United States Patent Application Publication US 2026/0103690 A1 - sequence listing, part 10

SEQ ID NO: 22785 - DNA, 50 bp, unidentified
  source 1..50: mol_type = unassigned DNA; note = target_3b45ed8
  misc_feature 1..23: note = LF
  misc_feature 24..25: note = Core
  misc_feature 26..50: note = RF
agcctcgtccttcgaaatgtccgagcccgacctcttgtttgagttcctga

SEQ ID NO: 22786 - DNA, 50 bp, unidentified
  source 1..50: mol_type = unassigned DNA; note = target_3b5883a
  misc_feature 1..23: note = LF
  misc_feature 24..25: note = Core
  misc_feature 26..50: note = RF
actccgccgccagccgctttgggtggaaaccggatgccacgtcacgcggc

SEQ ID NO: 22787 - DNA, 50 bp, unidentified
  source 1..50: mol_type = unassigned DNA; note = target_3b605f9
  misc_feature 1..23: note = LF
  misc_feature 24..25: note = Core
  misc_feature 26..50: note = RF
cgccgaccgggtcgacggggtgcctttcctgatcaacggcaactccggga

SEQ ID NO: 22788 - DNA, 50 bp, unidentified
  source 1..50: mol_type = unassigned DNA; note = target_3b6cba5
  misc_feature 1..24: note = LF
  misc_feature 25: note = Core
  misc_feature 26..50: note = RF
ctcataggccgccgccttgcgcccctccgtcactcggcgcggtgcgccga

SEQ ID NO: 22789 - DNA, 50 bp, unidentified
  source 1..50: mol_type = unassigned DNA; note = target_3b6d65f
  misc_feature 1..22: note = LF
  misc_feature 23..25: note = Core
  misc_feature 26..50: note = RF
tccattgaattacccagacctccttattataattttccgaaagctcgtcc

SEQ ID NO: 22790 - DNA, 50 bp, unidentified
  source 1..50: mol_type = unassigned DNA; note = target_3b79837
  misc_feature 1..24: note = LF
  misc_feature 25: note = Core
  misc_feature 26..50: note = RF
ccgcagtagagggcgaatatctgcttcgggtcatgagcgccgttttcgcg

SEQ ID NO: 22791 - DNA, 50 bp, unidentified
  source 1..50: mol_type = unassigned DNA; note = target_3b7d65c
  misc_feature 1..22: note = LF
  misc_feature 23..25: note = Core
  misc_feature 26..50: note = RF
cgctgaatggatcggtcgctaatgaccctaagcagacattttatcttgtc

SEQ ID NO: 22792 - DNA, 50 bp, unidentified
  source 1..50: mol_type = unassigned DNA; note = target_3b80355
  misc_feature 1..24: note = LF
  misc_feature 25: note = Core
  misc_feature 26..50: note = RF
acggcgccgctccgggcttagaagtttccccgcgtaatgtcctgaagaat

SEQ ID NO: 22793 - DNA, 50 bp, unidentified
  source 1..50: mol_type = unassigned DNA; note = target_3b8195e
  misc_feature 1..22: note = LF
  misc_feature 23..25: note = Core
  misc_feature 26..50: note = RF
ttgatctacatacttattaacctgagctcggcttaattaggcttgcaaaa

SEQ ID NO: 22794 - DNA, 50 bp, unidentified
  source 1..50: mol_type = unassigned DNA; note = target_3b878bc
  misc_feature 1..23: note = LF
  misc_feature 24..25: note = Core
  misc_feature 26..50: note = RF
tactagaaatttcattaatccccctagttaagataaacaattgccccatc

SEQ ID NO: 22795 - DNA, 50 bp, unidentified
  source 1..50: mol_type = unassigned DNA; note = target_3b92c8c
  misc_feature 1..23: note = LF
  misc_feature 24..25: note = Core
  misc_feature 26..50: note = RF
cagtcgggggcggtgccacgctcctatcaagtcacgccgaccggtccttc

SEQ ID NO: 22796 - DNA, 50 bp, unidentified
  source 1..50: mol_type = unassigned DNA; note = target_3b9cf59
  misc_feature 1..23: note = LF
  misc_feature 24..25: note = Core
  misc_feature 26..50: note = RF
agactttttcattttgattcctccttaaaccacatacctgaacaaaaaca

SEQ ID NO: 22797 - DNA, 50 bp, unidentified
  source 1..50: mol_type = unassigned DNA; note = target_3b9f8c4
  misc_feature 1..24: note = LF
  misc_feature 25: note = Core
  misc_feature 26..50: note = RF
agagacctcaaatttaatgtatatatagatatatacattatatttggagt

SEQ ID NO: 22798 - DNA, 50 bp, unidentified
  source 1..50: mol_type = unassigned DNA; note = target_3ba9cae
  misc_feature 1..21: note = LF
  misc_feature 22..25: note = Core
  misc_feature 26..50: note = RF
gattgcttcgcttcgctcgcaatgacgaatgactagagatcgcgcaacac

SEQ ID NO: 22799 - DNA, 50 bp, unidentified
  source 1..50: mol_type = unassigned DNA; note = target_3bae67c
  misc_feature 1..22: note = LF
  misc_feature 23..25: note = Core
  misc_feature 26..50: note = RF
ccggcacaaaaggattttcacttctatcggggctaaaaaattgaatccat

SEQ ID NO: 22800 - DNA, 50 bp, unidentified
  source 1..50: mol_type = unassigned DNA; note = target_3baec39
  misc_feature 1..22: note = LF
  misc_feature 23..25: note = Core
  misc_feature 26..50: note = RF
gggtgagtctgacttccgctaatgacccattccggacattagtccagtcg

SEQ ID NO: 22801 - DNA, 50 bp, unidentified
  source 1..50: mol_type = unassigned DNA; note = target_3bafea8
  misc_feature 1..24: note = LF
  misc_feature 25: note = Core
  misc_feature 26..50: note = RF
gcgcttggcagcgggccctaccatttttttgagagaagctcgcgcaacgc

SEQ ID NO: 22802 - DNA, 50 bp, unidentified
  source 1..50: mol_type = unassigned DNA; note = target_3bb72b0
  misc_feature 1..23: note = LF
  misc_feature 24..25: note = Core
  misc_feature 26..50: note = RF
aaagaaaaaatattatttaactccttatatttacaagctatcttataaat

SEQ ID NO: 22803 - DNA, 50 bp, unidentified
  source 1..50: mol_type = unassigned DNA; note = target_3bbb621
  misc_feature 1..23: note = LF
  misc_feature 24..25: note = Core
  misc_feature 26..50: note = RF
cggcgtcatgatatactgggcgttggtgcgcggatcgttaatggcgttgt

SEQ ID NO: 22804 - DNA, 50 bp, unidentified
  source 1..50: mol_type = unassigned DNA; note = target_3bc48dc
  misc_feature 1..23: note = LF
  misc_feature 24..25: note = Core
  misc_feature 26..50: note = RF
tcacatgtgaatgcgctttatcttgccttccgcccctcactttcccgggc

SEQ ID NO: 22805 - DNA, 50 bp, unidentified
  source 1..50: mol_type = unassigned DNA; note = target_3bc8a96
  misc_feature 1..24: note = LF
  misc_feature 25: note = Core
  misc_feature 26..50: note = RF
cccatcgacgcctcatcgtgcgttctcctcgttgccggattgctgctgct

SEQ ID NO: 22806 - DNA, 50 bp, unidentified
  source 1..50: mol_type = unassigned DNA; note = target_3bcc335
  misc_feature 1..23: note = LF
  misc_feature 24..25: note = Core
  misc_feature 26..50: note = RF
atccggccagtgtccgctttgggtggaaagcagacatggcgcgtccccca

SEQ ID NO: 22807 - DNA, 50 bp, unidentified
  source 1..50: mol_type = unassigned DNA; note = target_3bce2bc
  misc_feature 1..22: note = LF
  misc_feature 23..25: note = Core
  misc_feature 26..50: note = RF
gctgaaaaacctctagctccggtgacaacgtctttcaaggggcggttccg

SEQ ID NO: 22808 - DNA, 50 bp, unidentified
  source 1..50: mol_type = unassigned DNA; note = target_3bcf72e
  misc_feature 1..23: note = LF
  misc_feature 24..25: note = Core
  misc_feature 26..50: note = RF
gcaccagatcgaccatcagctcccccccctgatcggatgtgcccgcagcc

SEQ ID NO: 22809 - DNA, 50 bp, unidentified
  source 1..50: mol_type = unassigned DNA; note = target_3bcfd97
  misc_feature 1..23: note = LF
  misc_feature 24..25: note = Core
  misc_feature 26..50: note = RF
atcctggtgccgggtgccccatccttcccgcttcatttcgcgggtagagc

SEQ ID NO: 22810 - DNA, 50 bp, unidentified
  source 1..50: mol_type = unassigned DNA; note = target_3bd568b
  misc_feature 1..24: note = LF
  misc_feature 25: note = Core
  misc_feature 26..50: note = RF
ccgccgctcgccctccccgcagcccacccccccgcagcctacgaccactc

SEQ ID NO: 22811 - DNA, 50 bp, unidentified
  source 1..50: mol_type = unassigned DNA; note = target_3bd686c
  misc_feature 1..23: note = LF
  misc_feature 24..25: note = Core
  misc_feature 26..50: note = RF
cttgagtccgttatgcgcacaaaagcggacattgactaaaagcgcctttc

SEQ ID NO: 22812 - DNA, 50 bp, unidentified
  source 1..50: mol_type = unassigned DNA; note = target_3bd99c9
  misc_feature 1..22: note = LF
  misc_feature 23..25: note = Core
  misc_feature 26..50: note = RF
acagaggtagtctaggactttattttctcgtccatggctacccctgtctg

SEQ ID NO: 22813 - DNA, 50 bp, unidentified
  source 1..50: mol_type = unassigned DNA; note = target_3bdaba8
  misc_feature 1..24: note = LF
  misc_feature 25: note = Core
  misc_feature 26..50: note = RF
gcgtgaaggtgggtgcgtcatacccggggagatctgcactgctgccatgg

SEQ ID NO: 22814 - DNA, 50 bp, unidentified
  source 1..50: mol_type = unassigned DNA; note = target_3be780c
  misc_feature 1..23: note = LF
  misc_feature 24..25: note = Core
  misc_feature 26..50: note = RF
cggcagctcactatgtccgctattggcgcaaagcggacgttctcgtaata

SEQ ID NO: 22815 - DNA, 50 bp, unidentified
  source 1..50: mol_type = unassigned DNA; note = target_3bee175
  misc_feature 1..22: note = LF
  misc_feature 23..25: note = Core
  misc_feature 26..50: note = RF
ggtcataccgttgcgcgaagtctgacagctcccgcttgatgtactaacgc

SEQ ID NO: 22816 - DNA, 50 bp, unidentified
  source 1..50: mol_type = unassigned DNA; note = target_3bee4fd
  misc_feature 1..23: note = LF
  misc_feature 24..25: note = Core
  misc_feature 26..50: note = RF
cacccgccgcgttcccgcgcctgctcagtagttgaacgaggtatacgagc

SEQ ID NO: 22817 - DNA, 50 bp, unidentified
  source 1..50: mol_type = unassigned DNA; note = target_3bf6717
  misc_feature 1..23: note = LF
  misc_feature 24..25: note = Core
  misc_feature 26..50: note = RF
agaattatatactcacttccttcctgaaagtctcaaattgtcaggttcga

SEQ ID NO: 22818 - DNA, 50 bp, unidentified
  source 1..50: mol_type = unassigned DNA; note = target_3c0b885
  misc_feature 1..23: note = LF
  misc_feature 24..25: note = Core
  misc_feature 26..50: note = RF
atagggaattccgaaggactttcctatgatataaaaaattccccggaaat

SEQ ID NO: 22819 - DNA, 50 bp, unidentified
  source 1..50: mol_type = unassigned DNA; note = target_3c144c4
  misc_feature 1..22: note = LF
  misc_feature 23..25: note = Core
  misc_feature 26..50: note = RF
gtcggagagccgacgtgcacaatctccggtaccttgagtcccacttcgcc

SEQ ID NO: 22820 - DNA, 50 bp, unidentified
  source 1..50: mol_type = unassigned DNA; note = target_3c1781f
  misc_feature 1..22: note = LF
  misc_feature 23..25: note = Core
  misc_feature 26..50: note = RF
caaactccatcaaaagtgagtcagaccctaattttgacccccctcttggc

SEQ ID NO: 22821 - DNA, 50 bp, unidentified
  source 1..50: mol_type = unassigned DNA; note = target_3c17f00
  misc_feature 1..22: note = LF
  misc_feature 23..25: note = Core
  misc_feature 26..50: note = RF
taaatttaatattcatttgtcttctcctttattttatcaaattagctaat

SEQ ID NO: 22822 - DNA, 50 bp, unidentified
  source 1..50: mol_type = unassigned DNA; note = target_3c199c2
  misc_feature 1..23: note = LF
  misc_feature 24..25: note = Core
  misc_feature 26..50: note = RF
ccgagtgataagctcggcatcacctctttattttattttaacacaaaatt

SEQ ID NO: 22823 - DNA, 50 bp, unidentified
  source 1..50: mol_type = unassigned DNA; note = target_3c1e80a
  misc_feature 1..23: note = LF
  misc_feature 24..25: note = Core
  misc_feature 26..50: note = RF
cgttccgtggcattaacatgacctgccggaagtttgatccggctacgatt

SEQ ID NO: 22824 - DNA, 50 bp, unidentified
  source 1..50: mol_type = unassigned DNA; note = target_3c241f5
  misc_feature 1..22: note = LF
  misc_feature 23..25: note = Core
  misc_feature 26..50: note = RF
aaatttatggggtatagactttgtcaaagtccatagactttgacaaagtt

SEQ ID NO: 22825 - DNA, 50 bp, unidentified
  source 1..50: mol_type = unassigned DNA; note = target_3c28aa5
  misc_feature 1..22: note = LF
  misc_feature 23..25: note = Core
  misc_feature 26..50: note = RF
gccaagggcgcaggggttgtgcagaccttccttaggccagtgtagtggga

SEQ ID NO: 22826 - DNA, 50 bp, unidentified
  source 1..50: mol_type = unassigned DNA; note = target_3c30fe3
  misc_feature 1..23: note = LF
  misc_feature 24..25: note = Core
  misc_feature 26..50: note = RF
gttcaactccccctcgactccgctcgggaatcaaaccctttcccgcttca

SEQ ID NO: 22827 - DNA, 50 bp, unidentified
  source 1..50: mol_type = unassigned DNA; note = target_3c31514
  misc_feature 1..24: note = LF
  misc_feature 25: note = Core
  misc_feature 26..50: note = RF
cgtgctgggcgacgaaagcacaagtggatccgagcgcgcacccgctcacg

SEQ ID NO: 22828 - DNA, 50 bp, unidentified
  source 1..50: mol_type = unassigned DNA; note = target_3c36848
  misc_feature 1..22: note = LF
  misc_feature 23..25: note = Core
  misc_feature 26..50: note = RF
tccgctaacgaggggtttcttctgacaacacccgctcgaggcaggaattc

SEQ ID NO: 22829 - DNA, 50 bp, unidentified
  source 1..50: mol_type = unassigned DNA; note = target_3c3a454
  misc_feature 1..23: note = LF
  misc_feature 24..25: note = Core
  misc_feature 26..50: note = RF
aggcgccaggaaaagccccgttcctcagaagacagaccattgaccatgcc

SEQ ID NO: 22830 - DNA, 50 bp, unidentified
  source 1..50: mol_type = unassigned DNA; note = target_3c3e5f0
  misc_feature 1..23: note = LF
  misc_feature 24..25: note = Core
  misc_feature 26..50: note = RF
ggtttaggcaggccgtgcagaggtggcttaaagctgctcgatcatcgctg

SEQ ID NO: 22831 - DNA, 50 bp, unidentified
  source 1..50: mol_type = unassigned DNA; note = target_3c3f83f
  misc_feature 1..23: note = LF
  misc_feature 24..25: note = Core
  misc_feature 26..50: note = RF
gttccgcgcgttcgagattcgggtttttcttcaaaaaatctcttgcagca

SEQ ID NO: 22832 - DNA, 50 bp, unidentified
  source 1..50: mol_type = unassigned DNA; note = target_3c47d23
  misc_feature 1..23: note = LF
  misc_feature 24..25: note = Core
  misc_feature 26..50: note = RF
atttactttcatgctttcacctcctaatataatgccagttttatatttgc

SEQ ID NO: 22833 - DNA, 50 bp, unidentified
  source 1..50: mol_type = unassigned DNA; note = target_3c56249
  misc_feature 1..24: note = LF
  misc_feature 25: note = Core
  misc_feature 26..50: note = RF
gcccaagggctgtccctcgactgacgctctcccgtcgttcggcacggtcc

SEQ ID NO: 22834 - DNA, 50 bp, unidentified
  source 1..50: mol_type = unassigned DNA; note = target_3c57d67
  misc_feature 1..22: note = LF
  misc_feature 23..25: note = Core
  misc_feature 26..50: note = RF
tattccatctgttaacccgtgttgaggttaagtagatttatcgcaacaga

SEQ ID NO: 22835 - DNA, 50 bp, unidentified
  source 1..50: mol_type = unassigned DNA; note = target_3c58194
  misc_feature 1..24: note = LF
  misc_feature 25: note = Core
  misc_feature 26..50: note = RF
gacttcagtcccgtcaatgtccgcttgggtcaaaagcagacttcgcgccc

SEQ ID NO: 22836 - DNA, 50 bp, unidentified
  source 1..50: mol_type = unassigned DNA; note = target_3c5b3b7
  misc_feature 1..24: note = LF
  misc_feature 25: note = Core
  misc_feature 26..50: note = RF
tggagcgaagcaagttcggcttgaacactagttagggtttactaaaacta

SEQ ID NO: 22837 - DNA, 50 bp, unidentified
  source 1..50: mol_type = unassigned DNA; note = target_3c68266
  misc_feature 1..24: note = LF
  misc_feature 25: note = Core
  misc_feature 26..50: note = RF
cgcctgagtccgaccgattagcggcagaacagtgcacttcgcgaagtgcg

SEQ ID NO: 22838 - DNA, 50 bp, unidentified
  source 1..50: mol_type = unassigned DNA; note = target_3c6bd47
  misc_feature 1..23: note = LF
  misc_feature 24..25: note = Core
  misc_feature 26..50: note = RF
aaggttattcaagaaaagccccctttagcgagaattcgttagaaatactt

SEQ ID NO: 22839 - DNA, 50 bp, unidentified
  source 1..50: mol_type = unassigned DNA; note = target_3c6eb7e
  misc_feature 1..23: note = LF
  misc_feature 24..25: note = Core
  misc_feature 26..50: note = RF
cttttctcaaattcattctccttgtctttctatttttattcattttacat

SEQ ID NO: 22840 - DNA, 50 bp, unidentified
  source 1..50: mol_type = unassigned DNA; note = target_3c70c80
  misc_feature 1..24: note = LF
  misc_feature 25: note = Core
  misc_feature 26..50: note = RF
aaatctcaccattgaggatatacgttgttagccactgttatactttcact

SEQ ID NO: 22841 - DNA, 50 bp, unidentified
  source 1..50: mol_type = unassigned DNA; note = target_3c7118f
  misc_feature 1..21: note = LF
  misc_feature 22..25: note = Core
  misc_feature 26..50: note = RF
cacgtcatcagcagcaggtcgctcatggatggccctcgggggctatggcg

SEQ ID NO: 22842 - DNA, 50 bp, unidentified
  source 1..50: mol_type = unassigned DNA; note = target_3c72d27
  misc_feature 1..22: note = LF
  misc_feature 23..25: note = Core
  misc_feature 26..50: note = RF
agggagcaagagtcctgttccccttctcccattttgggagaagcgatgag

SEQ ID NO: 22843 - DNA, 50 bp, unidentified
  source 1..50: mol_type = unassigned DNA; note = target_3c7d404
  misc_feature 1..23: note = LF
  misc_feature 24..25: note = Core
  misc_feature 26..50: note = RF
ttttttttatttccaacattaccctcctttcgtatagatattgatttaaa

SEQ ID NO: 22844 - DNA, 50 bp, unidentified
  source 1..50: mol_type = unassigned DNA; note = target_3c8a225
  misc_feature 1..21: note = LF
  misc_feature 22..25: note = Core
  misc_feature 26..50: note = RF
tctgagttcgggcatgaggtgttcctctcgcggggcgcgcggtgcgggtc

SEQ ID NO: 22845 - DNA, 50 bp, unidentified
  source 1..50: mol_type = unassigned DNA; note = target_3c9e871
  misc_feature 1..23: note = LF
  misc_feature 24..25: note = Core
  misc_feature 26..50: note = RF
ttaaggcaaagctagcggaaagctgccattccggaaacgatcaatgaaga

SEQ ID NO: 22846 - DNA, 50 bp, unidentified
  source 1..50: mol_type = unassigned DNA; note = target_3ca74c8
  misc_feature 1..23: note = LF
  misc_feature 24..25: note = Core
  misc_feature 26..50: note = RF
cttgtagaaacagacaagggctttgttgcgtaattcgagggaactaaatc

SEQ ID NO: 22847 - DNA, 50 bp, unidentified
  source 1..50: mol_type = unassigned DNA; note = target_3caa3e9
  misc_feature 1..24: note = LF
  misc_feature 25: note = Core
  misc_feature 26..50: note = RF
cggcccgacggcagtagtaccaacttagttgtgtgagcgtgcgtgagcga

SEQ ID NO: 22848 - DNA, 50 bp, unidentified
  source 1..50: mol_type = unassigned DNA; note = target_3caba02
  misc_feature 1..23: note = LF
  misc_feature 24..25: note = Core
  misc_feature 26..50: note = RF
gcccctgcccttccgttttggggtggattgcggacagtctgcttctggaa

SEQ ID NO: 22849 - DNA, 50 bp, unidentified
  source 1..50: mol_type = unassigned DNA; note = target_3caec02
  misc_feature 1..23: note = LF
  misc_feature 24..25: note = Core
  misc_feature 26..50: note = RF
taagattagttttttatcatttttcttgtatgagaagccatcaccgcaat

SEQ ID NO: 22850 - DNA, 50 bp, unidentified
  source 1..50: mol_type = unassigned DNA; note = target_3cb9e22
  misc_feature 1..24: note = LF
  misc_feature 25: note = Core
  misc_feature 26..50: note = RF
gacaggaaacgcgcgcagtgccgccgttatgatcggcgggctccactatg

SEQ ID NO: 22851 - DNA, 50 bp, unidentified
  source 1..50: mol_type = unassigned DNA; note = target_3cc1e88
  misc_feature 1..23: note = LF
  misc_feature 24..25: note = Core
  misc_feature 26..50: note = RF
atccagatttcgaggatcttgtccgacttaatagggaaacactacggcgt

SEQ ID NO: 22852 - DNA, 50 bp, unidentified
  source 1..50: mol_type = unassigned DNA; note = target_3ccac5b
  misc_feature 1..23: note = LF
  misc_feature 24..25: note = Core
  misc_feature 26..50: note = RF
atcgcgtagcgacgcgcagcgcccttgacgcgctgttcgggatccggctg

SEQ ID NO: 22853 - DNA, 50 bp, unidentified
  source 1..50: mol_type = unassigned DNA; note = target_3ccda67
  misc_feature 1..23: note = LF
  misc_feature 24..25: note = Core
  misc_feature 26..50: note = RF
ctaatgcacttctaaaaatcctccttgtattaacatacgcatatccagat

SEQ ID NO: 22854 - DNA, 50 bp, unidentified
  source 1..50: mol_type = unassigned DNA; note = target_3cd8382
  misc_feature 1..23: note = LF
  misc_feature 24..25: note = Core
  misc_feature 26..50: note = RF
ctttttctttactcattttaagcctcctttttagttaaagaaatatgact

SEQ ID NO: 22855 - DNA, 50 bp, unidentified
  source 1..50: mol_type = unassigned DNA; note = target_3cdb967
  misc_feature 1..22: note = LF
  misc_feature 23..25: note = Core
  misc_feature 26..50: note = RF
gtttatcaaagtgcttcgacaggctcagcaggacaaaaaaatataactaa

SEQ ID NO: 22856 - DNA, 50 bp, unidentified
  source 1..50: mol_type = unassigned DNA; note = target_3cdf184
  misc_feature 1..24: note = LF
  misc_feature 25: note = Core
  misc_feature 26..50: note = RF
gtttctgccattacttcaactccctcaaaaaaacgcctcatgtactacta

SEQ ID NO: 22857 - DNA, 50 bp, unidentified
  source 1..50: mol_type = unassigned DNA; note = target_3ce0556
  misc_feature 1..23: note = LF
  misc_feature 24..25: note = Core
  misc_feature 26..50: note = RF
cgggatgtttgaccgacatgacttcccctttcagccccgcgcccgccgga

SEQ ID NO: 22858 - DNA, 50 bp, unidentified
  source 1..50: mol_type = unassigned DNA; note = target_3ce5693
  misc_feature 1..21: note = LF
  misc_feature 22..25: note = Core
  misc_feature 26..50: note = RF
gtggcggccccaggcgacctgaccccccgtcgggcccaacaccggcgtgc

SEQ ID NO: 22859 - DNA, 50 bp, unidentified
  source 1..50: mol_type = unassigned DNA; note = target_3cef7cf
  misc_feature 1..24: note = LF
  misc_feature 25: note = Core
  misc_feature 26..50: note = RF
cgtaggacggcacccggcccaaagcagccgtcagacctcgtgggggcact

SEQ ID NO: 22860 - DNA, 50 bp, unidentified
  source 1..50: mol_type = unassigned DNA; note = target_3cfa6d6
  misc_feature 1..24: note = LF
  misc_feature 25: note = Core
  misc_feature 26..50: note = RF
cagaaccctcaattttctacatagcggacattggaacgaatcttcgaggg

SEQ ID NO: 22861 - DNA, 50 bp, unidentified
  source 1..50: mol_type = unassigned DNA; note = target_3cfb0f5
  misc_feature 1..23: note = LF
  misc_feature 24..25: note = Core
  misc_feature 26..50: note = RF
ccagcatgctgattaagcttcacagccaggccacgaccacaccgaagatc

SEQ ID NO: 22862 - DNA, 50 bp, unidentified
  source 1..50: mol_type = unassigned DNA; note = target_3d0b6f8
  misc_feature 1..22: note = LF
  misc_feature 23..25: note = Core
  misc_feature 26..50: note = RF
cagttttgaatcaatagaaaataaaaaatagcatgggaaaattgcccatg

SEQ ID NO: 22863 - DNA, 50 bp, unidentified
  source 1..50: mol_type = unassigned DNA; note = target_3d0bec0
  misc_feature 1..24: note = LF
  misc_feature 25: note = Core
  misc_feature 26..50: note = RF
tttcatcgtcaagtagatcgtaagcgtccggcgatcacatctttaatcgc

SEQ ID NO: 22864 - DNA, 50 bp, unidentified
  source 1..50: mol_type = unassigned DNA; note = target_3d0e819
  misc_feature 1..23: note = LF
  misc_feature 24..25: note = Core
  misc_feature 26..50: note = RF
tggcgcgccgcggccgatgaagatgggcactatttcttcgccgtgcccct

SEQ ID NO: 22865 - DNA, 50 bp, unidentified
  source 1..50: mol_type = unassigned DNA; note = target_3d10b4b
  misc_feature 1..24: note = LF
  misc_feature 25: note = Core
  misc_feature 26..50: note = RF
cgtcgcgcctacgagctgtacccgttttttgagatcaccagcttcagtgc

SEQ ID NO: 22866 - DNA, 50 bp, unidentified
  source 1..50: mol_type = unassigned DNA; note = target_3d11573
  misc_feature 1..24: note = LF
  misc_feature 25: note = Core
  misc_feature 26..50: note = RF
tgctccttgaggttccgggccacattccgataagccgggcggtctcaatg

SEQ ID NO: 22867 - DNA, 50 bp, unidentified
  source 1..50: mol_type = unassigned DNA; note = target_3d15298
  misc_feature 1..24: note = LF
  misc_feature 25: note = Core
  misc_feature 26..50: note = RF
cccgccgcgggcgctacggctgcccgttacctgccaataaatcccggccc

SEQ ID NO: 22868 - DNA, 50 bp, unidentified
  source 1..50: mol_type = unassigned DNA; note = target_3d162cd
  misc_feature 1..24: note = LF
  misc_feature 25: note = Core
  misc_feature 26..50: note = RF
catttaagccttgctatgcgggagcatccatacatggtccgagcccaccg

SEQ ID NO: 22869 - DNA, 50 bp, unidentified
  source 1..50: mol_type = unassigned DNA; note = target_3d1ce4a
  misc_feature 1..24: note = LF
  misc_feature 25: note = Core
  misc_feature 26..50: note = RF
ccaactcctggcctttgaggttggcccacactccctcgaccggattgagt

SEQ ID NO: 22870 - DNA, 50 bp, unidentified
  source 1..50: mol_type = unassigned DNA; note = target_3d203b1
  misc_feature 1..23: note = LF
  misc_feature 24..25: note = Core
  misc_feature 26..50: note = RF
cagtaatttgttttggcgtaccactaatctgtaatttgaaagtaccagat

SEQ ID NO: 22871 - DNA, 50 bp, unidentified
  source 1..50: mol_type = unassigned DNA; note = target_3d220dd
  misc_feature 1..24: note = LF
  misc_feature 25: note = Core
  misc_feature 26..50: note = RF
gtgagattgacctaatttgtccgcttgggtcattcgctaccaggttgagc

SEQ ID NO: 22872 - DNA, 50 bp, unidentified
  source 1..50: mol_type = unassigned DNA; note = target_3d27722
  misc_feature 1..24: note = LF
  misc_feature 25: note = Core
  misc_feature 26..50: note = RF
ttccggcatcgtgaccgcagattccggtgatcgtgaccgggcatggtgtt

SEQ ID NO: 22873 - DNA, 50 bp, unidentified
  source 1..50: mol_type = unassigned DNA; note = target_3d280d4
  misc_feature 1..23: note = LF
  misc_feature 24..25: note = Core
  misc_feature 26..50: note = RF
gccgaaggcttttgccttcggctttttcgtccagcgaccgaacgcccgcc

SEQ ID NO: 22874 - DNA, 50 bp, unidentified
  source 1..50: mol_type = unassigned DNA; note = target_3d2a0df
  misc_feature 1..23: note = LF
  misc_feature 24..25: note = Core
  misc_feature 26..50: note = RF
actgcctcgcttcgaacacttccccccccggctcccgccccggaccgaac

SEQ ID NO: 22875 - DNA, 50 bp, unidentified
  source 1..50: mol_type = unassigned DNA; note = target_3d2c286
  misc_feature 1..23: note = LF
  misc_feature 24..25: note = Core
  misc_feature 26..50: note = RF
tgcgcgcttgtggctcgatagattgtccatgatcacgatgtcgccgcggt

SEQ ID NO: 22876 - DNA, 50 bp, unidentified
  source 1..50: mol_type = unassigned DNA; note = target_3d4bc73
  misc_feature 1..24: note = LF
  misc_feature 25: note = Core
  misc_feature 26..50: note = RF
caaaaaagggtaacagcgataggccactatgggaagtaaatcaaaataag

SEQ ID NO: 22877 - DNA, 50 bp, unidentified
  source 1..50: mol_type = unassigned DNA; note = target_3d517cf
  misc_feature 1..22: note = LF
  misc_feature 23..25: note = Core
  misc_feature 26..50: note = RF
tgaagcgggatgccgcccagccgctcctacaggtacgaggaaaacctcag

SEQ ID NO: 22878 - DNA, 50 bp, unidentified
  source 1..50: mol_type = unassigned DNA; note = target_3d58024
  misc_feature 1..23: note = LF
  misc_feature 24..25: note = Core
  misc_feature 26..50: note = RF
ggattacgcttcgctaatccgccctacgactagccccgaacagttgtccg

SEQ ID NO: 22879 - DNA, 50 bp, unidentified
  source 1..50: mol_type = unassigned DNA; note = target_3d59002
  misc_feature 1..23: note = LF
  misc_feature 24..25: note = Core
  misc_feature 26..50: note = RF
gctatgtccgctctacccctaaaagcggacatgtgcagtgcaagagccca

SEQ ID NO: 22880 - DNA, 50 bp, unidentified
  source 1..50: mol_type = unassigned DNA; note = target_3d5c24a
  misc_feature 1..24: note = LF
  misc_feature 25: note = Core
  misc_feature 26..50: note = RF
tcaagtgtatctgtccctcccctacgggggaggctaggtggggctgatgt

SEQ ID NO: 22881 - DNA, 50 bp, unidentified
  source 1..50: mol_type = unassigned DNA; note = target_3d5cdec
  misc_feature 1..23: note = LF
  misc_feature 24..25: note = Core
  misc_feature 26..50: note = RF
ggggtgcgcgcaaactcgctgcgctcaaacaacgccagccctgatccgtc

SEQ ID NO: 22882 - DNA, 50 bp, unidentified
  source 1..50: mol_type = unassigned DNA; note = target_3d64fec
  misc_feature 1..23: note = LF
  misc_feature 24..25: note = Core
  misc_feature 26..50: note = RF
ttgaagcctgcgatctaccggatctgccgcgatcagtgcgcggatctgcc

SEQ ID NO: 22883 - DNA, 50 bp, unidentified
  source 1..50: mol_type = unassigned DNA; note = target_3d68b05
  misc_feature 1..23: note = LF
  misc_feature 24..25: note = Core
  misc_feature 26..50: note = RF
gcgccgcaggttgagcataagtcagcgaaaacggccgagagcgagcaagg

SEQ ID NO: 22884 - DNA, 50 bp, unidentified
  source 1..50: mol_type = unassigned DNA; note = target_3d6dab1
  misc_feature 1..24: note = LF
  misc_feature 25: note = Core
  misc_feature 26..50: note = RF
agcctggagcacccgattatgagtcggatgctctgacgcaatggtattca

SEQ ID NO: 22885 - DNA, 50 bp, unidentified
  source 1..50: mol_type = unassigned DNA; note = target_3d73f21
  misc_feature 1..22: note = LF
  misc_feature 23..25: note = Core
  misc_feature 26..50: note = RF
tcctaattgaagtaaagcacccgtttagtttaagtatatttattcacaaa

SEQ ID NO: 22886 - DNA, 50 bp, unidentified
  source 1..50: mol_type = unassigned DNA; note = target_3d760d4
  misc_feature 1..23: note = LF
  misc_feature 24..25: note = Core
  misc_feature 26..50: note = RF
cacttcgctgctgcaaaccacctagacatcatggcctgactccggcgggt

SEQ ID NO: 22887 - DNA, 50 bp, unidentified
  source 1..50: mol_type = unassigned DNA; note = target_3d7fa6e
  misc_feature 1..23: note = LF
  misc_feature 24..25: note = Core
  misc_feature 26..50: note = RF
tgtaatcgccactatatcaccacctttcaatgattatgtgattacttctg

SEQ ID NO: 22888 - DNA, 50 bp, unidentified
  source 1..50: mol_type = unassigned DNA; note = target_3d8d715
  misc_feature 1..23: note = LF
  misc_feature 24..25: note = Core
  misc_feature 26..50: note = RF
tatagtagctaacattgcaacaccttgctcagtaaatactctaggattta

SEQ ID NO: 22889 - DNA, 50 bp, unidentified
  source 1..50: mol_type = unassigned DNA; note = target_3d93709
  misc_feature 1..23: note = LF
  misc_feature 24..25: note = Core
  misc_feature 26..50: note = RF
cggactccggggcgggcagggcgctcatgacgccggtagcccgaggattc

SEQ ID NO: 22890 - DNA, 50 bp, unidentified
  source 1..50: mol_type = unassigned DNA; note = target_3d94e14
  misc_feature 1..23: note = LF
  misc_feature 24..25: note = Core
  misc_feature 26..50: note = RF
aataaatttcacagctatttctcctttttatttcttgatttaaggtcgct

SEQ ID NO: 22891 - DNA, 50 bp, unidentified
  source 1..50: mol_type = unassigned DNA; note = target_3da1f90
  misc_feature 1..23: note = LF
  misc_feature 24..25: note = Core
  misc_feature 26..50: note = RF
tgacttttactatatgtatgttactaaattaactaaccgattgattttat

SEQ ID NO: 22892 - DNA, 50 bp, unidentified
  source 1..50: mol_type = unassigned DNA; note = target_3dad120
  misc_feature 1..22: note = LF
  misc_feature 23..25: note = Core
  misc_feature 26..50: note = RF
cggagactggttagcgttggtctgacagcaccggttggtgagaagcggtg

SEQ ID NO: 22893 - DNA, 50 bp, unidentified
  source 1..50: mol_type = unassigned DNA; note = target_3db2479
  misc_feature 1..23: note = LF
  misc_feature 24..25: note = Core
  misc_feature 26..50: note = RF
tcgctgcgctcgttcgctcgctactcgaccagcggtgggcgagtggcctt

SEQ ID NO: 22894 - DNA, 50 bp, unidentified
  source 1..50: mol_type = unassigned DNA; note = target_3db4bb6
  misc_feature 1..23: note = LF
  misc_feature 24..25: note = Core
  misc_feature 26..50: note = RF
ctggtgagatgggaccggtggggatttcatcttatcaccggacaacaggc

SEQ ID NO: 22895 - DNA, 50 bp, unidentified
  source 1..50: mol_type = unassigned DNA; note = target_3db55d3
  misc_feature 1..23: note = LF
  misc_feature 24..25: note = Core
  misc_feature 26..50: note = RF
accgtcacaacttctccaaagcagacattggcagttcaaggcctcggctg

SEQ ID NO: 22896 - DNA, 50 bp, unidentified
  source 1..50: mol_type = unassigned DNA; note = target_3dd0d7d
  misc_feature 1..24: note = LF
  misc_feature 25: note = Core
  misc_feature 26..50: note = RF
catcagaatccagtacgcgcaccccaccccccatgagaaacggctctgcc

SEQ ID NO: 22897 - DNA, 50 bp, unidentified
  source 1..50: mol_type = unassigned DNA; note = target_3dd808c
  misc_feature 1..23: note = LF
  misc_feature 24..25: note = Core
  misc_feature 26..50: note = RF
cggcggcaaccaacccgcgcatcagagcatgatcaaccgtcgtttcatga

SEQ ID NO: 22898 - DNA, 50 bp, unidentified
  source 1..50: mol_type = unassigned DNA; note = target_3dd82b6
  misc_feature 1..24: note = LF
  misc_feature 25: note = Core
  misc_feature 26..50: note = RF
gtatcgggcacttttccctttacgtgttggtgaatgaattataattaaag

SEQ ID NO: 22899 - DNA, 50 bp, unidentified
  source 1..50: mol_type = unassigned DNA; note = target_3de3629
  misc_feature 1..24: note = LF
  misc_feature 25: note = Core
  misc_feature 26..50: note = RF
ccgacgccgctcggggcttagaagtttccctccgctacatccttcagaat

SEQ ID NO: 22900 - DNA, 50 bp, unidentified
  source 1..50: mol_type = unassigned DNA; note = target_3df0412
  misc_feature 1..23: note = LF
  misc_feature 24..25: note = Core
  misc_feature 26..50: note = RF
cgccggcgacgccagcccgtggcctagccggacccctcgccggagggctg

SEQ ID NO: 22901 - DNA, 50 bp, unidentified
  source 1..50: mol_type = unassigned DNA; note = target_3dfe5f6
  misc_feature 1..21: note = LF
  misc_feature 22..25: note = Core
  misc_feature 26..50: note = RF
gatggccggccttcgccggccatgacggtcggggttgatgagcggcggta

SEQ ID NO: 22902 - DNA, 50 bp, unidentified
  source 1..50: mol_type = unassigned DNA; note = target_3e024a1
  misc_feature 1..23: note = LF
  misc_feature 24..25: note = Core
  misc_feature 26..50: note = RF
tccttggatgtccggatcagccgagcgggtcggccgttgcgtagtgcagc

SEQ ID NO: 22903 - DNA, 50 bp, unidentified
  source 1..50: mol_type = unassigned DNA; note = target_3e06671
  misc_feature 1..24: note = LF
  misc_feature 25: note = Core
  misc_feature 26..50: note = RF
ttggctattgttatggaccacaggtgccctacatacatatcctgtgtgca

SEQ ID NO: 22904 - DNA, 50 bp, unidentified
  source 1..50: mol_type = unassigned DNA; note = target_3e0667f
  misc_feature 1..22: note = LF
  misc_feature 23..25: note = Core
  misc_feature 26..50: note = RF
cctttattccggaaatgcgcccgttttgcttaataccaattatttcaaaa

SEQ ID NO: 22905 - DNA, 50 bp, unidentified
  source 1..50: mol_type = unassigned DNA; note = target_3e075af
  misc_feature 1..22: note = LF
  misc_feature 23..25: note = Core
  misc_feature 26..50: note = RF
gccaaatctgaaccgaaagaggaaaaccatgtttcagcgttttaaatccc

SEQ ID NO: 22906 - DNA, 50 bp, unidentified
  source 1..50: mol_type = unassigned DNA; note = target_3e0d0ba
  misc_feature 1..24: note = LF
  misc_feature 25: note = Core
  misc_feature 26..50: note = RF
taatgtaaaaccttttttattcatagttactcctttaaaagttagccaac

SEQ ID NO: 22907 - DNA, 50 bp, unidentified
  source 1..50: mol_type = unassigned DNA; note = target_3e10ed5
  misc_feature 1..23: note = LF
  misc_feature 24..25: note = Core
  misc_feature 26..50: note = RF
cattgcgccgaagagcaggccggagcctgtggtaaacgggagcggggcgg

SEQ ID NO: 22908 - DNA, 50 bp, unidentified
  source 1..50: mol_type = unassigned DNA; note = target_3e18a84
  misc_feature 1..23: note = LF
  misc_feature 24..25: note = Core
  misc_feature 26..50: note = RF
ccaatctgatcgacaagaatatgctctagaaacccgttcccgcacgggcc

SEQ ID NO: 22909 - DNA, 50 bp, unidentified
  source 1..50: mol_type = unassigned DNA; note = target_3e1fd45
  misc_feature 1..23: note = LF
  misc_feature 24..25: note = Core
  misc_feature 26..50: note = RF
atgaggtccccctctggcaggatagttgtcaccctttaaaatttaaccag

SEQ ID NO: 22910 - DNA, 50 bp, unidentified
  source 1..50: mol_type = unassigned DNA; note = target_3e25e56
  misc_feature 1..24: note = LF
  misc_feature 25: note = Core
  misc_feature 26..50: note = RF
tcgcctgccccgtgggcttaccacttttttgatagcaccgccttgaatcc

SEQ ID NO: 22911 - DNA, 50 bp, unidentified
  source 1..50: mol_type = unassigned DNA; note = target_3e28e5e
  misc_feature 1..23: note = LF
  misc_feature 24..25: note = Core
  misc_feature 26..50: note = RF
tcggggttctcgaccagctcggtctgacacaccgggcttgtgggcctgac

SEQ ID NO: 22912 - DNA, 50 bp, unidentified
  source 1..50: mol_type = unassigned DNA; note = target_3e29542
  misc_feature 1..23: note = LF
  misc_feature 24..25: note = Core
  misc_feature 26..50: note = RF
ctcccacttagataagtgataggagtaatgtcggcattatgactagcagc

SEQ ID NO: 22913 - DNA, 50 bp, unidentified
  source 1..50: mol_type = unassigned DNA; note = target_3e2e7b9
  misc_feature 1..24: note = LF
  misc_feature 25: note = Core
  misc_feature 26..50: note = RF
gctgattttttcatcattttatcttctccttatagcttttaattaattcc

SEQ ID NO: 22914 - DNA, 50 bp, unidentified
  source 1..50: mol_type = unassigned DNA; note = target_3e30e71
  misc_feature 1..23: note = LF
  misc_feature 24..25: note = Core
  misc_feature 26..50: note = RF
gtgccccatcgccggcaagccagctcccacaggaacagcacagccctcaa

SEQ ID NO: 22915 - DNA, 50 bp, unidentified
  source 1..50: mol_type = unassigned DNA; note = target_3e34f5b
  misc_feature 1..24: note = LF
  misc_feature 25: note = Core
  misc_feature 26..50: note = RF
ggcaaggccctgaggccacaggaatgagggaagttgggggtgacgcttta

SEQ ID NO: 22916 - DNA, 50 bp, unidentified
  source 1..50: mol_type = unassigned DNA; note = target_3e3df38
  misc_feature 1..23: note = LF
  misc_feature 24..25: note = Core
  misc_feature 26..50: note = RF
tccgaccggaagcatcaacacgcctactgcctcccgaccgcggtggtcaa

SEQ ID NO: 22917 - DNA, 50 bp, unidentified
  source 1..50: mol_type = unassigned DNA; note = target_3e40b9c
  misc_feature 1..22: note = LF
  misc_feature 23..25: note = Core
  misc_feature 26..50: note = RF
ctgttcttgaagattactgccctttagttccacaaaaaagcagggacggc

SEQ ID NO: 22918 - DNA, 50 bp, unidentified
  source 1..50: mol_type = unassigned DNA; note = target_3e4933d
  misc_feature 1..23: note = LF
  misc_feature 24..25: note = Core
  misc_feature 26..50: note = RF
cacgaatctgcggtaacaggctgctatgaggtcactctgaacggtcacga

SEQ ID NO: 22919 - DNA, 50 bp, unidentified
  source 1..50: mol_type = unassigned DNA; note = target_3e590a3
  misc_feature 1..24: note = LF
  misc_feature 25: note = Core
  misc_feature 26..50: note = RF
tacccagtcgaggatgaccgctcctgacccaaagcgagctctgccggatt

SEQ ID NO: 22920 - DNA, 50 bp, unidentified
  source 1..50: mol_type = unassigned DNA; note = target_3e5caee
  misc_feature 1..22: note = LF
  misc_feature 23..25: note = Core
  misc_feature 26..50: note = RF
tgaagtcgctattatagcggctttttttgttttatcggtacaagttcttg

SEQ ID NO: 22921 - DNA, 50 bp, unidentified
  source 1..50: mol_type = unassigned DNA; note = target_3e6096b
  misc_feature 1..22: note = LF
  misc_feature 23..25: note = Core
  misc_feature 26..50: note = RF
ggcggtcgacaggtccaaggaaagacacgtgtctggtcgatcgctgtttg

SEQ ID NO: 22922 - DNA, 50 bp, unidentified
  source 1..50: mol_type = unassigned DNA; note = target_3e62eca
  misc_feature 1..23: note = LF
  misc_feature 24..25: note = Core
  misc_feature 26..50: note = RF
cgccaaaacgcgaggccgcggcgtgggtcccggcgttcgccgggacgacg

SEQ ID NO: 22923 - DNA, 50 bp, unidentified
  source 1..50: mol_type = unassigned DNA; note = target_3e66f2e
  misc_feature 1..23: note = LF
  misc_feature 24..25: note = Core
  misc_feature 26..50: note = RF
gtcgggtcctggatcatgccgggtctccttcgctgctgtgactgcccgtt

SEQ ID NO: 22924 - DNA, 50 bp, unidentified
  source 1..50: mol_type = unassigned DNA; note = target_3e7da1f
  misc_feature 1..24: note = LF
  misc_feature 25: note = Core
  misc_feature 26..50: note = RF
tattcaaaagctactttctcaagctgatttaacatataaaggtttcaatc

SEQ ID NO: 22925 - DNA, 50 bp, unidentified
  source 1..50: mol_type = unassigned DNA; note = target_3e80b5b
  misc_feature 1..23: note = LF
  misc_feature 24..25: note = Core
  misc_feature 26..50: note = RF
tgtctgcgtgcgcggtgcgcaccctactcgttgcgatcgtctttcttcat

SEQ ID NO: 22926 - DNA, 50 bp, unidentified
  source 1..50: mol_type = unassigned DNA; note = target_3e8ad33
  misc_feature 1..23: note = LF
  misc_feature 24..25: note = Core
  misc_feature 26..50: note = RF
cgatcagacgaccgcgcccccctttttgacgcccagactggacgccgtgc

SEQ ID NO: 22927 - DNA, 50 bp, unidentified
  source 1..50: mol_type = unassigned DNA; note = target_3e8b4d7
  misc_feature 1..22: note = LF
  misc_feature 23..25: note = Core
  misc_feature 26..50: note = RF
tcgtcgtattgaactttgatcctagatttattgggcgagatgcattgctg

SEQ ID NO: 22928 - DNA, 50 bp, unidentified
  source 1..50: mol_type = unassigned DNA; note = target_3e9fd00
  misc_feature 1..23: note = LF
  misc_feature 24..25: note = Core
  misc_feature 26..50: note = RF
gcctcctttgaagttgagggtgtttttattgaatgcagcgaagatgcccg

SEQ ID NO: 22929 - DNA, 50 bp, unidentified
  source 1..50: mol_type = unassigned DNA; note = target_3ea6b5d
  misc_feature 1..21: note = LF
  misc_feature 22..25: note = Core
  misc_feature 26..50: note = RF
ttgatgcgcttcggggtggcggtcatgactgctcctcggtggtgcgggcc

SEQ ID NO: 22930 - DNA, 50 bp, unidentified
  source 1..50: mol_type = unassigned DNA; note = target_3ea79c8
  misc_feature 1..24: note = LF
  misc_feature 25: note = Core
  misc_feature 26..50: note = RF
ggtggcgtcgaatcaaggcgtactttcacttctgccccttggcaaagtac

SEQ ID NO: 22931 - DNA, 50 bp, unidentified
  source 1..50: mol_type = unassigned DNA; note = target_3eabde9
  misc_feature 1..23: note = LF
  misc_feature 24..25: note = Core
  misc_feature 26..50: note = RF
cagcgaaccctacgacgttggcactagacgaggcggatgaagctggcgtg

SEQ ID NO: 22932 - DNA, 50 bp, unidentified
  source 1..50: mol_type = unassigned DNA; note = target_3eace41
  misc_feature 1..24: note = LF
  misc_feature 25: note = Core
  misc_feature 26..50: note = RF
cttttcagcggcatgaaaatcgtttttttactttattttttcaaaatacc

SEQ ID NO: 22933 - DNA, 50 bp, unidentified
  source 1..50: mol_type = unassigned DNA; note = target_3eadc2c
  misc_feature 1..23: note = LF
  misc_feature 24..25: note = Core
  misc_feature 26..50: note = RF
cacttttactactcatatttctcctccattctaaatattattctctttta

SEQ ID NO: 22934 - DNA, 50 bp, unidentified
  source 1..50: mol_type = unassigned DNA; note = target_3eaf365
  misc_feature 1..20: note = LF
  misc_feature 21..25: note = Core
  misc_feature 26..50: note = RF
tttttaagaccaatcattttgtcacctcattaccgattagattagaaaag

SEQ ID NO: 22935 - DNA, 50 bp, unidentified
  source 1..50: mol_type = unassigned DNA; note = target_3eb1f2f
  misc_feature 1..23: note = LF
  misc_feature 24..25: note = Core
  misc_feature 26..50: note = RF
ctatgaaggtggtggttttccaatgcccgtgcggcacgctcatccgcagg

SEQ ID NO: 22936 - DNA, 50 bp, unidentified
  source 1..50: mol_type = unassigned DNA; note = target_3eb2ae9
  misc_feature 1..23: note = LF
  misc_feature 24..25: note = Core
  misc_feature 26..50: note = RF
tacgttatccatattgtttccccctaaattaagatattacaattataaca

SEQ ID NO: 22937 - DNA, 50 bp, unidentified
  source 1..50: mol_type = unassigned DNA; note = target_3eb3463
  misc_feature 1..23: note = LF
  misc_feature 24..25: note = Core
  misc_feature 26..50: note = RF
gatcgatcgaccgcggatcgggcctcagaattggccatcccccaaggccg

SEQ ID NO: 22938 - DNA, 50 bp, unidentified
  source 1..50: mol_type = unassigned DNA; note = target_3eb48cf
  misc_feature 1..24: note = LF
  misc_feature 25: note = Core
  misc_feature 26..50: note = RF
ttactgccattaacataattggctctttctttctacaaatccgggccgga

SEQ ID NO: 22939 - DNA, 50 bp, unidentified
  source 1..50: mol_type = unassigned DNA; note = target_3eb6d87
  misc_feature 1..22: note = LF
  misc_feature 23..25: note = Core
  misc_feature 26..50: note = RF
aatttaaccttgaaagatcaacagaccctagtgttagtaatttaacttcg

SEQ ID NO: 22940 - DNA, 50 bp, unidentified
  source 1..50: mol_type = unassigned DNA; note = target_3ec40e4
  misc_feature 1..23: note = LF
  misc_feature 24..25: note = Core
  misc_feature 26..50: note = RF
cgcggcgcccgagtggcggctcctggcacttagcggaagtgcgagcgttc

SEQ ID NO: 22941 - DNA, 50 bp, unidentified
  source 1..50: mol_type = unassigned DNA; note = target_3ec8eb0
  misc_feature 1..24: note = LF
  misc_feature 25: note = Core
  misc_feature 26..50: note = RF
aaaacctatcccgattgacacggaaagtcatatcagtatctctaccgcgc

SEQ ID NO: 22942 - DNA, 50 bp, unidentified
  source 1..50: mol_type = unassigned DNA; note = target_3ecf8cc
  misc_feature 1..22: note = LF
  misc_feature 23..25: note = Core
  misc_feature 26..50: note = RF
tcggaacgccgcccggagctggctcccacagtgaacggcatacgctgtca

SEQ ID NO: 22943 - DNA, 50 bp, unidentified
  source 1..50: mol_type = unassigned DNA; note = target_3ed031c
  misc_feature 1..23: note = LF
  misc_feature 24..25: note = Core
  misc_feature 26..50: note = RF
cgcaccgccgtcagtttggtcactgggagggcgatcttatgagcggttca

SEQ ID NO: 22944 - DNA, 50 bp, unidentified
  source 1..50: mol_type = unassigned DNA; note = target_3ed8126
  misc_feature 1..23: note = LF
  misc_feature 24..25: note = Core
  misc_feature 26..50: note = RF
ccgtgaaacaatacctaacgcgactttgctcatcgcacgataaatcctaa

SEQ ID NO: 22945 - DNA, 50 bp, unidentified
  source 1..50: mol_type = unassigned DNA; note = target_3edb1fc
  misc_feature 1..22: note = LF
  misc_feature 23..25: note = Core
  misc_feature 26..50: note = RF
ctattcagttcaacaaattggaatttgttgctccgtcaaactgaaagttt

SEQ ID NO: 22946 - DNA, 50 bp, unidentified
  source 1..50: mol_type = unassigned DNA; note = target_3ee33d4
  misc_feature 1..24: note = LF
  misc_feature 25: note = Core
  misc_feature 26..50: note = RF
gcttcttagtcatttaaaacccctcttatttaattgtatcacgttaagta

SEQ ID NO: 22947 - DNA, 50 bp, unidentified
  source 1..50: mol_type = unassigned DNA; note = target_3ee6fea
  misc_feature 1..21: note = LF
  misc_feature 22..25: note = Core
  misc_feature 26..50: note = RF
ttttaaatactgacatcatattcacctataaatattatatattatttttt

SEQ ID NO: 22948 - DNA, 50 bp, unidentified
  source 1..50: mol_type = unassigned DNA; note = target_3ee7637
  misc_feature 1..22: note = LF
  misc_feature 23..25: note = Core
  misc_feature 26..50: note = RF
agcttggttgcatcggttggagtcccttctatggtttgcgtcagcgtacg

SEQ ID NO: 22949 - DNA, 50 bp, unidentified
  source 1..50: mol_type = unassigned DNA; note = target_3eeb818
  misc_feature 1..23: note = LF
  misc_feature 24..25: note = Core
  misc_feature 26..50: note = RF
gacaaccgactggtccccgctatctgtcaagtcaagtgagacagtgatgg

SEQ ID NO: 22950 - DNA, 50 bp, unidentified
  source 1..50: mol_type = unassigned DNA; note = target_3eed674
  misc_feature 1..23: note = LF
  misc_feature 24..25: note = Core
  misc_feature 26..50: note = RF
tccatacccggagtggaacatccctgtcttgtccgcacccagcactccag

SEQ ID NO: 22951 - DNA, 50 bp, unidentified
  source 1..50: mol_type = unassigned DNA; note = target_3ef40b8
  misc_feature 1..23: note = LF
  misc_feature 24..25: note = Core
  misc_feature 26..50: note = RF
gccggacaggataataattagccctaatccgacattttttcagaggggca

SEQ ID NO: 22952 - DNA, 50 bp, unidentified
  source 1..50: mol_type = unassigned DNA; note = target_3ef46d8
  misc_feature 1..23: note = LF
  misc_feature 24..25: note = Core
  misc_feature 26..50: note = RF
attcgcagccgggggtcgatgctagacatcatggcccgccccgaagctga

SEQ ID NO: 22953 - DNA, 50 bp, unidentified
  source 1..50: mol_type = unassigned DNA; note = target_3ef6b89
  misc_feature 1..22: note = LF
  misc_feature 23..25: note = Core
  misc_feature 26..50: note = RF
gtgcttttcgcagtctttgtactgagtcactactcaccttaggcggaccg

SEQ ID NO: 22954 - DNA, 50 bp, unidentified
  source 1..50: mol_type = unassigned DNA; note = target_3eff622
  misc_feature 1..23: note = LF
  misc_feature 24..25: note = Core
  misc_feature 26..50: note = RF
ggtgacggccgcagaagatgtagagcggcaggtagcaataacagtcataa

SEQ ID NO: 22955 - DNA, 50 bp, unidentified
  source 1..50: mol_type = unassigned DNA; note = target_3eff7af
  misc_feature 1..23: note = LF
  misc_feature 24..25: note = Core
  misc_feature 26..50: note = RF
ggccggatgcaggagcaagcggttttggttacttttttccaagaaaaaat

SEQ ID NO: 22956 - DNA, 50 bp, unidentified
  source 1..50: mol_type = unassigned DNA; note = target_3f09baa
  misc_feature 1..23: note = LF
  misc_feature 24..25: note = Core
  misc_feature 26..50: note = RF
gtctctaacataattttaccctctctcttttccggcagaactaacaatcc

SEQ ID NO: 22957 - DNA, 50 bp, unidentified
  source 1..50: mol_type = unassigned DNA; note = target_3f162d7
  misc_feature 1..22: note = LF
  misc_feature 23..25: note = Core
  misc_feature 26..50: note = RF
cagcgaagccgctgtgagtctttttttgtgcacacccaacttgagtaatt

SEQ ID NO: 22958 - DNA, 50 bp, unidentified
  source 1..50: mol_type = unassigned DNA; note = target_3f23656
  misc_feature 1..23: note = LF
  misc_feature 24..25: note = Core
  misc_feature 26..50: note = RF
tttttttactcattatcttcctccttttttaagaataaattatttggtcc

SEQ ID NO: 22959 - DNA, 50 bp, unidentified
  source 1..50: mol_type = unassigned DNA; note = target_3f38005
  misc_feature 1..23: note = LF
  misc_feature 24..25: note = Core
  misc_feature 26..50: note = RF
ccttgtcgacggcggttcgcatgttgtcgtagatgccccgccgcggcaca

SEQ ID NO: 22960 - DNA, 50 bp, unidentified
  source 1..50: mol_type = unassigned DNA; note = target_3f39663
  misc_feature 1..23: note = LF
  misc_feature 24..25: note = Core
  misc_feature 26..50: note = RF
actgcgcccgcatcccaggtccatgcaacaacgccgcgcaggcgcccgtt

SEQ ID NO: 22961 - DNA, 50 bp, unidentified
  source 1..50: mol_type = unassigned DNA; note = target_3f42f19
  misc_feature 1..23: note = LF
  misc_feature 24..25: note = Core
  misc_feature 26..50: note = RF
aaaagaaaaaggatgtcgtttcgatcagggctacaatttcaggctttttt

SEQ ID NO: 22962 - DNA, 50 bp, unidentified
  source 1..50: mol_type = unassigned DNA; note = target_3f44103
  misc_feature 1..23: note = LF
  misc_feature 24..25: note = Core
  misc_feature 26..50: note = RF
cgatgagcattgcttgttaggccttttttgtgggtgttcgtgtggggtat

SEQ ID NO: 22963 - DNA, 50 bp, unidentified
  source 1..50: mol_type = unassigned DNA; note = target_3f4b536
  misc_feature 1..21: note = LF
  misc_feature 22..25: note = Core
  misc_feature 26..50: note = RF
gcgccgagtcggacggcggtgctcatgcggtcaccgtgctggctactgct

SEQ ID NO: 22964 - DNA, 50 bp, unidentified
  source 1..50: mol_type = unassigned DNA; note = target_3f5b11d
  misc_feature 1..22: note = LF
  misc_feature 23..25: note = Core
  misc_feature 26..50: note = RF
agaaaggtcgccaaagttagtcaaattgcgacgacgcaacccgcggcagt

SEQ ID NO: 22965 - DNA, 50 bp, unidentified
  source 1..50: mol_type = unassigned DNA; note = target_3f644ed
  misc_feature 1..23: note = LF
  misc_feature 24..25: note = Core
  misc_feature 26..50: note = RF
ccagctgggatggaaatcacagcctataatcaccatcgaaggctcctctc

SEQ ID NO: 22966 - DNA, 50 bp, unidentified
  source 1..50: mol_type = unassigned DNA; note = target_3f6d465
  misc_feature 1..23: note = LF
  misc_feature 24..25: note = Core
  misc_feature 26..50: note = RF
cctagtgtcagctttccacccaaagctgccattagcggagtgtctgcttt

SEQ ID NO: 22967 - DNA, 50 bp, unidentified
  source 1..50: mol_type = unassigned DNA; note = target_3f6fe28
  misc_feature 1..24: note = LF
  misc_feature 25: note = Core
  misc_feature 26..50: note = RF
agatggtttgcgtgcaacctgaatcagtgactccgcctgccaatataccc

SEQ ID NO: 22968 - DNA, 50 bp, unidentified
  source 1..50: mol_type = unassigned DNA; note = target_3f71793
  misc_feature 1..24: note = LF
  misc_feature 25: note = Core
  misc_feature 26..50: note = RF
caaggcgattcgccggccgtccggttgggtcaatcgcgtcgcttttgcga

SEQ ID NO: 22969 - DNA, 50 bp, unidentified
  source 1..50: mol_type = unassigned DNA; note = target_3f76350
  misc_feature 1..23: note = LF
  misc_feature 24..25: note = Core
  misc_feature 26..50: note = RF
tatctctctccttatttttcccccttttgatgcattcaatgcatcttctt

SEQ ID NO: 22970 - DNA, 50 bp, unidentified
  source 1..50: mol_type = unassigned DNA; note = target_3f78298
  misc_feature 1..24: note = LF
  misc_feature 25: note = Core
  misc_feature 26..50: note = RF
accggctgaaaccgcagtcggaagcggacattgcatttgcacagccagag

SEQ ID NO: 22971 - DNA, 50 bp, unidentified
  source 1..50: mol_type = unassigned DNA; note = target_3f79023
  misc_feature 1..19: note = LF
  misc_feature 20..25: note = Core
  misc_feature 26..50: note = RF
gccacgtcgcctaccagctgtcctttcacgaaggcagccggtacccgctc

SEQ ID NO: 22972 - DNA, 50 bp, unidentified
  source 1..50: mol_type = unassigned DNA; note = target_3f7bd52
  misc_feature 1..24: note = LF
  misc_feature 25: note = Core
  misc_feature 26..50: note = RF
gatcacggaggtgctgtccgaatgcgtccggcgaagcggcctgcgcaatg

SEQ ID NO: 22973 - DNA, 50 bp, unidentified
  source 1..50: mol_type = unassigned DNA; note = target_3f7ed55
  misc_feature 1..24: note = LF
  misc_feature 25: note = Core
  misc_feature 26..50: note = RF
ttctcatcatttcagcccgtagggtgcaataaccgtagggcattgcaccg

SEQ ID NO: 22974 - DNA, 50 bp, unidentified
  source 1..50: mol_type = unassigned DNA; note = target_3f89c93
  misc_feature 1..24: note = LF
  misc_feature 25: note = Core
  misc_feature 26..50: note = RF
agattgccgcgtcgctgcgctcctcgcaatgacaggtgaagtgtcattgc

SEQ ID NO: 22975 - DNA, 50 bp, unidentified
  source 1..50: mol_type = unassigned DNA; note = target_3f8eafa
  misc_feature 1..23: note = LF
  misc_feature 24..25: note = Core
  misc_feature 26..50: note = RF
cgcttcgcagcacaaggctgctcctacatctgtttcgggccagtgaggcc

SEQ ID NO: 22976 - DNA, 50 bp, unidentified
  source 1..50: mol_type = unassigned DNA; note = target_3f8ed1b
  misc_feature 1..24: note = LF
  misc_feature 25: note = Core
  misc_feature 26..50: note = RF
ccaacttccgctcctggcccaggctgtgtaaaaactcaagaatattttgg

SEQ ID NO: 22977 - DNA, 50 bp, unidentified
  source 1..50: mol_type = unassigned DNA; note = target_3f8fd4c
  misc_feature 1..22: note = LF
  misc_feature 23..25: note = Core
  misc_feature 26..50: note = RF
atcactcaggcgaagagataagcccccctattgcaaaaaactctcactga

SEQ ID NO: 22978 - DNA, 50 bp, unidentified
  source 1..50: mol_type = unassigned DNA; note = target_3f90abc
  misc_feature 1..23: note = LF
  misc_feature 24..25: note = Core
  misc_feature 26..50: note = RF
gtatcgcttgcgctcaacccatcctacgcgcgctttacgttgggctcctt

SEQ ID NO: 22979 - DNA, 50 bp, unidentified
  source 1..50: mol_type = unassigned DNA; note = target_3fa6cbd
  misc_feature 1..23: note = LF
  misc_feature 24..25: note = Core
  misc_feature 26..50: note = RF
gggactgagttgagttcaggctcctatcaggtcactaacggcccggtcag

SEQ ID NO: 22980 - DNA, 50 bp, unidentified
  source 1..50: mol_type = unassigned DNA; note = target_3fb7255
  misc_feature 1..24: note = LF
  misc_feature 25: note = Core
  misc_feature 26..50: note = RF
cctccaaaacatgttcatcgtttctgcttaccggcaggtcgccgtggcat

SEQ ID NO: 22981 - DNA, 50 bp, unidentified
  source 1..50: mol_type = unassigned DNA; note = target_3fbb19e
  misc_feature 1..24: note = LF
  misc_feature 25: note = Core
  misc_feature 26..50: note = RF
acggggtcccgttacgccgccgatttgacacagtagcctcaaggcgcctg

SEQ ID NO: 22982 - DNA, 50 bp, unidentified
  source 1..50: mol_type = unassigned DNA; note = target_3fc35ad
  misc_feature 1..24: note = LF
  misc_feature 25: note = Core
  misc_feature 26..50: note = RF
tgcgtaaataacgcccctgcggagattccatgagcaaactgccttccccc

SEQ ID NO: 22983 - DNA, 50 bp, unidentified
  source 1..50: mol_type = unassigned DNA; note = target_3fcabda
  misc_feature 1..24: note = LF
  misc_feature 25: note = Core
  misc_feature 26..50: note = RF
acagcttgctgcgttgcggactactgtatggaccgttggctcgcgcctcg

SEQ ID NO: 22984 - DNA, 50 bp, unidentified
  source 1..50: mol_type = unassigned DNA; note = target_3fcb386
  misc_feature 1..23: note = LF
  misc_feature 24..25: note = Core
  misc_feature 26..50: note = RF
ccgggtcaatgagcgatatggcgatttttcaacagttacttcgggccgca

SEQ ID NO: 22985 - DNA, 50 bp, unidentified
  source 1..50: mol_type = unassigned DNA; note = target_3fcda79
  misc_feature 1..23: note = LF
  misc_feature 24..25: note = Core
  misc_feature 26..50: note = RF
gggcgttcgccaccgccggagcctgtcctcgggccggccgaaggccggac

SEQ ID NO: 22986 - DNA, 50 bp, unidentified
  source 1..50: mol_type = unassigned DNA; note = target_3fd1624
  misc_feature 1..23: note = LF
  misc_feature 24..25: note = Core
  misc_feature 26..50: note = RF
agcaaaaagcagccgagcatgggctcggctctacagaaggcgatgcctgg

SEQ ID NO: 22987 - DNA, 50 bp, unidentified
  source 1..50: mol_type = unassigned DNA; note = target_3fd5a92
  misc_feature 1..23: note = LF
  misc_feature 24..25: note = Core
  misc_feature 26..50: note = RF
cggagtgagtggcggctgcgcatagcccggatgagcgaagcgaaatccgg

SEQ ID NO: 22988 - DNA, 50 bp, unidentified
  source 1..50: mol_type = unassigned DNA; note = target_3fd5e8b
  misc_feature 1..24: note = LF
  misc_feature 25: note = Core
  misc_feature 26..50: note = RF
aagctgatcctcgataactggcgttgtttcccaaatcgatgcagcttgaa

SEQ ID NO: 22989 - DNA, 50 bp, unidentified
  source 1..50: mol_type = unassigned DNA; note = target_3fde9e0
  misc_feature 1..23: note = LF
  misc_feature 24..25: note = Core
  misc_feature 26..50: note = RF
cggggtttctgtggagccagatgtgtttttggtttacaaaaacctctggc

SEQ ID NO: 22990 - DNA, 50 bp, unidentified
  source 1..50: mol_type = unassigned DNA; note = target_3fdeb2c
  misc_feature 1..23: note = LF
  misc_feature 24..25: note = Core
  misc_feature 26..50: note = RF
tcccatatctgccatacatcaacctccttcaatcgttcttttaatgcaca

SEQ ID NO: 22991 - DNA, 50 bp, unidentified
  source 1..50: mol_type = unassigned DNA; note = target_3fe0d8e
  misc_feature 1..23: note = LF
  misc_feature 24..25: note = Core
  misc_feature 26..50: note = RF
tctatcacacataacttaaacacctctatcatgtagaaacctctaaggga

SEQ ID NO: 22992 - DNA, 50 bp, unidentified
  source 1..50: mol_type = unassigned DNA; note = target_3fea323
  misc_feature 1..23: note = LF
  misc_feature 24..25: note = Core
  misc_feature 26..50: note = RF
cgctatcgaccgccgtcttcatgttgtcgtagatgccgcgcgtgcaggtc

SEQ ID NO: 22993 - DNA, 50 bp, unidentified
  source 1..50: mol_type = unassigned DNA; note = target_3ff0b81
  misc_feature 1..23: note = LF
  misc_feature 24..25: note = Core
  misc_feature 26..50: note = RF
aaggggcacgacgatgatcgactagtctaggactaccacagtgtggtcag

SEQ ID NO: 22994 - DNA, 50 bp, unidentified
  source 1..50: mol_type = unassigned DNA; note = target_3ff0c40
  misc_feature 1..23: note = LF
  misc_feature 24..25: note = Core
  misc_feature 26..50: note = RF
ttatcaaatggcttacaacggttttgtatggttagttgcgtgtttaagca

SEQ ID NO: 22995 - DNA, 50 bp, unidentified
  source 1..50: mol_type = unassigned DNA; note = target_3ff1d88
  misc_feature 1..23: note = LF
  misc_feature 24..25: note = Core
  misc_feature 26..50: note = RF
acaggcgtgctgccttccagcggaggcgtttgcgagcacttaacgacaac

SEQ ID NO: 22996 - DNA, 50 bp, unidentified
  source 1..50: mol_type = unassigned DNA; note = target_3ff94d2
  misc_feature 1..24: note = LF
  misc_feature 25: note = Core
  misc_feature 26..50: note = RF
gcgggtcgggaagcgggtcgggcttgacatatgggtatttgaaaaagtcg

SEQ ID NO: 22997 - DNA, 50 bp, unidentified
  source 1..50: mol_type = unassigned DNA; note = target_3ffb6c6
  misc_feature 1..23: note = LF
  misc_feature 24..25: note = Core
  misc_feature 26..50: note = RF
cgcgctggtcatctggcccccctttttcgcccgcaggctcgaagccgtgc

SEQ ID NO: 22998 - DNA, 50 bp, unidentified
  source 1..50: mol_type = unassigned DNA; note = target_3ffebc8
  misc_feature 1..23: note = LF
  misc_feature 24..25: note = Core
  misc_feature 26..50: note = RF
tgggacacccccgcagccaccggaggcatgctgcaggaagaactcgactg

SEQ ID NO: 22999 - DNA, 50 bp, unidentified
  source 1..50: mol_type = unassigned DNA; note = target_3fffa8a
  misc_feature 1..23: note = LF
  misc_feature 24..25: note = Core
  misc_feature 26..50: note = RF
agactataagcccttcgacaagctcagggtgacttcaaagtttgcttgtt

SEQ ID NO: 23000 - DNA, 50 bp, unidentified
  source 1..50: mol_type = unassigned DNA; note = target_400627e
  misc_feature 1..23: note = LF
  misc_feature 24..25: note = Core
  misc_feature 26..50: note = RF
cgcaaaaaaaaatctaacccaacctacgctagtgctttgttatttaatgg

SEQ ID NO: 23001 - DNA, 50 bp, unidentified
  source 1..50: mol_type = unassigned DNA; note = target_400e921
  misc_feature 1..23: note = LF
  misc_feature 24..25: note = Core
  misc_feature 26..50: note = RF
tcgacgtgtccggtcatggcgtcctttcggggaggggacgccatgacggt

SEQ ID NO: 23002 - DNA, 50 bp, unidentified
  source 1..50: mol_type = unassigned DNA; note = target_4016684
  misc_feature 1..22: note = LF
  misc_feature 23..25: note = Core
  misc_feature 26..50: note = RF
ccccgctaaagccagattaatctgacactgccaccgaaccgcctctttgg

SEQ ID NO: 23003 - DNA, 50 bp, unidentified
  source 1..50: mol_type = unassigned DNA; note = target_4016d40
  misc_feature 1..23: note = LF
  misc_feature 24..25: note = Core
  misc_feature 26..50: note = RF
ttgtctgatacttcccacattttaattttcccctctttttatttcaagga

SEQ ID NO: 23004 - DNA, 50 bp, unidentified
  source 1..50: mol_type = unassigned DNA; note = target_401d5ae
  misc_feature 1..23: note = LF
  misc_feature 24..25: note = Core
  misc_feature 26..50: note = RF
ttctcttgatcatcttcattctcctttcttcttcaacatgtgtaagctgt

SEQ ID NO: 23005 - DNA, 50 bp, unidentified
  source 1..50: mol_type = unassigned DNA; note = target_401f253
  misc_feature 1..23: note = LF
  misc_feature 24..25: note = Core
  misc_feature 26..50: note = RF
tcttcaactaacccgcccctttcgtttaaaaagctgcccggattgccagc

SEQ ID NO: 23006 - DNA, 50 bp, unidentified
  source 1..50: mol_type = unassigned DNA; note = target_4023a7e
  misc_feature 1..23: note = LF
  misc_feature 24..25: note = Core
  misc_feature 26..50: note = RF
acaatctttccggagtcggaggtagaccggacttgtcgcggacatcgcga

SEQ ID NO: 23007 - DNA, 50 bp, unidentified
  source 1..50: mol_type = unassigned DNA; note = target_402df8c
  misc_feature 1..24: note = LF
  misc_feature 25: note = Core
  misc_feature 26..50: note = RF
ggcggcctgatctacctcacctgaccggcggacccatcggcggtcagatc

SEQ ID NO: 23008 - DNA, 50 bp, unidentified
  source 1..50: mol_type = unassigned DNA; note = target_402fdec
  misc_feature 1..24: note = LF
  misc_feature 25: note = Core
  misc_feature 26..50: note = RF
gtaaaagagtatcgcagcgaaaagagaaaataaaccaattcaactatcat

SEQ ID NO: 23009 - DNA, 50 bp, unidentified
  source 1..50: mol_type = unassigned DNA; note = target_403e64d
  misc_feature 1..24: note = LF
  misc_feature 25: note = Core
  misc_feature 26..50: note = RF
gaagggtgatgaaatcgcggcgtttcattcgatcacctcgtcggcacgca

SEQ ID NO: 23010 - DNA, 50 bp, unidentified
  source 1..50: mol_type = unassigned DNA; note = target_4040ce5
  misc_feature 1..23: note = LF
  misc_feature 24..25: note = Core
  misc_feature 26..50: note = RF
acccgttgctctcggactgggtcctgtcgccgagcagccccgtcgcgcgg

SEQ ID NO: 23011 - DNA, 50 bp, unidentified
  source 1..50: mol_type = unassigned DNA; note = target_4048e22
  misc_feature 1..23: note = LF
  misc_feature 24..25: note = Core
  misc_feature 26..50: note = RF
aatacttttttcatggttttctccttataatatctatgatccagtcactt

SEQ ID NO: 23012 - DNA, 50 bp, unidentified
  source 1..50: mol_type = unassigned DNA; note = target_40605de
  misc_feature 1..23: note = LF
  misc_feature 24..25: note = Core
  misc_feature 26..50: note = RF
gggcggctgtttcgcgccagaagcggcgatcataacttgggacgccggag

SEQ ID NO: 23013 - DNA, 50 bp, unidentified
  source 1..50: mol_type = unassigned DNA; note = target_40626b1
  misc_feature 1..24: note = LF
  misc_feature 25: note = Core
  misc_feature 26..50: note = RF
gccgcccgatgcacttcccaagagcggtcattgtggagaggggaagcgga

SEQ ID NO: 23014 - DNA, 50 bp, unidentified
  source 1..50: mol_type = unassigned DNA; note = target_4064ca2
  misc_feature 1..22: note = LF
  misc_feature 23..25: note = Core
  misc_feature 26..50: note = RF
caatcaccccacattacccctttcttaaaacagttaaaccgtaacaacaa

SEQ ID NO: 23015 - DNA, 50 bp, unidentified
  source 1..50: mol_type = unassigned DNA; note = target_4068d91
  misc_feature 1..24: note = LF
  misc_feature 25: note = Core
  misc_feature 26..50: note = RF
aaaaatcccctgcatccgcggggccgtctatacatgaagctctcgacgaa

SEQ ID NO: 23016 - DNA, 50 bp, unidentified
  source 1..50: mol_type = unassigned DNA; note = target_4068e28
  misc_feature 1..24: note = LF
  misc_feature 25: note = Core
  misc_feature 26..50: note = RF
tggcaggttcggctatgccttagcgtgctttattttccgttttctgagac

SEQ ID NO: 23017 - DNA, 50 bp, unidentified
  source 1..50: mol_type = unassigned DNA; note = target_406ab74
  misc_feature 1..21: note = LF
  misc_feature 22..25: note = Core
  misc_feature 26..50: note = RF
cgctccttgctccgccctagaatgacgaaggtgataggtcagcgttcctt

SEQ ID NO: 23018 - DNA, 50 bp, unidentified
  source 1..50: mol_type = unassigned DNA; note = target_406fc5f
  misc_feature 1..23: note = LF
  misc_feature 24..25: note = Core
  misc_feature 26..50: note = RF
gtccgcaggccctagagtgtctcctttcctgtcgcaggaacggctggtcg

SEQ ID NO: 23019 - DNA, 50 bp, unidentified
  source 1..50: mol_type = unassigned DNA; note = target_407555f
  misc_feature 1..22: note = LF
  misc_feature 23..25: note = Core
  misc_feature 26..50: note = RF
taatcggccattgtttctcctccttttttatttacatcaggcttcttgtg

SEQ ID NO: 23020 - DNA, 50 bp, unidentified
  source 1..50: mol_type = unassigned DNA; note = target_40798af
  misc_feature 1..23: note = LF
  misc_feature 24..25: note = Core
  misc_feature 26..50: note = RF
tctgaggagcagacgcggcgccgctagcgcgccgtcttggtaatggtccg

SEQ ID NO: 23021 - DNA, 50 bp, unidentified
  source 1..50: mol_type = unassigned DNA; note = target_407c792
  misc_feature 1..23: note = LF
  misc_feature 24..25: note = Core
  misc_feature 26..50: note = RF
gtatggaatgtgacctgctgacctgccactgaggttttcctccaagtagc

SEQ ID NO: 23022 - DNA, 50 bp, unidentified
  source 1..50: mol_type = unassigned DNA; note = target_4082507
  misc_feature 1..23: note = LF
  misc_feature 24..25: note = Core
  misc_feature 26..50: note = RF
aatatttatctcccatatgtatcctcctattattttcctctcttcgagct

SEQ ID NO: 23023 - DNA, 50 bp, unidentified
  source 1..50: mol_type = unassigned DNA; note = target_40828bc
  misc_feature 1..21: note = LF
  misc_feature 22..25: note = Core
  misc_feature 26..50: note = RF
ctcgtcaccgccgtcttcatattatcgtagatgccgcggcccggcacgcc

SEQ ID NO: 23024 - DNA, 50 bp, unidentified
  source 1..50: mol_type = unassigned DNA; note = target_409919e
  misc_feature 1..23: note = LF
  misc_feature 24..25: note = Core
  misc_feature 26..50: note = RF
aaccgtatcggaatgtcgcctcttggcacaatgcggacatctcagccgcg

SEQ ID NO: 23025 - DNA, 50 bp, unidentified
  source 1..50: mol_type = unassigned DNA; note = target_409f754
  misc_feature 1..23: note = LF
  misc_feature 24..25: note = Core
  misc_feature 26..50: note = RF
gattctggtgttggtccgaagcagacattggcactcccgggtatcccgtg

SEQ ID NO: 23026 - DNA, 50 bp, unidentified
  source 1..50: mol_type = unassigned DNA; note = target_40a233a
  misc_feature 1..24: note = LF
  misc_feature 25: note = Core
  misc_feature 26..50: note = RF
ggagaaccagggctgtccacggggcgtccacagatggacagcagccgtac

SEQ ID NO: 23027 - DNA, 50 bp, unidentified
  source 1..50: mol_type = unassigned DNA; note = target_40a3f4c
  misc_feature 1..24: note = LF
  misc_feature 25: note = Core
  misc_feature 26..50: note = RF
cgggccggcattgagcgaggtgagcgggcccgaccagcaggcgggcgtca

SEQ ID NO: 23028 - DNA, 50 bp, unidentified
  source 1..50: mol_type = unassigned DNA; note = target_40a4624
  misc_feature 1..23: note = LF
  misc_feature 24..25: note = Core
  misc_feature 26..50: note = RF
cggacttttgtgggccgccagattgtccatgatcacgacatcgccctttt

SEQ ID NO: 23029 - DNA, 50 bp, unidentified
  source 1..50: mol_type = unassigned DNA; note = target_40a6deb
  misc_feature 1..23: note = LF
  misc_feature 24..25: note = Core
  misc_feature 26..50: note = RF
ttcgtcagaaggttattcggaagcgtccgttgcatttgctgaccgacttg

SEQ ID NO: 23030 - DNA, 50 bp, unidentified
  source 1..50: mol_type = unassigned DNA; note = target_40a8806
  misc_feature 1..22: note = LF
  misc_feature 23..25: note = Core
  misc_feature 26..50: note = RF
cagcccatcgccggcaacgccggctcccacaatgtccgctgtgcacaaca

SEQ ID NO: 23031 - DNA, 50 bp, unidentified
  source 1..50: mol_type = unassigned DNA; note = target_40b0a73
  misc_feature 1..23: note = LF
  misc_feature 24..25: note = Core
  misc_feature 26..50: note = RF
ggtggtcgcggctgaagccgctcctacggcatcctgtccggcaggagcgg

SEQ ID NO: 23032 - DNA, 50 bp, unidentified
  source 1..50: mol_type = unassigned DNA; note = target_40b6a33
  misc_feature 1..23: note = LF
  misc_feature 24..25: note = Core
  misc_feature 26..50: note = RF
tgaggcaaccacggcattactccccccctttgagacacaacggattgcgc

SEQ ID NO: 23033 - DNA, 50 bp, unidentified
  source 1..50: mol_type = unassigned DNA; note = target_40b8523
  misc_feature 1..23: note = LF
  misc_feature 24..25: note = Core
  misc_feature 26..50: note = RF
tcctgataaggtataaaattatcaaggtacaatagcgtaagacttggttt

SEQ ID NO: 23034 - DNA, 50 bp, unidentified
  source 1..50: mol_type = unassigned DNA; note = target_40b8565
  misc_feature 1..24: note = LF
  misc_feature 25: note = Core
  misc_feature 26..50: note = RF
caacataagtcatagagccctaacgccgcgttgagccgcgtggggcacga

SEQ ID NO: 23035 - DNA, 50 bp, unidentified
  source 1..50: mol_type = unassigned DNA; note = target_40c403a
  misc_feature 1..23: note = LF
  misc_feature 24..25: note = Core
  misc_feature 26..50: note = RF
gccggagcaaatttagcaagcgtagcccggatgcagcgttagcgtaatcc

SEQ ID NO: 23036 - DNA, 50 bp, unidentified
  source 1..50: mol_type = unassigned DNA; note = target_40cabdc
  misc_feature 1..24: note = LF
  misc_feature 25: note = Core
  misc_feature 26..50: note = RF
gatttattcacgcagttgagacaatttaatacgttctacgacgattcaat

SEQ ID NO: 23037 - DNA, 50 bp, unidentified
  source 1..50: mol_type = unassigned DNA; note = target_40cd737
  misc_feature 1..22: note = LF
  misc_feature 23..25: note = Core
  misc_feature 26..50: note = RF
ataatgtcacatatcttattttcatattacaaagtttttaaggtaaataa

SEQ ID NO: 23038 - DNA, 50 bp, unidentified
  source 1..50: mol_type = unassigned DNA; note = target_40e9a4b
  misc_feature 1..22: note = LF
  misc_feature 23..25: note = Core
  misc_feature 26..50: note = RF
tttctgacatcatctcacctcttttcttcttgttaaattatatccacaac

SEQ ID NO: 23039 - DNA, 50 bp, unidentified
  source 1..50: mol_type = unassigned DNA; note = target_40f5bd7
  misc_feature 1..24: note = LF
  misc_feature 25: note = Core
  misc_feature 26..50: note = RF
tcccaagcgggctgggcgattgttttgagaaagcgcgaaagagcgctttc

SEQ ID NO: 23040 - DNA, 50 bp, unidentified
  source 1..50: mol_type = unassigned DNA; note = target_40fdb92
  misc_feature 1..23: note = LF
  misc_feature 24..25: note = Core
  misc_feature 26..50: note = RF
aaaagagagccgggaggctctcttttttttgcgctacttctgaatttccg

SEQ ID NO: 23041 - DNA, 50 bp, unidentified
  source 1..50: mol_type = unassigned DNA; note = target_4102f8f
  misc_feature 1..22: note = LF
  misc_feature 23..25: note = Core
  misc_feature 26..50: note = RF
caccaatcttctatgtgatctcctttctcatagcgacctgcgatgatctc

SEQ ID NO: 23042 - DNA, 50 bp, unidentified
  source 1..50: mol_type = unassigned DNA; note = target_4103758
  misc_feature 1..23: note = LF
  misc_feature 24..25: note = Core
  misc_feature 26..50: note = RF
gcattaaaggtcataaggcgttcctcctattagattttaatgataaaagc

SEQ ID NO: 23043 - DNA, 50 bp, unidentified
  source 1..50: mol_type = unassigned DNA; note = target_410e4a8
  misc_feature 1..23: note = LF
  misc_feature 24..25: note = Core
  misc_feature 26..50: note = RF
tctgttttcctctctcttcctttcttttctttgccaagacgtacaagatc

SEQ ID NO: 23044 - DNA, 50 bp, unidentified
  source 1..50: mol_type = unassigned DNA; note = target_4113291
  misc_feature 1..24: note = LF
  misc_feature 25: note = Core
  misc_feature 26..50: note = RF
ccttttatcccccggccgccgggtcaagcgaccacaggttaagttaataa

SEQ ID NO: 23045 - DNA, 50 bp, unidentified
  source 1..50: mol_type = unassigned DNA; note = target_41180da
  misc_feature 1..18: note = LF
  misc_feature 19..25: note = Core
  misc_feature 26..50: note = RF
cgtagccgtaggtggtgtagtccttttcataccagcccgcgccgagaccg

SEQ ID NO: 23046 - DNA, 50 bp, unidentified
  source 1..50: mol_type = unassigned DNA; note = target_41192ac
  misc_feature 1..23: note = LF
  misc_feature 24..25: note = Core
  misc_feature 26..50: note = RF
tttctccttcccagttcaatactctcatatcgtctggttcagaaaaagcc

SEQ ID NO: 23047 - DNA, 50 bp, unidentified
  source 1..50: mol_type = unassigned DNA; note = target_412ed2b
  misc_feature 1..23: note = LF
  misc_feature 24..25: note = Core
  misc_feature 26..50: note = RF
ttagaaggcatgactacccggacctgcataaaaagtaggaagccttacga

SEQ ID NO: 23048 - DNA, 50 bp, unidentified
  source 1..50: mol_type = unassigned DNA; note = target_4133452
  misc_feature 1..23: note = LF
  misc_feature 24..25: note = Core
  misc_feature 26..50: note = RF
gtgatctgctgcatggtgctgtcctttcctggtgcctggtgtcattacct

SEQ ID NO: 23049 - DNA, 50 bp, unidentified
  source 1..50: mol_type = unassigned DNA; note = target_413f7d2
  misc_feature 1..23: note = LF
  misc_feature 24..25: note = Core
  misc_feature 26..50: note = RF
ctatttgcaacagtgccctttatttccgttttctgagacgtccccagtac

SEQ ID NO: 23050 - DNA, 50 bp, unidentified
  source 1..50: mol_type = unassigned DNA; note = target_41428a9
  misc_feature 1..23: note = LF
  misc_feature 24..25: note = Core
  misc_feature 26..50: note = RF
tctatctgattgtcgatatcttcagccgcaagatcgttggatgggaagtt

SEQ ID NO: 23051 - DNA, 50 bp, unidentified
  source 1..50: mol_type = unassigned DNA; note = target_41479a5
  misc_feature 1..24: note = LF
  misc_feature 25: note = Core
  misc_feature 26..50: note = RF
gtttcatttgctctgcgatctaacgttggagttcagccgaccggacggcg

SEQ ID NO: 23052 - DNA, 50 bp, unidentified
  source 1..50: mol_type = unassigned DNA; note = target_4148f73
  misc_feature 1..23: note = LF
  misc_feature 24..25: note = Core
  misc_feature 26..50: note = RF
tccggctggcccgccacgcgcaccactacttggccgtcttcgacgagggc

SEQ ID NO: 23053 - DNA, 50 bp, unidentified
  source 1..50: mol_type = unassigned DNA; note = target_414e38a
  misc_feature 1..22: note = LF
  misc_feature 23..25: note = Core
  misc_feature 26..50: note = RF
aatcggcataataatttacctcctattcttaaaatggggagtgttattca

SEQ ID NO: 23054 - DNA, 50 bp, unidentified
  source 1..50: mol_type = unassigned DNA; note = target_4154ef2
  misc_feature 1..23: note = LF
  misc_feature 24..25: note = Core
  misc_feature 26..50: note = RF
gatcctaccggcgtcagccggtcagtcattcagtcgcggcatttggtggt

SEQ ID NO: 23055 - DNA, 50 bp, unidentified
  source 1..50: mol_type = unassigned DNA; note = target_415603b
  misc_feature 1..23: note = LF
  misc_feature 24..25: note = Core
  misc_feature 26..50: note = RF
ttcgagacggcgcttcgcgcctcctcaccatgaagctctactaggaggcg

SEQ ID NO: 23056 - DNA, 50 bp, unidentified
  source 1..50: mol_type = unassigned DNA; note = target_415dafc
  misc_feature 1..23: note = LF
  misc_feature 24..25: note = Core
  misc_feature 26..50: note = RF
ttggtattttttccataaattttctcctttttatagaattttgtattcaa

SEQ ID NO: 23057 - DNA, 50 bp, unidentified
  source 1..50: mol_type = unassigned DNA; note = target_415e4bc
  misc_feature 1..23: note = LF
  misc_feature 24..25: note = Core
  misc_feature 26..50: note = RF
gactgggaccggtatcggagccccttttttcgctcgcacgtgcgagccgt

SEQ ID NO: 23058 - DNA, 50 bp, unidentified
  source 1..50: mol_type = unassigned DNA; note = target_4164e51
  misc_feature 1..23: note = LF
  misc_feature 24..25: note = Core
  misc_feature 26..50: note = RF
cgcgcccttatggctgccgaggttgtccatgacgacaatatcgcctttcc

SEQ ID NO: 23059 - DNA, 50 bp, unidentified
  source 1..50: mol_type = unassigned DNA; note = target_4166ad7
  misc_feature 1..23: note = LF
  misc_feature 24..25: note = Core
  misc_feature 26..50: note = RF
gtcaggtgagtgaagactccttcctgaaaaattgatttctgagtcctttc

SEQ ID NO: 23060 - DNA, 50 bp, unidentified
  source 1..50: mol_type = unassigned DNA; note = target_416fc32
  misc_feature 1..23: note = LF
  misc_feature 24..25: note = Core
  misc_feature 26..50: note = RF
aacgttcactcgtgattttccaaacggactctaaatgcttttccttttat

SEQ ID NO: 23061 - DNA, 50 bp, unidentified
  source 1..50: mol_type = unassigned DNA; note = target_417025d
  misc_feature 1..23: note = LF
  misc_feature 24..25: note = Core
  misc_feature 26..50: note = RF
agcggcgggtcatgaggtcaaccctgtcagcctccaccgccggacgtcga

SEQ ID NO: 23062 - DNA, 50 bp, unidentified
  source 1..50: mol_type = unassigned DNA; note = target_41712e1
  misc_feature 1..23: note = LF
  misc_feature 24..25: note = Core
  misc_feature 26..50: note = RF
cgaaggcgtcgcatgatcagtgggcgttggcgaggcggtgccttgccgcg

SEQ ID NO: 23063 - DNA, 50 bp, unidentified
  source 1..50: mol_type = unassigned DNA; note = target_41716c9
  misc_feature 1..22: note = LF
  misc_feature 23..25: note = Core
  misc_feature 26..50: note = RF
ccgcgcaagtaggccggacatatgaccgcaccactcccgttgcgccatcg

SEQ ID NO: 23064 - DNA, 50 bp, unidentified
  source 1..50: mol_type = unassigned DNA; note = target_4173b9b
  misc_feature 1..23: note = LF
  misc_feature 24..25: note = Core
  misc_feature 26..50: note = RF
ctaggccgcggaacctgtccgcattttgtgggcgaggcggttgaacaacg

SEQ ID NO: 23065 - DNA, 50 bp, unidentified
  source 1..50: mol_type = unassigned DNA; note = target_4176d3c
  misc_feature 1..24: note = LF
  misc_feature 25: note = Core
  misc_feature 26..50: note = RF
cgctcaccattgctgccgggggaaacgaccgatgaagacggtctgtgaag

SEQ ID NO: 23066 - DNA, 50 bp, unidentified
  source 1..50: mol_type = unassigned DNA; note = target_417c1fd
  misc_feature 1..23: note = LF
  misc_feature 24..25: note = Core
  misc_feature 26..50: note = RF
ccaccggtgggctgaagcccaccctacgactcgcggaaacgctgtccggt

SEQ ID NO: 23067 - DNA, 50 bp, unidentified
  source 1..50: mol_type = unassigned DNA; note = target_417ccad
  misc_feature 1..23: note = LF
  misc_feature 24..25: note = Core
  misc_feature 26..50: note = RF
aagttaatttttccattttaatcctttccgatttgggaaagagccttgat

SEQ ID NO: 23068 - DNA, 50 bp, unidentified
  source 1..50: mol_type = unassigned DNA; note = target_417e955
  misc_feature 1..23: note = LF
  misc_feature 24..25: note = Core
  misc_feature 26..50: note = RF
cttgttgaactaacggtcagtttagttgaagaaggaatatgattatttag

SEQ ID NO: 23069 - DNA, 50 bp, unidentified
  source 1..50: mol_type = unassigned DNA; note = target_4183121
  misc_feature 1..24: note = LF
  misc_feature 25: note = Core
  misc_feature 26..50: note = RF
caatatgcgcgcgctcatatgtgccgatatgtgcggcgaagggccctgtc

SEQ ID NO: 23070 - DNA, 50 bp, unidentified
  source 1..50: mol_type = unassigned DNA; note = target_419066f
  misc_feature 1..24: note = LF
  misc_feature 25: note = Core
  misc_feature 26..50: note = RF
gcggccgccttctgggtcatgatctgacacagggcgcagatgcgatattc

SEQ ID NO: 23071 - DNA, 50 bp, unidentified
  source 1..50: mol_type = unassigned DNA; note = target_419865c
  misc_feature 1..23: note = LF
  misc_feature 24..25: note = Core
  misc_feature 26..50: note = RF
atgcgccgcttaatgtccattattgggggcaaagcggacgtgacgtgggc

SEQ ID NO: 23072 - DNA, 50 bp, unidentified
  source 1..50: mol_type = unassigned DNA; note = target_419bd13
  misc_feature 1..24: note = LF
  misc_feature 25: note = Core
  misc_feature 26..50: note = RF
ccagcagaagccaatagcaggtccccccccattcgcccggaattgacttc

SEQ ID NO: 23073 - DNA, 50 bp, unidentified
  source 1..50: mol_type = unassigned DNA; note = target_41a3cf4
  misc_feature 1..23: note = LF
  misc_feature 24..25: note = Core
  misc_feature 26..50: note = RF
tctctgtaagtggtcatattaacctccatgagccgcattgcggccacaaa

SEQ ID NO: 23074 - DNA, 50 bp, unidentified
  source 1..50: mol_type = unassigned DNA; note = target_41b25b3
  misc_feature 1..22: note = LF
  misc_feature 23..25: note = Core
  misc_feature 26..50: note = RF
ttcaactctaaactaagtaacctgaactccgttttgcgtgtagcaatgca

SEQ ID NO: 23075 - DNA, 50 bp, unidentified
  source 1..50: mol_type = unassigned DNA; note = target_41c010f
  misc_feature 1..24: note = LF
  misc_feature 25: note = Core
  misc_feature 26..50: note = RF
gcgccggtacccttctcggctcaccgaccaaagtgaagcagagcatggga

SEQ ID NO: 23076 - DNA, 50 bp, unidentified
  source 1..50: mol_type = unassigned DNA; note = target_41d36de
  misc_feature 1..22: note = LF
  misc_feature 23..25: note = Core
  misc_feature 26..50: note = RF
aggctcattttgcggtaaaaactgacccactgcccgagatgcgggtcaac

SEQ ID NO: 23077 - DNA, 50 bp, unidentified
  source 1..50: mol_type = unassigned DNA; note = target_41d70ae
  misc_feature 1..23: note = LF
  misc_feature 24..25: note = Core
  misc_feature 26..50: note = RF
tctcgtttgtcatatcgcatctcctttacatcttcatttcaaaatcgtgc

SEQ ID NO: 23078 - DNA, 50 bp, unidentified
  source 1..50: mol_type = unassigned DNA; note = target_41ddd46
  misc_feature 1..23: note = LF
  misc_feature 24..25: note = Core
  misc_feature 26..50: note = RF
taatccgcccgaaacggctggctaatcgcatggtgaatttcctgttaagt

SEQ ID NO: 23079 - DNA, 50 bp, unidentified
  source 1..50: mol_type = unassigned DNA; note = target_41ebdc5
  misc_feature 1..22: note = LF
  misc_feature 23..25: note = Core
  misc_feature 26..50: note = RF
ttatttttgtttgcgcgaataaagtaatgtgatgaacaactcaatagaat

SEQ ID NO: 23080 - DNA, 50 bp, unidentified
  source 1..50: mol_type = unassigned DNA; note = target_41f0242
  misc_feature 1..24: note = LF
  misc_feature 25: note = Core
  misc_feature 26..50: note = RF
ggcgctgagaggcactcatcgcggcagatccgggcgggcatagccccgtc

SEQ ID NO: 23081 - DNA, 50 bp, unidentified
  source 1..50: mol_type = unassigned DNA; note = target_41f9b09
  misc_feature 1..24: note = LF
  misc_feature 25: note = Core
  misc_feature 26..50: note = RF
gcatgatatcatacaaggctttgttgaataaataagatttcttgcgaacg

SEQ ID NO: 23082 - DNA, 50 bp, unidentified
  source 1..50: mol_type = unassigned DNA; note = target_41fe91d
  misc_feature 1..21: note = LF
  misc_feature 22..25: note = Core
  misc_feature 26..50: note = RF
ataccgtgacccgccgattggctcatgagcccttcgggtggcgcccgacg

SEQ ID NO: 23083 - DNA, 50 bp, unidentified
  source 1..50: mol_type = unassigned DNA; note = target_41ffbee
  misc_feature 1..23: note = LF
  misc_feature 24..25: note = Core
  misc_feature 26..50: note = RF
acggttccctgtggttatgggtcccgggtcgcgcttcgcttgcccgggac

SEQ ID NO: 23084 - DNA, 50 bp, unidentified
  source 1..50: mol_type = unassigned DNA; note = target_4206ccd
  misc_feature 1..23: note = LF
  misc_feature 24..25: note = Core
  misc_feature 26..50: note = RF
tgggggcatgcgcggaatatgtccgaaatccgcatcacgccccgggtaag

SEQ ID NO: 23085 - DNA, 50 bp, unidentified
  source 1..50: mol_type = unassigned DNA; note = target_4209389
  misc_feature 1..23: note = LF
  misc_feature 24..25: note = Core
  misc_feature 26..50: note = RF
tgagccagatcaggcgctgcatattgtaggtgaggttggcgaggccgatt

SEQ ID NO: 23086 - DNA, 50 bp, unidentified
  source 1..50: mol_type = unassigned DNA; note = target_420b5c0
  misc_feature 1..24: note = LF
  misc_feature 25: note = Core
  misc_feature 26..50: note = RF
accggcaccacactccatcagcggcagatgagggcgcttccgtcctactg

SEQ ID NO: 23087 - DNA, 50 bp, unidentified
  source 1..50: mol_type = unassigned DNA; note = target_421299f
  misc_feature 1..24: note = LF
  misc_feature 25: note = Core
  misc_feature 26..50: note = RF
tttttattcaacaatcgggccagattgtggaacagcacccttaaataaaa

SEQ ID NO: 23088 - DNA, 50 bp, unidentified
  source 1..50: mol_type = unassigned DNA; note = target_421c148
  misc_feature 1..22: note = LF
  misc_feature 23..25: note = Core
  misc_feature 26..50: note = RF
gaagatctccgtgctctccgcgtctccgtggcgagaactcctctgtggcc

SEQ ID NO: 23089 - DNA, 50 bp, unidentified
  source 1..50: mol_type = unassigned DNA; note = target_421f995
  misc_feature 1..23: note = LF
  misc_feature 24..25: note = Core
  misc_feature 26..50: note = RF
cttcgtcgtgccctgggcactcctcgcaatgacagagccttcgctcccta

SEQ ID NO: 23090 - DNA, 50 bp, unidentified
  source 1..50: mol_type = unassigned DNA; note = target_422a75a
  misc_feature 1..24: note = LF
  misc_feature 25: note = Core
  misc_feature 26..50: note = RF
tgtcgcccggcacacctgaacacacctgaacacacctggcaaaatggcca

SEQ ID NO: 23091 - DNA, 50 bp, unidentified
  source 1..50: mol_type = unassigned DNA; note = target_4236b74
  misc_feature 1..21: note = LF
  misc_feature 22..25: note = Core
  misc_feature 26..50: note = RF
gatattgataatatcatatacaatatggaaattttttgctgtcattttat

SEQ ID NO: 23092 - DNA, 50 bp, unidentified
  source 1..50: mol_type = unassigned DNA; note = target_423b1e6
  misc_feature 1..23: note = LF
  misc_feature 24..25: note = Core
  misc_feature 26..50: note = RF
aaaacgctcttagcgtgggatatttccgttttccaagtggacccctatta

SEQ ID NO: 23093 - DNA, 50 bp, unidentified
  source 1..50: mol_type = unassigned DNA; note = target_423cb6b
  misc_feature 1..23: note = LF
  misc_feature 24..25: note = Core
  misc_feature 26..50: note = RF
tttcccagttgtactaaagactcctattgattcggtccttcactgaaaac

SEQ ID NO: 23094 - DNA, 50 bp, unidentified
  source 1..50: mol_type = unassigned DNA; note = target_423d37d
  misc_feature 1..23: note = LF
  misc_feature 24..25: note = Core
  misc_feature 26..50: note = RF
attttttcatatgacatttcctcctaactaactaaatattttttatctat

SEQ ID NO: 23095 - DNA, 50 bp, unidentified
  source 1..50: mol_type = unassigned DNA; note = target_4241f5b
  misc_feature 1..22: note = LF
  misc_feature 23..25: note = Core
  misc_feature 26..50: note = RF
cagttcttcaacaaacgggtgcgtttaatccaggaaggattaaccgcctt

SEQ ID NO: 23096 - DNA, 50 bp, unidentified
  source 1..50: mol_type = unassigned DNA; note = target_4251b4f
  misc_feature 1..22: note = LF
  misc_feature 23..25: note = Core
  misc_feature 26..50: note = RF
agctcgtcgcggagcttgccgttgaagctttccacatagccttctcccac

SEQ ID NO: 23097 - DNA, 50 bp, unidentified
  source 1..50: mol_type = unassigned DNA; note = target_42545c6
  misc_feature 1..24: note = LF
  misc_feature 25: note = Core
  misc_feature 26..50: note = RF
ttttttcactattcatttttatctcctcgaacattctttctgtttcatat

SEQ ID NO: 23098 - DNA, 50 bp, unidentified
  source 1..50: mol_type = unassigned DNA; note = target_4255379
  misc_feature 1..23: note = LF
  misc_feature 24..25: note = Core
  misc_feature 26..50: note = RF
ggaatccaagcggtcctgtgacgctcatagaggcctctcgtttcggcccg

SEQ ID NO: 23099 - DNA, 50 bp, unidentified
  source 1..50: mol_type = unassigned DNA; note = target_4255fb6
  misc_feature 1..22: note = LF
  misc_feature 23..25: note = Core
  misc_feature 26..50: note = RF
agagacctccaagggggtctcttttttatgtataaataaaataataccct

SEQ ID NO: 23100 - DNA, 50 bp, unidentified
  source 1..50: mol_type = unassigned DNA; note = target_4262f94
  misc_feature 1..22: note = LF
  misc_feature 23..25: note = Core
  misc_feature 26..50: note = RF
ttcttattaaactaaagcccctgttttgtttaagtaaagtatttcacaat

SEQ ID NO: 23101 - DNA, 50 bp, unidentified
  source 1..50: mol_type = unassigned DNA; note = target_4264a71
  misc_feature 1..22: note = LF
  misc_feature 23..25: note = Core
  misc_feature 26..50: note = RF
gcaaggccccccgagtcacaatagatgccgcctgcttagaaccaagaacc

SEQ ID NO: 23102 - DNA, 50 bp, unidentified
  source 1..50: mol_type = unassigned DNA; note = target_4275d8f
  misc_feature 1..23: note = LF
  misc_feature 24..25: note = Core
  misc_feature 26..50: note = RF
atttttgcccgaatgctacgcccctacacggtgcatacagatagagtttt

SEQ ID NO: 23103 - DNA, 50 bp, unidentified
  source 1..50: mol_type = unassigned DNA; note = target_428d327
  misc_feature 1..22: note = LF
  misc_feature 23..25: note = Core
  misc_feature 26..50: note = RF
ctgctgggtggctaacaggtactttagtgaaagaagaatttgcataaaac

SEQ ID NO: 23104 - DNA, 50 bp, unidentified
  source 1..50: mol_type = unassigned DNA; note = target_428e0da
  misc_feature 1..24: note = LF
  misc_feature 25: note = Core
  misc_feature 26..50: note = RF
tatcagccaatgccgccattgcctcccccccacgtccgctgcgtgacgcg

SEQ ID NO: 23105 - DNA, 50 bp, unidentified
  source 1..50: mol_type = unassigned DNA; note = target_4292c26
  misc_feature 1..23: note = LF
  misc_feature 24..25: note = Core
  misc_feature 26..50: note = RF
aagagagtccccttgcccgggcttgtcccgggcatccacgtcttgcgaca

SEQ ID NO: 23106 - DNA, 50 bp, unidentified
  source 1..50: mol_type = unassigned DNA; note = target_429abbf
  misc_feature 1..24: note = LF
  misc_feature 25: note = Core
  misc_feature 26..50: note = RF
ctgaatagacaccttagccaagagcagccattcaacgttgtaaatcagct

SEQ ID NO: 23107 - DNA, 50 bp, unidentified
  source 1..50: mol_type = unassigned DNA; note = target_42ac1f5
  misc_feature 1..22: note = LF
  misc_feature 23..25: note = Core
  misc_feature 26..50: note = RF
cgtagaacctacgacctcggagagaaccatgaccccgaacggacagatcg

SEQ ID NO: 23108 - DNA, 50 bp, unidentified
  source 1..50: mol_type = unassigned DNA; note = target_42accc4
  misc_feature 1..24: note = LF
  misc_feature 25: note = Core
  misc_feature 26..50: note = RF
tgaacgtccgcttacgacccaaagcggacgttggccttaaggctcaggtg

SEQ ID NO: 23109 - DNA, 50 bp, unidentified
  source 1..50: mol_type = unassigned DNA; note = target_42ad79f
  misc_feature 1..23: note = LF
  misc_feature 24..25: note = Core
  misc_feature 26..50: note = RF
gtcactaaacaacagaattgtgctaaatatgtgctaaaactttctctaaa

SEQ ID NO: 23110 - DNA, 50 bp, unidentified
  source 1..50: mol_type = unassigned DNA; note = target_42adaba
  misc_feature 1..23: note = LF
  misc_feature 24..25: note = Core
  misc_feature 26..50: note = RF
gcgggggtcaccatgtcgcggcgaggactgaccgaagcaccgcgccgcgc

SEQ ID NO: 23111 - DNA, 50 bp, unidentified
  source 1..50: mol_type = unassigned DNA; note = target_42b1bc5
  misc_feature 1..23: note = LF
  misc_feature 24..25: note = Core
  misc_feature 26..50: note = RF
gtgggcagaaaaaattgcccaccctacgagttattaaatttgggtaaaac

SEQ ID NO: 23112 - DNA, 50 bp, unidentified
  source 1..50: mol_type = unassigned DNA; note = target_42bddc2
  misc_feature 1..24: note = LF
  misc_feature 25: note = Core
  misc_feature 26..50: note = RF
ggaaaacccttgccaacggggcgccgtccacacatggcacttttgagaca

SEQ ID NO: 23113 - DNA, 50 bp, unidentified
  source 1..50: mol_type = unassigned DNA; note = target_42be7c7
  misc_feature 1..23: note = LF
  misc_feature 24..25: note = Core
  misc_feature 26..50: note = RF
gatagacctcggaccaccaaaactgcgtcagagccaccgttccacgccta

SEQ ID NO: 23114 - DNA, 50 bp, unidentified
  source 1..50: mol_type = unassigned DNA; note = target_42cb2a4
  misc_feature 1..23: note = LF
  misc_feature 24..25: note = Core
  misc_feature 26..50: note = RF
tttgccgccaaactcattttcgccttccatgccgcctattgtggttgctg

SEQ ID NO: 23115 - DNA, 50 bp, unidentified
  source 1..50: mol_type = unassigned DNA; note = target_42d6a7e
  misc_feature 1..23: note = LF
  misc_feature 24..25: note = Core
  misc_feature 26..50: note = RF
gtgcagccggcggcccaggacgactgagccgccctatccggcggtcatga

SEQ ID NO: 23116 - DNA, 50 bp, unidentified
  source 1..50: mol_type = unassigned DNA; note = target_42dacc2
  misc_feature 1..22: note = LF
  misc_feature 23..25: note = Core
  misc_feature 26..50: note = RF
caattgttttcatctttttattgtttattaagttaataatcgctctttgt

SEQ ID NO: 23117 - DNA, 50 bp, unidentified
  source 1..50: mol_type = unassigned DNA; note = target_42dd145
  misc_feature 1..24: note = LF
  misc_feature 25: note = Core
  misc_feature 26..50: note = RF
gcatagtgtggaaggtgcgctaaacaacgctaagcgagaacaatcagcga

SEQ ID NO: 23118 - DNA, 50 bp, unidentified
  source 1..50: mol_type = unassigned DNA; note = target_42e6701
  misc_feature 1..23: note = LF
  misc_feature 24..25: note = Core
  misc_feature 26..50: note = RF
agcgcgacgcgagagtctgcaattgggatgaacccgaaggcaagttctcg

SEQ ID NO: 23119 - DNA, 50 bp, unidentified
  source 1..50: mol_type = unassigned DNA; note = target_42e8faf
  misc_feature 1..23: note = LF
  misc_feature 24..25: note = Core
  misc_feature 26..50: note = RF
gacggggcttctggaccaagctcctatgaagtcacaaacgcccgtccggc

SEQ ID NO: 23120 - DNA, 50 bp, unidentified
  source 1..50: mol_type = unassigned DNA; note = target_42f5e7e
  misc_feature 1..24: note = LF
  misc_feature 25: note = Core
  misc_feature 26..50: note = RF
aattcggttcaggtagccgtagatgtagatcttaagcatcacatccgggt

SEQ ID NO: 23121 - DNA, 50 bp, unidentified
  source 1..50: mol_type = unassigned DNA; note = target_42f9b53
  misc_feature 1..23: note = LF
  misc_feature 24..25: note = Core
  misc_feature 26..50: note = RF
acaattcttatcaccacacaaagtgaggaagaccctcattaaatgcagcg

SEQ ID NO: 23122 - DNA, 50 bp, unidentified
  source 1..50: mol_type = unassigned DNA; note = target_430258d
  misc_feature 1..24: note = LF
  misc_feature 25: note = Core
  misc_feature 26..50: note = RF
aaagccggaaatcttcaatacggatccagggcagccagttcaccagcatc

SEQ ID NO: 23123 - DNA, 50 bp, unidentified
  source 1..50: mol_type = unassigned DNA; note = target_4311bcc
  misc_feature 1..23: note = LF
  misc_feature 24..25: note = Core
  misc_feature 26..50: note = RF
atattctttcatttttattcctcctaatattttttaaaaaagccttttaa

SEQ ID NO: 23124 - DNA, 50 bp, unidentified
  source 1..50: mol_type = unassigned DNA; note = target_431b306
  misc_feature 1..22: note = LF
  misc_feature 23..25: note = Core
  misc_feature 26..50: note = RF
tccaaggttgcgcataacgttttgcggctacaagtagttggcgtttggaa

SEQ ID NO: 23125 - DNA, 50 bp, unidentified
  source 1..50: mol_type = unassigned DNA; note = target_43271de
  misc_feature 1..23: note = LF
  misc_feature 24..25: note = Core
  misc_feature 26..50: note = RF
gcgctccggtgtgagcgctttggagcggccatgcgcgctcacgcctgcct

SEQ ID NO: 23126 - DNA, 50 bp, unidentified
  source 1..50: mol_type = unassigned DNA; note = target_432b263
  misc_feature 1..23: note = LF
  misc_feature 24..25: note = Core
  misc_feature 26..50: note = RF
atcgagaacattgtccggcccggagacataggtaacaaaacgtgcctaag

SEQ ID NO: 23127 - DNA, 50 bp, unidentified
  source 1..50: mol_type = unassigned DNA; note = target_43323a9
  misc_feature 1..23: note = LF
  misc_feature 24..25: note = Core
  misc_feature 26..50: note = RF
ctgaaggggcggtatatcccagcctggggcgcaagccccaggtaagaggc

SEQ ID NO: 23128 - DNA, 50 bp, unidentified
  source 1..50: mol_type = unassigned DNA; note = target_4338d05
  misc_feature 1..23: note = LF
  misc_feature 24..25: note = Core
  misc_feature 26..50: note = RF
atggtgttattagagaatgcaggagcatattctcctgaacaaccacatga

SEQ ID NO: 23129 - DNA, 50 bp, unidentified
  source 1..50: mol_type = unassigned DNA; note = target_4348633
  misc_feature 1..23: note = LF
  misc_feature 24..25: note = Core
  misc_feature 26..50: note = RF
ttgtttcttcatgatatttcatccttttatgattttatactcaacttgtt

SEQ ID NO: 23130 - DNA, 50 bp, unidentified
  source 1..50: mol_type = unassigned DNA; note = target_435165e
  misc_feature 1..23: note = LF
  misc_feature 24..25: note = Core
  misc_feature 26..50: note = RF
aaggatgtctgctaaagaccaatagcggacattgtggagtatttaatcgc

SEQ ID NO: 23131 - DNA, 50 bp, unidentified
  source 1..50: mol_type = unassigned DNA; note = target_435e84d
  misc_feature 1..23: note = LF
  misc_feature 24..25: note = Core
  misc_feature 26..50: note = RF
ctacgcactgcgttgctccgctcaggatgacattatttatgttatgaatt

SEQ ID NO: 23132 - DNA, 50 bp, unidentified
  source 1..50: mol_type = unassigned DNA; note = target_437012f
  misc_feature 1..23: note = LF
  misc_feature 24..25: note = Core
  misc_feature 26..50: note = RF
ttttgacttcgccaacttatcccctctcccctcgtgggagagggttgggg

SEQ ID NO: 23133 - DNA, 50 bp, unidentified
  source 1..50: mol_type = unassigned DNA; note = target_43840fc
  misc_feature 1..23: note = LF
  misc_feature 24..25: note = Core
  misc_feature 26..50: note = RF
ttttatcaccatgaaaattataacatatttttctaataattgctattagt

SEQ ID NO: 23134 - DNA, 50 bp, unidentified
  source 1..50: mol_type = unassigned DNA; note = target_4388714
  misc_feature 1..23: note = LF
  misc_feature 24..25: note = Core
  misc_feature 26..50: note = RF
ctgggctctagcgagccacgcttctatcaagtcacgccgggcatccccga

SEQ ID NO: 23135 - DNA, 50 bp, unidentified
  source 1..50: mol_type = unassigned DNA; note = target_4397a62
  misc_feature 1..23: note = LF
  misc_feature 24..25: note = Core
  misc_feature 26..50: note = RF
ggatgaaccggtgatctgcctcgctcatggcggcgcgaaccacgtcaatg

SEQ ID NO: 23136 - DNA, 50 bp, unidentified
  source 1..50: mol_type = unassigned DNA; note = target_43a0277
  misc_feature 1..23: note = LF
  misc_feature 24..25: note = Core
  misc_feature 26..50: note = RF
cccgcggagccgtaacgaacccgtaggagcgcaccctgtgcgcgaccgtc

SEQ ID NO: 23137 - DNA, 50 bp, unidentified
  source 1..50: mol_type = unassigned DNA; note = target_43a92b6
  misc_feature 1..23: note = LF
  misc_feature 24..25: note = Core
  misc_feature 26..50: note = RF
atgttaatcccttctccggtcacctgtttatcttccgtggtcgacggggt

SEQ ID NO: 23138 - DNA, 50 bp, unidentified
  source 1..50: mol_type = unassigned DNA; note = target_43ab0e6
  misc_feature 1..23: note = LF
  misc_feature 24..25: note = Core
  misc_feature 26..50: note = RF
ttagctatttgcataatattctcctattgctttttaaatttatattttct

SEQ ID NO: 23139 - DNA, 50 bp, unidentified
  source 1..50: mol_type = unassigned DNA; note = target_43aef10
  misc_feature 1..24: note = LF
  misc_feature 25: note = Core
  misc_feature 26..50: note = RF
tccattttatgtcgtggttataacgccgcattaaggtgtgagcaacgcaa

SEQ ID NO: 23140 - DNA, 50 bp, unidentified
  source 1..50: mol_type = unassigned DNA; note = target_43c1159
  misc_feature 1..23: note = LF
  misc_feature 24..25: note = Core
  misc_feature 26..50: note = RF
gactgacggtgacattcaagctcctatcttgtcaagcggcgactggcatg

SEQ ID NO: 23141 - DNA, 50 bp, unidentified
  source 1..50: mol_type = unassigned DNA; note = target_43c8be5
  misc_feature 1..22: note = LF
  misc_feature 23..25: note = Core
  misc_feature 26..50: note = RF
gaagctcgtgtttttcttcctcctttcccttcaggctatccccttctttt

SEQ ID NO: 23142 - DNA, 50 bp, unidentified
  source 1..50: mol_type = unassigned DNA; note = target_43f855c
  misc_feature 1..23: note = LF
  misc_feature 24..25: note = Core
  misc_feature 26..50: note = RF
cggcatggatgccgcgtaagagcctacaaggacgtacttgcggcgtgtcc

SEQ ID NO: 23143 - DNA, 50 bp, unidentified
  source 1..50: mol_type = unassigned DNA; note = target_43f8fb8
  misc_feature 1..22: note = LF
  misc_feature 23..25: note = Core
  misc_feature 26..50: note = RF
aggatggcgatctgcatggggtgcctttcggtggtgggcgtggtgaaggg

SEQ ID NO: 23144 - DNA, 50 bp, unidentified
  source 1..50: mol_type = unassigned DNA; note = target_4405262
  misc_feature 1..23: note = LF
  misc_feature 24..25: note = Core
  misc_feature 26..50: note = RF
ttcgtgacgatcgcgaaacgcccctctgtcaagccaccagggccgttggc

SEQ ID NO: 23145 - DNA, 50 bp, unidentified
  source 1..50: mol_type = unassigned DNA; note = target_440b167
  misc_feature 1..24: note = LF
  misc_feature 25: note = Core
  misc_feature 26..50: note = RF
gaatcagtccgatcgggccattcgcggtgccgccacagcctttttgcagc

SEQ ID NO: 23146 - DNA, 50 bp, unidentified
  source 1..50: mol_type = unassigned DNA; note = target_441d2e1
  misc_feature 1..23: note = LF
  misc_feature 24..25: note = Core
  misc_feature 26..50: note = RF
cctacgcccatgcttcgagggcctcagaatgacacccaagagatgtttta

SEQ ID NO: 23147 - DNA, 50 bp, unidentified
  source 1..50: mol_type = unassigned DNA; note = target_44218d4
  misc_feature 1..23: note = LF
  misc_feature 24..25: note = Core
  misc_feature 26..50: note = RF
atccctcaaaggcggctttggttctcgcgacgactgttgccgacgacaca

SEQ ID NO: 23148 - DNA, 50 bp, unidentified
  source 1..50: mol_type = unassigned DNA; note = target_442ec0a
  misc_feature 1..23: note = LF
  misc_feature 24..25: note = Core
  misc_feature 26..50: note = RF
cggcatccgcattgtcactttcgaggcctgctcaggcttcactcacgtta

SEQ ID NO: 23149 - DNA, 50 bp, unidentified
  source 1..50: mol_type = unassigned DNA; note = target_44317ea
  misc_feature 1..22: note = LF
  misc_feature 23..25: note = Core
  misc_feature 26..50: note = RF
tttttgggtgtagtagctttttagaaatgtcgtgttcgtgtcgcgtaagc

SEQ ID NO: 23150 - DNA, 50 bp, unidentified
  source 1..50: mol_type = unassigned DNA; note = target_4444dc2
  misc_feature 1..21: note = LF
  misc_feature 22..25: note = Core
  misc_feature 26..50: note = RF
cgacgccggcctggccgactgaccccccatcagctgaccgtccggcgccc

SEQ ID NO: 23151 - DNA, 50 bp, unidentified
  source 1..50: mol_type = unassigned DNA; note = target_444ec12
  misc_feature 1..22: note = LF
  misc_feature 23..25: note = Core
  misc_feature 26..50: note = RF
tctggcgtccacatccagagcttgaatcacgccctggccaatctgggaat

SEQ ID NO: 23152 - DNA, 50 bp, unidentified
  source 1..50: mol_type = unassigned DNA; note = target_4451c29
  misc_feature 1..23: note = LF
  misc_feature 24..25: note = Core
  misc_feature 26..50: note = RF
tgaatctgcgtcactcattggtgtcctcctcttgcctcgcactcggcggg

SEQ ID NO: 23153 - DNA, 50 bp, unidentified
  source 1..50: mol_type = unassigned DNA; note = target_4456f09
  misc_feature 1..20: note = LF
  misc_feature 21..25: note = Core
  misc_feature 26..50: note = RF
tccagcgtcgcccgccgcatcccccgggatcacgaccagcgaggcctctc

SEQ ID NO: 23154 - DNA, 50 bp, unidentified
  source 1..50: mol_type = unassigned DNA; note = target_445e795
  misc_feature 1..22: note = LF
  misc_feature 23..25: note = Core
  misc_feature 26..50: note = RF
atatcctgacgccaagttaccgtgacatcacccccctgctgcgggactgc

SEQ ID NO: 23155 - DNA, 50 bp, unidentified
  source 1..50: mol_type = unassigned DNA; note = target_44690e0
  misc_feature 1..23: note = LF
  misc_feature 24..25: note = Core
  misc_feature 26..50: note = RF
agaaatggtgggcagtgcccaccctacaaaaaactggattcccgtttcca

SEQ ID NO: 23156 - DNA, 50 bp, unidentified
  source 1..50: mol_type = unassigned DNA; note = target_4487e5d
  misc_feature 1..24: note = LF
  misc_feature 25: note = Core
  misc_feature 26..50: note = RF
tggccgaatcttgaccgatccgaaaaacgaaagcgcccgtgcgctcgatg

SEQ ID NO: 23157 - DNA, 50 bp, unidentified
  source 1..50: mol_type = unassigned DNA; note = target_449829c
  misc_feature 1..23: note = LF
  misc_feature 24..25: note = Core
  misc_feature 26..50: note = RF
aatgtaaaatcggagtgataaggcttagggatagtagcggcatccttttt

SEQ ID NO: 23158 - DNA, 50 bp, unidentified
  source 1..50: mol_type = unassigned DNA; note = target_449a8c8
  misc_feature 1..22: note = LF
  misc_feature 23..25: note = Core
  misc_feature 26..50: note = RF
atggtcggaattcctgcatccatgaggtcgacggccaaggaccgtcgcat

SEQ ID NO: 23159 - DNA, 50 bp, unidentified
  source 1..50: mol_type = unassigned DNA; note = target_449acf1
  misc_feature 1..23: note = LF
  misc_feature 24..25: note = Core
  misc_feature 26..50: note = RF
tgaaccctgaaagccctgcggcgctggcgtgccgcagggcttttaatttt

SEQ ID NO: 23160 - DNA, 50 bp, unidentified
  source 1..50: mol_type = unassigned DNA; note = target_449b15a
  misc_feature 1..23: note = LF
  misc_feature 24..25: note = Core
  misc_feature 26..50: note = RF
accgccatattcagcttattgccctaggtggtgcaattggtaccggacta

SEQ ID NO: 23161 - DNA, 50 bp, unidentified
  source 1..50: mol_type = unassigned DNA; note = target_449e35c
  misc_feature 1..24: note = LF
  misc_feature 25: note = Core
  misc_feature 26..50: note = RF
cgcgaacgccgacgatgagttccccccaggatgcgaaggccgcgctggcc

SEQ ID NO: 23162 - DNA, 50 bp, unidentified
  source 1..50: mol_type = unassigned DNA; note = target_44a4a42
  misc_feature 1..23: note = LF
  misc_feature 24..25: note = Core
  misc_feature 26..50: note = RF
cgatgcggcggttctcgaaagcagactcgatgtcggcgacgctgagccgc

SEQ ID NO: 23163 - DNA, 50 bp, unidentified
  source 1..50: mol_type = unassigned DNA; note = target_44a6a9c
  misc_feature 1..23: note = LF
  misc_feature 24..25: note = Core
  misc_feature 26..50: note = RF
taaaagccgctctaaggagcggttttttatggctggatttgcgctcactc

SEQ ID NO: 23164 - DNA, 50 bp, unidentified
  source 1..50: mol_type = unassigned DNA; note = target_44b0c00
  misc_feature 1..23: note = LF
  misc_feature 24..25: note = Core
  misc_feature 26..50: note = RF
caaattccatttaattacccctcctaaatattttaataatgttttagccg

SEQ ID NO: 23165 - DNA, 50 bp, unidentified
  source 1..50: mol_type = unassigned DNA; note = target_44b9bdf
  misc_feature 1..22: note = LF
  misc_feature 23..25: note = Core
  misc_feature 26..50: note = RF
tattaaacgatattacttaacctgaactctacttgagatagatttattat

SEQ ID NO: 23166 - DNA, 50 bp, unidentified
  source 1..50: mol_type = unassigned DNA; note = target_44bef2f
  misc_feature 1..23: note = LF
  misc_feature 24..25: note = Core
  misc_feature 26..50: note = RF
accccgggcctggggctcagtcgtcgggggtggtgttggacgcgtcgcag

SEQ ID NO: 23167 - DNA, 50 bp, unidentified
  source 1..50: mol_type = unassigned DNA; note = target_44c8f89
  misc_feature 1..23: note = LF
  misc_feature 24..25: note = Core
  misc_feature 26..50: note = RF
aatcttactgttttgatgggctctgttgcacaaatcctgagagggattca

SEQ ID NO: 23168 - DNA, 50 bp, unidentified
  source 1..50: mol_type = unassigned DNA; note = target_44d02c3
  misc_feature 1..23: note = LF
  misc_feature 24..25: note = Core
  misc_feature 26..50: note = RF
agaacttataatatcttatatcacttatatggtgaaaaaatatttaaatt

SEQ ID NO: 23169 - DNA, 50 bp, unidentified
  source 1..50: mol_type = unassigned DNA; note = target_44d6a45
  misc_feature 1..23: note = LF
  misc_feature 24..25: note = Core
  misc_feature 26..50: note = RF
caggtcatatcccatgaggattcctttctgtgcccgctgggcgtcaccgc

SEQ ID NO: 23170 - DNA, 50 bp, unidentified
  source 1..50: mol_type = unassigned DNA; note = target_44d7cb6
  misc_feature 1..23: note = LF
  misc_feature 24..25: note = Core
  misc_feature 26..50: note = RF
ttcatccggtcgatgtgtgcttcctgaagtcagtaaaacgtcaaccgcag

SEQ ID NO: 23171 - DNA, 50 bp, unidentified
  source 1..50: mol_type = unassigned DNA; note = target_44de54c
  misc_feature 1..23: note = LF
  misc_feature 24..25: note = Core
  misc_feature 26..50: note = RF
aaaacaggcttaacgtaggatatttccgttttccaagcggcccccatatt

SEQ ID NO: 23172 - DNA, 50 bp, unidentified
  source 1..50: mol_type = unassigned DNA; note = target_44df944
  misc_feature 1..22: note = LF
  misc_feature 23..25: note = Core
  misc_feature 26..50: note = RF
gcggtctccaaggtcatgttgatcctttcggaggtcgagtgcttacccac

SEQ ID NO: 23173 - DNA, 50 bp, unidentified
  source 1..50: mol_type = unassigned DNA; note = target_44edb2d
  misc_feature 1..24: note = LF
  misc_feature 25: note = Core
  misc_feature 26..50: note = RF
cttcattcccgtcctgccaaggagaggggtggcgcgcagcgccggggcgg

SEQ ID NO: 23174 - DNA, 50 bp, unidentified
  source 1..50: mol_type = unassigned DNA; note = target_44f1b75
  misc_feature 1..22: note = LF
  misc_feature 23..25: note = Core
  misc_feature 26..50: note = RF
aaatctttcacacttcgacttcgctcagcacaagtatttcacatttacaa

SEQ ID NO: 23175 - DNA, 50 bp, unidentified
  source 1..50: mol_type = unassigned DNA; note = target_44f9b73
  misc_feature 1..23: note = LF
  misc_feature 24..25: note = Core
  misc_feature 26..50: note = RF
cgtggcgggttcgttcacaggttctcaggccgcgttgaagatcgtcaggc

SEQ ID NO: 23176 - DNA, 50 bp, unidentified
  source 1..50: mol_type = unassigned DNA; note = target_44facc5
  misc_feature 1..23: note = LF
  misc_feature 24..25: note = Core
  misc_feature 26..50: note = RF
tcaaaggcttgcatgaaaaactcctttccgagacggccccgctcctgata

SEQ ID NO: 23177 - DNA, 50 bp, unidentified
  source 1..50: mol_type = unassigned DNA; note = target_4500692
  misc_feature 1..24: note = LF
  misc_feature 25: note = Core
  misc_feature 26..50: note = RF
ccgaagcccttccgcttctgacccccccccgcgtccacggccccgcggcc

SEQ ID NO: 23178 - DNA, 50 bp, unidentified
  source 1..50: mol_type = unassigned DNA; note = target_45349ce
  misc_feature 1..23: note = LF
  misc_feature 24..25: note = Core
  misc_feature 26..50: note = RF
tttcaagcgtcaattgcctccttgtctttcttatggtaatttcttcatca

SEQ ID NO: 23179 - DNA, 50 bp, unidentified
  source 1..50: mol_type = unassigned DNA; note = target_45367dd
  misc_feature 1..23: note = LF
  misc_feature 24..25: note = Core
  misc_feature 26..50: note = RF
atggtcccgcgaaaattaaacctgacagaagctaggctcgtccgaccaga

SEQ ID NO: 23180 - DNA, 50 bp, unidentified
  source 1..50: mol_type = unassigned DNA; note = target_453a15a
  misc_feature 1..23: note = LF
  misc_feature 24..25: note = Core
  misc_feature 26..50: note = RF
cacatccagccagcgaactactgctggttcaccaatccggccaaggcact

SEQ ID NO: 23181 - DNA, 50 bp, unidentified
  source 1..50: mol_type = unassigned DNA; note = target_453edbd
  misc_feature 1..24: note = LF
  misc_feature 25: note = Core
  misc_feature 26..50: note = RF
accgcagatcacctccatgtccgctgggtcatttgcgtcgaccgaagcag

SEQ ID NO: 23182 - DNA, 50 bp, unidentified
  source 1..50: mol_type = unassigned DNA; note = target_45409b7
  misc_feature 1..23: note = LF
  misc_feature 24..25: note = Core
  misc_feature 26..50: note = RF
gtggcagaggtggccccgaaaagctcgaagagccaagcgtcaggatcgga

SEQ ID NO: 23183 - DNA, 50 bp, unidentified
  source 1..50: mol_type = unassigned DNA; note = target_4541207
  misc_feature 1..21: note = LF
  misc_feature 22..25: note = Core
  misc_feature 26..50: note = RF
ccgctggcccttggtctcgggatgacggccagtgcgcccttgtcgacgat

SEQ ID NO: 23184 - DNA, 50 bp, unidentified
  source 1..50: mol_type = unassigned DNA; note = target_454e464
  misc_feature 1..23: note = LF
  misc_feature 24..25: note = Core
  misc_feature 26..50: note = RF
ccgggttcgagccgggcgtgatcctttcaccagctgaccgctctcactac

SEQ ID NO: 23185 - DNA, 50 bp, unidentified
  source 1..50: mol_type = unassigned DNA; note = target_454f743
  misc_feature 1..23: note = LF
  misc_feature 24..25: note = Core
  misc_feature 26..50: note = RF
gccccaggtccggattttcggacctgggaaaccacgaactcaaagtacag

SEQ ID NO: 23186 - DNA, 50 bp, unidentified
  source 1..50: mol_type = unassigned DNA; note = target_455a4e0
  misc_feature 1..23: note = LF
  misc_feature 24..25: note = Core
  misc_feature 26..50: note = RF
tcaatgtccgtagttactccaacagcgacattattgttcggcgcagcgaa

SEQ ID NO: 23187 - DNA, 50 bp, unidentified
  source 1..50: mol_type = unassigned DNA; note = target_455c1d5
  misc_feature 1..24: note = LF
  misc_feature 25: note = Core
  misc_feature 26..50: note = RF
tattggacgcgttgcggcaccaaagttcttctcgggtggcagagccacca

SEQ ID NO: 23188 - DNA, 50 bp, unidentified
  source 1..50: mol_type = unassigned DNA; note = target_455f098
  misc_feature 1..23: note = LF
  misc_feature 24..25: note = Core
  misc_feature 26..50: note = RF
aggggatctcgccgccctgaccccggcaaaaggggccgcccctgcccaag

SEQ ID NO: 23189 - DNA, 50 bp, unidentified
  source 1..50: mol_type = unassigned DNA; note = target_4571131
  misc_feature 1..24: note = LF
  misc_feature 25: note = Core
  misc_feature 26..50: note = RF
atgtggagaaacctattgaggggttttgagcgtaatggagagttaaaaca

SEQ ID NO: 23190 - DNA, 50 bp, unidentified
  source 1..50: mol_type = unassigned DNA; note = target_4571adf
  misc_feature 1..23: note = LF
  misc_feature 24..25: note = Core
  misc_feature 26..50: note = RF
cgtggtgtgcccatacgctcctcctatgctcaaactaactatagggcagg

SEQ ID NO: 23191 - DNA, 50 bp, unidentified
  source 1..50: mol_type = unassigned DNA; note = target_4573a46
  misc_feature 1..22: note = LF
  misc_feature 23..25: note = Core
  misc_feature 26..50: note = RF
gaacggtctttcatatcgtttcctccataaaaatgcgcccgccgaaataa

SEQ ID NO: 23192 - DNA, 50 bp, unidentified
  source 1..50: mol_type = unassigned DNA; note = target_4576a61
  misc_feature 1..23: note = LF
  misc_feature 24..25: note = Core
  misc_feature 26..50: note = RF
cgtgctaacggatgcccggaatgctcaccgatcggccatccgggctgcgc

SEQ ID NO: 23193 - DNA, 50 bp, unidentified
  source 1..50: mol_type = unassigned DNA; note = target_4576b6f
  misc_feature 1..22: note = LF
  misc_feature 23..25: note = Core
  misc_feature 26..50: note = RF
ttttttaccgctgaggatactcctttttctcgggacgcctctgctgctgg

SEQ ID NO: 23194 - DNA, 50 bp, unidentified
  source 1..50: mol_type = unassigned DNA; note = target_45774a2
  misc_feature 1..23: note = LF
  misc_feature 24..25: note = Core
  misc_feature 26..50: note = RF
accggaccggatttggtgggctctggtgcaaatagcgcgggggtgatctg

SEQ ID NO: 23195 - DNA, 50 bp, unidentified
  source 1..50: mol_type = unassigned DNA; note = target_45857ca
  misc_feature 1..22: note = LF
  misc_feature 23..25: note = Core
  misc_feature 26..50: note = RF
agcggccaatcgcgacaagccagctcccacaggtacggcgccgggctcga

SEQ ID NO: 23196 - DNA, 50 bp, unidentified
  source 1..50: mol_type = unassigned DNA; note = target_45c3620
  misc_feature 1..23: note = LF
  misc_feature 24..25: note = Core
  misc_feature 26..50: note = RF
cgagatggttgaatggccgaacttggggcgcaaagcggtcgcgcaatctc

SEQ ID NO: 23197 - DNA, 50 bp, unidentified
  source 1..50: mol_type = unassigned DNA; note = target_45c3842
  misc_feature 1..24: note = LF
  misc_feature 25: note = Core
  misc_feature 26..50: note = RF
tctgagcggcgaaaatcgtagattgaagggtgggcagagcgcagaggctg

SEQ ID NO: 23198 - DNA, 50 bp, unidentified
  source 1..50: mol_type = unassigned DNA; note = target_45c5e6b
  misc_feature 1..23: note = LF
  misc_feature 24..25: note = Core
  misc_feature 26..50: note = RF
ctgtcgctgcgcggcgtgaggttcccctcgacgtgctgatcgcgggcgcg

SEQ ID NO: 23199 - DNA, 50 bp, unidentified
  source 1..50: mol_type = unassigned DNA; note = target_45c6df7
  misc_feature 1..21: note = LF
  misc_feature 22..25: note = Core
  misc_feature 26..50: note = RF
agccagaatttgtttgcacctccccccgtgaatgttttccgacatcccca

SEQ ID NO: 23200 - DNA, 50 bp, unidentified
  source 1..50: mol_type = unassigned DNA; note = target_45cb15b
  misc_feature 1..24: note = LF
  misc_feature 25: note = Core
  misc_feature 26..50: note = RF
tacctcagtttgggcgtctgctttcggccaaaagcggtcattcgccgact

SEQ ID NO: 23201 - DNA, 50 bp, unidentified
  source 1..50: mol_type = unassigned DNA; note = target_45cd6fc
  misc_feature 1..23: note = LF
  misc_feature 24..25: note = Core
  misc_feature 26..50: note = RF
tggggggcatatgcgggcgccccctccaccgccttcggcggtccccctcc

SEQ ID NO: 23202 - DNA, 50 bp, unidentified
  source 1..50: mol_type = unassigned DNA; note = target_45d09ec
  misc_feature 1..24: note = LF
  misc_feature 25: note = Core
  misc_feature 26..50: note = RF
cgaaaggtccatgcttttcgaagctgccggaagaacacccccggccctga

SEQ ID NO: 23203 - DNA, 50 bp, unidentified
  source 1..50: mol_type = unassigned DNA; note = target_45d0df0
  misc_feature 1..23: note = LF
  misc_feature 24..25: note = Core
  misc_feature 26..50: note = RF
aggttacccccgaagcttatctcctgctgacaaaaagaaaaaagttattt

SEQ ID NO: 23204 - DNA, 50 bp, unidentified
  source 1..50: mol_type = unassigned DNA; note = target_45d67e0
  misc_feature 1..22: note = LF
  misc_feature 23..25: note = Core
  misc_feature 26..50: note = RF
taaggtcagcaaagcgggacgaagcgggctttcaaccgggcaaggtcaat

SEQ ID NO: 23205 - DNA, 50 bp, unidentified
  source 1..50: mol_type = unassigned DNA; note = target_45d6faf
  misc_feature 1..23: note = LF
  misc_feature 24..25: note = Core
  misc_feature 26..50: note = RF
gaggcgtgaagaaacacgagatccttccgtggagcgcagagcacccatcc

SEQ ID NO: 23206 - DNA, 50 bp, unidentified
  source 1..50: mol_type = unassigned DNA; note = target_45dfb2d
  misc_feature 1..24: note = LF
  misc_feature 25: note = Core
  misc_feature 26..50: note = RF
ggcggaaaatcgctcgatacgcggcatgtgcggacgtttctacgtgggcg

SEQ ID NO: 23207 - DNA, 50 bp, unidentified
  source 1..50: mol_type = unassigned DNA; note = target_45e47d8
  misc_feature 1..23: note = LF
  misc_feature 24..25: note = Core
  misc_feature 26..50: note = RF
atcagccgctagaagatccccctctcagtgaatgtttcattcacctgccg

SEQ ID NO: 23208 - DNA, 50 bp, unidentified
  source 1..50: mol_type = unassigned DNA; note = target_45e635b
  misc_feature 1..20: note = LF
  misc_feature 21..25: note = Core
  misc_feature 26..50: note = RF
tattcgtcgggatatttatcctgctcgtgggctttgcgcggcccgtttcc

SEQ ID NO: 23209 - DNA, 50 bp, unidentified
  source 1..50: mol_type = unassigned DNA; note = target_45e6907
  misc_feature 1..24: note = LF
  misc_feature 25: note = Core
  misc_feature 26..50: note = RF
cgaacactaaaccgcactgaaccacacccccctgcttttcctctcccaaa

SEQ ID NO: 23210 - DNA, 50 bp, unidentified
  source 1..50: mol_type = unassigned DNA; note = target_46018df
  misc_feature 1..23: note = LF
  misc_feature 24..25: note = Core
  misc_feature 26..50: note = RF
tactattttttcctttttcttccctttctctgagtgaaatccgaaagcta

SEQ ID NO: 23211 - DNA, 50 bp, unidentified
  source 1..50: mol_type = unassigned DNA; note = target_4601f95
  misc_feature 1..21: note = LF
  misc_feature 22..25: note = Core
  misc_feature 26..50: note = RF
accgccccaagccccttcccgatagaattcgggaccgtaatatttgtaga

SEQ ID NO: 23212 - DNA, 50 bp, unidentified
  source 1..50: mol_type = unassigned DNA; note = target_4605604
  misc_feature 1..23: note = LF
  misc_feature 24..25: note = Core
  misc_feature 26..50: note = RF
gggcctcatcgcgagcaggctcgctcccacaggggaatgcgtacgcttaa

SEQ ID NO: 23213 - DNA, 50 bp, unidentified
  source 1..50: mol_type = unassigned DNA; note = target_46099e9
  misc_feature 1..24: note = LF
  misc_feature 25: note = Core
  misc_feature 26..50: note = RF
tttgtcgtagtgtttcagaattatttggcgtagtctttcagagctgtttg

SEQ ID NO: 23214 - DNA, 50 bp, unidentified
  source 1..50: mol_type = unassigned DNA; note = target_460b044
  misc_feature 1..24: note = LF
  misc_feature 25: note = Core
  misc_feature 26..50: note = RF
gtgggagggcacctggcctccccccaccccccggatctccagcacgcgct

SEQ ID NO: 23215 - DNA, 50 bp, unidentified
  source 1..50: mol_type = unassigned DNA; note = target_461dd5d
  misc_feature 1..23: note = LF
  misc_feature 24..25: note = Core
  misc_feature 26..50: note = RF
cgacgatcaagaagtgccaaagtagtgctaggctcaggacctattaattt

SEQ ID NO: 23216 - DNA, 50 bp, unidentified
  source 1..50: mol_type = unassigned DNA; note = target_462994f
  misc_feature 1..24: note = LF
  misc_feature 25: note = Core
  misc_feature 26..50: note = RF
gattaaaccagcaccgccaacgaccgcaatggagaaatcgatgcagtttc

SEQ ID NO: 23217 - DNA, 50 bp, unidentified
  source 1..50: mol_type = unassigned DNA; note = target_462d3c4
  misc_feature 1..22: note = LF
  misc_feature 23..25: note = Core
  misc_feature 26..50: note = RF
cgagcggtccgagcattactggtcctctccgataagacgtttcatcaatc

SEQ ID NO: 23218 - DNA, 50 bp, unidentified
  source 1..50: mol_type = unassigned DNA; note = target_463975c
  misc_feature 1..23: note = LF
  misc_feature 24..25: note = Core
  misc_feature 26..50: note = RF
tacgggagacgtatgtgatgcgtctctacagaatcaatctttttaaatcc

SEQ ID NO: 23219 - DNA, 50 bp, unidentified
  source 1..50: mol_type = unassigned DNA; note = target_464b5bf
  misc_feature 1..23: note = LF
  misc_feature 24..25: note = Core
  misc_feature 26..50: note = RF
tgatcggtcatttccgtagcttcctttcgtcgtcgccgccagcgaccgcg

SEQ ID NO: 23220 - DNA, 50 bp, unidentified
  source 1..50: mol_type = unassigned DNA; note = target_464b821
  misc_feature 1..22: note = LF
  misc_feature 23..25: note = Core
  misc_feature 26..50: note = RF
agaaataaattatatttttattcatagttttttcgttttataatgtaaga

SEQ ID NO: 23221 - DNA, 50 bp, unidentified
  source 1..50: mol_type = unassigned DNA; note = target_464bfb5
  misc_feature 1..23: note = LF
  misc_feature 24..25: note = Core
  misc_feature 26..50: note = RF
cgcacgggttccgccctcccttgctcactcctcttcctcttcttcagggc

SEQ ID NO: 23222 - DNA, 50 bp, unidentified
  source 1..50: mol_type = unassigned DNA; note = target_46507e0
  misc_feature 1..23: note = LF
  misc_feature 24..25: note = Core
  misc_feature 26..50: note = RF
ttcttcgcgcccctcccggccagctagccgccggtgaagccggccagctc

SEQ ID NO: 23223 - DNA, 50 bp, unidentified
  source 1..50: mol_type = unassigned DNA; note = target_465393c
  misc_feature 1..22: note = LF
  misc_feature 23..25: note = Core
  misc_feature 26..50: note = RF
tggcgcaacaaggcaatttccgatttgtatgaacccggcagtgtgttcaa

SEQ ID NO: 23224 - DNA, 50 bp, unidentified
  source 1..50: mol_type = unassigned DNA; note = target_4663210
  misc_feature 1..23: note = LF
  misc_feature 24..25: note = Core
  misc_feature 26..50: note = RF
gggacgtccacagatggaaaacagacactagcatttcgctgaacagacgt

SEQ ID NO: 23225 - DNA, 50 bp, unidentified
  source 1..50: mol_type = unassigned DNA; note = target_4666120
  misc_feature 1..23: note = LF
  misc_feature 24..25: note = Core
  misc_feature 26..50: note = RF
tggggttcgttccacaccccaccctacgtgctggttgcttgtggttttgc

SEQ ID NO: 23226 - DNA, 50 bp, unidentified
  source 1..50: mol_type = unassigned DNA; note = target_46670cf
  misc_feature 1..21: note = LF
  misc_feature 22..25: note = Core
  misc_feature 26..50: note = RF
gcgccttgcgggcgcctcgcaatgacaggtgccacggaacggcggacacg

SEQ ID NO: 23227 - DNA, 50 bp, unidentified
  source 1..50: mol_type = unassigned DNA; note = target_466b676
  misc_feature 1..24: note = LF
  misc_feature 25: note = Core
  misc_feature 26..50: note = RF
ccctcatccggctgccgccacctttctccccgcttgcggggcgaagggga

SEQ ID NO: 23228 - DNA, 50 bp, unidentified
  source 1..50: mol_type = unassigned DNA; note = target_4679907
  misc_feature 1..21: note = LF
  misc_feature 22..25: note = Core
  misc_feature 26..50: note = RF
tccacgtccctgacggtggtggtcatgcgctgcccttgactggcaggtaa

SEQ ID NO: 23229 - DNA, 50 bp, unidentified
  source 1..50: mol_type = unassigned DNA; note = target_468c2b8
  misc_feature 1..23: note = LF
  misc_feature 24..25: note = Core
  misc_feature 26..50: note = RF
cgttcacgcgccgtggctgcatgcggtgttagacggtcctgatactttgc

SEQ ID NO: 23230 - DNA, 50 bp, unidentified
  source 1..50: mol_type = unassigned DNA; note = target_469162f
  misc_feature 1..24: note = LF
  misc_feature 25: note = Core
  misc_feature 26..50: note = RF
ctcgctgcgatgcacaactcgcggcatgtgagtgctcagcagtccttggc

SEQ ID NO: 23231 - DNA, 50 bp, unidentified
  source 1..50: mol_type = unassigned DNA; note = target_469f6df
  misc_feature 1..21: note = LF
  misc_feature 22..25: note = Core
  misc_feature 26..50: note = RF
ggcgccggggacaccggggcggtcatgcgtgctccagcagcgtggtctcg

SEQ ID NO: 23232 - DNA, 50 bp, unidentified
  source 1..50: mol_type = unassigned DNA; note = target_46a2894
  misc_feature 1..23: note = LF
  misc_feature 24..25: note = Core
  misc_feature 26..50: note = RF
ggagtataatgtcagcgtggctttgtttcctaaatcggttgaactaaagc

SEQ ID NO: 23233 - DNA, 50 bp, unidentified
  source 1..50: mol_type = unassigned DNA; note = target_46afaed
  misc_feature 1..24: note = LF
  misc_feature 25: note = Core
  misc_feature 26..50: note = RF
acacgttctccgagcgatcagcggcaatacaggatgtcgctggggactgc

SEQ ID NO: 23234 - DNA, 50 bp, unidentified
  source 1..50: mol_type = unassigned DNA; note = target_46b837f
  misc_feature 1..23: note = LF
  misc_feature 24..25: note = Core
  misc_feature 26..50: note = RF
ccaaaagaggttaattctttaataggttgttcgctttaccaaacttacaa

SEQ ID NO: 23235 - DNA, 50 bp, unidentified
  source 1..50: mol_type = unassigned DNA; note = target_46c6593
  misc_feature 1..22: note = LF
  misc_feature 23..25: note = Core
  misc_feature 26..50: note = RF
tcaaagttaagttactattgtgtctatgtgtttaaaaaaaataaataaat

SEQ ID NO: 23236 - DNA, 50 bp, unidentified
  source 1..50: mol_type = unassigned DNA; note = target_46df353
  misc_feature 1..24: note = LF
  misc_feature 25: note = Core
  misc_feature 26..50: note = RF
tcaggagtcgcatcgatgttgatttgcactgaaaactgacccactttgct

SEQ ID NO: 23237 - DNA, 50 bp, unidentified
  source 1..50: mol_type = unassigned DNA; note = target_46e7e8c
  misc_feature 1..23: note = LF
  misc_feature 24..25: note = Core
  misc_feature 26..50: note = RF
tcgcagggcacgggactaggagtctcgggcttggggcgtggatggcgaaa

SEQ ID NO: 23238 - DNA, 50 bp, unidentified
  source 1..50: mol_type = unassigned DNA; note = target_46e89aa
  misc_feature 1..23: note = LF
  misc_feature 24..25: note = Core
  misc_feature 26..50: note = RF
atatgcgtcaagagatcacctccctttactgattcagtttccagcctatg

SEQ ID NO: 23239 - DNA, 50 bp, unidentified
  source 1..50: mol_type = unassigned DNA; note = target_46eec83
  misc_feature 1..23: note = LF
  misc_feature 24..25: note = Core
  misc_feature 26..50: note = RF
tgcgtcaatcgggcagacaagcgctcatagcaatccccgggtgattggca

SEQ ID NO: 23240 - DNA, 50 bp, unidentified
  source 1..50: mol_type = unassigned DNA; note = target_46f8701
  misc_feature 1..24: note = LF
  misc_feature 25: note = Core
  misc_feature 26..50: note = RF
tcccgccgcaagcgcagagaacgccgcctagcgctatgcggggtccggcg

SEQ ID NO: 23241 - DNA, 50 bp, unidentified
  source 1..50: mol_type = unassigned DNA; note = target_46f989e
  misc_feature 1..22: note = LF
  misc_feature 23..25: note = Core
  misc_feature 26..50: note = RF
attcgacccgagggacgcctcttttttattgatcgatatcaaccagaccg

SEQ ID NO: 23242 - DNA, 50 bp, unidentified
  source 1..50: mol_type = unassigned DNA; note = target_46fbe06
  misc_feature 1..23: note = LF
  misc_feature 24..25: note = Core
  misc_feature 26..50: note = RF
gagctgccccgcagcactgggggtgggtagggggccacggcgaaggccgt

SEQ ID NO: 23243 - DNA, 50 bp, unidentified
  source 1..50: mol_type = unassigned DNA; note = target_4702b37
  misc_feature 1..22: note = LF
  misc_feature 23..25: note = Core
  misc_feature 26..50: note = RF
gaagtggttttttttatgtcgtcattgcgaggagcgaagcaatctcaaaa

SEQ ID NO: 23244 - DNA, 50 bp, unidentified
  source 1..50: mol_type = unassigned DNA; note = target_4707936
  misc_feature 1..23: note = LF
  misc_feature 24..25: note = Core
  misc_feature 26..50: note = RF
tcggctcccccggtctagagcgtgtctctttgatcggatggtcagttgat

SEQ ID NO: 23245 - DNA, 50 bp, unidentified
  source 1..50: mol_type = unassigned DNA; note = target_470aea5
  misc_feature 1..23: note = LF
  misc_feature 24..25: note = Core
  misc_feature 26..50: note = RF
atatgcacagtttgcgctttcatctcggtaattgaattgccgaggattcc

SEQ ID NO: 23246 - DNA, 50 bp, unidentified
  source 1..50: mol_type = unassigned DNA; note = target_4712f23
  misc_feature 1..23: note = LF
  misc_feature 24..25: note = Core
  misc_feature 26..50: note = RF
ccaagatcggccagcgcaagatctgttcccattggcagcagaattccgac

SEQ ID NO: 23247 - DNA, 50 bp, unidentified
  source 1..50: mol_type = unassigned DNA; note = target_4715a53
  misc_feature 1..23: note = LF
  misc_feature 24..25: note = Core
  misc_feature 26..50: note = RF
gaatttacagaagatgtctcgcgagtccctacatatctacactatggcct

SEQ ID NO: 23248 - DNA, 50 bp, unidentified
  source 1..50: mol_type = unassigned DNA; note = target_471ceb1
  misc_feature 1..24: note = LF
  misc_feature 25: note = Core
  misc_feature 26..50: note = RF
gaaggctaccctcgcacaccgcggcagatgaggtcgcggccgggcagccg

SEQ ID NO: 23249 - DNA, 50 bp, unidentified
  source 1..50: mol_type = unassigned DNA; note = target_47227ce
  misc_feature 1..24: note = LF
  misc_feature 25: note = Core
  misc_feature 26..50: note = RF
aagcgcgctagcgcactataaaaatgttaaattttcaatcgggtttagtg

SEQ ID NO: 23250 - DNA, 50 bp, unidentified
  source 1..50: mol_type = unassigned DNA; note = target_472c41c
  misc_feature 1..24: note = LF
  misc_feature 25: note = Core
  misc_feature 26..50: note = RF
ttgtcttcgctgcggaccgccgcccccccctggaggcatcaccccagtca

SEQ ID NO: 23251 - DNA, 50 bp, unidentified
  source 1..50: mol_type = unassigned DNA; note = target_472dd94
  misc_feature 1..24: note = LF
  misc_feature 25: note = Core
  misc_feature 26..50: note = RF
gcgacaggtaaacactgattacattggacatttatcagtcggagttaaac

SEQ ID NO: 23252 - DNA, 50 bp, unidentified
  source 1..50: mol_type = unassigned DNA; note = target_472eeb5
  misc_feature 1..23: note = LF
  misc_feature 24..25: note = Core
  misc_feature 26..50: note = RF
cgcaaccctgcaaaggttgcgggtttttatgcttttggtattggccgctg

SEQ ID NO: 23253 - DNA, 50 bp, unidentified
  source 1..50: mol_type = unassigned DNA; note = target_473209b
  misc_feature 1..24: note = LF
  misc_feature 25: note = Core
  misc_feature 26..50: note = RF
gtttttgcgccgtcccgcgaggactgacttttccttggctcaccccccgg

SEQ ID NO: 23254 - DNA, 50 bp, unidentified
  source 1..50: mol_type = unassigned DNA; note = target_4737d4e
  misc_feature 1..23: note = LF
  misc_feature 24..25: note = Core
  misc_feature 26..50: note = RF
ctgtggccagttttacttgaccactacagatgcactcctaccttggaact

SEQ ID NO: 23255 - DNA, 50 bp, unidentified
  source 1..50: mol_type = unassigned DNA; note = target_473aaa7
  misc_feature 1..23: note = LF
  misc_feature 24..25: note = Core
  misc_feature 26..50: note = RF
aagtgtcatatagctgaacgctccttttacaactcactctttcgttttta

SEQ ID NO: 23256 - DNA, 50 bp, unidentified
  source 1..50: mol_type = unassigned DNA; note = target_473d6f5
  misc_feature 1..24: note = LF
  misc_feature 25: note = Core
  misc_feature 26..50: note = RF
cgttcaccgtcttccacgccgcccccccccctcgaccgtccatccggcac

SEQ ID NO: 23257 - DNA, 50 bp, unidentified
  source 1..50: mol_type = unassigned DNA; note = target_474417a
  misc_feature 1..23: note = LF
  misc_feature 24..25: note = Core
  misc_feature 26..50: note = RF
cgcgcctcgccgggcgagggggtttcgttttgcgcttcacctcctgtcgc

SEQ ID NO: 23258 - DNA, 50 bp, unidentified
  source 1..50: mol_type = unassigned DNA; note = target_475097c
  misc_feature 1..23: note = LF
  misc_feature 24..25: note = Core
  misc_feature 26..50: note = RF
tcggcacgctcgagcattacgcgagcctcctgaagcgcatcaccgacagc

SEQ ID NO: 23259 - DNA, 50 bp, unidentified
  source 1..50: mol_type = unassigned DNA; note = target_4752046
  misc_feature 1..24: note = LF
  misc_feature 25: note = Core
  misc_feature 26..50: note = RF
ccgcaccagcccacaccccgccaccacataagtcatgagcgccctcttta

SEQ ID NO: 23260 - DNA, 50 bp, unidentified
  source 1..50: mol_type = unassigned DNA; note = target_4752d19
  misc_feature 1..23: note = LF
  misc_feature 24..25: note = Core
  misc_feature 26..50: note = RF
agcagatcaagcgcacctagccgtcgttaggtgcgggtcgtttcctgcat

SEQ ID NO: 23261 - DNA, 50 bp, unidentified
  source 1..50: mol_type = unassigned DNA; note = target_4783c0d
  misc_feature 1..23: note = LF
  misc_feature 24..25: note = Core
  misc_feature 26..50: note = RF
acttccctgcccgagtgaccgcgctctaggctccggccggcaagaccggc

SEQ ID NO: 23262 - DNA, 50 bp, unidentified
  source 1..50: mol_type = unassigned DNA; note = target_479a713
  misc_feature 1..23: note = LF
  misc_feature 24..25: note = Core
  misc_feature 26..50: note = RF
aacctaccgcttgcgttaggctttgttgcataactccgaatgggtctgtg

SEQ ID NO: 23263 - DNA, 50 bp, unidentified
  source 1..50: mol_type = unassigned DNA; note = target_479ce47
  misc_feature 1..23: note = LF
  misc_feature 24..25: note = Core
  misc_feature 26..50: note = RF
ctgtcgtagtcggcccgcttcgtaggatgggttgagccaacgggtcgcgc

SEQ ID NO: 23264 - DNA, 50 bp, unidentified
  source 1..50: mol_type = unassigned DNA; note = target_479ffd2
  misc_feature 1..22: note = LF
  misc_feature 23..25: note = Core
  misc_feature 26..50: note = RF
agctcgtccctgagcttgccgttgaagctttccacgtagccgttctccca

SEQ ID NO: 23265 - DNA, 50 bp, unidentified
  source 1..50: mol_type = unassigned DNA; note = target_47b5154
  misc_feature 1..23: note = LF
  misc_feature 24..25: note = Core
  misc_feature 26..50: note = RF
gaaaacgcgcacaaatgcgacccagttgggtgcttgggtgcgggggtggg

SEQ ID NO: 23266 - DNA, 50 bp, unidentified
  source 1..50: mol_type = unassigned DNA; note = target_47bc693
  misc_feature 1..24: note = LF
  misc_feature 25: note = Core
  misc_feature 26..50: note = RF
ctgcggtcagcgtgcgagatccgccgttctgggtgggtttcggccggagt

SEQ ID NO: 23267 - DNA, 50 bp, unidentified
  source 1..50: mol_type = unassigned DNA; note = target_47be464
  misc_feature 1..23: note = LF
  misc_feature 24..25: note = Core
  misc_feature 26..50: note = RF
gaccctaaggctctgaataaagcagcgagcctggcaatgtaacgaaattt

SEQ ID NO: 23268 - DNA, 50 bp, unidentified
  source 1..50: mol_type = unassigned DNA; note = target_47d8656
  misc_feature 1..24: note = LF
  misc_feature 25: note = Core
  misc_feature 26..50: note = RF
ggcggggccgatgggctgggtatcccttctctggcccacgctcgtggaca

SEQ ID NO: 23269 - DNA, 50 bp, unidentified
  source 1..50: mol_type = unassigned DNA; note = target_47e65c7
  misc_feature 1..23: note = LF
  misc_feature 24..25: note = Core
  misc_feature 26..50: note = RF
gatattttgttacgtatagcttcctgaaagcgtgaggtcagatttttttg

SEQ ID NO: 23270 - DNA, 50 bp, unidentified
  source 1..50: mol_type = unassigned DNA; note = target_47e78f8
  misc_feature 1..23: note = LF
  misc_feature 24..25: note = Core
  misc_feature 26..50: note = RF
tttttgtttcatactgtcatctcctcatagattagatatttatattttac

SEQ ID NO: 23271 - DNA, 50 bp, unidentified
  source 1..50: mol_type = unassigned DNA; note = target_47ecc3a
  misc_feature 1..23: note = LF
  misc_feature 24..25: note = Core
  misc_feature 26..50: note = RF
tccaaaatgaccctagcctcgatctttcgtgttcatgagctggcggtttg

SEQ ID NO: 23272 - DNA, 50 bp, unidentified
  source 1..50: mol_type = unassigned DNA; note = target_47f4f2f
  misc_feature 1..23: note = LF
  misc_feature 24..25: note = Core
  misc_feature 26..50: note = RF
cagcaaggcgggcaagcgaacattgggtatgtggcatcatgtctgctgct

SEQ ID NO: 23273 - DNA, 50 bp, unidentified
  source 1..50: mol_type = unassigned DNA; note = target_47f5c3b
  misc_feature 1..22: note = LF
  misc_feature 23..25: note = Core
  misc_feature 26..50: note = RF
tctgtctcatggctgtgtcttcctttctctacggtgttgcttgaagaaca

SEQ ID NO: 23274 - DNA, 50 bp, unidentified
  source 1..50: mol_type = unassigned DNA; note = target_47fa3dc
  misc_feature 1..24: note = LF
  misc_feature 25: note = Core
  misc_feature 26..50: note = RF
cgctcgtcattggcggggcctaacgtgatgtagggcgcaagcccgacgcc

SEQ ID NO: 23275 - DNA, 50 bp, unidentified
  source 1..50: mol_type = unassigned DNA; note = target_47fe011
  misc_feature 1..22: note = LF
  misc_feature 23..25: note = Core
  misc_feature 26..50: note = RF
tgcactgccgcttccagggccaaaggacggataagtcaggatggaacgac

SEQ ID NO: 23276 - DNA, 50 bp, unidentified
  source 1..50: mol_type = unassigned DNA; note = target_480242f
  misc_feature 1..24: note = LF
  misc_feature 25: note = Core
  misc_feature 26..50: note = RF
ttccaatttggtgcaagatgtgatttcaagatgctggctggaacaggagg

SEQ ID NO: 23277 - DNA, 50 bp, unidentified
  source 1..50: mol_type = unassigned DNA; note = target_4802c29
  misc_feature 1..24: note = LF
  misc_feature 25: note = Core
  misc_feature 26..50: note = RF
aaaaccagccattaattttatacgtcttaagcgccaattcaaatacttcc

SEQ ID NO: 23278 - DNA, 50 bp, unidentified
  source 1..50: mol_type = unassigned DNA; note = target_4805c89
  misc_feature 1..22: note = LF
  misc_feature 23..25: note = Core
  misc_feature 26..50: note = RF
aaagactgccgaagacttacgaagtctttgagacttcgtaagtctggcaa

SEQ ID NO: 23279 - DNA, 50 bp, unidentified
  source 1..50: mol_type = unassigned DNA; note = target_4805e5a
  misc_feature 1..22: note = LF
  misc_feature 23..25: note = Core
  misc_feature 26..50: note = RF
tcgccacccggatgtctgaagctgagggcaaagcggaagtcgttcgcggc

SEQ ID NO: 23280 - DNA, 50 bp, unidentified
  source 1..50: mol_type = unassigned DNA; note = target_48209b4
  misc_feature 1..23: note = LF
  misc_feature 24..25: note = Core
  misc_feature 26..50: note = RF
cggccccttcgcgagcaggctcgctcccacagtagatctccagtgggcga

SEQ ID NO: 23281 - DNA, 50 bp, unidentified
  source 1..50: mol_type = unassigned DNA; note = target_4827478
  misc_feature 1..24: note = LF
  misc_feature 25: note = Core
  misc_feature 26..50: note = RF
atctcgaagccacaaagtcttcttttttttgatccagcacggtcaagctg

SEQ ID NO: 23282 - DNA, 50 bp, unidentified
  source 1..50: mol_type = unassigned DNA; note = target_482cf73
  misc_feature 1..24: note = LF
  misc_feature 25: note = Core
  misc_feature 26..50: note = RF
attcaggtagcgagcgtgaaccgccgttatctgggcgttcccttttgctt

SEQ ID NO: 23283 - DNA, 50 bp, unidentified
  source 1..50: mol_type = unassigned DNA; note = target_483ae76
  misc_feature 1..23: note = LF
  misc_feature 24..25: note = Core
  misc_feature 26..50: note = RF
gtggcccgggatcaggcaaaacgagtctcgtcgacgtccttgccgcccaa

SEQ ID NO: 23284 - DNA, 50 bp, unidentified
  source 1..50: mol_type = unassigned DNA; note = target_483b057
  misc_feature 1..24: note = LF
  misc_feature 25: note = Core
  misc_feature 26..50: note = RF
ccaaaacctcctagggcatttaacgctttactaatgggcgcataaatgct

SEQ ID NO: 23285 - DNA, 50 bp, unidentified
  source 1..50: mol_type = unassigned DNA; note = target_483e47f
  misc_feature 1..24: note = LF
  misc_feature 25: note = Core
  misc_feature 26..50: note = RF
tgctgcaagccgcgcgggtcgcggcattacagcgcgttctcaggagcgag

SEQ ID NO: 23286 - DNA, 50 bp, unidentified
  source 1..50: mol_type = unassigned DNA; note = target_4842688
  misc_feature 1..24: note = LF
  misc_feature 25: note = Core
  misc_feature 26..50: note = RF
ggtggtataccgtggcgctatacccgggggtataaaatagccttggcaga

SEQ ID NO: 23287 - DNA, 50 bp, unidentified
  source 1..50: mol_type = unassigned DNA; note = target_484bdaa
  misc_feature 1..24: note = LF
  misc_feature 25: note = Core
  misc_feature 26..50: note = RF
ttggcgcgtcttctgatgcctaacgaggctgtagaaaaagttgttttcgc

SEQ ID NO: 23288 - DNA, 50 bp, unidentified
  source 1..50: mol_type = unassigned DNA; note = target_4855543
  misc_feature 1..24: note = LF
  misc_feature 25: note = Core
  misc_feature 26..50: note = RF
tgcgctgtcggtgctagcacacccccccgaagaggatggctgcggtggtg

SEQ ID NO: 23289 - DNA, 50 bp, unidentified
  source 1..50: mol_type = unassigned DNA; note = target_4858e27
  misc_feature 1..23: note = LF
  misc_feature 24..25: note = Core
  misc_feature 26..50: note = RF
tcataaagaaaatgtgatatttttttttatgtgcattctaaaatattagg

SEQ ID NO: 23290 - DNA, 50 bp, unidentified
  source 1..50: mol_type = unassigned DNA; note = target_48613b6
  misc_feature 1..23: note = LF
  misc_feature 24..25: note = Core
  misc_feature 26..50: note = RF
tggccccatcgcgagcaggctcgctcccacagtggatcgacgtacaccgg

SEQ ID NO: 23291 - DNA, 50 bp, unidentified
  source 1..50: mol_type = unassigned DNA; note = target_4862be1
  misc_feature 1..23: note = LF
  misc_feature 24..25: note = Core
  misc_feature 26..50: note = RF
tgattaaaatttatcgtttgacgtgctcccctgaaatgtgaccgcttttt

SEQ ID NO: 23292 - DNA, 50 bp, unidentified
  source 1..50: mol_type = unassigned DNA; note = target_4863415
  misc_feature 1..23: note = LF
  misc_feature 24..25: note = Core
  misc_feature 26..50: note = RF
gctacaaaaatgagactaagaattttaaacatcaatgattgtgcccaaaa

SEQ ID NO: 23293 - DNA, 50 bp, unidentified; identical to SEQ ID NO: 20434
  source 1..50: mol_type = unassigned DNA; note = target_487b02a
  misc_feature 1..21: note = LF
  misc_feature 22..25: note = Core
  misc_feature 26..50: note = RF

SEQ ID NO: 23294 - DNA, 50 bp, unidentified
  source 1..50: mol_type = unassigned DNA; note = target_487e63a
  misc_feature 1..24: note = LF
  misc_feature 25: note = Core
  misc_feature 26..50: note = RF
ttcggattttcacgaaaacctaacgcctcattaagtggaaattaatggtt

SEQ ID NO: 23295 - DNA, 50 bp, unidentified
  source 1..50: mol_type = unassigned DNA; note = target_487e923
  misc_feature 1..24: note = LF
  misc_feature 25: note = Core
  misc_feature 26..50: note = RF
acccggggcgccgcccagcagcaccaccccccggcccccggcgggggcca

SEQ ID NO: 23296 - DNA, 50 bp, unidentified
  source 1..50: mol_type = unassigned DNA; note = target_4882dc5
  misc_feature 1..24: note = LF
  misc_feature 25: note = Core
  misc_feature 26..50: note = RF
tagcgatagggtagcgtagactcaccccgacatcgctgcgctcgtcgacc

SEQ ID NO: 23297 - DNA, 50 bp, unidentified
  source 1..50: mol_type = unassigned DNA; note = target_488345f
  misc_feature 1..24: note = LF
  misc_feature 25: note = Core
  misc_feature 26..50: note = RF
actgcgaggccgcgcgctcagcggcatgagcggacgccgcgccgtcgagt

SEQ ID NO: 23298 - DNA, 50 bp, unidentified
  source 1..50: mol_type = unassigned DNA; note = target_48916b5
  misc_feature 1..24: note = LF
  misc_feature 25: note = Core
  misc_feature 26..50: note = RF
cgacgggctgcttccggccagaagcggacacttacgatagccgctcttag

SEQ ID NO: 23299 - DNA, 50 bp, unidentified
  source 1..50: mol_type = unassigned DNA; note = target_4897801
  misc_feature 1..23: note = LF
  misc_feature 24..25: note = Core
  misc_feature 26..50: note = RF
agacgccatcgcgagcaagctcgctcccacactgttccgaggcgctacac

SEQ ID NO: 23300 - DNA, 50 bp, unidentified
  source 1..50: mol_type = unassigned DNA; note = target_489888b
  misc_feature 1..23: note = LF
  misc_feature 24..25: note = Core
  misc_feature 26..50: note = RF
tcattttcataaataagttcctcctcataaaaatttatcgagaaaatgtc

SEQ ID NO: 23301 - DNA, 50 bp, unidentified
  source 1..50: mol_type = unassigned DNA; note = target_489b382
  misc_feature 1..20: note = LF
  misc_feature 21..25: note = Core
  misc_feature 26..50: note = RF
ggagccaccccacgaaccggcccccccgcgaaccgaagcccccacggacc

SEQ ID NO: 23302 - DNA, 50 bp, unidentified
  source 1..50: mol_type = unassigned DNA; note = target_48aa5dd
  misc_feature 1..24: note = LF
  misc_feature 25: note = Core
  misc_feature 26..50: note = RF
ctcgttcgctattcctcccgaaagcggacaatcggggaagcagtatcagt

SEQ ID NO: 23303 - DNA, 50 bp, unidentified
  source 1..50: mol_type = unassigned DNA; note = target_48b4921
  misc_feature 1..23: note = LF
  misc_feature 24..25: note = Core
  misc_feature 26..50: note = RF
gtcgcggtgccgatgcgtcttccagtgtccggacggtcattcgaggtctg

SEQ ID NO: 23304 - DNA, 50 bp, unidentified
  source 1..50: mol_type = unassigned DNA; note = target_48be344
  misc_feature 1..24: note = LF
  misc_feature 25: note = Core
  misc_feature 26..50: note = RF
ccttctgacggcgcaactaggctttgttgcataaatcaggctcggccagc

SEQ ID NO: 23305 - DNA, 50 bp, unidentified
  source 1..50: mol_type = unassigned DNA; note = target_48be619
  misc_feature 1..24: note = LF
  misc_feature 25: note = Core
  misc_feature 26..50: note = RF
cggtttttcggacacgggtataagtggatttcgagcccgggagggacata

SEQ ID NO: 23306 - DNA, 50 bp, unidentified
  source 1..50: mol_type = unassigned DNA; note = target_48bf9cf
  misc_feature 1..22: note = LF
  misc_feature 23..25: note = Core
  misc_feature 26..50: note = RF
tttctttttcttctcgctcttttttcagttcggttaaagcttgaatcaga

SEQ ID NO: 23307 - DNA, 50 bp, unidentified
  source 1..50: mol_type = unassigned DNA; note = target_48c2df8
  misc_feature 1..23: note = LF
  misc_feature 24..25: note = Core
  misc_feature 26..50: note = RF
gtttccatagttatcagtacctcctttttcaaaaggatagcaaaaacagc

SEQ ID NO: 23308 - DNA, 50 bp, unidentified
  source 1..50: mol_type = unassigned DNA; note = target_48d031f
  misc_feature 1..22: note = LF
  misc_feature 23..25: note = Core
  misc_feature 26..50: note = RF
atggggtcgaaaacgacgcgaatgacccttagcgacaaaatgccatcgtc

SEQ ID NO: 23309 - DNA, 50 bp, unidentified
  source 1..50: mol_type = unassigned DNA; note = target_48d09e2
  misc_feature 1..23: note = LF
  misc_feature 24..25: note = Core
  misc_feature 26..50: note = RF
ctcctcgccgccacccctgacgcctgacccgcgccgacctcatcctgacc

SEQ ID NO: 23310 - DNA, 50 bp, unidentified
  source 1..50: mol_type = unassigned DNA; note = target_48d148f
  misc_feature 1..23: note = LF
  misc_feature 24..25: note = Core
  misc_feature 26..50: note = RF
tgactgcctatactgctcctctcctttcttttttcccattcaatctctga

SEQ ID NO: 23311 - DNA, 50 bp, unidentified
  source 1..50: mol_type = unassigned DNA; note = target_48d8946
  misc_feature 1..23: note = LF
  misc_feature 24..25: note = Core
  misc_feature 26..50: note = RF
gtgtcgcgcactagattggcggtcatgcgcctcgtccgcctgctgaccct

SEQ ID NO: 23312 - DNA, 50 bp, unidentified
  source 1..50: mol_type = unassigned DNA; note = target_48e44f8
  misc_feature 1..23: note = LF
  misc_feature 24..25: note = Core
  misc_feature 26..50: note = RF
gatggcgcgcgcctgctcaaaaggaacgccatgagcaacgaccccttcac

SEQ ID NO: 23313 - DNA, 50 bp, unidentified
  source 1..50: mol_type = unassigned DNA; note = target_48e4814
  misc_feature 1..23: note = LF
  misc_feature 24..25: note = Core
  misc_feature 26..50: note = RF
taggcagccggtacacatgaatagacgtccgtaggtgaggagccgaaaca

SEQ ID NO: 23314 - DNA, 50 bp, unidentified
  source 1..50: mol_type = unassigned DNA; note = target_48e9a25
  misc_feature 1..23: note = LF
  misc_feature 24..25: note = Core
  misc_feature 26..50: note = RF
cgagcttgttcatggtcctgttccttccagttgtgctcatgcctgttcgc

SEQ ID NO: 23315 - DNA, 50 bp, unidentified
  source 1..50: mol_type = unassigned DNA; note = target_48eca66
  misc_feature 1..23: note = LF
  misc_feature 24..25: note = Core
  misc_feature 26..50: note = RF
tcgacgtgtcggtggacgacctcctgtcgatgaaaatgcctacagcttaa

SEQ ID NO: 23316 - DNA, 50 bp, unidentified
  source 1..50: mol_type = unassigned DNA; note = target_48ecc43
  misc_feature 1..24: note = LF
  misc_feature 25: note = Core
  misc_feature 26..50: note = RF
acaaaaaaaggtaacagcgagggcctctatgggaagtaaatctaaactga

SEQ ID NO: 23317 - DNA, 50 bp, unidentified
  source 1..50: mol_type = unassigned DNA; note = target_48fa54d
  misc_feature 1..24: note = LF
  misc_feature 25: note = Core
  misc_feature 26..50: note = RF
caagtggcggctatggatcgtaagcgctcaaataaccccgccttgaggcc

SEQ ID NO: 23318 - DNA, 50 bp, unidentified
  source 1..50: mol_type = unassigned DNA; note = target_48fab52
  misc_feature 1..24: note = LF
  misc_feature 25: note = Core
  misc_feature 26..50: note = RF
ttccttcggtgctctattgtccgtttctgatgggatgccgttatgaaatc

SEQ ID NO: 23319 - DNA, 50 bp, unidentified
  source 1..50: mol_type = unassigned DNA; note = target_48fcad2
  misc_feature 1..23: note = LF
  misc_feature 24..25: note = Core
  misc_feature 26..50: note = RF
gttatgtgcggataaatccgcacctacaaactggatcgccacgctgcctg

SEQ ID NO: 23320 - DNA, 50 bp, unidentified
  source 1..50: mol_type = unassigned DNA; note = target_4904c28
  misc_feature 1..23: note = LF
  misc_feature 24..25: note = Core
  misc_feature 26..50: note = RF
attcttttttactttattccattcttttttgaaataattccttccataat

SEQ ID NO: 23321 - DNA, 50 bp, unidentified
  source 1..50: mol_type = unassigned DNA; note = target_4906219
  misc_feature 1..22: note = LF
  misc_feature 23..25: note = Core
  misc_feature 26..50: note = RF
cttttacttgtaggtcccaaatagaaatgtcgtgttctgtgtcggctgag

SEQ ID NO: 23322 - DNA, 50 bp, unidentified
  source 1..50: mol_type = unassigned DNA; note = target_4906e9b
  misc_feature 1..24: note = LF
  misc_feature 25: note = Core
  misc_feature 26..50: note = RF
caatgcgcagccatcccctcccttctttatgttctctcggtggtgcataa

SEQ ID NO: 23323 - DNA, 50 bp, unidentified
  source 1..50: mol_type = unassigned DNA; note = target_490b814
  misc_feature 1..23: note = LF
  misc_feature 24..25: note = Core
  misc_feature 26..50: note = RF
catgcgtcaggttcctacggttcctctcattaggtttgggacgcgggccc

SEQ ID NO: 23324 - DNA, 50 bp, unidentified
  source 1..50: mol_type = unassigned DNA; note = target_4916f16
  misc_feature 1..24: note = LF
  misc_feature 25: note = Core
  misc_feature 26..50: note = RF
tcgttcggaccgaacggatcgcggcagatgtgtgcggtgggtcagctacc

SEQ ID NO: 23325 - DNA, 50 bp, unidentified
  source 1..50: mol_type = unassigned DNA; note = target_493019c
  misc_feature 1..23: note = LF
  misc_feature 24..25: note = Core
  misc_feature 26..50: note = RF
ctgctcgatcgtatggccagtcttttttgcgcgtcataccgtgacgaatg

SEQ ID NO: 23326 - DNA, 50 bp, unidentified
  source 1..50: mol_type = unassigned DNA; note = target_493a868
  misc_feature 1..22: note = LF
  misc_feature 23..25: note = Core
  misc_feature 26..50: note = RF
cttgttatcaaccaatagtaaggagaggaaaatgttcgaaaatttgaaaa

SEQ ID NO: 23327 - DNA, 50 bp, unidentified
  source 1..50: mol_type = unassigned DNA; note = target_493bbdc
  misc_feature 1..23: note = LF
  misc_feature 24..25: note = Core
  misc_feature 26..50: note = RF
gctgcggtgcggctcgtcaaagctgccgttcgatccaaaaaatatggtta

SEQ ID NO: 23328 - DNA, 50 bp, unidentified
  source 1..50: mol_type = unassigned DNA; note = target_4940c73
  misc_feature 1..23: note = LF
  misc_feature 24..25: note = Core
  misc_feature 26..50: note = RF
gtcctcagtcgctctgcggacatacggtcttatgggtcagcggcgggccc

SEQ ID NO: 23329 - DNA, 50 bp, unidentified
  source 1..50: mol_type = unassigned DNA; note = target_4947ada
  misc_feature 1..24: note = LF
  misc_feature 25: note = Core
  misc_feature 26..50: note = RF
tggcgcctcctcatgccacctaacgttcccggtaaccggcgcgtgcccgg

SEQ ID NO: 23330 - DNA, 50 bp, unidentified
  source 1..50: mol_type = unassigned DNA; note = target_4947fa8
  misc_feature 1..21: note = LF
  misc_feature 22..25: note = Core
  misc_feature 26..50: note = RF
acgggacgggtgttcatggttctccttgagcggtgcggtgcgaggggcgg

SEQ ID NO: 23331 - DNA, 50 bp, unidentified
  source 1..50: mol_type = unassigned DNA; note = target_494a5b0
  misc_feature 1..23: note = LF
  misc_feature 24..25: note = Core
  misc_feature 26..50: note = RF
gcgcgtcccgtgccgccctggatccggctctgcgccgcaacgccaagagg

SEQ ID NO: 23332 - DNA, 50 bp, unidentified
  source 1..50: mol_type = unassigned DNA; note = target_494af4c
  misc_feature 1..22: note = LF
  misc_feature 23..25: note = Core
  misc_feature 26..50: note = RF
gcgcttcatcgagcggcaggctttttgttgtttgggaaattacgacttcg

SEQ ID NO: 23333 - DNA, 50 bp, unidentified
  source 1..50: mol_type = unassigned DNA; note = target_494df9e
  misc_feature 1..23: note = LF
  misc_feature 24..25: note = Core
  misc_feature 26..50: note = RF
tccggcgatcgtcgtcataccttgtcctttctgcccgcgccatcgcggcc

SEQ ID NO: 23334 - DNA, 50 bp, unidentified
  source 1..50: mol_type = unassigned DNA; note = target_4951cf5
  misc_feature 1..24: note = LF
  misc_feature 25: note = Core
  misc_feature 26..50: note = RF
tattcgttttttgtcctaaatagctctgtccaaaagtgagtttggtgata

SEQ ID NO: 23335 - DNA, 50 bp, unidentified
  source 1..50: mol_type = unassigned DNA; note = target_495a39b
  misc_feature 1..23: note = LF
  misc_feature 24..25: note = Core
  misc_feature 26..50: note = RF
tgcgggtcgatcgagccccccccttttcggcgcccttgacgctctgacta

SEQ ID NO: 23336 - DNA, 50 bp, unidentified
  source 1..50: mol_type = unassigned DNA; note = target_495b4cf
  misc_feature 1..24: note = LF
  misc_feature 25: note = Core
  misc_feature 26..50: note = RF
cgcagcgccttgcccccgggcacccaccccccccgattatctcgacacat

SEQ ID NO: 23337 - DNA, 50 bp, unidentified
  source 1..50: mol_type = unassigned DNA; note = target_495e699
  misc_feature 1..24: note = LF
  misc_feature 25: note = Core
  misc_feature 26..50: note = RF
agaactagcaataaattatatacgttgttggtggtagttttttattttcc

SEQ ID NO: 23338 - DNA, 50 bp, unidentified
  source 1..50: mol_type = unassigned DNA; note = target_495fa0b
  misc_feature 1..22: note = LF
  misc_feature 23..25: note = Core
  misc_feature 26..50: note = RF
ccccttcctttctttcgactccgctcagggtaaactatctgagtgctgct

SEQ ID NO: 23339 - DNA, 50 bp, unidentified
  source 1..50: mol_type = unassigned DNA; note = target_496304f
  misc_feature 1..24: note = LF
  misc_feature 25: note = Core
  misc_feature 26..50: note = RF
agtttttactcacccccaacccctctctgtaaacagagaggggagtgatg

SEQ ID NO: 23340 - DNA, 50 bp, unidentified
  source 1..50: mol_type = unassigned DNA; note = target_49645bc
  misc_feature 1..23: note = LF
  misc_feature 24..25: note = Core
  misc_feature 26..50: note = RF
acgagacgatccgatgctggtgcgacaagtttggcaagggctttgctcac

SEQ ID NO: 23341 - DNA, 50 bp, unidentified
  source 1..50: mol_type = unassigned DNA; note = target_4974031
  misc_feature 1..22: note = LF
  misc_feature 23..25: note = Core
  misc_feature 26..50: note = RF
aaaggagaaaaggcttcgacgggctcagcctgacaaggttgtaagcataa

SEQ ID NO: 23342 - DNA, 50 bp, unidentified
  source 1..50: mol_type = unassigned DNA; note = target_498717b
  misc_feature 1..23: note = LF
  misc_feature 24..25: note = Core
  misc_feature 26..50: note = RF
aatttggtgggctgaagcccaccctacggtaaaggctgccacaggcaccc

SEQ ID NO: 23343 - DNA, 50 bp, unidentified
  source 1..50: mol_type = unassigned DNA; note = target_49a1689
  misc_feature 1..24: note = LF
  misc_feature 25: note = Core
  misc_feature 26..50: note = RF
ggtgagcgggcacgataacagggttggcagaccggccacgttggacaaca

SEQ ID NO: 23344 - DNA, 50 bp, unidentified
  source 1..50: mol_type = unassigned DNA; note = target_49a63cd
  misc_feature 1..24: note = LF
  misc_feature 25: note = Core
  misc_feature 26..50: note = RF
tattttttcatgataccgttgcctctctccataatatgcggcaggacaga

SEQ ID NO: 23345 - DNA, 50 bp, unidentified
  source 1..50: mol_type = unassigned DNA; note = target_49b0ef7
  misc_feature 1..22: note = LF
  misc_feature 23..25: note = Core
  misc_feature 26..50: note = RF
cgaatggtatcatcgtccaggtagagaaactccgcgatggcctgacagga

SEQ ID NO: 23346 - DNA, 50 bp, unidentified
  source 1..50: mol_type = unassigned DNA; note = target_49b3089
  misc_feature 1..22: note = LF
  misc_feature 23..25: note = Core
  misc_feature 26..50: note = RF
ggacactagatgtcgagtttagaaaacatactaacctagtgttggatcat

SEQ ID NO: 23347 - DNA, 50 bp, unidentified
  source 1..50: mol_type = unassigned DNA; note = target_49ba79d
  misc_feature 1..23: note = LF
  misc_feature 24..25: note = Core
  misc_feature 26..50: note = RF
catgccaaaaagtactggttaccttggtctggtgcatttccgggtcacgc

SEQ ID NO: 23348 - DNA, 50 bp, unidentified
  source 1..50: mol_type = unassigned DNA; note = target_49beff1
  misc_feature 1..24: note = LF
  misc_feature 25: note = Core
  misc_feature 26..50: note = RF
gcgcttggcgccgggccctaccatttttttgccagaagctcccggagccc

SEQ ID NO: 23349 - DNA, 50 bp, unidentified
  source 1..50: mol_type = unassigned DNA; note = target_49bf852
  misc_feature 1..23: note = LF
  misc_feature 24..25: note = Core
  misc_feature 26..50: note = RF
cgtttcgccttgctcaacgcatcctacggttgggtggcgatgcgtagggt

SEQ ID NO: 23350 - DNA, 50 bp, unidentified
  source 1..50: mol_type = unassigned DNA; note = target_49cdbaa
  misc_feature 1..21: note = LF
  misc_feature 22..25: note = Core
  misc_feature 26..50: note = RF
ccacacgcgcgtagtgaatttatgagtacacgccctagcactactttggc

SEQ ID NO: 23351 - DNA, 50 bp, unidentified
  source 1..50: mol_type = unassigned DNA; note = target_49cf8cc
  misc_feature 1..23: note = LF
  misc_feature 24..25: note = Core
  misc_feature 26..50: note = RF
gcacatctatcgttcatattcacctcgtattatattagaatggtatttta

SEQ ID NO: 23352 - DNA, 50 bp, unidentified
  source 1..50: mol_type = unassigned DNA; note = target_49d1c3f
  misc_feature 1..23: note = LF
  misc_feature 24..25: note = Core
  misc_feature 26..50: note = RF
ccctttgcgaaaatctgcgttaatctgcgtttcaataaagatttaaactc

SEQ ID NO: 23353 - DNA, 50 bp, unidentified
  source 1..50: mol_type = unassigned DNA; note = target_49d2e83
  misc_feature 1..23: note = LF
  misc_feature 24..25: note = Core
  misc_feature 26..50: note = RF
actggctccggaggcctgcctgccgaggcaggagtcaaatgttggtagct

SEQ ID NO: 23354 - DNA, 50 bp, unidentified
  source 1..50: mol_type = unassigned DNA; note = target_49e05c1
  misc_feature 1..23: note = LF
  misc_feature 24..25: note = Core
  misc_feature 26..50: note = RF
tcatgccggcgcgcaccgagatcccccccggcctcatgggcaccgcacgg

SEQ ID NO: 23355 - DNA, 50 bp, unidentified
  source 1..50: mol_type = unassigned DNA; note = target_49ead00
  misc_feature 1..23: note = LF
  misc_feature 24..25: note = Core
  misc_feature 26..50: note = RF
tggcggctggcgccttatccgggctacgggatggcaccggcccgtagccc

SEQ ID NO: 23356 - DNA, 50 bp, unidentified
  source 1..50: mol_type = unassigned DNA; note = target_49ecda3
  misc_feature 1..23: note = LF
  misc_feature 24..25: note = Core
  misc_feature 26..50: note = RF
acaaacaggatgaggattcgtgttgcctcacgaaggaacgttcccgaacg

SEQ ID NO: 23357 - DNA, 50 bp, unidentified
  source 1..50: mol_type = unassigned DNA; note = target_49ef377
  misc_feature 1..22: note = LF
  misc_feature 23..25: note = Core
  misc_feature 26..50: note = RF
ctgcggcgcacgcgggccgggatgacggccgtgctggctcgccgccttac

SEQ ID NO: 23358 - DNA, 50 bp, unidentified
  source 1..50: mol_type = unassigned DNA; note = target_49f01a7
  misc_feature 1..23: note = LF
  misc_feature 24..25: note = Core
  misc_feature 26..50: note = RF
aaaactgcgacggcgccgtttactggatgcccgctttcgcgggtatgacg

SEQ ID NO: 23359 - DNA, 50 bp, unidentified
  source 1..50: mol_type = unassigned DNA; note = target_49f120b
  misc_feature 1..23: note = LF
  misc_feature 24..25: note = Core
  misc_feature 26..50: note = RF
catcgtcttcgcgaacaagttcgctcctacggccttcggccagaatcaaa

SEQ ID NO: 23360 - DNA, 50 bp, unidentified
  source 1..50: mol_type = unassigned DNA; note = target_49f12f2
  misc_feature 1..23: note = LF
  misc_feature 24..25: note = Core
  misc_feature 26..50: note = RF
gagtcagaccgtaaaccgtaggtcggattagcccagcgtaatccgacaac

SEQ ID NO: 23361 - DNA, 50 bp, unidentified
  source 1..50: mol_type = unassigned DNA; note = target_49fa876
  misc_feature 1..23: note = LF
  misc_feature 24..25: note = Core
  misc_feature 26..50: note = RF
ttggtgtgcccgaaactcccgccctgcttggcccgcccatacaccggacg

SEQ ID NO: 23362 - DNA, 50 bp, unidentified
  source 1..50: mol_type = unassigned DNA; note = target_4a08703
  misc_feature 1..22: note = LF
  misc_feature 23..25: note = Core
  misc_feature 26..50: note = RF
gatgttgattgccgctgagatctgacccgggattgggggatatttccact

SEQ ID NO: 23363 - DNA, 50 bp, unidentified
  source 1..50: mol_type = unassigned DNA; note = target_4a10dd2
  misc_feature 1..23: note = LF
  misc_feature 24..25: note = Core
  misc_feature 26..50: note = RF
cccgatgtccgcttcagtgcaaaagcgaccgaattgctgcgttgccgtga

SEQ ID NO: 23364 - DNA, 50 bp, unidentified
  source 1..50: mol_type = unassigned DNA; note = target_4a14d08
  misc_feature 1..23: note = LF
  misc_feature 24..25: note = Core
  misc_feature 26..50: note = RF
gccttttgatgggaatgcaattcgtgccatagttccatgagttaaaaaag

SEQ ID NO: 23365 - DNA, 50 bp, unidentified
  source 1..50: mol_type = unassigned DNA; note = target_4a1bfea
  misc_feature 1..24: note = LF
  misc_feature 25: note = Core
  misc_feature 26..50: note = RF
tgggtaagtccgtaagtcgtagggcggattcgcgacagcaatccgccgca

SEQ ID NO: 23366 - DNA, 50 bp, unidentified
  source 1..50: mol_type = unassigned DNA; note = target_4a1e190
  misc_feature 1..23: note = LF
  misc_feature 24..25: note = Core
  misc_feature 26..50: note = RF
cggcgacgcaggtcgcggatcgctggcacctgctcgtcaacgcatccgag

SEQ ID NO: 23367 - DNA, 50 bp, unidentified
  source 1..50: mol_type = unassigned DNA; note = target_4a2e877
  misc_feature 1..23: note = LF
  misc_feature 24..25: note = Core
  misc_feature 26..50: note = RF
ggtggagttttcagacataatacttccgttttactccggcggttgtcacc

SEQ ID NO: 23368 - DNA, 50 bp, unidentified
  source 1..50: mol_type = unassigned DNA; note = target_4a366c8
  misc_feature 1..22: note = LF
  misc_feature 23..25: note = Core
  misc_feature 26..50: note = RF
tccgccaccagcacctctgtacccccggcgatgatcccggcccacttctg

SEQ ID NO: 23369 - DNA, 50 bp, unidentified
  source 1..50: mol_type = unassigned DNA; note = target_4a3726e
  misc_feature 1..22: note = LF
  misc_feature 23..25: note = Core
  misc_feature 26..50: note = RF
gacatttatgttagagctttttagaaatgtcgcgtttgggctcgttagaa

SEQ ID NO: 23370 - DNA, 50 bp, unidentified
  source 1..50: mol_type = unassigned DNA; note = target_4a38bee
  misc_feature 1..24: note = LF
  misc_feature 25: note = Core
  misc_feature 26..50: note = RF
ggagcactattctgcaataatggaagctatttagtattgttacggggcta

SEQ ID NO: 23371 - DNA, 50 bp, unidentified
  source 1..50: mol_type = unassigned DNA; note = target_4a3b476
  misc_feature 1..21: note = LF
  misc_feature 22..25: note = Core
  misc_feature 26..50: note = RF
tccatttcaccgctcttatgtcattcctgagaaaacgggaatccagtatt

SEQ ID NO: 23372 - DNA, 50 bp, unidentified
  source 1..50: mol_type = unassigned DNA; note = target_4a3ee70
  misc_feature 1..23: note = LF
  misc_feature 24..25: note = Core
  misc_feature 26..50: note = RF
cagataaaacatacaaaatcctccttttattatgccgcagcgggaacccg

SEQ ID NO: 23373 - DNA, 50 bp, unidentified
  source 1..50: mol_type = unassigned DNA; note = target_4a48278
  misc_feature 1..23: note = LF
  misc_feature 24..25: note = Core
  misc_feature 26..50: note = RF
ccagtcacacacggcccaaaccggacattcgccaccaccactagatgctg

SEQ ID NO: 23374 - DNA, 50 bp, unidentified
  source 1..50: mol_type = unassigned DNA; note = target_4a4f8f4
  misc_feature 1..23: note = LF
  misc_feature 24..25: note = Core
  misc_feature 26..50: note = RF
aaagttttaatttatatattaggaggaatgttaaatgttaaaagtaaaaa

SEQ ID NO: 23375 - DNA, 50 bp, unidentified
  source 1..50: mol_type = unassigned DNA; note = target_4a51412
  misc_feature 1..23: note = LF
  misc_feature 24..25: note = Core
  misc_feature 26..50: note = RF
gcgtccagagcgatcgccgccctcttcactgtccgcggtcggtcaccgaa

SEQ ID NO: 23376 - DNA, 50 bp, unidentified
  source 1..50: mol_type = unassigned DNA; note = target_4a5461a
  misc_feature 1..24: note = LF
  misc_feature 25: note = Core
  misc_feature 26..50: note = RF
taccgccatactttttacgccaggtgtaaaaagttgcctcagaaatcccc

SEQ ID NO: 23377 - DNA, 50 bp, unidentified
  source 1..50: mol_type = unassigned DNA; note = target_4a640fa
  misc_feature 1..23: note = LF
  misc_feature 24..25: note = Core
  misc_feature 26..50: note = RF
attcctgtgcctgtcacaggaatccagccggcttgcgtccgcaagccgaa

SEQ ID NO: 23378 - DNA, 50 bp, unidentified
  source 1..50: mol_type = unassigned DNA; note = target_4a6a60c
  misc_feature 1..23: note = LF
  misc_feature 24..25: note = Core
  misc_feature 26..50: note = RF
aaatcgtgctaaaccttaaggtcattctgcacctcgatttcatcaggatg

SEQ ID NO: 23379 - DNA, 50 bp, unidentified
  source 1..50: mol_type = unassigned DNA; note = target_4a6bffd
  misc_feature 1..22: note = LF
  misc_feature 23..25: note = Core
  misc_feature 26..50: note = RF
aagtttgtgcttagaactttttcattttataattgtcaaacagaatatca

SEQ ID NO: 23380 - DNA, 50 bp, unidentified
  source 1..50: mol_type = unassigned DNA; note = target_4a6e722
  misc_feature 1..24: note = LF
  misc_feature 25: note = Core
  misc_feature 26..50: note = RF
ttattcgggatttcggctcagccccaccccccggcggttgacagctatga

SEQ ID NO: 23381 - DNA, 50 bp, unidentified
  source 1..50: mol_type = unassigned DNA; note = target_4a7884e
  misc_feature 1..24: note = LF
  misc_feature 25: note = Core
  misc_feature 26..50: note = RF
gcgaaggaagcccagattatggacatgtggagtatagaaggtgcagacca

SEQ ID NO: 23382 - DNA, 50 bp, unidentified
  source 1..50: mol_type = unassigned DNA; note = target_4a8b27b
  misc_feature 1..22: note = LF
  misc_feature 23..25: note = Core
  misc_feature 26..50: note = RF
cgaacaggatgttgattttcactgagagctgacccggcggacgtgttcga

SEQ ID NO: 23383 - DNA, 50 bp, unidentified
  source 1..50: mol_type = unassigned DNA; note = target_4a91bf0
  misc_feature 1..24: note = LF
  misc_feature 25: note = Core
  misc_feature 26..50: note = RF
ggatccgacaggccaaaccactgctgcataaaatggatctgcagcatcgt

SEQ ID NO: 23384 - DNA, 50 bp, unidentified
  source 1..50: mol_type = unassigned DNA; note = target_4a93ef9
  misc_feature 1..24: note = LF
  misc_feature 25: note = Core
  misc_feature 26..50: note = RF
tctccgggttgtggtcaaaggcggcagtaagacgcgctcatcgcggcaga

SEQ ID NO: 23385 - DNA, 50 bp, unidentified
  source 1..50: mol_type = unassigned DNA; note = target_4a9442f
  misc_feature 1..21: note = LF
  misc_feature 22..25: note = Core
  misc_feature 26..50: note = RF
tcttgatgggagcacgcgaagctcatcggcctagcgggtgggcgccacca

SEQ ID NO: 23386 - DNA, 50 bp, unidentified
  source 1..50: mol_type = unassigned DNA; note = target_4a9913f
  misc_feature 1..23: note = LF
  misc_feature 24..25: note = Core
  misc_feature 26..50: note = RF
gacgctttcccggctgaagccggtctacaaggtgatcggggggtgtcagt

SEQ ID NO: 23387 - DNA, 50 bp, unidentified
  source 1..50: mol_type = unassigned DNA; note = target_4a9a3a5
  misc_feature 1..23: note = LF
  misc_feature 24..25: note = Core
  misc_feature 26..50: note = RF
gatacccaacacacagcggtggttgggtcccggctcgtgctcgcctcgct

SEQ ID NO: 23388 - DNA, 50 bp, unidentified
  source 1..50: mol_type = unassigned DNA; note = target_4aa297c
  misc_feature 1..23: note = LF
  misc_feature 24..25: note = Core
  misc_feature 26..50: note = RF
gacggggcctctcgcacaggctcctataaggtcacgacgcccgatcggcc

SEQ ID NO: 23389 - DNA, 50 bp, unidentified
  source 1..50: mol_type = unassigned DNA; note = target_4aad75c
  misc_feature 1..23: note = LF
  misc_feature 24..25: note = Core
  misc_feature 26..50: note = RF
aaccccggctattatggtcggggtttttatggctgattcccagcggatgc

SEQ ID NO: 23390 - DNA, 50 bp, unidentified
  source 1..50: mol_type = unassigned DNA; note = target_4ab670e
  misc_feature 1..23: note = LF
  misc_feature 24..25: note = Core
  misc_feature 26..50: note = RF
tacagaggtatcgcattcccctaatgtaggagctgccgaaggctgcgatc

SEQ ID NO: 23391 - DNA, 50 bp, unidentified
  source 1..50: mol_type = unassigned DNA; note = target_4abd5d0
  misc_feature 1..23: note = LF
  misc_feature 24..25: note = Core
  misc_feature 26..50: note = RF
gattttttccataacacccactcctttcacgcacatctataaaatcgaaa

SEQ ID NO: 23392 - DNA, 50 bp, unidentified
  source 1..50: mol_type = unassigned DNA; note = target_4abf7dd
  misc_feature 1..22: note = LF
  misc_feature 23..25: note = Core
  misc_feature 26..50: note = RF
gaatttcggcggcgaatttgggtgacagtgcattcatggcgctttggccg

SEQ ID NO: 23393 - DNA, 50 bp, unidentified
  source 1..50: mol_type = unassigned DNA; note = target_4ac0e89
  misc_feature 1..23: note = LF
  misc_feature 24..25: note = Core
  misc_feature 26..50: note = RF
ccgtcaaaccgtttatctaaactatacaggtaactcgagaagggtttatc

SEQ ID NO: 23394 - DNA, 50 bp, unidentified
  source 1..50: mol_type = unassigned DNA; note = target_4ac6402
  misc_feature 1..23: note = LF
  misc_feature 24..25: note = Core
  misc_feature 26..50: note = RF
ccacccatccttcccaatagggttgccattcgctgtcgcggtgcacgagg

SEQ ID NO: 23395 - DNA, 50 bp, unidentified
  source 1..50: mol_type = unassigned DNA; note = target_4acc85e
  misc_feature 1..24: note = LF
  misc_feature 25: note = Core
  misc_feature 26..50: note = RF
gtgactgatactgatgcccgggtcttttttatgatttcctccgccttttt

SEQ ID NO: 23396 - DNA, 50 bp, unidentified
  source 1..50: mol_type = unassigned DNA; note = target_4ad5f1b
  misc_feature 1..23: note = LF
  misc_feature 24..25: note = Core
  misc_feature 26..50: note = RF
gccgcagaagtaaatgaaccagtagcccgcatgagcgcagcgatatgcgg

SEQ ID NO: 23397 - DNA, 50 bp, unidentified
  source 1..50: mol_type = unassigned DNA; note = target_4adad24
  misc_feature 1..23: note = LF
  misc_feature 24..25: note = Core
  misc_feature 26..50: note = RF
attgactggaaagtccggcgacctgtgaattcgggtgacagatctcgctg

SEQ ID NO: 23398 - DNA, 50 bp, unidentified
  source 1..50: mol_type = unassigned DNA; note = target_4ae3461
  misc_feature 1..24: note = LF
  misc_feature 25: note = Core
  misc_feature 26..50: note = RF
ttttgccgatgagtgaaatggcgatgttacaacagcaattgactaagctt

SEQ ID NO: 23399 - DNA, 50 bp, unidentified
  source 1..50: mol_type = unassigned DNA; note = target_4ae73ce
  misc_feature 1..24: note = LF
  misc_feature 25: note = Core
  misc_feature 26..50: note = RF
gtacggctgaattttatccccccacggagccacggagggcagagaataaa

SEQ ID NO: 23400 - DNA, 50 bp, unidentified
  source 1..50: mol_type = unassigned DNA; note = target_4ae7dbe
  misc_feature 1..23: note = LF
  misc_feature 24..25: note = Core
  misc_feature 26..50: note = RF
gcttttctttcaatgcaatcatcctttctgtcctatataaacagtcccgc

SEQ ID NO: 23401 - DNA, 50 bp, unidentified
  source 1..50: mol_type = unassigned DNA; note = target_4aede08
  misc_feature 1..22: note = LF
  misc_feature 23..25: note = Core
  misc_feature 26..50: note = RF
gtcggagaatccgcgtccaatgagagttttgaatcggttggggcgaaccg

SEQ ID NO: 23402 - DNA, 50 bp, unidentified
  source 1..50: mol_type = unassigned DNA; note = target_4af68db
  misc_feature 1..24: note = LF
  misc_feature 25: note = Core
  misc_feature 26..50: note = RF
tacgggcgggaaaacatgtgcaaaccgaaggcaaacgaacttgttcgatt

SEQ ID NO: 23403 - DNA, 50 bp, unidentified
  source 1..50: mol_type = unassigned DNA; note = target_4af6c38
  misc_feature 1..24: note = LF
  misc_feature 25: note = Core
  misc_feature 26..50: note = RF
gaaagtagaagacctgaactgatctgacaatcgggcaccgtcaaaacggg

SEQ ID NO: 23404 - DNA, 50 bp, unidentified
  source 1..50: mol_type = unassigned DNA; note = target_4affdde
  misc_feature 1..23: note = LF
  misc_feature 24..25: note = Core
  misc_feature 26..50: note = RF
cttcattgatcaacttatctcacctccattcagcagtctgtccttattcc

SEQ ID NO: 23405 - DNA, 50 bp, unidentified
  source 1..50: mol_type = unassigned DNA; note = target_4b045ec
  misc_feature 1..21: note = LF
  misc_feature 22..25: note = Core
  misc_feature 26..50: note = RF
gttctgctccattatatattcctccagtaaagtgaacttgggccgctcaa

SEQ ID NO: 23406 - DNA, 50 bp, unidentified
  source 1..50: mol_type = unassigned DNA; note = target_4b0b2ad
  misc_feature 1..24: note = LF
  misc_feature 25: note = Core
  misc_feature 26..50: note = RF
acgtcagccgattacgactagccccactctccccgtaggaattcgtgatt

SEQ ID NO: 23407 - DNA, 50 bp, unidentified
  source 1..50: mol_type = unassigned DNA; note = target_4b1e62f
  misc_feature 1..23: note = LF
  misc_feature 24..25: note = Core
  misc_feature 26..50: note = RF
gcttacggcgtggcctcctgggtccggatctgcgcagcaacgctacgcgt

SEQ ID NO: 23408 - DNA, 50 bp, unidentified
  source 1..50: mol_type = unassigned DNA; note = target_4b21380
  misc_feature 1..21: note = LF
  misc_feature 22..25: note = Core
  misc_feature 26..50: note = RF
atggctatccaggagtattgcttgcctcattccaaaacaaccgaaattca

SEQ ID NO: 23409 - DNA, 50 bp, unidentified
  source 1..50: mol_type = unassigned DNA; note = target_4b26f0b
  misc_feature 1..24: note = LF
  misc_feature 25: note = Core
  misc_feature 26..50: note = RF
taccttattcaagataggcgcccgttgcggtatagtcaaatcaaggttct

SEQ ID NO: 23410 - DNA, 50 bp, unidentified
  source 1..50: mol_type = unassigned DNA; note = target_4b2837a
  misc_feature 1..24: note = LF
  misc_feature 25: note = Core
  misc_feature 26..50: note = RF
catatccagggacggcgattgacgtgacccccaattctcatccagcgata

SEQ ID NO: 23411 - DNA, 50 bp, unidentified
  source 1..50: mol_type = unassigned DNA; note = target_4b2e6fd
  misc_feature 1..23: note = LF
  misc_feature 24..25: note = Core
  misc_feature 26..50: note = RF
accgtccattcaggaaatggttcctgacaccttttcccgttctcaattcg

SEQ ID NO: 23412 - DNA, 50 bp, unidentified
  source 1..50: mol_type = unassigned DNA; note = target_4b2f5ae
  misc_feature 1..21: note = LF
  misc_feature 22..25: note = Core
  misc_feature 26..50: note = RF
tagtcaaaagccatgggtgatcctttcgtcttcggtcagcagttggtcag

SEQ ID NO: 23413 - DNA, 50 bp, unidentified
  source 1..50: mol_type = unassigned DNA; note = target_4b2fe12
  misc_feature 1..23: note = LF
  misc_feature 24..25: note = Core
  misc_feature 26..50: note = RF
aattcggtagcgatcagaggcacagcggaagtggcgggaccgcgctccaa

SEQ ID NO: 23414 - DNA, 50 bp, unidentified
  source 1..50: mol_type = unassigned DNA; note = target_4b3f42e
  misc_feature 1..23: note = LF
  misc_feature 24..25: note = Core
  misc_feature 26..50: note = RF
atctatcatcatacttatcactcctttttacttacttacctcctgcacta

SEQ ID NO: 23415 - DNA, 50 bp, unidentified
  source 1..50: mol_type = unassigned DNA; note = target_4b4081b
  misc_feature 1..24: note = LF
  misc_feature 25: note = Core
  misc_feature 26..50: note = RF
atctcaggcatatatcgctcctcctttcaaaagaatatgaggaccgaagt

SEQ ID NO: 23416 - DNA, 50 bp, unidentified
  source 1..50: mol_type = unassigned DNA; note = target_4b432da
  misc_feature 1..24: note = LF
  misc_feature 25: note = Core
  misc_feature 26..50: note = RF
cggccggcggtgacgtgacccccccacccccccccgttacccgaccgccg

SEQ ID NO: 23417 - DNA, 50 bp, unidentified
  source 1..50: mol_type = unassigned DNA; note = target_4b467b2
  misc_feature 1..24: note = LF
  misc_feature 25: note = Core
  misc_feature 26..50: note = RF
ctatcggaaaaggaaacgcgatggcgctatgggaagtaaagggatagtga

SEQ ID NO: 23418 - DNA, 50 bp, unidentified
  source 1..50: mol_type = unassigned DNA; note = target_4b482bb
  misc_feature 1..21: note = LF
  misc_feature 22..25: note = Core
  misc_feature 26..50: note = RF
gtttcttcccgacatcgcatactcctttccttcggttcgcatgggaaaga

SEQ ID NO: 23419 - DNA, 50 bp, unidentified
  source 1..50: mol_type = unassigned DNA; note = target_4b4cfc8
  misc_feature 1..23: note = LF
  misc_feature 24..25: note = Core
  misc_feature 26..50: note = RF
caatcgctcaagcaatggggccctgggttcccgctttcgctgggacgacg

SEQ ID NO: 23420 - DNA, 50 bp, unidentified
  source 1..50: mol_type = unassigned DNA; note = target_4b4db89
  misc_feature 1..23: note = LF
  misc_feature 24..25: note = Core
  misc_feature 26..50: note = RF
caccgcattcgcgagcaagcccgctcccacatttgatctccactagcttg

SEQ ID NO: 23421 - DNA, 50 bp, unidentified
  source 1..50: mol_type = unassigned DNA; note = target_4b54aa2
  misc_feature 1..23: note = LF
  misc_feature 24..25: note = Core
  misc_feature 26..50: note = RF
ggagccacatcggcgggggcttgctagccgcggcggtcggcctcggtcac

SEQ ID NO: 23422 - DNA, 50 bp, unidentified
  source 1..50: mol_type = unassigned DNA; note = target_4b63c4a
  misc_feature 1..23: note = LF
  misc_feature 24..25: note = Core
  misc_feature 26..50: note = RF
tgaaatccttcatggttactctccttatattattgcgatattatccagct

SEQ ID NO: 23423 - DNA, 50 bp, unidentified
  source 1..50: mol_type = unassigned DNA; note = target_4b654ba
  misc_feature 1..23: note = LF
  misc_feature 24..25: note = Core
  misc_feature 26..50: note = RF
ggcgcggaggcagggtctgcttgtggcgcatggctgccaactatccctca

SEQ ID NO: 23424 - DNA, 50 bp, unidentified
  source 1..50: mol_type = unassigned DNA; note = target_4b6f5fd
  misc_feature 1..23: note = LF
  misc_feature 24..25: note = Core
  misc_feature 26..50: note = RF
ggcgtccaaaaatgacccccccccccttacatcggtggcgatgatgctcc

SEQ ID NO: 23425 - DNA, 50 bp, unidentified
  source 1..50: mol_type = unassigned DNA; note = target_4b71eb0
  misc_feature 1..23: note = LF
  misc_feature 24..25: note = Core
  misc_feature 26..50: note = RF
gcatgagtcccctcctcctcctcctttctcttccctcatcataccccctc

SEQ ID NO: 23426 - DNA, 50 bp, unidentified
  source 1..50: mol_type = unassigned DNA; note = target_4b7f49b
  misc_feature 1..20: note = LF
  misc_feature 21..25: note = Core
  misc_feature 26..50: note = RF
tgcaacgccgtcgctttctcctgcttgattttcgaccctagcctgctctc

SEQ ID NO: 23427 - DNA, 50 bp, unidentified
  source 1..50: mol_type = unassigned DNA; note = target_4b8b1db
  misc_feature 1..23: note = LF
  misc_feature 24..25: note = Core
  misc_feature 26..50: note = RF
taggggccgcgcggccccacccgctcagaaggccaccgagacggagaacg

SEQ ID NO: 23428 - DNA, 50 bp, unidentified
  source 1..50: mol_type = unassigned DNA; note = target_4b8f726
  misc_feature 1..22: note = LF
  misc_feature 23..25: note = Core
  misc_feature 26..50: note = RF
ccgatcttcagctaacgcacccgtttagttgcataagaaaaggagctact

SEQ ID NO: 23429 - DNA, 50 bp, unidentified
  source 1..50: mol_type = unassigned DNA; note = target_4b9ca9e
  misc_feature 1..23: note = LF
  misc_feature 24..25: note = Core
  misc_feature 26..50: note = RF
gaaatgacaaatgatgacatatcctgctttctagtcttttcggtcatatc

SEQ ID NO: 23430 - DNA, 50 bp, unidentified
  source 1..50: mol_type = unassigned DNA; note = target_4b9ddbd
  misc_feature 1..22: note = LF
  misc_feature 23..25: note = Core
  misc_feature 26..50: note = RF
aattctctgctgagaaagggatatgccacatgccagagactcccatcacc

SEQ ID NO: 23431 - DNA, 50 bp, unidentified
  source 1..50: mol_type = unassigned DNA; note = target_4b9e710
  misc_feature 1..23: note = LF
  misc_feature 24..25: note = Core
  misc_feature 26..50: note = RF
ttctcgattattcacttgtacacctcacattatactaactaacaataatg

SEQ ID NO: 23432 - DNA, 50 bp, unidentified
  source 1..50: mol_type = unassigned DNA; note = target_4b9ef5e
  misc_feature 1..24: note = LF
  misc_feature 25: note = Core
  misc_feature 26..50: note = RF
gatcgtccggccttccgtttgcgctttttttaatctctggccagcgctca

SEQ ID NO: 23433 - DNA, 50 bp, unidentified
  source 1..50: mol_type = unassigned DNA; note = target_4ba20f1
  misc_feature 1..23: note = LF
  misc_feature 24..25: note = Core
  misc_feature 26..50: note = RF
acgtctctaccgcgtagcggtttagttctacaatatgaaatgctcattac

SEQ ID NO: 23434 - DNA, 50 bp, unidentified
  source 1..50: mol_type = unassigned DNA; note = target_4ba34b7
  misc_feature 1..23: note = LF
  misc_feature 24..25: note = Core
  misc_feature 26..50: note = RF
gctgcaacacgggcgcgtcggggtcagatcttgacatgacaggtcggact

SEQ ID NO: 23435 - DNA, 50 bp, unidentified
  source 1..50: mol_type = unassigned DNA; note = target_4ba444e
  misc_feature 1..23: note = LF
  misc_feature 24..25: note = Core
  misc_feature 26..50: note = RF
agattgccgcggtcgttcctccctcgcgatgacggtgcggcatgagtgaa

SEQ ID NO: 23436 - DNA, 50 bp, unidentified
  source 1..50: mol_type = unassigned DNA; note = target_4bb7cce
  misc_feature 1..24: note = LF
  misc_feature 25: note = Core
  misc_feature 26..50: note = RF
ccccgcgttccaggccctgacacacacccccccacgacacaaccccccac

SEQ ID NO: 23437 - DNA, 50 bp, unidentified
  source 1..50: mol_type = unassigned DNA; note = target_4bbde19
  misc_feature 1..23: note = LF
  misc_feature 24..25: note = Core
  misc_feature 26..50: note = RF
ccgaaatttcgggatccactgccatccgggctaaaagaaaagatggtttc

SEQ ID NO: 23438 - DNA, 50 bp, unidentified
  source 1..50: mol_type = unassigned DNA; note = target_4bca9e6
  misc_feature 1..23: note = LF
  misc_feature 24..25: note = Core
  misc_feature 26..50: note = RF
agattgcttcagtcgtgccttcttcgcaatgacacattgttttagtgtca

SEQ ID NO: 23439 - DNA, 50 bp, unidentified
  source 1..50: mol_type = unassigned DNA; note = target_4bd12bd
  misc_feature 1..23: note = LF
  misc_feature 24..25: note = Core
  misc_feature 26..50: note = RF
cactatattactcattatttcacctcatcttcaagaaatttaaatgcatc

SEQ ID NO: 23440 - DNA, 50 bp, unidentified
  source 1..50: mol_type = unassigned DNA; note = target_4be331a
  misc_feature 1..22: note = LF
  misc_feature 23..25: note = Core
  misc_feature 26..50: note = RF
ggatcggctcagtcatcgtgcatcctttctagcaatcattgtccgtgtta

SEQ ID NO: 23441 - DNA, 50 bp, unidentified
  source 1..50: mol_type = unassigned DNA; note = target_4c0f6b5
  misc_feature 1..24: note = LF
  misc_feature 25: note = Core
  misc_feature 26..50: note = RF
ggcgggttgccaaaggtgcagagttgtccacggtggcgggcgtcgcttgc

SEQ ID NO: 23442 - DNA, 50 bp, unidentified
  source 1..50: mol_type = unassigned DNA; note = target_4c1af9a
  misc_feature 1..23: note = LF
  misc_feature 24..25: note = Core
  misc_feature 26..50: note = RF
cgctgcgggccagcgtctgctcgtggcacttctgcgacgaacgacctccg

SEQ ID NO: 23443 - DNA, 50 bp, unidentified
  source 1..50: mol_type = unassigned DNA; note = target_4c25a00
  misc_feature 1..22: note = LF
  misc_feature 23..25: note = Core
  misc_feature 26..50: note = RF
ttgcctcttgtcggcattttcaaacgaatatttaaccgcccttccgcact

SEQ ID NO: 23444 - DNA, 50 bp, unidentified
  source 1..50: mol_type = unassigned DNA; note = target_4c2a5bc
  misc_feature 1..24: note = LF
  misc_feature 25: note = Core
  misc_feature 26..50: note = RF
agcttttgttctcacacagaatcccccccccgatctgcgtgctccaagca

SEQ ID NO: 23445 - DNA, 50 bp, unidentified
  source 1..50: mol_type = unassigned DNA; note = target_4c3a937
  misc_feature 1..24: note = LF
  misc_feature 25: note = Core
  misc_feature 26..50: note = RF
ctcgcctggcggcgggcgtcaccattttttgccagcaggtccttcagtgc

SEQ ID NO: 23446 - DNA, 50 bp, unidentified
  source 1..50: mol_type = unassigned DNA; note = target_4c41907
  misc_feature 1..24: note = LF
  misc_feature 25: note = Core
  misc_feature 26..50: note = RF
gatggacagaatggtcgactgcggcggaatgacgcgactccgacccatgg

SEQ ID NO: 23447 - DNA, 50 bp, unidentified
  source 1..50: mol_type = unassigned DNA; note = target_4c473ef
  misc_feature 1..23: note = LF
  misc_feature 24..25: note = Core
  misc_feature 26..50: note = RF
catacaaccggcgcagcttcttctggttcttcgcggaattgcggggaagg

SEQ ID NO: 23448 - DNA, 50 bp, unidentified
  source 1..50: mol_type = unassigned DNA; note = target_4c47d85
  misc_feature 1..23: note = LF
  misc_feature 24..25: note = Core
  misc_feature 26..50: note = RF
tcaggtcccgccccacgcggggcttgctttgggctcctgactgactccat

SEQ ID NO: 23449 - DNA, 50 bp, unidentified
  source 1..50: mol_type = unassigned DNA; note = target_4c4d20d
  misc_feature 1..23: note = LF
  misc_feature 24..25: note = Core
  misc_feature 26..50: note = RF
gacgtcaattcaaacaatggttcctgacaccgttttcttcgtgcattgat

SEQ ID NO: 23450 - DNA, 50 bp, unidentified
  source 1..50: mol_type = unassigned DNA; note = target_4c5cf39
  misc_feature 1..22: note = LF
  misc_feature 23..25: note = Core
  misc_feature 26..50: note = RF
gggatccaccactcacagaaggagacaagcatgaaagtaggtttaattgg

SEQ ID NO: 23451 - DNA, 50 bp, unidentified
  source 1..50: mol_type = unassigned DNA; note = target_4c60817
  misc_feature 1..21: note = LF
  misc_feature 22..25: note = Core
  misc_feature 26..50: note = RF
gtctggcgggtatccactaccatcccctaacgcaaaggtaaaaatgccca

SEQ ID NO: 23452 - DNA, 50 bp, unidentified
  source 1..50: mol_type = unassigned DNA; note = target_4c64904
  misc_feature 1..23: note = LF
  misc_feature 24..25: note = Core
  misc_feature 26..50: note = RF
gttttcagtgcttgcaacttcgtagggtgggcaaagcgcagcgtgcccac

SEQ ID NO: 23453 - DNA, 50 bp, unidentified
  source 1..50: mol_type = unassigned DNA; note = target_4c6a85c
  misc_feature 1..24: note = LF
  misc_feature 25: note = Core
  misc_feature 26..50: note = RF
cattggacctcgtctggcaccaacgtttctctggggcggcaatggccgcc

SEQ ID NO: 23454 - DNA, 50 bp, unidentified
  source 1..50: mol_type = unassigned DNA; note = target_4c6b100
  misc_feature 1..23: note = LF
  misc_feature 24..25: note = Core
  misc_feature 26..50: note = RF
taaaaatccattaatatcacctcctttgtgtcttttcatttttattttat

SEQ ID NO: 23455 - DNA, 50 bp, unidentified
  source 1..50: mol_type = unassigned DNA; note = target_4c6f89f
  misc_feature 1..24: note = LF
  misc_feature 25: note = Core
  misc_feature 26..50: note = RF
tatttaattctttcatatccatcttctcctttttaaaaattaatatgaaa

SEQ ID NO: 23456 - DNA, 50 bp, unidentified
  source 1..50: mol_type = unassigned DNA; note = target_4c72261
  misc_feature 1..23: note = LF
  misc_feature 24..25: note = Core
  misc_feature 26..50: note = RF
ttgatttttcactaacgggtgctttacttcaagaatcggggcaggttagc

SEQ ID NO: 23457 - DNA, 50 bp, unidentified
  source 1..50: mol_type = unassigned DNA; note = target_4c7cc5c
  misc_feature 1..23: note = LF
  misc_feature 24..25: note = Core
  misc_feature 26..50: note = RF
gcgtcagagccaaaattgcacgccgaaacacagctgtggtcagcaagaga

SEQ ID NO: 23458 - DNA, 50 bp, unidentified
  source 1..50: mol_type = unassigned DNA; note = target_4c800a3
  misc_feature 1..22: note = LF
  misc_feature 23..25: note = Core
  misc_feature 26..50: note = RF
gcgctgggcaccctggctgagacccccggtatctcggctccggaggcggc

SEQ ID NO: 23459 - DNA, 50 bp, unidentified
  source 1..50: mol_type = unassigned DNA; note = target_4c841c4
  misc_feature 1..23: note = LF
  misc_feature 24..25: note = Core
  misc_feature 26..50: note = RF
cgactatgccgcacatctattgtctatccagtatgttcggtctattccgt

SEQ ID NO: 23460 - DNA, 50 bp, unidentified
  source 1..50: mol_type = unassigned DNA; note = target_4c884a9
  misc_feature 1..21: note = LF
  misc_feature 22..25: note = Core
  misc_feature 26..50: note = RF
ccgctgtggggcagccgcgggctcatcggacgtcggccagggcgagcggc

SEQ ID NO: 23461 - DNA, 50 bp, unidentified
  source 1..50: mol_type = unassigned DNA; note = target_4c8879b
  misc_feature 1..23: note = LF
  misc_feature 24..25: note = Core
  misc_feature 26..50: note = RF
agatattcagacatcgttatttcctttctgatagggctctatctgcggta

SEQ ID NO: 23462 - DNA, 50 bp, unidentified
  source 1..50: mol_type = unassigned DNA; note = target_4c8f1cd
  misc_feature 1..24: note = LF
  misc_feature 25: note = Core
  misc_feature 26..50: note = RF
caccacggaagtgcgtcatcgcggcagattgggatgttcgtggggatcgg

SEQ ID NO: 23463 - DNA, 50 bp, unidentified
  source 1..50: mol_type = unassigned DNA; note = target_4cb376a
  misc_feature 1..23: note = LF
  misc_feature 24..25: note = Core
  misc_feature 26..50: note = RF
gatgggacgctcagcgtagcggcatagggggagtccgcaggacggaggac

SEQ ID NO: 23464 - DNA, 50 bp, unidentified
  source 1..50: mol_type = unassigned DNA; note = target_4cb6bdd
  misc_feature 1..23: note = LF
  misc_feature 24..25: note = Core
  misc_feature 26..50: note = RF
cactccgttacggtagcgtcaggctatactgcaatcttttatttaagcat

SEQ ID NO: 23465 - DNA, 50 bp, unidentified
  source 1..50: mol_type = unassigned DNA; note = target_4cbfd44
  misc_feature 1..24: note = LF
  misc_feature 25: note = Core
  misc_feature 26..50: note = RF
gcggccccgtgcggcgctcatatcttttttgcggcgacctctttcatcac

SEQ ID NO: 23466 - DNA, 50 bp, unidentified
  source 1..50: mol_type = unassigned DNA; note = target_4cc2679
  misc_feature 1..22: note = LF
  misc_feature 23..25: note = Core
  misc_feature 26..50: note = RF
acctttttcagctatcgcccccgtttagcacaacaagctaccctactaat

SEQ ID NO: 23467 - DNA, 50 bp, unidentified
  source 1..50: mol_type = unassigned DNA; note = target_4cca21c
  misc_feature 1..24: note = LF
  misc_feature 25: note = Core
  misc_feature 26..50: note = RF
aggaggctccaacatctgagagaaaatggagccatgaaaaaatcaaacaa

SEQ ID NO: 23468 - DNA, 50 bp, unidentified
  source 1..50: mol_type = unassigned DNA; note = target_4ccce44
  misc_feature 1..24: note = LF
  misc_feature 25: note = Core
  misc_feature 26..50: note = RF
agaatgatgcagaagccataatgacataaagtcagacggaaaagacatag

SEQ ID NO: 23469 - DNA, 50 bp, unidentified
  source 1..50: mol_type = unassigned DNA; note = target_4ccef76
  misc_feature 1..23: note = LF
  misc_feature 24..25: note = Core
  misc_feature 26..50: note = RF
aggggcgtgccggccagggacgcctcaggccatgcccgcctgctgcagaa

SEQ ID NO: 23470 - DNA, 50 bp, unidentified
  source 1..50: mol_type = unassigned DNA; note = target_4cd00be
  misc_feature 1..24: note = LF
  misc_feature 25: note = Core
  misc_feature 26..50: note = RF
tccttcgcgaagaaggccgcggcttttagaatgtcccgctcggccttcag

SEQ ID NO: 23471 - DNA, 50 bp, unidentified
  source 1..50: mol_type = unassigned DNA; note = target_4cd0b5e
  misc_feature 1..23: note = LF
  misc_feature 24..25: note = Core
  misc_feature 26..50: note = RF
tttttgcgtgatggtaagtatatctattccaaatattgtggaatggaaat

SEQ ID NO: 23472 - DNA, 50 bp, unidentified
  source 1..50: mol_type = unassigned DNA; note = target_4cd4cd3
  misc_feature 1..20: note = LF
  misc_feature 21..25: note = Core
  misc_feature 26..50: note = RF
atcatatctgaatacattctgtcacctcccttacactaacaacctttagc

SEQ ID NO: 23473 - DNA, 50 bp, unidentified
  source 1..50: mol_type = unassigned DNA; note = target_4cd84b7
  misc_feature 1..23: note = LF
  misc_feature 24..25: note = Core
  misc_feature 26..50: note = RF
aggtctgaatatactgcttgtagtggtcaactaaaactgcagccgtgagc

SEQ ID NO: 23474 - DNA, 50 bp, unidentified
  source 1..50: mol_type = unassigned DNA; note = target_4ce0868
  misc_feature 1..23: note = LF
  misc_feature 24..25: note = Core
  misc_feature 26..50: note = RF
ccgcattaattgcggtctcgtcgtttttttgaggagttcccgctcaacgc

SEQ ID NO: 23475 - DNA, 50 bp, unidentified
  source 1..50: mol_type = unassigned DNA; note = target_4ced496
  misc_feature 1..23: note = LF
  misc_feature 24..25: note = Core
  misc_feature 26..50: note = RF
gctgaacccgactgtcggcgccgctagacttgcccggccatgcccaccta

SEQ ID NO: 23476 - DNA, 50 bp, unidentified
  source 1..50: mol_type = unassigned DNA; note = target_4cf20ec
  misc_feature 1..23: note = LF
  misc_feature 24..25: note = Core
  misc_feature 26..50: note = RF
tatctaaccgtgcgcaggatctgtaggaccggcttcagccgggagggcaa

SEQ ID NO: 23477 - DNA, 50 bp, unidentified
  source 1..50: mol_type = unassigned DNA; note = target_4cf4f86
  misc_feature 1..22: note = LF
  misc_feature 23..25: note = Core
  misc_feature 26..50: note = RF
ggcccagcccaggcctgggcacctaatccggcgccacccagatcaggctg

SEQ ID NO: 23478 - DNA, 50 bp, unidentified
  source 1..50: mol_type = unassigned DNA; note = target_4d0e404
  misc_feature 1..24: note = LF
  misc_feature 25: note = Core
  misc_feature 26..50: note = RF
cagacgtttccaaaccttcatattaacaacctcctcaactttattttgtg

SEQ ID NO: 23479 - DNA, 50 bp, unidentified
  source 1..50: mol_type = unassigned DNA; note = target_4d13e30
  misc_feature 1..22: note = LF
  misc_feature 23..25: note = Core
  misc_feature 26..50: note = RF
tcagatgaaagcccagagagtcttttctattcttccatcgccgtcctcct

SEQ ID NO: 23480 - DNA, 50 bp, unidentified
  source 1..50: mol_type = unassigned DNA; note = target_4d200fa
  misc_feature 1..24: note = LF
  misc_feature 25: note = Core
  misc_feature 26..50: note = RF
gactcggacctgtgtgttcgcccccacttttttgcccggacgtgagcggt

SEQ ID NO: 23481 - DNA, 50 bp, unidentified
  source 1..50: mol_type = unassigned DNA; note = target_4d2af3e
  misc_feature 1..23: note = LF
  misc_feature 24..25: note = Core
  misc_feature 26..50: note = RF
actttgtacattcacccatcctccttattccagtccctgaaatgcaggca

SEQ ID NO: 23482 - DNA, 50 bp, unidentified
  source 1..50: mol_type = unassigned DNA; note = target_4d3145d
  misc_feature 1..23: note = LF
  misc_feature 24..25: note = Core
  misc_feature 26..50: note = RF
tcactcaccaacacatcttcgggatgacgaggtttatagtctttaagcaa

SEQ ID NO: 23483 - DNA, 50 bp, unidentified
  source 1..50: mol_type = unassigned DNA; note = target_4d34292
  misc_feature 1..22: note = LF
  misc_feature 23..25: note = Core
  misc_feature 26..50: note = RF
agttcatcgcgcagtcggccgttgaagctctcgatgaagccgttctgcat

SEQ ID NO: 23484 - DNA, 50 bp, unidentified
  source 1..50: mol_type = unassigned DNA; note = target_4d37777
  misc_feature 1..24: note = LF
  misc_feature 25: note = Core
  misc_feature 26..50: note = RF
gggtttccacacgaaaatgtgacctgcccccaagatttaggtacaaataa

SEQ ID NO: 23485 - DNA, 50 bp, unidentified
  source 1..50: mol_type = unassigned DNA; note = target_4d3a0be
  misc_feature 1..20: note = LF
  misc_feature 21..25: note = Core
  misc_feature 26..50: note = RF
ttcgtaaaaagcgtttcaccttagagtcggtctcaaaacctgaagaaaaa

SEQ ID NO: 23486 - DNA, 50 bp, unidentified
  source 1..50: mol_type = unassigned DNA; note = target_4d4894a
  misc_feature 1..23: note = LF
  misc_feature 24..25: note = Core
  misc_feature 26..50: note = RF
tttcagagggggtgacaactatcctgacactgaggggccaccgtcgatca

SEQ ID NO: 23487 - DNA, 50 bp, unidentified
  source 1..50: mol_type = unassigned DNA; note = target_4d4f18a
  misc_feature 1..23: note = LF
  misc_feature 24..25: note = Core
  misc_feature 26..50: note = RF
tgccgtaggaggcgcgggcgccactcatgaccggtcctcgagggtcgcca

SEQ ID NO: 23488 - DNA, 50 bp, unidentified
  source 1..50: mol_type = unassigned DNA; note = target_4d50786
  misc_feature 1..23: note = LF
  misc_feature 24..25: note = Core
  misc_feature 26..50: note = RF
gggtctcgcgcaagccgtgactttgcagcaaggtgatttcggtcgcagga

SEQ ID NO: 23489 - DNA, 50 bp, unidentified
  source 1..50: mol_type = unassigned DNA; note = target_4d5b1e3
  misc_feature 1..23: note = LF
  misc_feature 24..25: note = Core
  misc_feature 26..50: note = RF
caagaatttggatcagatcgttatgagtctacggcctaactcatcttctg

SEQ ID NO: 23490 - DNA, 50 bp, unidentified
  source 1..50: mol_type = unassigned DNA; note = target_4d5c6af
  misc_feature 1..23: note = LF
  misc_feature 24..25: note = Core
  misc_feature 26..50: note = RF
tacagttttgttcatattaactcctttaatttaatttctttccctatatt

SEQ ID NO: 23491 - DNA, 50 bp, unidentified
  source 1..50: mol_type = unassigned DNA; note = target_4d5ee28
  misc_feature 1..23: note = LF
  misc_feature 24..25: note = Core
  misc_feature 26..50: note = RF
gctactgatgtcggggtcaggcggcggagacgccgagtatcgggcgggcc

SEQ ID NO: 23492 - DNA, 50 bp, unidentified
  source 1..50: mol_type = unassigned DNA; note = target_4d62f2f
  misc_feature 1..24: note = LF
  misc_feature 25: note = Core
  misc_feature 26..50: note = RF
ggatatttggctcaagcaggagaaaaaacaatggcatctcggacatgcgc

SEQ ID NO: 23493 - DNA, 50 bp, unidentified
  source 1..50: mol_type = unassigned DNA; note = target_4d64827
  misc_feature 1..23: note = LF
  misc_feature 24..25: note = Core
  misc_feature 26..50: note = RF
tactttagtattcattttacctccttcccattttgtgtctttctacagta

SEQ ID NO: 23494 - DNA, 50 bp, unidentified
  source 1..50: mol_type = unassigned DNA; note = target_4d6509b
  misc_feature 1..24: note = LF
  misc_feature 25: note = Core
  misc_feature 26..50: note = RF
agccgcagatcgatgcccagatctttttttatgagttcgttagccttcgt

SEQ ID NO: 23495 - DNA, 50 bp, unidentified
  source 1..50: mol_type = unassigned DNA; note = target_4d67a07
  misc_feature 1..23: note = LF
  misc_feature 24..25: note = Core
  misc_feature 26..50: note = RF
tcgggacgagcaggcccctgactgactctttaaataatacaagttcttgc

SEQ ID NO: 23496 - DNA, 50 bp, unidentified
  source 1..50: mol_type = unassigned DNA; note = target_4d6af83
  misc_feature 1..24: note = LF
  misc_feature 25: note = Core
  misc_feature 26..50: note = RF
tttagtgttaccataaagaaacagagtaattatgtttgtgtgattgtaga

SEQ ID NO: 23497 - DNA, 50 bp, unidentified
  source 1..50: mol_type = unassigned DNA; note = target_4d78b3c
  misc_feature 1..23: note = LF
  misc_feature 24..25: note = Core
  misc_feature 26..50: note = RF
caccggccatgtctcgaacgcgcctttcacggcactgaccgatgtcccga

SEQ ID NO: 23498 - DNA, 50 bp, unidentified
  source 1..50: mol_type = unassigned DNA; note = target_4d7e79c
  misc_feature 1..23: note = LF
  misc_feature 24..25: note = Core
  misc_feature 26..50: note = RF
ccgatgcgctgcgcttatcgggcctacatgtcgcacgaactatgtaggcc

SEQ ID NO: 23499 - DNA, 50 bp, unidentified
  source 1..50: mol_type = unassigned DNA; note = target_4d80ff6
  misc_feature 1..23: note = LF
  misc_feature 24..25: note = Core
  misc_feature 26..50: note = RF
cccatggacggctggtccgaagcctgaccccaccggccatccccctgggc

SEQ ID NO: 23500 - DNA, 50 bp, unidentified
  source 1..50: mol_type = unassigned DNA; note = target_4d8991a
  misc_feature 1..23: note = LF
  misc_feature 24..25: note = Core
  misc_feature 26..50: note = RF
tttggcaaagatttcatcactccctaacatactgttaaaacctactattt

SEQ ID NO: 23501 - DNA, 50 bp, unidentified
  source 1..50: mol_type = unassigned DNA; note = target_4d89ed3
  misc_feature 1..23: note = LF
  misc_feature 24..25: note = Core
  misc_feature 26..50: note = RF
aatctcatcttcctattgatctcctttcagagcagacttgaagtctttta

SEQ ID NO: 23502 - DNA, 50 bp, unidentified
  source 1..50: mol_type = unassigned DNA; note = target_4d8f74d
  misc_feature 1..23: note = LF
  misc_feature 24..25: note = Core
  misc_feature 26..50: note = RF
atgcggctggatcggagcagggcaggggggcaaaaccgtcccaacagggt

SEQ ID NO: 23503 - DNA, 50 bp, unidentified; identical to SEQ ID NO: 21451
  source 1..50: mol_type = unassigned DNA; note = target_4d900c8
  misc_feature 1..23: note = LF
  misc_feature 24..25: note = Core
  misc_feature 26..50: note = RF

SEQ ID NO: 23504 - DNA, 50 bp, unidentified
  source 1..50: mol_type = unassigned DNA; note = target_4d9dc48
  misc_feature 1..23: note = LF
  misc_feature 24..25: note = Core
  misc_feature 26..50: note = RF
tgaccaccgtgggcagccaatagctcagtccgtaggctgacagcgggaag

SEQ ID NO: 23505 - DNA, 50 bp, unidentified
  source 1..50: mol_type = unassigned DNA; note = target_4d9f5d6
  misc_feature 1..23: note = LF
  misc_feature 24..25: note = Core
  misc_feature 26..50: note = RF
ccgaaccaccccggcacagtcccctgaaggaatggcaattccgttcaccg

SEQ ID NO: 23506 - DNA, 50 bp, unidentified
  source 1..50: mol_type = unassigned DNA; note = target_4da1e50
  misc_feature 1..23: note = LF
  misc_feature 24..25: note = Core
  misc_feature 26..50: note = RF
cgctcatctagctgatggtctcaagggtcatgtagcgcgcccgctgcacg

SEQ ID NO: 23507 - DNA, 50 bp, unidentified
  source 1..50: mol_type = unassigned DNA; note = target_4da92c6
  misc_feature 1..24: note = LF
  misc_feature 25: note = Core
  misc_feature 26..50: note = RF
gttacaacctcaagttctaatgaccgattggggataaaaaaaggctgtgt

SEQ ID NO: 23508 - DNA, 50 bp, unidentified
  source 1..50: mol_type = unassigned DNA; note = target_4db2ece
  misc_feature 1..22: note = LF
  misc_feature 23..25: note = Core
  misc_feature 26..50: note = RF
cccagaccaacaacggctctgcggacctttcggacataagctgcaacgca

SEQ ID NO: 23509 - DNA, 50 bp, unidentified
  source 1..50: mol_type = unassigned DNA; note = target_4dba40d
  misc_feature 1..23: note = LF
  misc_feature 24..25: note = Core
  misc_feature 26..50: note = RF
aagccgaggcagacggccaagatctttcggcaactgaagggagggcggca

SEQ ID NO: 23510 - DNA, 50 bp, unidentified
  source 1..50: mol_type = unassigned DNA; note = target_4dba94b
  misc_feature 1..24: note = LF
  misc_feature 25: note = Core
  misc_feature 26..50: note = RF
gtgcatgttcatggtttcatttctctttaagtaatcattaaaaattaagt

SEQ ID NO: 23511 - DNA, 50 bp, unidentified
  source 1..50: mol_type = unassigned DNA; note = target_4dbcec0
  misc_feature 1..23: note = LF
  misc_feature 24..25: note = Core
  misc_feature 26..50: note = RF
cattggattattcgaacccccgttttttgaaccgcagcccctcgcggcgc

SEQ ID NO: 23512 - DNA, 50 bp, unidentified
  source 1..50: mol_type = unassigned DNA; note = target_4dc8e7d
  misc_feature 1..23: note = LF
  misc_feature 24..25: note = Core
  misc_feature 26..50: note = RF
tacggagctctggcctcgcgcctctttcgagccacgccacggcaaggaac

SEQ ID NO: 23513 - DNA, 50 bp, unidentified
  source 1..50: mol_type = unassigned DNA; note = target_4dc98bf
  misc_feature 1..23: note = LF
  misc_feature 24..25: note = Core
  misc_feature 26..50: note = RF
tcgtgtttttactcattttttctctccctttctttttttcaacgaaaaga

SEQ ID NO: 23514 - DNA, 50 bp, unidentified
  source 1..50: mol_type = unassigned DNA; note = target_4dcdf20
  misc_feature 1..23: note = LF
  misc_feature 24..25: note = Core
  misc_feature 26..50: note = RF
aaaccggtcgcggacagagtccgctcctacacctgaccccgagcgtagga

SEQ ID NO: 23515 - DNA, 50 bp, unidentified
  source 1..50: mol_type = unassigned DNA; note = target_4dd2b63
  misc_feature 1..24: note = LF
  misc_feature 25: note = Core
  misc_feature 26..50: note = RF
ctttggtatcataactgacctctctttcaatacaaaggattcttaaacgg

SEQ ID NO: 23516 - DNA, 50 bp, unidentified
  source 1..50: mol_type = unassigned DNA; note = target_4dd9c9c
  misc_feature 1..23: note = LF
  misc_feature 24..25: note = Core
  misc_feature 26..50: note = RF
tgagcgtgatgaactcgcgccgcctcattcgatcacctcgtcggcgagcg

SEQ ID NO: 23517 - DNA, 50 bp, unidentified
  source 1..50: mol_type = unassigned DNA; note = target_4ddcc93
  misc_feature 1..23: note = LF
  misc_feature 24..25: note = Core
  misc_feature 26..50: note = RF
gctgcgccgccgtcccaccccgtaggagccccagtcaccgggcgatgcct

SEQ ID NO: 23518 - DNA, 50 bp, unidentified
  source 1..50: mol_type = unassigned DNA; note = target_4dde628
  misc_feature 1..24: note = LF
  misc_feature 25: note = Core
  misc_feature 26..50: note = RF
cgccagcccccggcccgccgcccccaccccccccgacggcgtcggcccca

SEQ ID NO: 23519 - DNA, 50 bp, unidentified
  source 1..50: mol_type = unassigned DNA; note = target_4de60b5
  misc_feature 1..23: note = LF
  misc_feature 24..25: note = Core
  misc_feature 26..50: note = RF
acgacgcttaccatcgtcgtatgcgtccatttctagcacgtggcactagt

SEQ ID NO: 23520 - DNA, 50 bp, unidentified
  source 1..50: mol_type = unassigned DNA; note = target_4dec58f
  misc_feature 1..22: note = LF
  misc_feature 23..25: note = Core
  misc_feature 26..50: note = RF
ttgaaaggttcaacaggctttttttattggcgcaacggttcgccgaagaa

SEQ ID NO: 23521 - DNA, 50 bp, unidentified
  source 1..50: mol_type = unassigned DNA; note = target_4df1d33
  misc_feature 1..23: note = LF
  misc_feature 24..25: note = Core
  misc_feature 26..50: note = RF
ggcgatgcgcggcggcctgcggccttgattccgcgcaggtggaattcgga

SEQ ID NO: 23522 - DNA, 50 bp, unidentified
  source 1..50: mol_type = unassigned DNA; note = target_4df2856
  misc_feature 1..23: note = LF
  misc_feature 24..25: note = Core
  misc_feature 26..50: note = RF
gccaccggcttagcgtgctttatttccgttttctgagacgacccctagat

SEQ ID NO: 23523 - DNA, 50 bp, unidentified
  source 1..50: mol_type = unassigned DNA; note = target_4df9ac7
  misc_feature 1..23: note = LF
  misc_feature 24..25: note = Core
  misc_feature 26..50: note = RF
atgagaataattttaaaggtaagcgtcacatttgaaccgtatcaacaaaa

SEQ ID NO: 23524 - DNA, 50 bp, unidentified
  source 1..50: mol_type = unassigned DNA; note = target_4dfe501
  misc_feature 1..23: note = LF
  misc_feature 24..25: note = Core
  misc_feature 26..50: note = RF
ctgtcaccttccgaaaacaaagctgtcattcgcatttgccagctcgaacc

SEQ ID NO: 23525 - DNA, 50 bp, unidentified
  source 1..50: mol_type = unassigned DNA; note = target_4e00acc
  misc_feature 1..23: note = LF
  misc_feature 24..25: note = Core
  misc_feature 26..50: note = RF
cctcgttatgaaaataacggggttttttgtgcttgtggttagcgctaaac

SEQ ID NO: 23526 - DNA, 50 bp, unidentified
  source 1..50: mol_type = unassigned DNA; note = target_4e0b18c
  misc_feature 1..24: note = LF
  misc_feature 25: note = Core
  misc_feature 26..50: note = RF
ctgccaatctttgatcaccattctctttccttttgtgtctaagcttgctg

SEQ ID NO: 23527 - DNA, 50 bp, unidentified
  source 1..50: mol_type = unassigned DNA; note = target_4e22371
  misc_feature 1..23: note = LF
  misc_feature 24..25: note = Core
  misc_feature 26..50: note = RF
aaggtcccggtgtccatgccattagcccacattatgcataaagtaccagc

SEQ ID NO: 23528 - DNA, 50 bp, unidentified
  source 1..50: mol_type = unassigned DNA; note = target_4e259a8
  misc_feature 1..24: note = LF
  misc_feature 25: note = Core
  misc_feature 26..50: note = RF
ctacgaccgcagtgggttggttaccggacataggccagggaatctccgcg

SEQ ID NO: 23529 - DNA, 50 bp, unidentified
  source 1..50: mol_type = unassigned DNA; note = target_4e26f20
  misc_feature 1..23: note = LF
  misc_feature 24..25: note = Core
  misc_feature 26..50: note = RF
ccaatgtccgctatacccccaatagcgaccaatgcaccgcagcaaacaac

SEQ ID NO: 23530 - DNA, 50 bp, unidentified
  source 1..50: mol_type = unassigned DNA; note = target_4e2aa95
  misc_feature 1..23: note = LF
  misc_feature 24..25: note = Core
  misc_feature 26..50: note = RF
gcagtcgtctccctaacccccacctgacagtaaagcaggagcgcagaatc

SEQ ID NO: 23531 - DNA, 50 bp, unidentified
  source 1..50: mol_type = unassigned DNA; note = target_4e2ee4b
  misc_feature 1..23: note = LF
  misc_feature 24..25: note = Core
  misc_feature 26..50: note = RF
ctcgctggtcgccggccccccctttttcgcccgcaggctcgaagccgtgc

SEQ ID NO: 23532 - DNA, 50 bp, unidentified
  source 1..50: mol_type = unassigned DNA; note = target_4e34f9c
  misc_feature 1..23: note = LF
  misc_feature 24..25: note = Core
  misc_feature 26..50: note = RF
taaaagtggaattcctaataatcctttcttcttgcaaaatctccgtaaat

SEQ ID NO: 23533 - DNA, 50 bp, unidentified
  source 1..50: mol_type = unassigned DNA; note = target_4e37fc0
  misc_feature 1..22: note = LF
  misc_feature 23..25: note = Core
  misc_feature 26..50: note = RF
aatggaaactagtaattattaggagatgaaatgaaaaggtttttaagtag

SEQ ID NO: 23534 - DNA, 50 bp, unidentified
  source 1..50: mol_type = unassigned DNA; note = target_4e441ec
  misc_feature 1..23: note = LF
  misc_feature 24..25: note = Core
  misc_feature 26..50: note = RF
tgacatggaacctctccggcctttttctatgtccagaaaaagtaagattg

SEQ ID NO: 23535 - DNA, 50 bp, unidentified
  source 1..50: mol_type = unassigned DNA; note = target_4e4b74d
  misc_feature 1..23: note = LF
  misc_feature 24..25: note = Core
  misc_feature 26..50: note = RF
ttagtctcgcgaacttccgattatggcacaaagcgccagtttgagtcgcc

SEQ ID NO: 23536 - DNA, 50 bp, unidentified
  source 1..50: mol_type = unassigned DNA; note = target_4e52b01
  misc_feature 1..23: note = LF
  misc_feature 24..25: note = Core
  misc_feature 26..50: note = RF
ttaatctcacccttcgactccgctcagggtgacataattcgacaggctta

SEQ ID NO: 23537 - DNA, 50 bp, unidentified
  source 1..50: mol_type = unassigned DNA; note = target_4e55af3
  misc_feature 1..23: note = LF
  misc_feature 24..25: note = Core
  misc_feature 26..50: note = RF
tcctcggggtggaaagtctggggtcaggcctgagtagttgactttcgttc

SEQ ID NO: 23538 - DNA, 50 bp, unidentified
  source 1..50: mol_type = unassigned DNA; note = target_4e57ff5
  misc_feature 1..23: note = LF
  misc_feature 24..25: note = Core
  misc_feature 26..50: note = RF
gggattttcgcggacaaggtccgctcctacaggatgacgccgaaccctca

SEQ ID NO: 23539 - DNA, 50 bp, unidentified
  source 1..50: mol_type = unassigned DNA; note = target_4e590f9
  misc_feature 1..23: note = LF
  misc_feature 24..25: note = Core
  misc_feature 26..50: note = RF
gctccgcccccagcggtggcgacctagaccgggcccggcggccagcggcg

SEQ ID NO: 23540 - DNA, 50 bp, unidentified
  source 1..50: mol_type = unassigned DNA; note = target_4e68b74
  misc_feature 1..24: note = LF
  misc_feature 25: note = Core
  misc_feature 26..50: note = RF
atcgctttcaaatccgtccccctttttcgcgtccaatttcgaccccctga

SEQ ID NO: 23541 - DNA, 50 bp, unidentified
  source 1..50: mol_type = unassigned DNA; note = target_4e819fc
  misc_feature 1..23: note = LF
  misc_feature 24..25: note = Core
  misc_feature 26..50: note = RF
ggcgcccttgtggctgccaagattgtccatgatcacgatgtcgtcccgcg

SEQ ID NO: 23542 - DNA, 50 bp, unidentified
  source 1..50: mol_type = unassigned DNA; note = target_4e8c39a
  misc_feature 1..23: note = LF
  misc_feature 24..25: note = Core
  misc_feature 26..50: note = RF
aattactgaatcttgattaactccttttttattgattctttcggtatgaa

SEQ ID NO: 23543 - DNA, 50 bp, unidentified
  source 1..50: mol_type = unassigned DNA; note = target_4e9459c
  misc_feature 1..23: note = LF
  misc_feature 24..25: note = Core
  misc_feature 26..50: note = RF
tgttgtcgcgcgctggagcacccctcatccgaccgcgcttgcgcgcggcc

SEQ ID NO: 23544 - DNA, 50 bp, unidentified
  source 1..50: mol_type = unassigned DNA; note = target_4e979a5
  misc_feature 1..23: note = LF
  misc_feature 24..25: note = Core
  misc_feature 26..50: note = RF
catgggattgccacggcttcgcctcgcaatgacaaattcattgattctaa

SEQ ID NO: 23545 - DNA, 50 bp, unidentified
  source 1..50: mol_type = unassigned DNA; note = target_4eaa831
  misc_feature 1..22: note = LF
  misc_feature 23..25: note = Core
  misc_feature 26..50: note = RF
cgctgtttatttttatatactcctttttagtctgttcgaatacatgatta

SEQ ID NO: 23546 - DNA, 50 bp, unidentified
  source 1..50: mol_type = unassigned DNA; note = target_4ec11f5
  misc_feature 1..24: note = LF
  misc_feature 25: note = Core
  misc_feature 26..50: note = RF
aatggcaataggttttttgtagggtgggtcatgacccaccatttctttaa

SEQ ID NO: 23547 - DNA, 50 bp, unidentified
  source 1..50: mol_type = unassigned DNA; note = target_4ec4e4c
  misc_feature 1..23: note = LF
  misc_feature 24..25: note = Core
  misc_feature 26..50: note = RF
accgggcgagggacaccatggcttccttccctgaggtgggcggggtccgc

SEQ ID NO: 23548 - DNA, 50 bp, unidentified
  source 1..50: mol_type = unassigned DNA; note = target_4ec64b7
  misc_feature 1..24: note = LF
  misc_feature 25: note = Core
  misc_feature 26..50: note = RF
caagaggctattaagcctccgcagggtgtccgacgatcgccacccccaca

SEQ ID NO: 23549 - DNA, 50 bp, unidentified
  source 1..50: mol_type = unassigned DNA; note = target_4ecbfcd
  misc_feature 1..23: note = LF
  misc_feature 24..25: note = Core
  misc_feature 26..50: note = RF
agctattttagctagctcggaaatgtccaaaagtttcggtcggcttactt

SEQ ID NO: 23550 - DNA, 50 bp, unidentified
  source 1..50: mol_type = unassigned DNA; note = target_4ee0909
  misc_feature 1..23: note = LF
  misc_feature 24..25: note = Core
  misc_feature 26..50: note = RF
gaaagagaagtacaatgaactcctctctgaaacacggcatacctcataac

SEQ ID NO: 23551 - DNA, 50 bp, unidentified
  source 1..50: mol_type = unassigned DNA; note = target_4ee6b8d
  misc_feature 1..22: note = LF
  misc_feature 23..25: note = Core
  misc_feature 26..50: note = RF
ttatcccggaatgatccgggtattttatttcccgggaaatgaaacgatgg

SEQ ID NO: 23552 - DNA, 50 bp, unidentified
  source 1..50: mol_type = unassigned DNA; note = target_4eeee3d
  misc_feature 1..21: note = LF
  misc_feature 22..25: note = Core
  misc_feature 26..50: note = RF
ccgacgttccggatgacagtcgcttaatcattacgttgccatttcttcct

SEQ ID NO: 23553 - DNA, 50 bp, unidentified
  source 1..50: mol_type = unassigned DNA; note = target_4ef02f7
  misc_feature 1..23: note = LF
  misc_feature 24..25: note = Core
  misc_feature 26..50: note = RF
ggaggcctctatccggtccatattcgaatgggtcacacgaggctgcagct

SEQ ID NO: 23554 - DNA, 50 bp, unidentified
  source 1..50: mol_type = unassigned DNA; note = target_4f0b0a6
  misc_feature 1..24: note = LF
  misc_feature 25: note = Core
  misc_feature 26..50: note = RF
tcggcaggaccccgctcaacgcggcagatgagtgcgttctagcgacccag

SEQ ID NO: 23555 - DNA, 50 bp, unidentified
  source 1..50: mol_type = unassigned DNA; note = target_4f0e638
  misc_feature 1..21: note = LF
  misc_feature 22..25: note = Core
  misc_feature 26..50: note = RF
ctggtggtgatcgcgagtccgctcatgacagctcctccttgatccggctg

SEQ ID NO: 23556 - DNA, 50 bp, unidentified
  source 1..50: mol_type = unassigned DNA; note = target_4f15322
  misc_feature 1..24: note = LF
  misc_feature 25: note = Core
  misc_feature 26..50: note = RF
gatcactttctcacaggcacgcaacgggcacgaccatcggatcgccagct

SEQ ID NO: 23557 - DNA, 50 bp, unidentified
  source 1..50: mol_type = unassigned DNA; note = target_4f195a6
  misc_feature 1..23: note = LF
  misc_feature 24..25: note = Core
  misc_feature 26..50: note = RF
taccgctatcgcgagcaagctcgctcccacatttggaattgtgttgggcc

SEQ ID NO: 23558 - DNA, 50 bp, unidentified
  source 1..50: mol_type = unassigned DNA; note = target_4f1f7b9
  misc_feature 1..24: note = LF
  misc_feature 25: note = Core
  misc_feature 26..50: note = RF
caactggatcccggcaatccatgccgggatgacgatttgtgtagatacct

SEQ ID NO: 23559 - DNA, 50 bp, unidentified
  source 1..50: mol_type = unassigned DNA; note = target_4f24618
  misc_feature 1..23: note = LF
  misc_feature 24..25: note = Core
  misc_feature 26..50: note = RF
ggaggtgtttgcaattctaggtgctattcaatcatcaaaatctcttttat

SEQ ID NO: 23560 - DNA, 50 bp, unidentified
  source 1..50: mol_type = unassigned DNA; note = target_4f24ae3
  misc_feature 1..23: note = LF
  misc_feature 24..25: note = Core
  misc_feature 26..50: note = RF
cgctgcgaggggtcagcctgtttagtcccggcatttgctggagcggattg

SEQ ID NO: 23561 - DNA, 50 bp, unidentified
  source 1..50: mol_type = unassigned DNA; note = target_4f28bc2
  misc_feature 1..22: note = LF
  misc_feature 23..25: note = Core
  misc_feature 26..50: note = RF
cagagactggttcgctttcgtctgacaatgccatttcaatatttttttga

SEQ ID NO: 23562 - DNA, 50 bp, unidentified
  source 1..50: mol_type = unassigned DNA; note = target_4f35dba
  misc_feature 1..24: note = LF
  misc_feature 25: note = Core
  misc_feature 26..50: note = RF
tatacggaaccgtacgtacggtggtgtgagaggacggcggctgcgaagcc

SEQ ID NO: 23563 - DNA, 50 bp, unidentified
  source 1..50: mol_type = unassigned DNA; note = target_4f38058
  misc_feature 1..22: note = LF
  misc_feature 23..25: note = Core
  misc_feature 26..50: note = RF
aaccctggttgttgatttccactgaggaactcgatggcgcaccgctggcc

SEQ ID NO: 23564 - DNA, 50 bp, unidentified
  source 1..50: mol_type = unassigned DNA; note = target_4f4a5c7
  misc_feature 1..23: note = LF
  misc_feature 24..25: note = Core
  misc_feature 26..50: note = RF
ttacggctagcgcctaacccgacctacgcaagtgctttgtgccgtcttaa

SEQ ID NO: 23565 - DNA, 50 bp, unidentified
  source 1..50: mol_type = unassigned DNA; note = target_4f4c3ef
  misc_feature 1..22: note = LF
  misc_feature 23..25: note = Core
  misc_feature 26..50: note = RF
cgatattaggacctaactttcaatttgtaggggtggttaatgactaagaa

SEQ ID NO: 23566 - DNA, 50 bp, unidentified
  source 1..50: mol_type = unassigned DNA; note = target_4f51f44
  misc_feature 1..24: note = LF
  misc_feature 25: note = Core
  misc_feature 26..50: note = RF
acgagcagggtccaaacatagagtttcgtaacagtcccccaccggtgttt

SEQ ID NO: 23567 - DNA, 50 bp, unidentified
  source 1..50: mol_type = unassigned DNA; note = target_4f5a43d
  misc_feature 1..24: note = LF
  misc_feature 25: note = Core
  misc_feature 26..50: note = RF
tgattgctggcataaaacacctcctatttgataacaaaattatacataaa

SEQ ID NO: 23568 - DNA, 50 bp, unidentified
  source 1..50: mol_type = unassigned DNA; note = target_4f604b0
  misc_feature 1..23: note = LF
  misc_feature 24..25: note = Core
  misc_feature 26..50: note = RF
ttggcctctgtgtgttttctggtaggggcagaaaatcttgagcccggtca

SEQ ID NO: 23569 - DNA, 50 bp, unidentified
  source 1..50: mol_type = unassigned DNA; note = target_4f61775
  misc_feature 1..24: note = LF
  misc_feature 25: note = Core
  misc_feature 26..50: note = RF
acaacagacgttatcgatcgagtttgaccctaatactgctgctaatactg

SEQ ID NO: 23570 - DNA, 50 bp, unidentified
  source 1..50: mol_type = unassigned DNA; note = target_4f6a81e
  misc_feature 1..24: note = LF
  misc_feature 25: note = Core
  misc_feature 26..50: note = RF
atgcatgccgttcgtcaaaagatctgtgtaatagaaagatcttaatgctc

SEQ ID NO: 23571 - DNA, 50 bp, unidentified
  source 1..50: mol_type = unassigned DNA; note = target_4f6ab98
  misc_feature 1..24: note = LF
  misc_feature 25: note = Core
  misc_feature 26..50: note = RF
cagagagcgaatggcgatgtccgttttgggtcagcctcgacccgttcacg

SEQ ID NO: 23572 - DNA, 50 bp, unidentified
  source 1..50: mol_type = unassigned DNA; note = target_4f753c9
  misc_feature 1..23: note = LF
  misc_feature 24..25: note = Core
  misc_feature 26..50: note = RF
attcggagcaatgctcctcgcaatgacgagaaacaagtctcggggccgcg

SEQ ID NO: 23573 - DNA, 50 bp, unidentified
  source 1..50: mol_type = unassigned DNA; note = target_4f7f223
  misc_feature 1..24: note = LF
  misc_feature 25: note = Core
  misc_feature 26..50: note = RF
gtgccatccggaccgcggctgtgtccccccgtaggcgccgtctcgacgaa

SEQ ID NO: 23574 - DNA, 50 bp, unidentified
  source 1..50: mol_type = unassigned DNA; note = target_4f88d95
  misc_feature 1..21: note = LF
  misc_feature 22..25: note = Core
  misc_feature 26..50: note = RF
ccaaatcatatcccgcgttttttttcgtgcaatgatgtattaggaaagga

SEQ ID NO: 23575 - DNA, 50 bp, unidentified
  source 1..50: mol_type = unassigned DNA; note = target_4f9b312
  misc_feature 1..23: note = LF
  misc_feature 24..25: note = Core
  misc_feature 26..50: note = RF
ccatgcaggatgaagttttcagtagggacaggtaagattagctgctcgat

SEQ ID NO: 23576 - DNA, 50 bp, unidentified
  source 1..50: mol_type = unassigned DNA; note = target_4f9ce99
  misc_feature 1..24: note = LF
  misc_feature 25: note = Core
  misc_feature 26..50: note = RF
tgtgcgattgatcggacgcctaacgttcgcagtcaccagcgcgcgcggtc

SEQ ID NO: 23577 - DNA, 50 bp, unidentified
  source 1..50: mol_type = unassigned DNA; note = target_4f9e4a2
  misc_feature 1..22: note = LF
  misc_feature 23..25: note = Core
  misc_feature 26..50: note = RF
atcccaaatgtagtagctttatagaaatgtcgtgttctgctctgggtatg

SEQ ID NO: 23578 - DNA, 50 bp, unidentified
  source 1..50: mol_type = unassigned DNA; note = target_4f9fae4
  misc_feature 1..24: note = LF
  misc_feature 25: note = Core
  misc_feature 26..50: note = RF
tattattacgttctaatactttatttcagtctagtacttcatttttttga

SEQ ID NO: 23579 - DNA, 50 bp, unidentified
  source 1..50: mol_type = unassigned DNA; note = target_4fa16f3
  misc_feature 1..23: note = LF
  misc_feature 24..25: note = Core
  misc_feature 26..50: note = RF
tcgggctgccctttcttttggttcttttctttgggcacacaaagaaaaga

SEQ ID NO: 23580 - DNA, 50 bp, unidentified
  source 1..50: mol_type = unassigned DNA; note = target_4faade5
  misc_feature 1..23: note = LF
  misc_feature 24..25: note = Core
  misc_feature 26..50: note = RF
gaccgcttttcgatcagatagcagacgttcgcgacggctaggttaaatgg

SEQ ID NO: 23581 - DNA, 50 bp, unidentified
  source 1..50: mol_type = unassigned DNA; note = target_4fab5d1
  misc_feature 1..22: note = LF
  misc_feature 23..25: note = Core
  misc_feature 26..50: note = RF
tgttgccatttctctttacctcctttattcctttaaaatttccatataca

SEQ ID NO: 23582 - DNA, 50 bp, unidentified
  source 1..50: mol_type = unassigned DNA; note = target_4fab7b4
  misc_feature 1..24: note = LF
  misc_feature 25: note = Core
  misc_feature 26..50: note = RF
agtaaagtgctttcatgaaaacctctattttgaaaagtattgcatggggt

SEQ ID NO: 23583 - DNA, 50 bp, unidentified
  source 1..50: mol_type = unassigned DNA; note = target_4fb2ae5
  misc_feature 1..22: note = LF
  misc_feature 23..25: note = Core
  misc_feature 26..50: note = RF
gcatataacctttttctcataataatttcctttcttccatattatgtatc

SEQ ID NO: 23584 - DNA, 50 bp, unidentified
  source 1..50: mol_type = unassigned DNA; note = target_4fb78b6
  misc_feature 1..22: note = LF
  misc_feature 23..25: note = Core
  misc_feature 26..50: note = RF
ttgtgccataactttcacctcctttgtctgatataatcatagcacaggct

SEQ ID NO: 23585 - DNA, 50 bp, unidentified
  source 1..50: mol_type = unassigned DNA; note = target_4fbc51a
  misc_feature 1..23: note = LF
  misc_feature 24..25: note = Core
  misc_feature 26..50: note = RF
ccacttgtctgtctcatgtcccactcctcagtggttacgatgagccaaca

SEQ ID NO: 23586 - DNA, 50 bp, unidentified
  source 1..50: mol_type = unassigned DNA; note = target_4fc88ab
  misc_feature 1..24: note = LF
  misc_feature 25: note = Core
  misc_feature 26..50: note = RF
tggaagacgctgcgcgtttcccactttcccaccgcacggcgactgcgggg

SEQ ID NO: 23587 - DNA, 50 bp, unidentified
  source 1..50: mol_type = unassigned DNA; note = target_4fca984
  misc_feature 1..24: note = LF
  misc_feature 25: note = Core
  misc_feature 26..50: note = RF
gatttttgaccaccagccccagggcggaacggactggggctggcgtgaat

SEQ ID NO: 23588 - DNA, 50 bp, unidentified
  source 1..50: mol_type = unassigned DNA; note = target_4fe2762
  misc_feature 1..24: note = LF
  misc_feature 25: note = Core
  misc_feature 26..50: note = RF
tccgtacctgaataaccatttaacgctgagcacagttgcaaaaatatatg

SEQ ID NO: 23589 - DNA, 50 bp, unidentified
  source 1..50: mol_type = unassigned DNA; note = target_4fe3b7b
  misc_feature 1..22: note = LF
  misc_feature 23..25: note = Core
  misc_feature 26..50: note = RF
cctccagccccagccagcatcttgaatcacaaatgcgcccgagtcgggaa

SEQ ID NO: 23590 - DNA, 50 bp, unidentified
  source 1..50: mol_type = unassigned DNA; note = target_4fe4fbb
  misc_feature 1..23: note = LF
  misc_feature 24..25: note = Core
  misc_feature 26..50: note = RF
agcctgctagtacctcccgtcattgattctgaggttgatccatgactctc

SEQ ID NO: 23591 - DNA, 50 bp, unidentified
  source 1..50: mol_type = unassigned DNA; note = target_4fe7ea5
  misc_feature 1..21: note = LF
  misc_feature 22..25: note = Core
  misc_feature 26..50: note = RF
gatgcccgccgccgtgaggatctcccagaccgtcgtcgagccgaccgggt

SEQ ID NO: 23592 - DNA, 50 bp, unidentified
  source 1..50: mol_type = unassigned DNA; note = target_4fe83c3
  misc_feature 1..23: note = LF
  misc_feature 24..25: note = Core
  misc_feature 26..50: note = RF
tcatcttttggctctgatcaatgagtcctgaccctagtctaaaatacaaa

SEQ ID NO: 23593 - DNA, 50 bp, unidentified
  source 1..50: mol_type = unassigned DNA; note = target_4fefdc0
  misc_feature 1..22: note = LF
  misc_feature 23..25: note = Core
  misc_feature 26..50: note = RF
tcttaaagctttatgctttctttttttatggacaaaatttgttctttatt

SEQ ID NO: 23594 - DNA, 50 bp, unidentified
  source 1..50: mol_type = unassigned DNA; note = target_4ff4ab3
  misc_feature 1..23: note = LF
  misc_feature 24..25: note = Core
  misc_feature 26..50: note = RF
gttttaacggcttatgtcgtgctctccccggtgaccgggctcttttgcca

SEQ ID NO: 23595 - DNA, 50 bp, unidentified
  source 1..50: mol_type = unassigned DNA; note = target_5006549
  misc_feature 1..22: note = LF
  misc_feature 23..25: note = Core
  misc_feature 26..50: note = RF
acttccgcgcggctgtggccgcccccccgcaccatcatgtggacgcgcac

SEQ ID NO: 23596 - DNA, 50 bp, unidentified
  source 1..50: mol_type = unassigned DNA; note = target_501a826
  misc_feature 1..23: note = LF
  misc_feature 24..25: note = Core
  misc_feature 26..50: note = RF
ggcttcaccgcaacccgcccctcctgtctgtcttgtggccgtattgtcca

SEQ ID NO: 23597 - DNA, 50 bp, unidentified
  source 1..50: mol_type = unassigned DNA; note = target_501c9fe
  misc_feature 1..24: note = LF
  misc_feature 25: note = Core
  misc_feature 26..50: note = RF
gccctcctcgggagcctccccaacttttgcacgctctcgtctacgtcggt

SEQ ID NO: 23598 - DNA, 50 bp, unidentified
  source 1..50: mol_type = unassigned DNA; note = target_501f83a
  misc_feature 1..23: note = LF
  misc_feature 24..25: note = Core
  misc_feature 26..50: note = RF
caatgtcgccctaaaggaacgacctacactgattgtgaaactcgaaactc

SEQ ID NO: 23599 - DNA, 50 bp, unidentified
  source 1..50: mol_type = unassigned DNA; note = target_501ff46
  misc_feature 1..24: note = LF
  misc_feature 25: note = Core
  misc_feature 26..50: note = RF
gaggttcatcaacccgataggtgccgttcacgacgccgggtaacaccacc

SEQ ID NO: 23600 - DNA, 50 bp, unidentified
  source 1..50: mol_type = unassigned DNA; note = target_501ff69
  misc_feature 1..23: note = LF
  misc_feature 24..25: note = Core
  misc_feature 26..50: note = RF
ctcgtatgggtacccgacccagcccccccggatcgacccacgacgcgaaa

SEQ ID NO: 23601 - DNA, 50 bp, unidentified
  source 1..50: mol_type = unassigned DNA; note = target_50246d0
  misc_feature 1..22: note = LF
  misc_feature 23..25: note = Core
  misc_feature 26..50: note = RF
tcgttctcgaatcccatcatggaagggccttagtgccgattccggagaga

SEQ ID NO: 23602 - DNA, 50 bp, unidentified
  source 1..50: mol_type = unassigned DNA; note = target_50264c4
  misc_feature 1..22: note = LF
  misc_feature 23..25: note = Core
  misc_feature 26..50: note = RF
tttataaaaaagagaggggtgtcatgctgaggcactcaagcatgagggca

SEQ ID NO: 23603 - DNA, 50 bp, unidentified
  source 1..50: mol_type = unassigned DNA; note = target_502d553
  misc_feature 1..22: note = LF
  misc_feature 23..25: note = Core
  misc_feature 26..50: note = RF
tgtgttgattgtcaccgagaactgaacaggtcgacgacccgcttgggctc

SEQ ID NO: 23604 - DNA, 50 bp, unidentified
  source 1..50: mol_type = unassigned DNA; note = target_502f696
  misc_feature 1..23: note = LF
  misc_feature 24..25: note = Core
  misc_feature 26..50: note = RF
tccacaataccgaggcgcgccggaggtaaccatgccgatgtttggtctgg

SEQ ID NO: 23605 - DNA, 50 bp, unidentified
  source 1..50: mol_type = unassigned DNA; note = target_503a7a5
  misc_feature 1..24: note = LF
  misc_feature 25: note = Core
  misc_feature 26..50: note = RF
tttcattgtgcggtgccgctaacgtacattcttcgagaatgaacataatc

SEQ ID NO: 23606 - DNA, 50 bp, unidentified
  source 1..50: mol_type = unassigned DNA; note = target_503ea9b
  misc_feature 1..23: note = LF
  misc_feature 24..25: note = Core
  misc_feature 26..50: note = RF
ttctccattgcgccaaatgcctccttcttatgcttactaccagcccataa

SEQ ID NO: 23607 - DNA, 50 bp, unidentified
  source 1..50: mol_type = unassigned DNA; note = target_503ed78
  misc_feature 1..24: note = LF
  misc_feature 25: note = Core
  misc_feature 26..50: note = RF
ggcgcaagagagttttccccttttcacccccctttttcgccgaagcagcc

SEQ ID NO: 23608 - DNA, 50 bp, unidentified
  source 1..50: mol_type = unassigned DNA; note = target_5042629
  misc_feature 1..23: note = LF
  misc_feature 24..25: note = Core
  misc_feature 26..50: note = RF
ataataccatattccatgtttttctccttatataaagttcaaaaccagaa

SEQ ID NO: 23609 - DNA, 50 bp, unidentified
  source 1..50: mol_type = unassigned DNA; note = target_5042eab
  misc_feature 1..23: note = LF
  misc_feature 24..25: note = Core
  misc_feature 26..50: note = RF
gcggagggcatggcacaggcaattgggggcaggaggggaacttggaactg

SEQ ID NO: 23610 - DNA, 50 bp, unidentified
  source 1..50: mol_type = unassigned DNA; note = target_504a1ca
  misc_feature 1..23: note = LF
  misc_feature 24..25: note = Core
  misc_feature 26..50: note = RF
ggtcgcgaatgaccagccgagcgctagaaccgctcatgcctttcgaagtc

SEQ ID NO: 23611 - DNA, 50 bp, unidentified
  source 1..50: mol_type = unassigned DNA; note = target_505be13
  misc_feature 1..22: note = LF
  misc_feature 23..25: note = Core
  misc_feature 26..50: note = RF
atatttaaggttagacttacgaagtttctaaaacttcgtaagtcttttct

SEQ ID NO: 23612 - DNA, 50 bp, unidentified
  source 1..50: mol_type = unassigned DNA; note = target_506a062
  misc_feature 1..23: note = LF
  misc_feature 24..25: note = Core
  misc_feature 26..50: note = RF
cgctcttaatgcgggtcctgacgtgttttctccttccagcagcaggtgag

SEQ ID NO: 23613 - DNA, 50 bp, unidentified
  source 1..50: mol_type = unassigned DNA; note = target_506a498
  misc_feature 1..23: note = LF
  misc_feature 24..25: note = Core
  misc_feature 26..50: note = RF
tatttaatttcattttttctttcctatcctttcattaattcttcaaatgc

SEQ ID NO: 23614 - DNA, 50 bp, unidentified
  source 1..50: mol_type = unassigned DNA; note = target_506ec25
  misc_feature 1..23: note = LF
  misc_feature 24..25: note = Core
  misc_feature 26..50: note = RF
tacggcattcgcgagcaagctcgctcccacaggatcggggtcgactcagt

SEQ ID NO: 23615 - DNA, 50 bp, unidentified
  source 1..50: mol_type = unassigned DNA; note = target_5074c3e
  misc_feature 1..23: note = LF
  misc_feature 24..25: note = Core
  misc_feature 26..50: note = RF
caagcctaaccaaaaaatccagctgaccgttggcagcgcagacgtttcca

SEQ ID NO: 23616 - DNA, 50 bp, unidentified
  source 1..50: mol_type = unassigned DNA; note = target_5075ccb
  misc_feature 1..24: note = LF
  misc_feature 25: note = Core
  misc_feature 26..50: note = RF
cggggtagtttcccacaaccccgttttgcgggatggactcaagtgacgga

SEQ ID NO: 23617 - DNA, 50 bp, unidentified
  source 1..50: mol_type = unassigned DNA; note = target_50816a5
  misc_feature 1..23: note = LF
  misc_feature 24..25: note = Core
  misc_feature 26..50: note = RF
aagaaaagaaggtttaaccaccgagggcacggagccgctgcgcttcacag

SEQ ID NO: 23618 - DNA, 50 bp, unidentified
  source 1..50: mol_type = unassigned DNA; note = target_5084a4a
  misc_feature 1..23: note = LF
  misc_feature 24..25: note = Core
  misc_feature 26..50: note = RF
agcggtccgccgcccggccgagcctacaggggtgaggcaagcgtgttgcg

SEQ ID NO: 23619 - DNA, 50 bp, unidentified
  source 1..50: mol_type = unassigned DNA; note = target_508b6a3
  misc_feature 1..22: note = LF
  misc_feature 23..25: note = Core
  misc_feature 26..50: note = RF
gcttcggtgttgccggatacacagaaggtcggacactctcagttgcaggc

SEQ ID NO: 23620 - DNA, 50 bp, unidentified
  source 1..50: mol_type = unassigned DNA; note = target_50947e2
  misc_feature 1..24: note = LF
  misc_feature 25: note = Core
  misc_feature 26..50: note = RF
ttcgactgaggagctgatcgtaagcgtccgctgatggccgtgtagacgcg

SEQ ID NO: 23621 - DNA, 50 bp, unidentified
  source 1..50: mol_type = unassigned DNA; note = target_50a0179
  misc_feature 1..23: note = LF
  misc_feature 24..25: note = Core
  misc_feature 26..50: note = RF
gtgggcagaatttgctcgccatttttttatagttaaaatcaaatttgaaa

SEQ ID NO: 23622 - DNA, 50 bp, unidentified
  source 1..50: mol_type = unassigned DNA; note = target_50ae7d0
  misc_feature 1..23: note = LF
  misc_feature 24..25: note = Core
  misc_feature 26..50: note = RF
aaaggtcgccatgaatggcgaccctacggaaggcatgtgcgaatgtaggg

SEQ ID NO: 23623 - DNA, 50 bp, unidentified
  source 1..50: mol_type = unassigned DNA; note = target_50bbb0b
  misc_feature 1..24: note = LF
  misc_feature 25: note = Core
  misc_feature 26..50: note = RF
atatgcgcatgcgcagtattataatgttatgtctgggagctctaaattga

SEQ ID NO: 23624 - DNA, 50 bp, unidentified
  source 1..50: mol_type = unassigned DNA; note = target_50c4116
  misc_feature 1..24: note = LF
  misc_feature 25: note = Core
  misc_feature 26..50: note = RF
gtacgccgtgacaggaggcagggaaatcgcttttaaagaggaggctccgc

SEQ ID NO: 23625 - DNA, 50 bp, unidentified
  source 1..50: mol_type = unassigned DNA; note = target_50d0e83
  misc_feature 1..23: note = LF
  misc_feature 24..25: note = Core
  misc_feature 26..50: note = RF
gaccgcctgctggaagtcccccttttgcgcccgctgccgaacggtgagct

SEQ ID NO: 23626 - DNA, 50 bp, unidentified
  source 1..50: mol_type = unassigned DNA; note = target_50dd54d
  misc_feature 1..24: note = LF
  misc_feature 25: note = Core
  misc_feature 26..50: note = RF
cgccagaaccgacctgctcatccttacgacgactggggtccggagaagct

SEQ ID NO: 23627 - DNA, 50 bp, unidentified
  source 1..50: mol_type = unassigned DNA; note = target_50e1c5a
  misc_feature 1..22: note = LF
  misc_feature 23..25: note = Core
  misc_feature 26..50: note = RF
cgacgttcggcaggacaccttgaaccgcgtatctcctgtgagggccttgt

SEQ ID NO: 23628 - DNA, 50 bp, unidentified
  source 1..50: mol_type = unassigned DNA; note = target_50ea656
  misc_feature 1..22: note = LF
  misc_feature 23..25: note = Core
  misc_feature 26..50: note = RF
tttactaattctacaaattccgatttgacaagtaccttatagcttcatat

SEQ ID NO: 23629 - DNA, 50 bp, unidentified
  source 1..50: mol_type = unassigned DNA; note = target_50ebc94
  misc_feature 1..23: note = LF
  misc_feature 24..25: note = Core
  misc_feature 26..50: note = RF
cgctggctcgttgccggttaacgtgacaatgctcttaagaaggctcgatc

SEQ ID NO: 23630 - DNA, 50 bp, unidentified
  source 1..50: mol_type = unassigned DNA; note = target_50edb87
  misc_feature 1..24: note = LF
  misc_feature 25: note = Core
  misc_feature 26..50: note = RF
cgcgcccgcagggcgcacagcgagagtcgtgcgggcggcggttcctgtac

SEQ ID NO: 23631 - DNA, 50 bp, unidentified
  source 1..50: mol_type = unassigned DNA; note = target_50f82dd
  misc_feature 1..23: note = LF
  misc_feature 24..25: note = Core
  misc_feature 26..50: note = RF
aggatgaattgcatattccccagaggttcgacgccggtcgattgcccacc

SEQ ID NO: 23632 - DNA, 50 bp, unidentified
  source 1..50: mol_type = unassigned DNA; note = target_50f9cf8
  misc_feature 1..23: note = LF
  misc_feature 24..25: note = Core
  misc_feature 26..50: note = RF
tctctggtgggctaaagcccaccctacgcggagcgccgcccggcccaccc

SEQ ID NO: 23633 - DNA, 50 bp, unidentified
  source 1..50: mol_type = unassigned DNA; note = target_50facab
  misc_feature 1..22: note = LF
  misc_feature 23..25: note = Core
  misc_feature 26..50: note = RF
agttcacttctcggacagccccttttgtctgctattatataagccagcca

SEQ ID NO: 23634 - DNA, 50 bp, unidentified
  source 1..50: mol_type = unassigned DNA; note = target_50fb59a
  misc_feature 1..23: note = LF
  misc_feature 24..25: note = Core
  misc_feature 26..50: note = RF
cggcctgggtctgccgacatcacctgacaccaatggaagttcacccgatg

SEQ ID NO: 23635 - DNA, 50 bp, unidentified
  source 1..50: mol_type = unassigned DNA; note = target_50fe769
  misc_feature 1..23: note = LF
  misc_feature 24..25: note = Core
  misc_feature 26..50: note = RF
aaaacagtcttagcgtgggataattccgttttctgagacgacccctatct

SEQ ID NO: 23636 - DNA, 50 bp, unidentified
  source 1..50: mol_type = unassigned DNA; note = target_5106c1a
  misc_feature 1..24: note = LF
  misc_feature 25: note = Core
  misc_feature 26..50: note = RF
ggattcctgtgacgagcacaggaatgagggaagataggttggcggccccg

SEQ ID NO: 23637 - DNA, 50 bp, unidentified
  source 1..50: mol_type = unassigned DNA; note = target_510fa1c
  misc_feature 1..23: note = LF
  misc_feature 24..25: note = Core
  misc_feature 26..50: note = RF
ccatagtcattaatctgagagatctctcgactcctcgaagctgtagcgat

SEQ ID NO: 23638 - DNA, 50 bp, unidentified
  source 1..50: mol_type = unassigned DNA; note = target_51165c5
  misc_feature 1..21: note = LF
  misc_feature 22..25: note = Core
  misc_feature 26..50: note = RF
acgtcgtcgacctcgggctcgctcatccgatcacccgtcgcgcacatttc

SEQ ID NO: 23639 - DNA, 50 bp, unidentified
  source 1..50: mol_type = unassigned DNA; note = target_512156a
  misc_feature 1..24: note = LF
  misc_feature 25: note = Core
  misc_feature 26..50: note = RF
ggggttattgaggtttcgtgctttcagcacggggcgcaatttgcgactgt

SEQ ID NO: 23640 - DNA, 50 bp, unidentified
  source 1..50: mol_type = unassigned DNA; note = target_5121609
  misc_feature 1..23: note = LF
  misc_feature 24..25: note = Core
  misc_feature 26..50: note = RF
cgcttcggggcaggagcaagctcctgccctacggaatcccggcccctacc

SEQ ID NO: 23641 - DNA, 50 bp, unidentified
  source 1..50: mol_type = unassigned DNA; note = target_512d937
  misc_feature 1..24: note = LF
  misc_feature 25: note = Core
  misc_feature 26..50: note = RF
cggggtcggggcgcaccgatgcccccccccgcgcagaagctgggttcggt

SEQ ID NO: 23642 - DNA, 50 bp, unidentified
  source 1..50: mol_type = unassigned DNA; note = target_5131cd7
  misc_feature 1..23: note = LF
  misc_feature 24..25: note = Core
  misc_feature 26..50: note = RF
atttgctgttttttcggctgaaagcacagtctcctaatcacccaagttgg

SEQ ID NO: 23643 - DNA, 50 bp, unidentified
  source 1..50: mol_type = unassigned DNA; note = target_513b782
  misc_feature 1..23: note = LF
  misc_feature 24..25: note = Core
  misc_feature 26..50: note = RF
aatttctgattcataataacctccttacatcatatattttatatttttct

SEQ ID NO: 23644 - DNA, 50 bp, unidentified
  source 1..50: mol_type = unassigned DNA; note = target_513e9c6
  misc_feature 1..24: note = LF
  misc_feature 25: note = Core
  misc_feature 26..50: note = RF
ggaaggagtagtgaaactgctaacgcccctattcagccaaagatccccag

SEQ ID NO: 23645 - DNA, 50 bp, unidentified
  source 1..50: mol_type = unassigned DNA; note = target_51445fa
  misc_feature 1..23: note = LF
  misc_feature 24..25: note = Core
  misc_feature 26..50: note = RF
accattcccggattgcatctgggctacgtaaagcaagaagcccagcattg

SEQ ID NO: 23646 - DNA, 50 bp, unidentified
  source 1..50: mol_type = unassigned DNA; note = target_5147214
  misc_feature 1..21: note = LF
  misc_feature 22..25: note = Core
  misc_feature 26..50: note = RF
acggcctgcgcgcgtaccgagccccccggttccgccgagacgtgcactga

SEQ ID NO: 23647 - DNA, 50 bp, unidentified
  source 1..50: mol_type = unassigned DNA; note = target_51499f5
  misc_feature 1..23: note = LF
  misc_feature 24..25: note = Core
  misc_feature 26..50: note = RF
ttgttcccgaagaagcccaaatacgcattattggggccgagagattgagc

SEQ ID NO: 23648 - DNA, 50 bp, unidentified
  source 1..50: mol_type = unassigned DNA; note = target_5149f0d
  misc_feature 1..22: note = LF
  misc_feature 23..25: note = Core
  misc_feature 26..50: note = RF
tttttctcatttctctttcctcctttttttattttatatttccaccgtaa

SEQ ID NO: 23649 - DNA, 50 bp, unidentified
  source 1..50: mol_type = unassigned DNA; note = target_515c997
  misc_feature 1..24: note = LF
  misc_feature 25: note = Core
  misc_feature 26..50: note = RF
ccagggtggctgcttcacgtctgctttgggtcacaagcagaccaaaggcc

SEQ ID NO: 23650 - DNA, 50 bp, unidentified
  source 1..50: mol_type = unassigned DNA; note = target_515d1ff
  misc_feature 1..22: note = LF
  misc_feature 23..25: note = Core
  misc_feature 26..50: note = RF
tttatcagtacgaatcatctcctttccgatttttcaaagatagattgtca

SEQ ID NO: 23651 - DNA, 50 bp, unidentified
  source 1..50: mol_type = unassigned DNA; note = target_515f66c
  misc_feature 1..24: note = LF
  misc_feature 25: note = Core
  misc_feature 26..50: note = RF
ccttgccggcggctcgactagcggcagttgagcgtgttctgcgagcagcg

SEQ ID NO: 23652 - DNA, 50 bp, unidentified
  source 1..50: mol_type = unassigned DNA; note = target_516523e
  misc_feature 1..22: note = LF
  misc_feature 23..25: note = Core
  misc_feature 26..50: note = RF
atgatctttagtttacgtaacctgagatctgtttaagagcgacgctttct

SEQ ID NO: 23653 - DNA, 50 bp, unidentified
  source 1..50: mol_type = unassigned DNA; note = target_516dd64
  misc_feature 1..24: note = LF
  misc_feature 25: note = Core
  misc_feature 26..50: note = RF
ctggttccggttctggccagtaagcgagtattcgatgggtgtaaaactta

SEQ ID NO: 23654 - DNA, 50 bp, unidentified
  source 1..50: mol_type = unassigned DNA; note = target_5177605
  misc_feature 1..23: note = LF
  misc_feature 24..25: note = Core
  misc_feature 26..50: note = RF
gaatccatactccctgtggtggttggattccgggttcgctcgtttcactc

SEQ ID NO: 23655 - DNA, 50 bp, unidentified
  source 1..50: mol_type = unassigned DNA; note = target_517bc9c
  misc_feature 1..23: note = LF
  misc_feature 24..25: note = Core
  misc_feature 26..50: note = RF
ggttcgcgtgccgcgaacccaacctacggcctttcgctcagaccctcggt

SEQ ID NO: 23656 - DNA, 50 bp, unidentified
  source 1..50: mol_type = unassigned DNA; note = target_5186c8e
  misc_feature 1..23: note = LF
  misc_feature 24..25: note = Core
  misc_feature 26..50: note = RF
aggtcatacattgacacatcctcctctctacacttcacacaagtccgctc

SEQ ID NO: 23657 - DNA, 50 bp, unidentified
  source 1..50: mol_type = unassigned DNA; note = target_51874e0
  misc_feature 1..23: note = LF
  misc_feature 24..25: note = Core
  misc_feature 26..50: note = RF
gggcggctcggtgcgcacggtgttctctctcatacggggcagggcggtgt

SEQ ID NO: 23658 - DNA, 50 bp, unidentified
  source 1..50: mol_type = unassigned DNA; note = target_518b308
  misc_feature 1..24: note = LF
  misc_feature 25: note = Core
  misc_feature 26..50: note = RF
tctgtgaatttgtcatgttcggatcgtcctttaaatcatagtattttcac

SEQ ID NO: 23659 - DNA, 50 bp, unidentified
  source 1..50: mol_type = unassigned DNA; note = target_518c8dd
  misc_feature 1..23: note = LF
  misc_feature 24..25: note = Core
  misc_feature 26..50: note = RF
gctcctggacaacgtgttttccttgtggtgaaggaaccaactggctctgc

SEQ ID NO: 23660 - DNA, 50 bp, unidentified
  source 1..50: mol_type = unassigned DNA; note = target_5193fa5
  misc_feature 1..23: note = LF
  misc_feature 24..25: note = Core
  misc_feature 26..50: note = RF
ggcacccagagccctagcagcgtagggtgggcaaaggcgcgaagcgccgt

SEQ ID NO: 23661 - DNA, 50 bp, unidentified
  source 1..50: mol_type = unassigned DNA; note = target_5195966
  misc_feature 1..24: note = LF
  misc_feature 25: note = Core
  misc_feature 26..50: note = RF
tccatgaattacctcttatgtaagcggtctgtcagaagcctgacgactga

SEQ ID NO: 23662 - DNA, 50 bp, unidentified
  source 1..50: mol_type = unassigned DNA; note = target_5198a80
  misc_feature 1..23: note = LF
  misc_feature 24..25: note = Core
  misc_feature 26..50: note = RF
agcacggtcaaaaacaaccaggcctggttgtcttcaggcttagtaaccca

SEQ ID NO: 23663 - DNA, 50 bp, unidentified
  source 1..50: mol_type = unassigned DNA; note = target_519c895
  misc_feature 1..21: note = LF
  misc_feature 22..25: note = Core
  misc_feature 26..50: note = RF
ggggatgggccatgatggtggttcctttcgactgcggttggaagggacgc

SEQ ID NO: 23664 - DNA, 50 bp, unidentified
  source 1..50: mol_type = unassigned DNA; note = target_51a562f
  misc_feature 1..20: note = LF
  misc_feature 21..25: note = Core
  misc_feature 26..50: note = RF
tatactggatgcggggtcgcccccccggtgagggtgggggatgtcgacgg

SEQ ID NO: 23665 - DNA, 50 bp, unidentified
  source 1..50: mol_type = unassigned DNA; note = target_51a6399
  misc_feature 1..21: note = LF
  misc_feature 22..25: note = Core
  misc_feature 26..50: note = RF
cgttctcgggctgcctgtttgtgtttcgcagccggcgggcgacggcgatc

SEQ ID NO: 23666 - DNA, 50 bp, unidentified
  source 1..50: mol_type = unassigned DNA; note = target_51a8460
  misc_feature 1..23: note = LF
  misc_feature 24..25: note = Core
  misc_feature 26..50: note = RF
gttaaccgagcgttcggtgccagaggttggaccgcagtcccgtctcctcc

SEQ ID NO: 23667 - DNA, 50 bp, unidentified
  source 1..50: mol_type = unassigned DNA; note = target_51c14bb
  misc_feature 1..23: note = LF
  misc_feature 24..25: note = Core
  misc_feature 26..50: note = RF
gttttcgcgcaattcaaaattcttgatttatgctcagaacccattgcaat

SEQ ID NO: 23668 - DNA, 50 bp, unidentified
  source 1..50: mol_type = unassigned DNA; note = target_51c656f
  misc_feature 1..23: note = LF
  misc_feature 24..25: note = Core
  misc_feature 26..50: note = RF
ggcctggcggcggctccgcagcgctcatcgagcccccacgcttgcggcct

SEQ ID NO: 23669 - DNA, 50 bp, unidentified
  source 1..50: mol_type = unassigned DNA; note = target_51c6b68
  misc_feature 1..23: note = LF
  misc_feature 24..25: note = Core
  misc_feature 26..50: note = RF
aagccgttcgcgtgcgaaattcttgattttcgcggccttggcatgcggtc

SEQ ID NO: 23670 - DNA, 50 bp, unidentified; identical to SEQ ID NO: 20606
  source 1..50: mol_type = unassigned DNA; note = target_51cdf18
  misc_feature 1..22: note = LF
  misc_feature 23..25: note = Core
  misc_feature 26..50: note = RF

SEQ ID NO: 23671 - DNA, 50 bp, unidentified
  source 1..50: mol_type = unassigned DNA; note = target_51d3945
  misc_feature 1..23: note = LF
  misc_feature 24..25: note = Core
  misc_feature 26..50: note = RF
ttcttccgctgcgcttcagaaactcgaactgactcggtagttatattaaa

SEQ ID NO: 23672 - DNA, 50 bp, unidentified
  source 1..50: mol_type = unassigned DNA; note = target_51e01b2
  misc_feature 1..23: note = LF
  misc_feature 24..25: note = Core
  misc_feature 26..50: note = RF
gtggcggctggtgacacagctgttgggtcagggcctagttgggctggtgg

SEQ ID NO: 23673 - DNA, 50 bp, unidentified
  source 1..50: mol_type = unassigned DNA; note = target_51eb8a2
  misc_feature 1..24: note = LF
  misc_feature 25: note = Core
  misc_feature 26..50: note = RF
attcttgtctaaatgggtgtccggtttcattgagctgagtcaacgcctgt

SEQ ID NO: 23674 - DNA, 50 bp, unidentified
  source 1..50: mol_type = unassigned DNA; note = target_51edd55
  misc_feature 1..23: note = LF
  misc_feature 24..25: note = Core
  misc_feature 26..50: note = RF
gccaccatcagacttcatcagattgagtcagagcccaacattgaccccac

SEQ ID NO: 23675 - DNA, 50 bp, unidentified
  source 1..50: mol_type = unassigned DNA; note = target_51f1aaf
  misc_feature 1..23: note = LF
  misc_feature 24..25: note = Core
  misc_feature 26..50: note = RF
tcatcctgaattttcctacatggatgtagatacttaggttcagtctggaa

SEQ ID NO: 23676 - DNA, 50 bp, unidentified
  source 1..50: mol_type = unassigned DNA; note = target_51f1c33
  misc_feature 1..23: note = LF
  misc_feature 24..25: note = Core
  misc_feature 26..50: note = RF
acttacaaacaaagaaaatgtagtggtttaatgatcccggacacctcaca

SEQ ID NO: 23677 - DNA, 50 bp, unidentified
  source 1..50: mol_type = unassigned DNA; note = target_51f269d
  misc_feature 1..23: note = LF
  misc_feature 24..25: note = Core
  misc_feature 26..50: note = RF
gtgagcggagcaaataaccgacgctcctacggcaagtgaggggggttaaa

SEQ ID NO: 23678 - DNA, 50 bp, unidentified
  source 1..50: mol_type = unassigned DNA; note = target_51f43e8
  misc_feature 1..23: note = LF
  misc_feature 24..25: note = Core
  misc_feature 26..50: note = RF
cagggaaggagtgcgttcttacctggggagatctcgccttgtgcctgaaa

SEQ ID NO: 23679 - DNA, 50 bp, unidentified
  source 1..50: mol_type = unassigned DNA; note = target_51feb80
  misc_feature 1..24: note = LF
  misc_feature 25: note = Core
  misc_feature 26..50: note = RF
aagccgcgatagagaagcggtcatttcgttcagcttcggactttggcgtg

SEQ ID NO: 23680 - DNA, 50 bp, unidentified
  source 1..50: mol_type = unassigned DNA; note = target_520d164
  misc_feature 1..24: note = LF
  misc_feature 25: note = Core
  misc_feature 26..50: note = RF
ttgctcgcgccgccgcaagttctctggatccccggctacgccgaggatga

SEQ ID NO: 23681 - DNA, 50 bp, unidentified
  source 1..50: mol_type = unassigned DNA; note = target_521bfab
  misc_feature 1..23: note = LF
  misc_feature 24..25: note = Core
  misc_feature 26..50: note = RF
cgtttcggatgaaacccgaaacgctctaggcggcgctttcatgcggcttc

SEQ ID NO: 23682 - DNA, 50 bp, unidentified
  source 1..50: mol_type = unassigned DNA; note = target_522ad91
  misc_feature 1..23: note = LF
  misc_feature 24..25: note = Core
  misc_feature 26..50: note = RF
gccgtcgagaacggcccaaagcggacattgactgtgccttactttctgcg

SEQ ID NO: 23683 - DNA, 50 bp, unidentified
  source 1..50: mol_type = unassigned DNA; note = target_52372d2
  misc_feature 1..23: note = LF
  misc_feature 24..25: note = Core
  misc_feature 26..50: note = RF
atctgagacccttcacacaagcagacattgagcgactgaccaaaagcgga

SEQ ID NO: 23684 - DNA, 50 bp, unidentified
  source 1..50: mol_type = unassigned DNA; note = target_5237e25
  misc_feature 1..24: note = LF
  misc_feature 25: note = Core
  misc_feature 26..50: note = RF
ggttgttcaaaagagatcttgaggtgtgtgccagtggcttgtgcaatacg

SEQ ID NO: 23685 - DNA, 50 bp, unidentified
  source 1..50: mol_type = unassigned DNA; note = target_52391e8
  misc_feature 1..22: note = LF
  misc_feature 23..25: note = Core
  misc_feature 26..50: note = RF
aagaaagagccgcttggctcttttttattgaagtagctttgtataataat

SEQ ID NO: 23686 - DNA, 50 bp, unidentified
  source 1..50: mol_type = unassigned DNA; note = target_523b022
  misc_feature 1..23: note = LF
  misc_feature 24..25: note = Core
  misc_feature 26..50: note = RF
ttgcgccgcgccgtcggtcgagactggaaggggaaggcctcgcccgccct

SEQ ID NO: 23687 - DNA, 50 bp, unidentified
  source 1..50: mol_type = unassigned DNA; note = target_523f729
  misc_feature 1..21: note = LF
  misc_feature 22..25: note = Core
  misc_feature 26..50: note = RF
tcgtggcttacgctcctcgcaatgacggtggactagcttagacctaacaa

SEQ ID NO: 23688 - DNA, 50 bp, unidentified
  source 1..50: mol_type = unassigned DNA; note = target_524a0f3
  misc_feature 1..22: note = LF
  misc_feature 23..25: note = Core
  misc_feature 26..50: note = RF
actgcctcctaaaagacagtcttgaatcagatcttgcccccgatgtgaat

SEQ ID NO: 23689 - DNA, 50 bp, unidentified
  source 1..50: mol_type = unassigned DNA; note = target_5258143
  misc_feature 1..23: note = LF
  misc_feature 24..25: note = Core
  misc_feature 26..50: note = RF
cgacaatctctgtggcaactcttagcctgtcggacccttggcttgatagc

SEQ ID NO: 23690 - DNA, 50 bp, unidentified
  source 1..50: mol_type = unassigned DNA; note = target_5259a5a
  misc_feature 1..23: note = LF
  misc_feature 24..25: note = Core
  misc_feature 26..50: note = RF
ccgcaacaatcaagttcagtggttgggtccccgctttcgcggggacgacg

SEQ ID NO: 23691 - DNA, 50 bp, unidentified
  source 1..50: mol_type = unassigned DNA; note = target_525c5a4
  misc_feature 1..23: note = LF
  misc_feature 24..25: note = Core
  misc_feature 26..50: note = RF
acgaagcgccccagccggggcgctttgtttggtcgggcgggctggaatgc

SEQ ID NO: 23692 - DNA, 50 bp, unidentified
  source 1..50: mol_type = unassigned DNA; note = target_5261417
  misc_feature 1..24: note = LF
  misc_feature 25: note = Core
  misc_feature 26..50: note = RF
agctgttcaggggtgaggcctaacgtttgagttcaccggcgtgcggaagc

SEQ ID NO: 23693 - DNA, 50 bp, unidentified
  source 1..50: mol_type = unassigned DNA; note = target_5275aff
  misc_feature 1..23: note = LF
  misc_feature 24..25: note = Core
  misc_feature 26..50: note = RF
tactctcgctgtgcagtgtagggtcagaccttcattcttggtgtttgtcc

SEQ ID NO: 23694 - DNA, 50 bp, unidentified
  source 1..50: mol_type = unassigned DNA; note = target_52785e4
  misc_feature 1..23: note = LF
  misc_feature 24..25: note = Core
  misc_feature 26..50: note = RF
ggaaatatctcataccgatcttcctttctgaaataaaataagccggctct

SEQ ID NO: 23695 - DNA, 50 bp, unidentified
  source 1..50: mol_type = unassigned DNA; note = target_527c93c
  misc_feature 1..24: note = LF
  misc_feature 25: note = Core
  misc_feature 26..50: note = RF
gcggtcctagagctctcccgataccggtcattgttccgaggtaaagcgga

SEQ ID NO: 23696 - DNA, 50 bp, unidentified
  source 1..50: mol_type = unassigned DNA; note = target_527e598
  misc_feature 1..23: note = LF
  misc_feature 24..25: note = Core
  misc_feature 26..50: note = RF
ggtttcgctacgctctacccaacctacggggttggatggatatcggtagt

SEQ ID NO: 23697 - DNA, 50 bp, unidentified
  source 1..50: mol_type = unassigned DNA; note = target_5295f66
  misc_feature 1..24: note = LF
  misc_feature 25: note = Core
  misc_feature 26..50: note = RF
gcaccgacaccgcccaactcgcggcagatgcgtgtgagtggtcgcctcag

SEQ ID NO: 23698 - DNA, 50 bp, unidentified
  source 1..50: mol_type = unassigned DNA; note = target_52aa2dc
  misc_feature 1..23: note = LF
  misc_feature 24..25: note = Core
  misc_feature 26..50: note = RF
ctcacagccggcacattctaaactgggttgcgacaaattccctatcttgc

SEQ ID NO: 23699 - DNA, 50 bp, unidentified
  source 1..50: mol_type = unassigned DNA; note = target_52aae89
  misc_feature 1..23: note = LF
  misc_feature 24..25: note = Core
  misc_feature 26..50: note = RF
ccggccgccagttcgagaggcccctctggcctgccgggcatctcccccac

SEQ ID NO: 23700 - DNA, 50 bp, unidentified
  source 1..50: mol_type = unassigned DNA; note = target_52acc2c
  misc_feature 1..21: note = LF
  misc_feature 22..25: note = Core
  misc_feature 26..50: note = RF
ggccatccgaaagggtggtctttttattgcaaagaaaaagccctggtgtt

SEQ ID NO: 23701 - DNA, 50 bp, unidentified
  source 1..50: mol_type = unassigned DNA; note = target_52bbb0e
  misc_feature 1..24: note = LF
  misc_feature 25: note = Core
  misc_feature 26..50: note = RF
catctgggcttaacgacatggtggtggttctgatgagtcgggtcatatcg

SEQ ID NO: 23702 - DNA, 50 bp, unidentified
  source 1..50: mol_type = unassigned DNA; note = target_52c23ef
  misc_feature 1..24: note = LF
  misc_feature 25: note = Core
  misc_feature 26..50: note = RF
ggtgcggacccgcatgccgggtggtgtgggaggggatcgctcaggctacc

SEQ ID NO: 23703 - DNA, 50 bp, unidentified
  source 1..50: mol_type = unassigned DNA; note = target_52c33b4
  misc_feature 1..23: note = LF
  misc_feature 24..25: note = Core
  misc_feature 26..50: note = RF
tgtaacttattaccataattaatctccttgtaaattattttttaccacat

SEQ ID NO: 23704 - DNA, 50 bp, unidentified
  source 1..50: mol_type = unassigned DNA; note = target_52ddd46
  misc_feature 1..24: note = LF
  misc_feature 25: note = Core
  misc_feature 26..50: note = RF
cttttgtcgtattgagtagggcgaagggaggttttactaatggcaaatga

SEQ ID NO: 23705 - DNA, 50 bp, unidentified
  source 1..50: mol_type = unassigned DNA; note = target_52de529
  misc_feature 1..23: note = LF
  misc_feature 24..25: note = Core
  misc_feature 26..50: note = RF
cggcggaccgctgctttcgatctagcccgcattatgcacggaggtctggc

SEQ ID NO: 23706 - DNA, 50 bp, unidentified
  source 1..50: mol_type = unassigned DNA; note = target_52ea201
  misc_feature 1..24: note = LF
  misc_feature 25: note = Core
  misc_feature 26..50: note = RF
tgattttgcccatttgctgtctcctttcttaatgaaatgtttcacgtgaa

SEQ ID NO: 23707 - DNA, 50 bp, unidentified
  source 1..50: mol_type = unassigned DNA; note = target_52ec162
  misc_feature 1..23: note = LF
  misc_feature 24..25: note = Core
  misc_feature 26..50: note = RF
tgagtctttcccaacccgcaaggatgacggctcggttatttggtatggct

SEQ ID NO: 23708 - DNA, 50 bp, unidentified
  source 1..50: mol_type = unassigned DNA; note = target_52eee75
  misc_feature 1..24: note = LF
  misc_feature 25: note = Core
  misc_feature 26..50: note = RF
ttttcgacggagtgcaatggggattttcgccaacggactcgacgctccat

SEQ ID NO: 23709 - DNA, 50 bp, unidentified
  source 1..50: mol_type = unassigned DNA; note = target_530054a
  misc_feature 1..23: note = LF
  misc_feature 24..25: note = Core
  misc_feature 26..50: note = RF
cgctctcgggattgctggggttgctcatcggacgggctcccccatcgggc

SEQ ID NO: 23710 - DNA, 50 bp, unidentified
  source 1..50: mol_type = unassigned DNA; note = target_530081e
  misc_feature 1..24: note = LF
  misc_feature 25: note = Core
  misc_feature 26..50: note = RF
tcgattcatatcttaggggctgcccaccccccacatccctcagccggccc

SEQ ID NO: 23711 - DNA, 50 bp, unidentified
  source 1..50: mol_type = unassigned DNA; note = target_5308d2f
  misc_feature 1..24: note = LF
  misc_feature 25: note = Core
  misc_feature 26..50: note = RF
taagcccggccgctacatggtaagcgagccacaaacctttcaattaccca

SEQ ID NO: 23712 - DNA, 50 bp, unidentified
  source 1..50: mol_type = unassigned DNA; note = target_5313717
  misc_feature 1..22: note = LF
  misc_feature 23..25: note = Core
  misc_feature 26..50: note = RF
gtgccgagagtgctcatgaccggcctttcgctttatcggggatggtttgt

SEQ ID NO: 23713 - DNA, 50 bp, unidentified
  source 1..50: mol_type = unassigned DNA; note = target_5321b79
  misc_feature 1..23: note = LF
  misc_feature 24..25: note = Core
  misc_feature 26..50: note = RF
aatagcaggctgatgtcgcctattggcacaactcggcatcagggcggcgt

SEQ ID NO: 23714 - DNA, 50 bp, unidentified
  source 1..50: mol_type = unassigned DNA; note = target_5324f4e
  misc_feature 1..24: note = LF
  misc_feature 25: note = Core
  misc_feature 26..50: note = RF
aagtgaagtctcgtttttccttttctttcttgggaattgtttataattta

SEQ ID NO: 23715 - DNA, 50 bp, unidentified
  source 1..50: mol_type = unassigned DNA; note = target_53296ac
  misc_feature 1..24: note = LF
  misc_feature 25: note = Core
  misc_feature 26..50: note = RF
gcacgcgagtacgggcgttagcagtgttaacggtttctcaaccaagtctg

SEQ ID NO: 23716 - DNA, 50 bp, unidentified
  source 1..50: mol_type = unassigned DNA; note = target_532e82c
  misc_feature 1..23: note = LF
  misc_feature 24..25: note = Core
  misc_feature 26..50: note = RF
ttcattactcattttcatatttcctttcataatctattcctcatcgacaa

SEQ ID NO: 23717 - DNA, 50 bp, unidentified
  source 1..50: mol_type = unassigned DNA; note = target_5342439
  misc_feature 1..24: note = LF
  misc_feature 25: note = Core
  misc_feature 26..50: note = RF
gcgctgaaatacaaaatagggtactgacaagttaactgaaattcggcgac

SEQ ID NO: 23718 - DNA, 50 bp, unidentified
  source 1..50: mol_type = unassigned DNA; note = target_5342cb3
  misc_feature 1..23: note = LF
  misc_feature 24..25: note = Core
  misc_feature 26..50: note = RF
tgatgattcgctcgctccgctcgctcatagcgatgcctccagcgcctcga

SEQ ID NO: 23719 - DNA, 50 bp, unidentified
  source 1..50: mol_type = unassigned DNA; note = target_535701d
  misc_feature 1..24: note = LF
  misc_feature 25: note = Core
  misc_feature 26..50: note = RF
taatatggtcggcgtcactaaggagtttagccatgcccgcaaccgtattg

SEQ ID NO: 23720 - DNA, 50 bp, unidentified
  source 1..50: mol_type = unassigned DNA; note = target_5357250
  misc_feature 1..23: note = LF
  misc_feature 24..25: note = Core
  misc_feature 26..50: note = RF
cagagcgcttgaaattacgcgaatgacccattgcgtcgtttcggccggat

SEQ ID NO: 23721 - DNA, 50 bp, unidentified
  source 1..50: mol_type = unassigned DNA; note = target_53654b4
  misc_feature 1..23: note = LF
  misc_feature 24..25: note = Core
  misc_feature 26..50: note = RF
cccgcacaacgccaaggcgccgcaggcagggaaagaatgcttcgcgattg

SEQ ID NO: 23722 - DNA, 50 bp, unidentified
  source 1..50: mol_type = unassigned DNA; note = target_5367882
  misc_feature 1..23: note = LF
  misc_feature 24..25: note = Core
  misc_feature 26..50: note = RF
taaaaacgctcatatccatactcctctcttttgctgcctacaccagttct

SEQ ID NO: 23723 - DNA, 50 bp, unidentified
  source 1..50: mol_type = unassigned DNA; note = target_5388e58
  misc_feature 1..24: note = LF
  misc_feature 25: note = Core
  misc_feature 26..50: note = RF
gagccgggcttcagggatcgaaacttccgtattgccggtcatccaccaat

SEQ ID NO: 23724 - DNA, 50 bp, unidentified
  source 1..50: mol_type = unassigned DNA; note = target_539f980
  misc_feature 1..23: note = LF
  misc_feature 24..25: note = Core
  misc_feature 26..50: note = RF
aggactggcgcgccagcggtaaccgttccgccgcttggggattctagcga

SEQ ID NO: 23725 - DNA, 50 bp, unidentified
  source 1..50: mol_type = unassigned DNA; note = target_53a189d
  misc_feature 1..22: note = LF
  misc_feature 23..25: note = Core
  misc_feature 26..50: note = RF
ggcagcgtcgctgctccacgccctagagttgaccgatggctcatgaagct

SEQ ID NO: 23726 - DNA, 50 bp, unidentified
  source 1..50: mol_type = unassigned DNA; note = target_53b143c
  misc_feature 1..23: note = LF
  misc_feature 24..25: note = Core
  misc_feature 26..50: note = RF
cggcgtacgcaaacctccaatggaggaaaccgcgggagctgtgacgaagc

SEQ ID NO: 23727 - DNA, 50 bp, unidentified
  source 1..50: mol_type = unassigned DNA; note = target_53b2983
  misc_feature 1..23: note = LF
  misc_feature 24..25: note = Core
  misc_feature 26..50: note = RF
gctgactggcaaattgcacatctagggcatgtactcatcaagcggctggc

SEQ ID NO: 23728 - DNA, 50 bp, unidentified
  source 1..50: mol_type = unassigned DNA; note = target_53b837f
  misc_feature 1..23: note = LF
  misc_feature 24..25: note = Core
  misc_feature 26..50: note = RF
catttccttttcataatctcctcctttctgttgctttgtctatggacttg

SEQ ID NO: 23729 - DNA, 50 bp, unidentified
  source 1..50: mol_type = unassigned DNA; note = target_53bf9e3
  misc_feature 1..23: note = LF
  misc_feature 24..25: note = Core
  misc_feature 26..50: note = RF
gaccttatcgcgggcaagcaccgctcccacaggggttgcattccactcaa

SEQ ID NO: 23730 - DNA, 50 bp, unidentified
  source 1..50: mol_type = unassigned DNA; note = target_53c2cc9
  misc_feature 1..23: note = LF
  misc_feature 24..25: note = Core
  misc_feature 26..50: note = RF
gttcggcacgaaatgtctgcaattgggcgattgctgccgctcacagatac

SEQ ID NO: 23731 - DNA, 50 bp, unidentified
  source 1..50: mol_type = unassigned DNA; note = target_53c749d
  misc_feature 1..19: note = LF
  misc_feature 20..25: note = Core
  misc_feature 26..50: note = RF
ggtagcctgaagaggttgcccttttttttatgattactcggatttcagta

SEQ ID NO: 23732 - DNA, 50 bp, unidentified
  source 1..50: mol_type = unassigned DNA; note = target_53d3d74
  misc_feature 1..24: note = LF
  misc_feature 25: note = Core
  misc_feature 26..50: note = RF
agaactagcaatgagttatacacattgttgccagtagtgctttacgctac

SEQ ID NO: 23733 - DNA, 50 bp, unidentified
  source 1..50: mol_type = unassigned DNA; note = target_53d69a0
  misc_feature 1..23: note = LF
  misc_feature 24..25: note = Core
  misc_feature 26..50: note = RF
acacatggatacgcctggtcatcctcgttgacggcgggttgctactatcg

SEQ ID NO: 23734 - DNA, 50 bp, unidentified
  source 1..50: mol_type = unassigned DNA; note = target_53dd6db
  misc_feature 1..24: note = LF
  misc_feature 25: note = Core
  misc_feature 26..50: note = RF
gcggtgagcccgtgtcccggtagccgaacctcttgcgggaacgtcgcagg

SEQ ID NO: 23735 - DNA, 50 bp, unidentified
  source 1..50: mol_type = unassigned DNA; note = target_53def63
  misc_feature 1..24: note = LF
  misc_feature 25: note = Core
  misc_feature 26..50: note = RF
gctccggggccggatccgtccgcccattacgcagattgcgatgaagtcgg

SEQ ID NO: 23736 - DNA, 50 bp, unidentified
  source 1..50: mol_type = unassigned DNA; note = target_53e5e88
  misc_feature 1..23: note = LF
  misc_feature 24..25: note = Core
  misc_feature 26..50: note = RF
gcagacgccaggttggaaaaggctcactgtccgcaccccctaccaccacc

SEQ ID NO: 23737 - DNA, 50 bp, unidentified
  source 1..50: mol_type = unassigned DNA; note = target_53e7026
  misc_feature 1..23: note = LF
  misc_feature 24..25: note = Core
  misc_feature 26..50: note = RF
gagacgctcttggacgcactcatctgccgcgttgggcgcgctcctgccgc

SEQ ID NO: 23738 - DNA, 50 bp, unidentified
  source 1..50: mol_type = unassigned DNA; note = target_53ea5ec
  misc_feature 1..22: note = LF
  misc_feature 23..25: note = Core
  misc_feature 26..50: note = RF
ttccatcttctgtcccacttcccccccaagtcggtgatgcttcaacaact

SEQ ID NO: 23739 - DNA, 50 bp, unidentified
  source 1..50: mol_type = unassigned DNA; note = target_53f61f4
  misc_feature 1..23: note = LF
  misc_feature 24..25: note = Core
  misc_feature 26..50: note = RF
gattgcggcggcgtcggctcacatgcgataaggaccgcttcttcagccta

SEQ ID NO: 23740 - DNA, 50 bp, unidentified
  source 1..50: mol_type = unassigned DNA; note = target_53fa060
  misc_feature 1..23: note = LF
  misc_feature 24..25: note = Core
  misc_feature 26..50: note = RF
cagaaccgattaaacgcgacaggctctaattgcaatgcatccgctataaa

SEQ ID NO: 23741 - DNA, 50 bp, unidentified
  source 1..50: mol_type = unassigned DNA; note = target_53fd254
  misc_feature 1..22: note = LF
  misc_feature 23..25: note = Core
  misc_feature 26..50: note = RF
aaatctatatttaaacttacgaagttttcaaaacttcgtaagttttacaa

SEQ ID NO: 23742 - DNA, 50 bp, unidentified
  source 1..50: mol_type = unassigned DNA; note = target_540b5e9
  misc_feature 1..20: note = LF
  misc_feature 21..25: note = Core
  misc_feature 26..50: note = RF
tgccgccgcaactgtatcgcctcctttccaaagtttttgccgtcacccgt

SEQ ID NO: 23743 - DNA, 50 bp, unidentified
  source 1..50: mol_type = unassigned DNA; note = target_5420636
  misc_feature 1..23: note = LF
  misc_feature 24..25: note = Core
  misc_feature 26..50: note = RF
gaatctgcagaagatgtctcacgagtccctacatatttacaggcacgaat

SEQ ID NO: 23744 - DNA, 50 bp, unidentified
  source 1..50: mol_type = unassigned DNA; note = target_542156b
  misc_feature 1..23: note = LF
  misc_feature 24..25: note = Core
  misc_feature 26..50: note = RF
ccgcagcttgctagcggaccccttgcgggttgatcgtggaagatccgccg

SEQ ID NO: 23745 - DNA, 50 bp, unidentified
  source 1..50: mol_type = unassigned DNA; note = target_5428281
  misc_feature 1..22: note = LF
  misc_feature 23..25: note = Core
  misc_feature 26..50: note = RF
ccatcaccaccaaaatagcgtcagagccaattttcaacgccgaataacac

SEQ ID NO: 23746 - DNA, 50 bp, unidentified
  source 1..50: mol_type = unassigned DNA; note = target_542ba5b
  misc_feature 1..24: note = LF
  misc_feature 25: note = Core
  misc_feature 26..50: note = RF
gccaaacccgccgcgctcttttgcgttgtgcttgaggggcgccgtaaggc

SEQ ID NO: 23747 - DNA, 50 bp, unidentified
  source 1..50: mol_type = unassigned DNA; note = target_542daeb
  misc_feature 1..23: note = LF
  misc_feature 24..25: note = Core
  misc_feature 26..50: note = RF
tggtgtatgtaacaattgatttttctccagtttttttaaacactttagtg

SEQ ID NO: 23748 - DNA, 50 bp, unidentified
  source 1..50: mol_type = unassigned DNA; note = target_5434655
  misc_feature 1..24: note = LF
  misc_feature 25: note = Core
  misc_feature 26..50: note = RF
atgaatatcgagatcatacgcctgcaagctttagccccggccgacgctaa

SEQ ID NO: 23749 - DNA, 50 bp, unidentified
  source 1..50: mol_type = unassigned DNA; note = target_5439ffe
  misc_feature 1..23: note = LF
  misc_feature 24..25: note = Core
  misc_feature 26..50: note = RF
gaagccggatgaactcacgccgcctcactcgatcacctcgtctgcccgca

SEQ ID NO: 23750 - DNA, 50 bp, unidentified
  source 1..50: mol_type = unassigned DNA; note = target_5446ebd
  misc_feature 1..21: note = LF
  misc_feature 22..25: note = Core
  misc_feature 26..50: note = RF
tcgtcgtggtcgccggggaggctcatcgggtgtcggcggccgccgacggt

SEQ ID NO: 23751 - DNA, 50 bp, unidentified
  source 1..50: mol_type = unassigned DNA; note = target_544a9ea
  misc_feature 1..23: note = LF
  misc_feature 24..25: note = Core
  misc_feature 26..50: note = RF
ggtcgattgccaacggaatagcggacggaccgcaccttggcatcgggatt

SEQ ID NO: 23752 - DNA, 50 bp, unidentified
  source 1..50: mol_type = unassigned DNA; note = target_5453d57
  misc_feature 1..23: note = LF
  misc_feature 24..25: note = Core
  misc_feature 26..50: note = RF
acgagatgtcgtaggtctgctcgctcacccgaccacctccgcttgcctgg

SEQ ID NO: 23753 - DNA, 50 bp, unidentified
  source 1..50: mol_type = unassigned DNA; note = target_54548ef
  misc_feature 1..24: note = LF
  misc_feature 25: note = Core
  misc_feature 26..50: note = RF
caacaggtattgcggaaggttaacttccggtttgcccgtccccccggcgc

SEQ ID NO: 23754 - DNA, 50 bp, unidentified
  source 1..50: mol_type = unassigned DNA; note = target_5460186
  misc_feature 1..23: note = LF
  misc_feature 24..25: note = Core
  misc_feature 26..50: note = RF
aggatctgccgacgactgaattttggtccgcgaggagccgaaggcgggga

SEQ ID NO: 23755 - DNA, 50 bp, unidentified
  source 1..50: mol_type = unassigned DNA; note = target_546af0b
  misc_feature 1..24: note = LF
  misc_feature 25: note = Core
  misc_feature 26..50: note = RF
aaagtccctgacccacccggcaagaggggaagggtgtggccgaacagcaa

SEQ ID NO: 23756 - DNA, 50 bp, unidentified
  source 1..50: mol_type = unassigned DNA; note = target_5474ae4
  misc_feature 1..24: note = LF
  misc_feature 25: note = Core
  misc_feature 26..50: note = RF
gtgtccctttgaatctcgtgtgatttccagatccaagaagataagtggaa

SEQ ID NO: 23757 - DNA, 50 bp, unidentified
  source 1..50: mol_type = unassigned DNA; note = target_54780fe
  misc_feature 1..24: note = LF
  misc_feature 25: note = Core
  misc_feature 26..50: note = RF
aaaagccctcaatctgcgagggcttttttgtatctcaagtttgtagctta

SEQ ID NO: 23758 - DNA, 50 bp, unidentified
  source 1..50: mol_type = unassigned DNA; note = target_5487394
  misc_feature 1..23: note = LF
  misc_feature 24..25: note = Core
  misc_feature 26..50: note = RF
tcctatcgcgcccaggtgcgctcctacggcatctggtgggtgggtggagg

SEQ ID NO: 23759 - DNA, 50 bp, unidentified
  source 1..50: mol_type = unassigned DNA; note = target_54b3c86
  misc_feature 1..23: note = LF
  misc_feature 24..25: note = Core
  misc_feature 26..50: note = RF
caaaactgggcagcgtgctaagatgtatccaagcttgaagacaggataca

SEQ ID NO: 23760 - DNA, 50 bp, unidentified
  source 1..50: mol_type = unassigned DNA; note = target_54bbf49
  misc_feature 1..24: note = LF
  misc_feature 25: note = Core
  misc_feature 26..50: note = RF
cgatgcttccataatactcctaacgccccaataacgggcaaataatgctt

SEQ ID NO: 23761 - DNA, 50 bp, unidentified
  source 1..50: mol_type = unassigned DNA; note = target_54bf0e9
  misc_feature 1..23: note = LF
  misc_feature 24..25: note = Core
  misc_feature 26..50: note = RF
gggtgccttgtggctggacgggttgtccatgatgaccacgtcgccgcgtc

SEQ ID NO: 23762 - DNA, 50 bp, unidentified
  source 1..50: mol_type = unassigned DNA; note = target_54c678e
  misc_feature 1..24: note = LF
  misc_feature 25: note = Core
  misc_feature 26..50: note = RF
gctcgacggaacctcaggctctcctcctggcacttctctgaagtaacccc

SEQ ID NO: 23763 - DNA, 50 bp, unidentified
  source 1..50: mol_type = unassigned DNA; note = target_54c73b0
  misc_feature 1..23: note = LF
  misc_feature 24..25: note = Core
  misc_feature 26..50: note = RF
cagcgaattgaggaatcacgaggagcagcagcatgaaacgtgttgtgatg

SEQ ID NO: 23764 - DNA, 50 bp, unidentified
  source 1..50: mol_type = unassigned DNA; note = target_54c814d
  misc_feature 1..23: note = LF
  misc_feature 24..25: note = Core
  misc_feature 26..50: note = RF
agggctgaaggttgcgcaaaagcagttcaagcgggccaacaaggcgctgc

SEQ ID NO: 23765 - DNA, 50 bp, unidentified
  source 1..50: mol_type = unassigned DNA; note = target_54d1cf5
  misc_feature 1..24: note = LF
  misc_feature 25: note = Core
  misc_feature 26..50: note = RF
cgaacggagactgtgcagcagaaccggacgttcccgtcaggtagtcagta

SEQ ID NO: 23766 - DNA, 50 bp, unidentified
  source 1..50: mol_type = unassigned DNA; note = target_54e2e22
  misc_feature 1..24: note = LF
  misc_feature 25: note = Core
  misc_feature 26..50: note = RF
agaagatcaatcgtctgcttgaaccgctcattcttcacgaatgcagcata

SEQ ID NO: 23767 - DNA, 50 bp, unidentified
  source 1..50: mol_type = unassigned DNA; note = target_54eb39d
  misc_feature 1..22: note = LF
  misc_feature 23..25: note = Core
  misc_feature 26..50: note = RF
aataggcgggaactgaatcgtgagaggaagctcctcctgataaccacata

SEQ ID NO: 23768 - DNA, 50 bp, unidentified
  source 1..50: mol_type = unassigned DNA; note = target_54ff6e0
  misc_feature 1..21: note = LF
  misc_feature 22..25: note = Core
  misc_feature 26..50: note = RF
acgacgagcacgcgcaggccgctcatgcggtgactccgggcgcgaacttc

SEQ ID NO: 23769 - DNA, 50 bp, unidentified
  source 1..50: mol_type = unassigned DNA; note = target_5500a10
  misc_feature 1..23: note = LF
  misc_feature 24..25: note = Core
  misc_feature 26..50: note = RF
ccggtcgaaatgaccggaacgggtggaaagctgccgttatccatctctta

SEQ ID NO: 23770 - DNA, 50 bp, unidentified
  source 1..50: mol_type = unassigned DNA; note = target_55020e6
  misc_feature 1..24: note = LF
  misc_feature 25: note = Core
  misc_feature 26..50: note = RF
ggcgacaaacgcgcactgagccgccgatctggcgtcaatcccggtcggcc

SEQ ID NO: 23771 - DNA, 50 bp, unidentified
  source 1..50: mol_type = unassigned DNA; note = target_5508301
  misc_feature 1..21: note = LF
  misc_feature 22..25: note = Core
  misc_feature 26..50: note = RF
caaattaccgtcgccggttcgcccccgcgctgcagaccggccaccggcac

SEQ ID NO: 23772 - DNA, 50 bp, unidentified
  source 1..50: mol_type = unassigned DNA; note = target_5511f13
  misc_feature 1..23: note = LF
  misc_feature 24..25: note = Core
  misc_feature 26..50: note = RF
tcctcaacaacaaggcctgtggttgggtcccggctcgcgcttcgcttggc

SEQ ID NO: 23773 - DNA, 50 bp, unidentified
  source 1..50: mol_type = unassigned DNA; note = target_551ae26
  misc_feature 1..22: note = LF
  misc_feature 23..25: note = Core
  misc_feature 26..50: note = RF
ccgcacccagcactaacactttcatactacaatattattcagaacgtatc

SEQ ID NO: 23774 - DNA, 50 bp, unidentified
  source 1..50: mol_type = unassigned DNA; note = target_5540bf2
  misc_feature 1..23: note = LF
  misc_feature 24..25: note = Core
  misc_feature 26..50: note = RF
gatggttcgctccgcaagctccgctcacgcgacctcctcttcgtgggcga

SEQ ID NO: 23775 - DNA, 50 bp, unidentified
  source 1..50: mol_type = unassigned DNA; note = target_554caaf
  misc_feature 1..23: note = LF
  misc_feature 24..25: note = Core
  misc_feature 26..50: note = RF
gcaacgccgttggcggtgccaacctacatcaacgcggtgtcaaatacacg

SEQ ID NO: 23776 - DNA, 50 bp, unidentified
  source 1..50: mol_type = unassigned DNA; note = target_5554440
  misc_feature 1..24: note = LF
  misc_feature 25: note = Core
  misc_feature 26..50: note = RF
tcaggctcttacggccacaatgacttccggatgcgccgtcactcaggact

SEQ ID NO: 23777 - DNA, 50 bp, unidentified
  source 1..50: mol_type = unassigned DNA; note = target_5560990
  misc_feature 1..23: note = LF
  misc_feature 24..25: note = Core
  misc_feature 26..50: note = RF
aatctgcggtggcgtaccagtaatgggttaagtgataacaagtgtctgga

SEQ ID NO: 23778 - DNA, 50 bp, unidentified
  source 1..50: mol_type = unassigned DNA; note = target_55640ad
  misc_feature 1..23: note = LF
  misc_feature 24..25: note = Core
  misc_feature 26..50: note = RF
acgcccggagctccacgccgttgctcactcgagccctcccatcacgtcag

SEQ ID NO: 23779 - DNA, 50 bp, unidentified
  source 1..50: mol_type = unassigned DNA; note = target_557edc3
  misc_feature 1..24: note = LF
  misc_feature 25: note = Core
  misc_feature 26..50: note = RF
gttacgttggcgctcacgttaaggttcgatacgagcgcagtccgcaggat

SEQ ID NO: 23780 - DNA, 50 bp, unidentified
  source 1..50: mol_type = unassigned DNA; note = target_558b18f
  misc_feature 1..24: note = LF
  misc_feature 25: note = Core
  misc_feature 26..50: note = RF
gagagggtaaacttctatgcggattggtataactggcaaactcgtgggct

SEQ ID NO: 23781 - DNA, 50 bp, unidentified
  source 1..50: mol_type = unassigned DNA; note = target_558c466
  misc_feature 1..24: note = LF
  misc_feature 25: note = Core
  misc_feature 26..50: note = RF
aaggcgctggcggcgctcggctgacggtgccggctgacgacgtcgggcga

SEQ ID NO: 23782 - DNA, 50 bp, unidentified
  source 1..50: mol_type = unassigned DNA; note = target_559617b
  misc_feature 1..23: note = LF
  misc_feature 24..25: note = Core
  misc_feature 26..50: note = RF
ccccaacacgggtggccgtgtccctatcagcggtccaccgacgccacccg

SEQ ID NO: 23783 - DNA, 50 bp, unidentified
  source 1..50: mol_type = unassigned DNA; note = target_5597913
  misc_feature 1..23: note = LF
  misc_feature 24..25: note = Core
  misc_feature 26..50: note = RF
agccgtgaggttttggcccaggctgtgtcaaaacacataaacaaaacctt

SEQ ID NO: 23784 - DNA, 50 bp, unidentified
  source 1..50: mol_type = unassigned DNA; note = target_5598175
  misc_feature 1..23: note = LF
  misc_feature 24..25: note = Core
  misc_feature 26..50: note = RF
cggagttgccactagagcgccactggtccgagcgacaatggcgacgcctc

SEQ ID NO: 23785 - DNA, 50 bp, unidentified
  source 1..50: mol_type = unassigned DNA; note = target_55a4fa2
  misc_feature 1..23: note = LF
  misc_feature 24..25: note = Core
  misc_feature 26..50: note = RF
tgacttttgccataaagtacctcctgattgtagtaagactggaatgatta

SEQ ID NO: 23786 - DNA, 50 bp, unidentified
  source 1..50: mol_type = unassigned DNA; note = target_55ab865
  misc_feature 1..23: note = LF
  misc_feature 24..25: note = Core
  misc_feature 26..50: note = RF
ttcggcggttgggccggtgatcttgactcatcctcgatctaccccgcggc

SEQ ID NO: 23787 - DNA, 50 bp, unidentified
  source 1..50: mol_type = unassigned DNA; note = target_55b5f4f
  misc_feature 1..24: note = LF
  misc_feature 25: note = Core
  misc_feature 26..50: note = RF
tcgcttccgagcagacctcagagctttcggcggataacgtcctgcagcat

SEQ ID NO: 23788 - DNA, 50 bp, unidentified
  source 1..50: mol_type = unassigned DNA; note = target_55b6116
  misc_feature 1..23: note = LF
  misc_feature 24..25: note = Core
  misc_feature 26..50: note = RF
gttgtgttgtccataatttgcacctctctatataaaattaataatgtaat

SEQ ID NO: 23789 - DNA, 50 bp, unidentified
  source 1..50: mol_type = unassigned DNA; note = target_55c343c
  misc_feature 1..21: note = LF
  misc_feature 22..25: note = Core
  misc_feature 26..50: note = RF
catagccgaaccgttgtgggtaattgaaaaaacttaaaattgataaaaaa

SEQ ID NO: 23790 - DNA, 50 bp, unidentified
  source 1..50: mol_type = unassigned DNA; note = target_55c9131
  misc_feature 1..22: note = LF
  misc_feature 23..25: note = Core
  misc_feature 26..50: note = RF
gtcgctttgtcaaaggaaactcctttctctgcagactcgctctctcatcg

SEQ ID NO: 23791 - DNA, 50 bp, unidentified
  source 1..50: mol_type = unassigned DNA; note = target_55cc45c
  misc_feature 1..24: note = LF
  misc_feature 25: note = Core
  misc_feature 26..50: note = RF
gatataagttacttaatatgtcctctttctttcatgatgaacaagtctga

SEQ ID NO: 23792 - DNA, 50 bp, unidentified
  source 1..50: mol_type = unassigned DNA; note = target_55ce4b8
  misc_feature 1..23: note = LF
  misc_feature 24..25: note = Core
  misc_feature 26..50: note = RF
ccaagcctggctcggaccgcccgagcaaccctcggacgcgcagtgtagtg

SEQ ID NO: 23793 - DNA, 50 bp, unidentified
  source 1..50: mol_type = unassigned DNA; note = target_55d0128
  misc_feature 1..22: note = LF
  misc_feature 23..25: note = Core
  misc_feature 26..50: note = RF
tcctatcgcgccgatgggacttttttgatgcgctccttatggtaacgaag

SEQ ID NO: 23794 - DNA, 50 bp, unidentified
  source 1..50: mol_type = unassigned DNA; note = target_55d22e2
  misc_feature 1..22: note = LF
  misc_feature 23..25: note = Core
  misc_feature 26..50: note = RF
cgtacgagccgaaatctaactctgaccccgattttcccttaaggcggccg

SEQ ID NO: 23795 - DNA, 50 bp, unidentified
  source 1..50: mol_type = unassigned DNA; note = target_55d484a
  misc_feature 1..23: note = LF
  misc_feature 24..25: note = Core
  misc_feature 26..50: note = RF
acacatcggaatcctggtgcggcctaacgccaaagctcagctgcgggcgg

SEQ ID NO: 23796 - DNA, 50 bp, unidentified
  source 1..50: mol_type = unassigned DNA; note = target_55d4c8f
  misc_feature 1..23: note = LF
  misc_feature 24..25: note = Core
  misc_feature 26..50: note = RF
caattcttccatcttattttctcctatttagattgaagacaatatattct

SEQ ID NO: 23797 - DNA, 50 bp, unidentified
  source 1..50: mol_type = unassigned DNA; note = target_55d5d87
  misc_feature 1..24: note = LF
  misc_feature 25: note = Core
  misc_feature 26..50: note = RF
ttgcgggttcaggcacagtaaggagtcaataatgagtcagaatgtttatc

SEQ ID NO: 23798 - DNA, 50 bp, unidentified
  source 1..50: mol_type = unassigned DNA; note = target_55de9f6
  misc_feature 1..24: note = LF
  misc_feature 25: note = Core
  misc_feature 26..50: note = RF
atggaaacaatattggggtaaagaaaagaggttgagacataacgtttttg

SEQ ID NO: 23799 - DNA, 50 bp, unidentified
  source 1..50: mol_type = unassigned DNA; note = target_55e6024
  misc_feature 1..23: note = LF
  misc_feature 24..25: note = Core
  misc_feature 26..50: note = RF
ttgaatataacatggtggaaagctgccattcagattccggcccaatagcg

SEQ ID NO: 23800 - DNA, 50 bp, unidentified
  source 1..50: mol_type = unassigned DNA; note = target_55ebcbc
  misc_feature 1..22: note = LF
  misc_feature 23..25: note = Core
  misc_feature 26..50: note = RF
aaatcaccacacaaattgaggaagaccccttaaaggcgagatgaggaatt

SEQ ID NO: 23801 - DNA, 50 bp, unidentified
  source 1..50: mol_type = unassigned DNA; note = target_55ed7be
  misc_feature 1..24: note = LF
  misc_feature 25: note = Core
  misc_feature 26..50: note = RF
cctgctcggccgcgtgcaggctttttttttgaagctgatgccctcgtgct

SEQ ID NO: 23802 - DNA, 50 bp, unidentified
  source 1..50: mol_type = unassigned DNA; note = target_55f3843
  misc_feature 1..24: note = LF
  misc_feature 25: note = Core
  misc_feature 26..50: note = RF
gttcatgatcgaccgctcatggccgatcaccgaagttctgttgcattcgc

SEQ ID NO: 23803 - DNA, 50 bp, unidentified
  source 1..50: mol_type = unassigned DNA; note = target_55fbc2c
  misc_feature 1..23: note = LF
  misc_feature 24..25: note = Core
  misc_feature 26..50: note = RF
gcacgaaacagcatgtgcccaacctacagtctatgtggacgggacgcata

SEQ ID NO: 23804 - DNA, 50 bp, unidentified
  source 1..50: mol_type = unassigned DNA; note = target_55fd8c4
  misc_feature 1..23: note = LF
  misc_feature 24..25: note = Core
  misc_feature 26..50: note = RF
gcgtgctgccggtccgatgtgggtggaaagcggtcacttggtcggcggcc

SEQ ID NO: 23805 - DNA, 50 bp, unidentified
  source 1..50: mol_type = unassigned DNA; note = target_5606247
  misc_feature 1..24: note = LF
  misc_feature 25: note = Core
  misc_feature 26..50: note = RF
agcaaactcgccgcctccttttgccacccccaatcgcaggttcacagcgc

SEQ ID NO: 23806 - DNA, 50 bp, unidentified
  source 1..50: mol_type = unassigned DNA; note = target_5612835
  misc_feature 1..23: note = LF
  misc_feature 24..25: note = Core
  misc_feature 26..50: note = RF
gccgcacgcgccgttccggtcgatgggtttcggtgcgaggtcgggcaaga

SEQ ID NO: 23807 - DNA, 50 bp, unidentified
  source 1..50: mol_type = unassigned DNA; note = target_561755e
  misc_feature 1..23: note = LF
  misc_feature 24..25: note = Core
  misc_feature 26..50: note = RF
gtctgtaaaaacgtcggatcagcctacgttggttcgaacccaacacatgc

SEQ ID NO: 23808 - DNA, 50 bp, unidentified
  source 1..50: mol_type = unassigned DNA; note = target_5617723
  misc_feature 1..23: note = LF
  misc_feature 24..25: note = Core
  misc_feature 26..50: note = RF
tgccccgatcgcgcatgtggccctgggtccccgctttcgcgggacgaacg

SEQ ID NO: 23809 - DNA, 50 bp, unidentified
  source 1..50: mol_type = unassigned DNA; note = target_5618365
  misc_feature 1..23: note = LF
  misc_feature 24..25: note = Core
  misc_feature 26..50: note = RF
tgtccgctttccgctccaaagcagacattaagtgtgctaacgtaaagttc

SEQ ID NO: 23810 - DNA, 50 bp, unidentified
  source 1..50: mol_type = unassigned DNA; note = target_561aa9d
  misc_feature 1..23: note = LF
  misc_feature 24..25: note = Core
  misc_feature 26..50: note = RF
gcgggacgggttgtcagcttgggtgggtagctgccggggcgcatgacgat

SEQ ID NO: 23811 - DNA, 50 bp, unidentified
  source 1..50: mol_type = unassigned DNA; note = target_561f942
  misc_feature 1..23: note = LF
  misc_feature 24..25: note = Core
  misc_feature 26..50: note = RF
aataaagcagtgataaatctcagtttgtataactgagcagagctagtttt

SEQ ID NO: 23812 - DNA, 50 bp, unidentified
  source 1..50: mol_type = unassigned DNA; note = target_5625ffa
  misc_feature 1..24: note = LF
  misc_feature 25: note = Core
  misc_feature 26..50: note = RF
ctcatagcgcctgaaaaacggggtttgcggtaacttgcctgccgatgatc

SEQ ID NO: 23813 - DNA, 50 bp, unidentified
  source 1..50: mol_type = unassigned DNA; note = target_562d51c
  misc_feature 1..24: note = LF
  misc_feature 25: note = Core
  misc_feature 26..50: note = RF
gatgagcgtgtgcccctttctgggcggaaggacgctcgctcaccggcggt

SEQ ID NO: 23814 - DNA, 50 bp, unidentified
  source 1..50: mol_type = unassigned DNA; note = target_5631403
  misc_feature 1..24: note = LF
  misc_feature 25: note = Core
  misc_feature 26..50: note = RF
gatccatgcaaataatggcctacttttgctccggcgctcatagccagggg

SEQ ID NO: 23815 - DNA, 50 bp, unidentified
  source 1..50: mol_type = unassigned DNA; note = target_5637a67
  misc_feature 1..23: note = LF
  misc_feature 24..25: note = Core
  misc_feature 26..50: note = RF
cgaaaagcgaagttgagccatggatggcgaatctgagcggccgtcaattt

SEQ ID NO: 23816 - DNA, 50 bp, unidentified
  source 1..50: mol_type = unassigned DNA; note = target_563d4d0
  misc_feature 1..23: note = LF
  misc_feature 24..25: note = Core
  misc_feature 26..50: note = RF
tattttctttttcatacaatttcctttctgatcagacgaagctgaattgc

SEQ ID NO: 23817 - DNA, 50 bp, unidentified
  source 1..50: mol_type = unassigned DNA; note = target_5642ec3
  misc_feature 1..22: note = LF
  misc_feature 23..25: note = Core
  misc_feature 26..50: note = RF
cgccagcactctcaggctctcttgactattttgtattgctcgacggactg

SEQ ID NO: 23818 - DNA, 50 bp, unidentified
  source 1..50: mol_type = unassigned DNA; note = target_564820c
  misc_feature 1..21: note = LF
  misc_feature 22..25: note = Core
  misc_feature 26..50: note = RF
gacgcccaggatgagatccccttcccaatgaccggcctcgagcttggtct

SEQ ID NO: 23819 - DNA, 50 bp, unidentified
  source 1..50: mol_type = unassigned DNA; note = target_5661329
  misc_feature 1..24: note = LF
  misc_feature 25: note = Core
  misc_feature 26..50: note = RF
tcattactccagaatagcgcccgattgtggaagatcatcgtttaaatctt

SEQ ID NO: 23820 - DNA, 50 bp, unidentified
  source 1..50: mol_type = unassigned DNA; note = target_566b971
  misc_feature 1..22: note = LF
  misc_feature 23..25: note = Core
  misc_feature 26..50: note = RF
gcctccactccagccagcatcttgaatcacaaaacagcctaaaccggaat

SEQ ID NO: 23821 - DNA, 50 bp, unidentified
  source 1..50: mol_type = unassigned DNA; note = target_566fe07
  misc_feature 1..23: note = LF
  misc_feature 24..25: note = Core
  misc_feature 26..50: note = RF
ccgctccaataggcatccaattttgcatgccgaaacacacgcaatgaaaa

SEQ ID NO: 23822 - DNA, 50 bp, unidentified
  source 1..50: mol_type = unassigned DNA; note = target_56777ce
  misc_feature 1..23: note = LF
  misc_feature 24..25: note = Core
  misc_feature 26..50: note = RF
ctgctccaggcctagcgcaacgcctgaccggggcggccggaggaccggct

SEQ ID NO: 23823 - DNA, 50 bp, unidentified; identical to SEQ ID NO: 20606
  source 1..50: mol_type = unassigned DNA; note = target_5680752
  misc_feature 1..22: note = LF
  misc_feature 23..25: note = Core
  misc_feature 26..50: note = RF

SEQ ID NO: 23824 - DNA, 50 bp, unidentified
  source 1..50: mol_type = unassigned DNA; note = target_56844da
  misc_feature 1..24: note = LF
  misc_feature 25: note = Core
  misc_feature 26..50: note = RF
catgtccacaggcatggaacagagagtttgccacggcaccacacattaag

SEQ ID NO: 23825 - DNA, 50 bp, unidentified
  source 1..50: mol_type = unassigned DNA; note = target_5689413
  misc_feature 1..23: note = LF
  misc_feature 24..25: note = Core
  misc_feature 26..50: note = RF
ttcggcacggataaatccgtgccctttcaaaataatccctctccgttttt

SEQ ID NO: 23826 - DNA, 50 bp, unidentified
  source 1..50: mol_type = unassigned DNA; note = target_56c74a2
  misc_feature 1..24: note = LF
  misc_feature 25: note = Core
  misc_feature 26..50: note = RF
cacgcggctccagcggatgttaagcggttcctggcacttggccagcgtga

SEQ ID NO: 23827 - DNA, 50 bp, unidentified
  source 1..50: mol_type = unassigned DNA; note = target_56cb02e
  misc_feature 1..24: note = LF
  misc_feature 25: note = Core
  misc_feature 26..50: note = RF
gaaatgagcgcgaacggccactttcggacgttcacgcctccaacgccctc

SEQ ID NO: 23828 - DNA, 50 bp, unidentified
  source 1..50: mol_type = unassigned DNA; note = target_56ce748
  misc_feature 1..23: note = LF
  misc_feature 24..25: note = Core
  misc_feature 26..50: note = RF
gagcagtgctgcccaatgcctccctcatcgattcaaatttcccaatgata

SEQ ID NO: 23829 - DNA, 50 bp, unidentified
  source 1..50: mol_type = unassigned DNA; note = target_56d754c
  misc_feature 1..24: note = LF
  misc_feature 25: note = Core
  misc_feature 26..50: note = RF
gatgcctcccatatgcaacctaacgtgaattaggtgacaaattagttgac

SEQ ID NO: 23830 - DNA, 50 bp, unidentified
  source 1..50: mol_type = unassigned DNA; note = target_56d75c1
  misc_feature 1..23: note = LF
  misc_feature 24..25: note = Core
  misc_feature 26..50: note = RF
tccacgtaccccagcgggtacgcctcggcccttcactcgctgcggccttg

SEQ ID NO: 23831 - DNA, 50 bp, unidentified
  source 1..50: mol_type = unassigned DNA; note = target_56dd9cf
  misc_feature 1..23: note = LF
  misc_feature 24..25: note = Core
  misc_feature 26..50: note = RF
gttcacttccgttcttggcacaaagcggacgtcgaatcagcgacctgcga

SEQ ID NO: 23832 - DNA, 50 bp, unidentified
  source 1..50: mol_type = unassigned DNA; note = target_56ea31a
  misc_feature 1..23: note = LF
  misc_feature 24..25: note = Core
  misc_feature 26..50: note = RF
acaatcccaagtggggccgctcgtggcgcaaagcgatcatgcccgcggca

SEQ ID NO: 23833 - DNA, 50 bp, unidentified
  source 1..50: mol_type = unassigned DNA; note = target_57001da
  misc_feature 1..23: note = LF
  misc_feature 24..25: note = Core
  misc_feature 26..50: note = RF
atttagacattctttatcacttcctttctgtctgccctctgcagacggag

SEQ ID NO: 23834 - DNA, 50 bp, unidentified
  source 1..50: mol_type = unassigned DNA; note = target_57013ea
  misc_feature 1..23: note = LF
  misc_feature 24..25: note = Core
  misc_feature 26..50: note = RF
tttcttgctcatggtgttttatcctttcaatatcttcgtaagctgctgtg

SEQ ID NO: 23835 - DNA, 50 bp, unidentified
  source 1..50: mol_type = unassigned DNA; note = target_5703fee
  misc_feature 1..24: note = LF
  misc_feature 25: note = Core
  misc_feature 26..50: note = RF
ttgtagttttctttcatatattcttctcctttatttatatattattttaa

SEQ ID NO: 23836 - DNA, 50 bp, unidentified
  source 1..50: mol_type = unassigned DNA; note = target_5716796
  misc_feature 1..23: note = LF
  misc_feature 24..25: note = Core
  misc_feature 26..50: note = RF
cgtccgttcagccctcaataacagacatcagcttagagttgtgacgccat

SEQ ID NO: 23837 - DNA, 50 bp, unidentified
  source 1..50: mol_type = unassigned DNA; note = target_572406a
  misc_feature 1..23: note = LF
  misc_feature 24..25: note = Core
  misc_feature 26..50: note = RF
aaccaaaattcatttccttctttctaagtttccaaaataatttgtgccaa

SEQ ID NO: 23838 - DNA, 50 bp, unidentified
  source 1..50: mol_type = unassigned DNA; note = target_572be28
  misc_feature 1..23: note = LF
  misc_feature 24..25: note = Core
  misc_feature 26..50: note = RF
aatggcggcgtgaagaccttgggtggattaccgaacggccgctcgtttca

SEQ ID NO: 23839 - DNA, 50 bp, unidentified
  source 1..50: mol_type = unassigned DNA; note = target_5730e39
  misc_feature 1..24: note = LF
  misc_feature 25: note = Core
  misc_feature 26..50: note = RF
ccgaattgttgcctaagcagtaactgacggattgtttgaatgctaagtca

SEQ ID NO: 23840 - DNA, 50 bp, unidentified
  source 1..50: mol_type = unassigned DNA; note = target_573a51f
  misc_feature 1..22: note = LF
  misc_feature 23..25: note = Core
  misc_feature 26..50: note = RF
ccggtgatcgcgccagcctgcgcttcccactgacaagcagaggggtcgga

SEQ ID NO: 23841 - DNA, 50 bp, unidentified; identical to SEQ ID NO: 21522
  source 1..50: mol_type = unassigned DNA; note = target_57484a1
  misc_feature 1..23: note = LF
  misc_feature 24..25: note = Core
  misc_feature 26..50: note = RF

SEQ ID NO: 23842 - DNA, 50 bp, unidentified
  source 1..50: mol_type = unassigned DNA; note = target_574f79a
  misc_feature 1..21: note = LF
  misc_feature 22..25: note = Core
  misc_feature 26..50: note = RF
gatggcccgtatttgcgggccatgacaatcagggcaacttcaccgtatcc

SEQ ID NO: 23843 - DNA, 50 bp, unidentified
  source 1..50: mol_type = unassigned DNA; note = target_575950e
  misc_feature 1..23: note = LF
  misc_feature 24..25: note = Core
  misc_feature 26..50: note = RF
ttagaaagtcttagttatgactcctttcttgattaagccgcacttgctgc

SEQ ID NO: 23844 - DNA, 50 bp, unidentified
  source 1..50: mol_type = unassigned DNA; note = target_5771ff0
  misc_feature 1..23: note = LF
  misc_feature 24..25: note = Core
  misc_feature 26..50: note = RF
aaaatcaacgtgggcttcagcccctgagggaaggtttgaaatcgactcaa

SEQ ID NO: 23845 - DNA, 50 bp, unidentified
  source 1..50: mol_type = unassigned DNA; note = target_57728b8
  misc_feature 1..24: note = LF
  misc_feature 25: note = Core
  misc_feature 26..50: note = RF
gtttgctcggccgcatggagtgacttttttcaggctcaagcccagccggc

SEQ ID NO: 23846 - DNA, 50 bp, unidentified
  source 1..50: mol_type = unassigned DNA; note = target_5775e8b
  misc_feature 1..23: note = LF
  misc_feature 24..25: note = Core
  misc_feature 26..50: note = RF
aataacttttttcattttaacttgtctcctttattaatttcatattaatt

SEQ ID NO: 23847 - DNA, 50 bp, unidentified
  source 1..50: mol_type = unassigned DNA; note = target_5777705
  misc_feature 1..24: note = LF
  misc_feature 25: note = Core
  misc_feature 26..50: note = RF
agaatctttttccaatccaatccctccgtggtgtcgtatcctacctctgt

SEQ ID NO: 23848 - DNA, 50 bp, unidentified
  source 1..50: mol_type = unassigned DNA; note = target_578684c
  misc_feature 1..23: note = LF
  misc_feature 24..25: note = Core
  misc_feature 26..50: note = RF
agttgcttaaacggaataaaaacagttggttatcgctacgcgattttaac

SEQ ID NO: 23849 - DNA, 50 bp, unidentified
  source 1..50: mol_type = unassigned DNA; note = target_578cab9
  misc_feature 1..23: note = LF
  misc_feature 24..25: note = Core
  misc_feature 26..50: note = RF
cacctgtatcgggagcaagccccctcccacattgtgatcctcagtgtttt

SEQ ID NO: 23850 - DNA, 50 bp, unidentified
  source 1..50: mol_type = unassigned DNA; note = target_57917dd
  misc_feature 1..23: note = LF
  misc_feature 24..25: note = Core
  misc_feature 26..50: note = RF
agcgatgccgtgagggggcgtccaccccatcaacctgccggctcacaaga

SEQ ID NO: 23851 - DNA, 50 bp, unidentified
  source 1..50: mol_type = unassigned DNA; note = target_579d650
  misc_feature 1..24: note = LF
  misc_feature 25: note = Core
  misc_feature 26..50: note = RF
gcgccaactttactaaagagtaacttccgggtcggccacatccatgtgag

SEQ ID NO: 23852 - DNA, 50 bp, unidentified
  source 1..50: mol_type = unassigned DNA; note = target_57ae9df
  misc_feature 1..23: note = LF
  misc_feature 24..25: note = Core
  misc_feature 26..50: note = RF
ttctgattccggagggttaatttgacataaaaggaatgatcgcgatttgc

SEQ ID NO: 23853 - DNA, 50 bp, unidentified
  source 1..50: mol_type = unassigned DNA; note = target_57b3785
  misc_feature 1..23: note = LF
  misc_feature 24..25: note = Core
  misc_feature 26..50: note = RF
cctggtgaggcgtctgcgagacccttcgtggctcgcttcgctcgcacctc

SEQ ID NO: 23854 - DNA, 50 bp, unidentified
  source 1..50: mol_type = unassigned DNA; note = target_57b5ea8
  misc_feature 1..23: note = LF
  misc_feature 24..25: note = Core
  misc_feature 26..50: note = RF
gacagcaagtggagctaacgggactatgttcgaaccccctcggagcagtg

SEQ ID NO: 23855 - DNA, 50 bp, unidentified
  source 1..50: mol_type = unassigned DNA; note = target_57c04c2
  misc_feature 1..22: note = LF
  misc_feature 23..25: note = Core
  misc_feature 26..50: note = RF
gtccgacgcctcggtaaagcctgctcccacggttctgcggcgcctgccgt

SEQ ID NO: 23856 - DNA, 50 bp, unidentified
  source 1..50: mol_type = unassigned DNA; note = target_57c2b4f
  misc_feature 1..23: note = LF
  misc_feature 24..25: note = Core
  misc_feature 26..50: note = RF
acgagccaactgcacttgattggagaagctatgagcgacaaaacagcgag

SEQ ID NO: 23857 - DNA, 50 bp, unidentified
  source 1..50: mol_type = unassigned DNA; note = target_57d136d
  misc_feature 1..24: note = LF
  misc_feature 25: note = Core
  misc_feature 26..50: note = RF
atgctaatgtatggtgcgttaaacgtacaataattttcgatatccaaact

SEQ ID NO: 23858 - DNA, 50 bp, unidentified
  source 1..50: mol_type = unassigned DNA; note = target_57d230e
  misc_feature 1..22: note = LF
  misc_feature 23..25: note = Core
  misc_feature 26..50: note = RF
tttgacgtagtgattttcatggtaaacctcctgctttctacttaattata

SEQ ID NO: 23859 - DNA, 50 bp, unidentified
  source 1..50: mol_type = unassigned DNA; note = target_57d8f28
  misc_feature 1..23: note = LF
  misc_feature 24..25: note = Core
  misc_feature 26..50: note = RF
agaggacgtagagcgagccctcctggattgcttcgctgcgctcgcaatga

SEQ ID NO: 23860 - DNA, 50 bp, unidentified
  source 1..50: mol_type = unassigned DNA; note = target_57d93df
  misc_feature 1..23: note = LF
  misc_feature 24..25: note = Core
  misc_feature 26..50: note = RF
tgaatgccacgccattttttgctgaacttgacgcacacaactcctggaag

SEQ ID NO: 23861 - DNA, 50 bp, unidentified
  source 1..50: mol_type = unassigned DNA; note = target_57e341a
  misc_feature 1..23: note = LF
  misc_feature 24..25: note = Core
  misc_feature 26..50: note = RF
gcttttacttttcaatttagattctaattcattaagaagggcagtgcgaa

SEQ ID NO: 23862 - DNA, 50 bp, unidentified
  source 1..50: mol_type = unassigned DNA; note = target_57e4153
  misc_feature 1..24: note = LF
  misc_feature 25: note = Core
  misc_feature 26..50: note = RF
tcaacataatcgtcgctagcacgcttttgtccaaaaacgttccagagata

SEQ ID NO: 23863 - DNA, 50 bp, unidentified
  source 1..50: mol_type = unassigned DNA; note = target_57e7a6e
  misc_feature 1..23: note = LF
  misc_feature 24..25: note = Core
  misc_feature 26..50: note = RF
ggtttgacggcctatgccgtgctctccccggagacgagttccttcttgcc

SEQ ID NO: 23864 - DNA, 50 bp, unidentified
  source 1..50: mol_type = unassigned DNA; note = target_57ea283
  misc_feature 1..21: note = LF
  misc_feature 22..25: note = Core
  misc_feature 26..50: note = RF
tttctcgtgggcaccgctacggtcatgcgctggcctctccggctggctct

SEQ ID NO: 23865 - DNA, 50 bp, unidentified
  source 1..50: mol_type = unassigned DNA; note = target_57f0c59
  misc_feature 1..24: note = LF
  misc_feature 25: note = Core
  misc_feature 26..50: note = RF
aactatgttggttgtcacttccgatcgggtcaatcgctaccgaaatgggc

SEQ ID NO: 23866 - DNA, 50 bp, unidentified
  source 1..50: mol_type = unassigned DNA; note = target_57f7216
  misc_feature 1..23: note = LF
  misc_feature 24..25: note = Core
  misc_feature 26..50: note = RF
tgactcaatcagcgcttcacctcctgccatccaaaagtcattgagttagt

SEQ ID NO: 23867 - DNA, 50 bp, unidentified
  source 1..50: mol_type = unassigned DNA; note = target_57fd237
  misc_feature 1..23: note = LF
  misc_feature 24..25: note = Core
  misc_feature 26..50: note = RF
cttcccccgaaccacgcttgcgcctttcagcgcacgtggctctccggtga

SEQ ID NO: 23868 - DNA, 50 bp, unidentified
  source 1..50: mol_type = unassigned DNA; note = target_57fd394
  misc_feature 1..23: note = LF
  misc_feature 24..25: note = Core
  misc_feature 26..50: note = RF
ataacaacgaactgcggtggctatgggtccctgcgttcgcagggacgacg

SEQ ID NO: 23869 - DNA, 50 bp, unidentified
  source 1..50: mol_type = unassigned DNA; note = target_57fe71d
  misc_feature 1..23: note = LF
  misc_feature 24..25: note = Core
  misc_feature 26..50: note = RF
caaccaggatgacgaccccgtccctatgggcgaaatgccgcatgaactca

SEQ ID NO: 23870 - DNA, 50 bp, unidentified
  source 1..50: mol_type = unassigned DNA; note = target_580294d
  misc_feature 1..24: note = LF
  misc_feature 25: note = Core
  misc_feature 26..50: note = RF
ttcgttgattgcgtgacccccccccttttttttggcttctcggtgacccc

SEQ ID NO: 23871 - DNA, 50 bp, unidentified
  source 1..50: mol_type = unassigned DNA; note = target_5807b0f
  misc_feature 1..24: note = LF
  misc_feature 25: note = Core
  misc_feature 26..50: note = RF
agcgccgggtcgtccccatctcggcatgtcggacgtcccgaaagcccatc

SEQ ID NO: 23872 - DNA, 50 bp, unidentified
  source 1..50: mol_type = unassigned DNA; note = target_581f3b7
  misc_feature 1..23: note = LF
  misc_feature 24..25: note = Core
  misc_feature 26..50: note = RF
ggttcccatgcgtcaagggagggtggaaagcggtcgcctgctagggtcgc

SEQ ID NO: 23873 - DNA, 50 bp, unidentified
  source 1..50: mol_type = unassigned DNA; note = target_58202d3
  misc_feature 1..23: note = LF
  misc_feature 24..25: note = Core
  misc_feature 26..50: note = RF
gacgttcctccacctatgagtagagccggtggcccgagtgatgcccatgt

SEQ ID NO: 23874 - DNA, 50 bp, unidentified
  source 1..50: mol_type = unassigned DNA; note = target_5823292
  misc_feature 1..21: note = LF
  misc_feature 22..25: note = Core
  misc_feature 26..50: note = RF
ggtgccgatgagcaggtcgccttcccagtggccgggcacggcccggtcag

SEQ ID NO: 23875 - DNA, 50 bp, unidentified
  source 1..50: mol_type = unassigned DNA; note = target_5827f70
  misc_feature 1..23: note = LF
  misc_feature 24..25: note = Core
  misc_feature 26..50: note = RF
gcggggacaaggagattttgacacacctccatctcacattggaatctgga

SEQ ID NO: 23876 - DNA, 50 bp, unidentified
  source 1..50: mol_type = unassigned DNA; note = target_582d8b4
  misc_feature 1..23: note = LF
  misc_feature 24..25: note = Core
  misc_feature 26..50: note = RF
gttgatgtctgcttctctccgaaagcgacctaattgctgcgcgggccgcg

SEQ ID NO: 23877 - DNA, 50 bp, unidentified
  source 1..50: mol_type = unassigned DNA; note = target_582ee2d
  misc_feature 1..22: note = LF
  misc_feature 23..25: note = Core
  misc_feature 26..50: note = RF
aaccgttcaggaattttgtgtcagactcttagaagaagtcgattttattg

SEQ ID NO: 23878 - DNA, 50 bp, unidentified
  source 1..50: mol_type = unassigned DNA; note = target_5830d23
  misc_feature 1..21: note = LF
  misc_feature 22..25: note = Core
  misc_feature 26..50: note = RF
aatcgcacagtcgcgacgccgctcagtcctcggccggttccttccagaac

SEQ ID NO: 23879 - DNA, 50 bp, unidentified
  source 1..50: mol_type = unassigned DNA; note = target_5848edc
  misc_feature 1..24: note = LF
  misc_feature 25: note = Core
  misc_feature 26..50: note = RF
ggcctaacctacgatgaaaggctacgggtaggcgagctttgctcgggaat

SEQ ID NO: 23880 - DNA, 50 bp, unidentified
  source 1..50: mol_type = unassigned DNA; note = target_58508ff
  misc_feature 1..23: note = LF
  misc_feature 24..25: note = Core
  misc_feature 26..50: note = RF
cagtccccgagagattatggttactgttcacgcccgatcgagggcgtgaa

SEQ ID NO: 23881 - DNA, 50 bp, unidentified
  source 1..50: mol_type = unassigned DNA; note = target_58544fc
  misc_feature 1..23: note = LF
  misc_feature 24..25: note = Core
  misc_feature 26..50: note = RF
ccgggccgggccattttcccaaaacctgttcccgattgcgttgtcccgaa

SEQ ID NO: 23882 - DNA, 50 bp, unidentified
  source 1..50: mol_type = unassigned DNA; note = target_5855b0d
  misc_feature 1..23: note = LF
  misc_feature 24..25: note = Core
  misc_feature 26..50: note = RF
caatctaggctcaggcatggattccgggtctccgcttcgctccgcccgga

SEQ ID NO: 23883 - DNA, 50 bp, unidentified
  source 1..50: mol_type = unassigned DNA; note = target_5867cb8
  misc_feature 1..23: note = LF
  misc_feature 24..25: note = Core
  misc_feature 26..50: note = RF
gagcacctgcggaagtcgctgacctgggaccagggcaaggagatgtccaa

SEQ ID NO: 23884 - DNA, 50 bp, unidentified
  source 1..50: mol_type = unassigned DNA; note = target_586d6e1
  misc_feature 1..23: note = LF
  misc_feature 24..25: note = Core
  misc_feature 26..50: note = RF
gcgggtgcaaaatgggatgtcagagagagatagaaacgcgtcctgaaggg

SEQ ID NO: 23885 - DNA, 50 bp, unidentified
  source 1..50: mol_type = unassigned DNA; note = target_5874f0c
  misc_feature 1..24: note = LF
  misc_feature 25: note = Core
  misc_feature 26..50: note = RF
cctggattagccgaaggcgtaatccgacccttggtgctgagcgcgaatac

SEQ ID NO: 23886 - DNA, 50 bp, unidentified
  source 1..50: mol_type = unassigned DNA; note = target_5882110
  misc_feature 1..23: note = LF
  misc_feature 24..25: note = Core
  misc_feature 26..50: note = RF
cacagtcggcatagtttatactcctttctgaagctcggcaataaacctgc

SEQ ID NO: 23887 - DNA, 50 bp, unidentified
  source 1..50: mol_type = unassigned DNA; note = target_58838bf
  misc_feature 1..24: note = LF
  misc_feature 25: note = Core
  misc_feature 26..50: note = RF
atacgaactccttatatggataacttccggttggccgaaccctggagcta

SEQ ID NO: 23888 - DNA, 50 bp, unidentified
  source 1..50: mol_type = unassigned DNA; note = target_5885b45
  misc_feature 1..24: note = LF
  misc_feature 25: note = Core
  misc_feature 26..50: note = RF
ctgcccagctatgagctatatacgttgttacccatagttatttttccaca

SEQ ID NO: 23889 - DNA, 50 bp, unidentified
  source 1..50: mol_type = unassigned DNA; note = target_58881d8
  misc_feature 1..21: note = LF
  misc_feature 22..25: note = Core
  misc_feature 26..50: note = RF
acaaatttcaaatattgagataggatttattgctatgtatatatgtataa

SEQ ID NO: 23890 - DNA, 50 bp, unidentified
  source 1..50: mol_type = unassigned DNA; note = target_5893f8e
  misc_feature 1..22: note = LF
  misc_feature 23..25: note = Core
  misc_feature 26..50: note = RF
ggcgttggctgttgatttgcactgagaacagacccagtattagagtgaac

SEQ ID NO: 23891 - DNA, 50 bp, unidentified
  source 1..50: mol_type = unassigned DNA; note = target_5899135
  misc_feature 1..22: note = LF
  misc_feature 23..25: note = Core
  misc_feature 26..50: note = RF
ttacacttaaactatactgccatttagttgaagaaggaataacaaaaaaa

SEQ ID NO: 23892 - DNA, 50 bp, unidentified
  source 1..50: mol_type = unassigned DNA; note = target_589e8c8
  misc_feature 1..22: note = LF
  misc_feature 23..25: note = Core
  misc_feature 26..50: note = RF
ggagttgattgtcattgagaattgacccatgtgcaaccttgccccggctt

SEQ ID NO: 23893 - DNA, 50 bp, unidentified
  source 1..50: mol_type = unassigned DNA; note = target_58a2ba2
  misc_feature 1..23: note = LF
  misc_feature 24..25: note = Core
  misc_feature 26..50: note = RF
gggaagttctcggagattacttcctgaagtcttccttttcatatttttcc

SEQ ID NO: 23894 - DNA, 50 bp, unidentified
  source 1..50: mol_type = unassigned DNA; note = target_58ac9f6
  misc_feature 1..21: note = LF
  misc_feature 22..25: note = Core
  misc_feature 26..50: note = RF
tcactgttttcgtcattttaatcacctcattgatttttttcgcgctaccc

SEQ ID NO: 23895 - DNA, 50 bp, unidentified
  source 1..50: mol_type = unassigned DNA; note = target_58b00ff
  misc_feature 1..22: note = LF
  misc_feature 23..25: note = Core
  misc_feature 26..50: note = RF
gcatttggggccgcggttctcgaaccaccagtgatgcgatccgtcgatct

SEQ ID NO: 23896 - DNA, 50 bp, unidentified
  source 1..50: mol_type = unassigned DNA; note = target_58b85cc
  misc_feature 1..23: note = LF
  misc_feature 24..25: note = Core
  misc_feature 26..50: note = RF
aatgatagcggtcgacagtgacaagttgaccaagccggtggaagtcgcat

SEQ ID NO: 23897 - DNA, 50 bp, unidentified
  source 1..50: mol_type = unassigned DNA; note = target_58bf367
  misc_feature 1..24: note = LF
  misc_feature 25: note = Core
  misc_feature 26..50: note = RF
aaccgttcatatgtgaggcctaacgttcgagctaagctgcccgcgtaggc

SEQ ID NO: 23898 - DNA, 50 bp, unidentified
  source 1..50: mol_type = unassigned DNA; note = target_58c202f
  misc_feature 1..23: note = LF
  misc_feature 24..25: note = Core
  misc_feature 26..50: note = RF
acagttctgcgcggtgcgtagcccgggtaaggcgtcagccgctacccggg

SEQ ID NO: 23899 - DNA, 50 bp, unidentified
  source 1..50: mol_type = unassigned DNA; note = target_58c5521
  misc_feature 1..23: note = LF
  misc_feature 24..25: note = Core
  misc_feature 26..50: note = RF
acaaccgtagccagtttggcaactgggaaggcgacttgatgatctttgaa

SEQ ID NO: 23900 - DNA, 50 bp, unidentified
  source 1..50: mol_type = unassigned DNA; note = target_58c85a7
  misc_feature 1..22: note = LF
  misc_feature 23..25: note = Core
  misc_feature 26..50: note = RF
ggatcgagcctggcggccgagcctaggctggggacgttcggctaaagacg

SEQ ID NO: 23901 - DNA, 50 bp, unidentified
  source 1..50: mol_type = unassigned DNA; note = target_58cb5ee
  misc_feature 1..24: note = LF
  misc_feature 25: note = Core
  misc_feature 26..50: note = RF
agtctcgacgggcctgtcagtaattcgtgttcaaggcatatgatgctccc

SEQ ID NO: 23902 - DNA, 50 bp, unidentified
  source 1..50: mol_type = unassigned DNA; note = target_58cd4f7
  misc_feature 1..24: note = LF
  misc_feature 25: note = Core
  misc_feature 26..50: note = RF
agctgtcgctgacagtcttctgcccaacacgtggtactggtccaccgacg

SEQ ID NO: 23903 - DNA, 50 bp, unidentified
  source 1..50: mol_type = unassigned DNA; note = target_58cf69c
  misc_feature 1..22: note = LF
  misc_feature 23..25: note = Core
  misc_feature 26..50: note = RF
ataatcttcaactaacgcccccgttttgtttaagaacatttcttcacaaa

SEQ ID NO: 23904 - DNA, 50 bp, unidentified
  source 1..50: mol_type = unassigned DNA; note = target_58d9ed7
  misc_feature 1..24: note = LF
  misc_feature 25: note = Core
  misc_feature 26..50: note = RF
ggcggtcgaactggctaggctgcccgcatgacgcagtacgacatcgcgat

SEQ ID NO: 23905 - DNA, 50 bp, unidentified
  source 1..50: mol_type = unassigned DNA; note = target_58dac5b
  misc_feature 1..23: note = LF
  misc_feature 24..25: note = Core
  misc_feature 26..50: note = RF
cgtgggatcgagaccgggtgtccctgaaggtcgctcatggaacgaggtcg

SEQ ID NO: 23906 - DNA, 50 bp, unidentified
  source 1..50: mol_type = unassigned DNA; note = target_58ef10b
  misc_feature 1..24: note = LF
  misc_feature 25: note = Core
  misc_feature 26..50: note = RF
gcgaacagcgcgcctaacccaggctacgattactaagaatagaacccacc

SEQ ID NO: 23907 - DNA, 50 bp, unidentified
  source 1..50: mol_type = unassigned DNA; note = target_58f2f01
  misc_feature 1..23: note = LF
  misc_feature 24..25: note = Core
  misc_feature 26..50: note = RF
ccctgtcgcggctgaagccgctcctacagcgtctgcggttcagcgcaaaa

SEQ ID NO: 23908 - DNA, 50 bp, unidentified
  source 1..50: mol_type = unassigned DNA; note = target_59014ff
  misc_feature 1..23: note = LF
  misc_feature 24..25: note = Core
  misc_feature 26..50: note = RF
cctcgccccgctcttgcggggagagggtcggggtgagggggccctccacg

SEQ ID NO: 23909 - DNA, 50 bp, unidentified
  source 1..50: mol_type = unassigned DNA; note = target_5913cba
  misc_feature 1..24: note = LF
  misc_feature 25: note = Core
  misc_feature 26..50: note = RF
cccaataaacagagtctaagagcctcttaattttccaattagaaaatatt

SEQ ID NO: 23910 - DNA, 50 bp, unidentified
  source 1..50: mol_type = unassigned DNA; note = target_591543f
  misc_feature 1..23: note = LF
  misc_feature 24..25: note = Core
  misc_feature 26..50: note = RF
aaaatcaataccttaggaggtagaggttcgacgccagtcgcgttcgctcc

SEQ ID NO: 23911 - DNA, 50 bp, unidentified
  source 1..50: mol_type = unassigned DNA; note = target_59175f7
  misc_feature 1..23: note = LF
  misc_feature 24..25: note = Core
  misc_feature 26..50: note = RF
gggcacgctgcgctttgcccatcctacggctgcccccgctcggcatgggt

SEQ ID NO: 23912 - DNA, 50 bp, unidentified
  source 1..50: mol_type = unassigned DNA; note = target_5918153
  misc_feature 1..23: note = LF
  misc_feature 24..25: note = Core
  misc_feature 26..50: note = RF
cgagcgagaagaacaccactccgataggccagtccgatggagctgccaac

SEQ ID NO: 23913 - DNA, 50 bp, unidentified
  source 1..50: mol_type = unassigned DNA; note = target_591c089
  misc_feature 1..23: note = LF
  misc_feature 24..25: note = Core
  misc_feature 26..50: note = RF
ttcgcggcccggcgccttaaagctgctggtccgcaaccggcccaactccc

SEQ ID NO: 23914 - DNA, 50 bp, unidentified
  source 1..50: mol_type = unassigned DNA; note = target_5921852
  misc_feature 1..23: note = LF
  misc_feature 24..25: note = Core
  misc_feature 26..50: note = RF
gacacggcgagcatggcgggctcctctcagtcataccgggtaggtatatc

SEQ ID NO: 23915 - DNA, 50 bp, unidentified
  source 1..50: mol_type = unassigned DNA; note = target_5923fc1
  misc_feature 1..23: note = LF
  misc_feature 24..25: note = Core
  misc_feature 26..50: note = RF
gccccgtttcgctagcaagccagctcctacaaggcccctgatctctggca

SEQ ID NO: 23916 - DNA, 50 bp, unidentified; identical to SEQ ID NO: 21190
  source 1..50: mol_type = unassigned DNA; note = target_592b03a
  misc_feature 1..22: note = LF
  misc_feature 23..25: note = Core
  misc_feature 26..50: note = RF

SEQ ID NO: 23917 - DNA, 50 bp, unidentified
  source 1..50: mol_type = unassigned DNA; note = target_5930e2f
  misc_feature 1..23: note = LF
  misc_feature 24..25: note = Core
  misc_feature 26..50: note = RF
ttgggcattcgcttgcaggcaagctcccacagcggcttcgtggcagggcc

SEQ ID NO: 23918 - DNA, 50 bp, unidentified
  source 1..50: mol_type = unassigned DNA; note = target_593e611
  misc_feature 1..23: note = LF
  misc_feature 24..25: note = Core
  misc_feature 26..50: note = RF
ggatgtcggcccggatgaacaacctactgaaagatcacagctagctcact

SEQ ID NO: 23919 - DNA, 50 bp, unidentified
  source 1..50: mol_type = unassigned DNA; note = target_594021b
  misc_feature 1..24: note = LF
  misc_feature 25: note = Core
  misc_feature 26..50: note = RF
ctaatcccccggcccacctacccccactccccctcccaactaggtcgcat

SEQ ID NO: 23920 - DNA, 50 bp, unidentified
  source 1..50: mol_type = unassigned DNA; note = target_5942356
  misc_feature 1..23: note = LF
  misc_feature 24..25: note = Core
  misc_feature 26..50: note = RF
gtcatcttctggatcaatcaatgagtcctgaccctacgattctgttcaaa

SEQ ID NO: 23921 - DNA, 50 bp, unidentified
  source 1..50: mol_type = unassigned DNA; note = target_594f45c
  misc_feature 1..23: note = LF
  misc_feature 24..25: note = Core
  misc_feature 26..50: note = RF
gatgaaatagaattgcacctcatctgccgcaagtcggtcgtcaggcgcca

SEQ ID NO: 23922 - DNA, 50 bp, unidentified
  source 1..50: mol_type = unassigned DNA; note = target_5952163
  misc_feature 1..24: note = LF
  misc_feature 25: note = Core
  misc_feature 26..50: note = RF
gcctgggactcggcaaaagccagtttccgaaaatcccgtttatcaggaca

SEQ ID NO: 23923 - DNA, 50 bp, unidentified
  source 1..50: mol_type = unassigned DNA; note = target_59569c3
  misc_feature 1..22: note = LF
  misc_feature 23..25: note = Core
  misc_feature 26..50: note = RF
tagtgcaagcagccgccgcttctgacccatagcagaagtgccctcgcacg

SEQ ID NO: 23924 - DNA, 50 bp, unidentified
  source 1..50: mol_type = unassigned DNA; note = target_5957028
  misc_feature 1..24: note = LF
  misc_feature 25: note = Core
  misc_feature 26..50: note = RF
agacattccgttcgcaacccaaagcggccgttcagattagatccgaatta

SEQ ID NO: 23925 - DNA, 50 bp, unidentified
  source 1..50: mol_type = unassigned DNA; note = target_595a5ac
  misc_feature 1..24: note = LF
  misc_feature 25: note = Core
  misc_feature 26..50: note = RF
cgaacgtccgctatcggccagaagcggacattcgccagagttcagctcaa

SEQ ID NO: 23926 - DNA, 50 bp, unidentified
  source 1..50: mol_type = unassigned DNA; note = target_595af69
  misc_feature 1..24: note = LF
  misc_feature 25: note = Core
  misc_feature 26..50: note = RF
gccaacgacgtcttttatccggaggccgcgtaatgaactattccggacac

SEQ ID NO: 23927 - DNA, 50 bp, unidentified
  source 1..50: mol_type = unassigned DNA; note = target_59610c1
  misc_feature 1..23: note = LF
  misc_feature 24..25: note = Core
  misc_feature 26..50: note = RF
tttattggggtgaaatgtacttcctgaaatgcttttttggtctttcttgc

SEQ ID NO: 23928 - DNA, 50 bp, unidentified
  source 1..50: mol_type = unassigned DNA; note = target_596165a
  misc_feature 1..23: note = LF
  misc_feature 24..25: note = Core
  misc_feature 26..50: note = RF
gccaagctttccatggattcctcctttcttactggtaagattataagcta

SEQ ID NO: 23929 - DNA, 50 bp, unidentified
  source 1..50: mol_type = unassigned DNA; note = target_5963ef5
  misc_feature 1..23: note = LF
  misc_feature 24..25: note = Core
  misc_feature 26..50: note = RF
taatagagattgcttcactccgttcgcaatgacaatggaattgcacagct

SEQ ID NO: 23930 - DNA, 50 bp, unidentified
  source 1..50: mol_type = unassigned DNA; note = target_596d7fc
  misc_feature 1..23: note = LF
  misc_feature 24..25: note = Core
  misc_feature 26..50: note = RF
cgggccggtcgtctcgcccccctttttgccccgatggacgcggcgtccaa

SEQ ID NO: 23931 - DNA, 50 bp, unidentified
  source 1..50: mol_type = unassigned DNA; note = target_59799e3
  misc_feature 1..24: note = LF
  misc_feature 25: note = Core
  misc_feature 26..50: note = RF
actttttatgcagcgcggcgctgttgcataaatcccgaacagggcgagtt

SEQ ID NO: 23932 - DNA, 50 bp, unidentified
  source 1..50: mol_type = unassigned DNA; note = target_597bede
  misc_feature 1..24: note = LF
  misc_feature 25: note = Core
  misc_feature 26..50: note = RF
aaggagactcttcagcggccttgttgatcaattccaatcaatggacgcag

SEQ ID NO: 23933 - DNA, 50 bp, unidentified
  source 1..50: mol_type = unassigned DNA; note = target_597e712
  misc_feature 1..23: note = LF
  misc_feature 24..25: note = Core
  misc_feature 26..50: note = RF
aacaccgtatagaacgtccggttctgccgctgtcgggatgggcgttcttg

SEQ ID NO: 23934 - DNA, 50 bp, unidentified
  source 1..50: mol_type = unassigned DNA; note = target_5993b5b
  misc_feature 1..23: note = LF
  misc_feature 24..25: note = Core
  misc_feature 26..50: note = RF
cggcatggatgccgcgccagagcctccagggacggattcacggcgtgtcc

SEQ ID NO: 23935 - DNA, 50 bp, unidentified
  source 1..50: mol_type = unassigned DNA; note = target_59b1605
  misc_feature 1..24: note = LF
  misc_feature 25: note = Core
  misc_feature 26..50: note = RF
ttttccggcgggcatcctgcgactttccgtaaacgccgtttatcgaccat

SEQ ID NO: 23936 - DNA, 50 bp, unidentified
  source 1..50: mol_type = unassigned DNA; note = target_59c3ca5
  misc_feature 1..24: note = LF
  misc_feature 25: note = Core
  misc_feature 26..50: note = RF
ccggtgttgttggtgtaatggcgatgttatgtaagttatccgagacgcac

SEQ ID NO: 23937 - DNA, 50 bp, unidentified
  source 1..50: mol_type = unassigned DNA; note = target_59d06ac
  misc_feature 1..23: note = LF
  misc_feature 24..25: note = Core
  misc_feature 26..50: note = RF
gtgccatttacgtcttatgtctcctttcttaaaaaacactgcccttgtgg

SEQ ID NO: 23938 - DNA, 50 bp, unidentified
  source 1..50: mol_type = unassigned DNA; note = target_59d55fb
  misc_feature 1..24: note = LF
  misc_feature 25: note = Core
  misc_feature 26..50: note = RF
tatggggttgtgcaacggttaccattgttgtaaacagttttttattcacg

SEQ ID NO: 23939 - DNA, 50 bp, unidentified
  source 1..50: mol_type = unassigned DNA; note = target_59d62fb
  misc_feature 1..22: note = LF
  misc_feature 23..25: note = Core
  misc_feature 26..50: note = RF
aatcgactgtcgccgtccaacgagacttatgaatcgatcagccgttatcg

SEQ ID NO: 23940 - DNA, 50 bp, unidentified
  source 1..50: mol_type = unassigned DNA; note = target_59e6d82
  misc_feature 1..23: note = LF
  misc_feature 24..25: note = Core
  misc_feature 26..50: note = RF
ggccccgtcgtgacggtcccgtcctctcagtgacgcggcgccggtcatca

SEQ ID NO: 23941 - DNA, 50 bp, unidentified
  source 1..50: mol_type = unassigned DNA; note = target_59f5263
  misc_feature 1..23: note = LF
  misc_feature 24..25: note = Core
  misc_feature 26..50: note = RF
gattaatagccataacgtccctccttatttgtacatcgccgtaagtttgt

SEQ ID NO: 23942 - DNA, 50 bp, unidentified
  source 1..50: mol_type = unassigned DNA; note = target_59f653d
  misc_feature 1..23: note = LF
  misc_feature 24..25: note = Core
  misc_feature 26..50: note = RF
tcggctctctcatggacaagctgctcagaagcccgtgatcgggagcaacg

SEQ ID NO: 23943 - DNA, 50 bp, unidentified
  source 1..50: mol_type = unassigned DNA; note = target_59f6f8f
  misc_feature 1..21: note = LF
  misc_feature 22..25: note = Core
  misc_feature 26..50: note = RF
tccgtccggcccagcttgtcgcccccgctcgcgcggtggcggaccggcgg

SEQ ID NO: 23944 - DNA, 50 bp, unidentified
  source 1..50: mol_type = unassigned DNA; note = target_59f81f1
  misc_feature 1..23: note = LF
  misc_feature 24..25: note = Core
  misc_feature 26..50: note = RF
cgactgcgctccgctggtcgaccctctctacgctaaagcgtaaagagggt

SEQ ID NO: 23945 - DNA, 50 bp, unidentified
  source 1..50: mol_type = unassigned DNA; note = target_5a00f0d
  misc_feature 1..22: note = LF
  misc_feature 23..25: note = Core
  misc_feature 26..50: note = RF
gcctgtcaccattcatatcttttcacctcatacttcaataaacttttcat

SEQ ID NO: 23946 - DNA, 50 bp, unidentified
  source 1..50: mol_type = unassigned DNA; note = target_5a0401b
  misc_feature 1..23: note = LF
  misc_feature 24..25: note = Core
  misc_feature 26..50: note = RF
ccaccagcttcacacccagagcccttcgacaagctcagggcgaacggaat

SEQ ID NO: 23947 - DNA, 50 bp, unidentified
  source 1..50: mol_type = unassigned DNA; note = target_5a099ac
  misc_feature 1..24: note = LF
  misc_feature 25: note = Core
  misc_feature 26..50: note = RF
ttcatttcattttgcactgccgctatcacggaatgatccgaatcttgagc

SEQ ID NO: 23948 - DNA, 50 bp, unidentified
  source 1..50: mol_type = unassigned DNA; note = target_5a26db1
  misc_feature 1..24: note = LF
  misc_feature 25: note = Core
  misc_feature 26..50: note = RF
aattgtacgcatgctccaccctcctcctaataatccaatagatttttcat

SEQ ID NO: 23949 - DNA, 50 bp, unidentified
  source 1..50: mol_type = unassigned DNA; note = target_5a27663
  misc_feature 1..23: note = LF
  misc_feature 24..25: note = Core
  misc_feature 26..50: note = RF
acccagcacttcagtacctgtagtggtctaatcatcccggacaccatttt

SEQ ID NO: 23950 - DNA, 50 bp, unidentified
  source 1..50: mol_type = unassigned DNA; note = target_5a2de9e
  misc_feature 1..23: note = LF
  misc_feature 24..25: note = Core
  misc_feature 26..50: note = RF
gtcaccgctactgtggtcacgaggtctccggtttggttccggttgtgctt

SEQ ID NO: 23951 - DNA, 50 bp, unidentified
  source 1..50: mol_type = unassigned DNA; note = target_5a35f14
  misc_feature 1..24: note = LF
  misc_feature 25: note = Core
  misc_feature 26..50: note = RF
cgtcagtcgatcttcactgttggttttccacgcggaactgagcctaaccg

SEQ ID NO: 23952 - DNA, 50 bp, unidentified
  source 1..50: mol_type = unassigned DNA; note = target_5a3d13d
  misc_feature 1..23: note = LF
  misc_feature 24..25: note = Core
  misc_feature 26..50: note = RF
caccgctatcgcgagcaggctcgctcccacagggttccgcgctagaagta

SEQ ID NO: 23953 - DNA, 50 bp, unidentified
  source 1..50: mol_type = unassigned DNA; note = target_5a4625f
  misc_feature 1..23: note = LF
  misc_feature 24..25: note = Core
  misc_feature 26..50: note = RF
gggtctcgcccaaactcgcttcgctcaaacagctgcgagccctgatccgc

SEQ ID NO: 23954 - DNA, 50 bp, unidentified
  source 1..50: mol_type = unassigned DNA; note = target_5a4b032
  misc_feature 1..24: note = LF
  misc_feature 25: note = Core
  misc_feature 26..50: note = RF
gaagtttttgatatatccatattttcccctcctgtaagaaagtacataaa

SEQ ID NO: 23955 - DNA, 50 bp, unidentified
  source 1..50: mol_type = unassigned DNA; note = target_5a4de49
  misc_feature 1..23: note = LF
  misc_feature 24..25: note = Core
  misc_feature 26..50: note = RF
agatcaatacgaacacagatggatcgttattagccgcctccccggcggga

SEQ ID NO: 23956 - DNA, 50 bp, unidentified
  source 1..50: mol_type = unassigned DNA; note = target_5a4e2ec
  misc_feature 1..24: note = LF
  misc_feature 25: note = Core
  misc_feature 26..50: note = RF
cagtgagcaactaccgctcatcggcagatccgtgcgttgaggcgcccgga

SEQ ID NO: 23957 - DNA, 50 bp, unidentified
  source 1..50: mol_type = unassigned DNA; note = target_5a584e0
  misc_feature 1..23: note = LF
  misc_feature 24..25: note = Core
  misc_feature 26..50: note = RF
ccgggaacgtatctctttccgtacacctataatatagcagacacttccgt

SEQ ID NO: 23958 - DNA, 50 bp, unidentified
  source 1..50: mol_type = unassigned DNA; note = target_5a5e403
  misc_feature 1..20: note = LF
  misc_feature 21..25: note = Core
  misc_feature 26..50: note = RF
cctcccgctcgggcaggctgctcacgccggtaccagggcggccgcctggg

SEQ ID NO: 23959 - DNA, 50 bp, unidentified
  source 1..50: mol_type = unassigned DNA; note = target_5a62041
  misc_feature 1..23: note = LF
  misc_feature 24..25: note = Core
  misc_feature 26..50: note = RF
gcgttttccggtgctccgaagcagacgttcaccgtccagccgtgccagcg

SEQ ID NO: 23960 - DNA, 50 bp, unidentified
  source 1..50: mol_type = unassigned DNA; note = target_5a651cf
  misc_feature 1..23: note = LF
  misc_feature 24..25: note = Core
  misc_feature 26..50: note = RF
aacgacgcgccttgttgcgccattggttcgagcccaatggcgacggcgtt

SEQ ID NO: 23961 - DNA, 50 bp, unidentified
  source 1..50: mol_type = unassigned DNA; note = target_5a6f86b
  misc_feature 1..21: note = LF
  misc_feature 22..25: note = Core
  misc_feature 26..50: note = RF
aacgccacttcatgatcagttctcctcggcgccggctcagccgcgccgga

SEQ ID NO: 23962 - DNA, 50 bp, unidentified
  source 1..50: mol_type = unassigned DNA; note = target_5a75301
  misc_feature 1..23: note = LF
  misc_feature 24..25: note = Core
  misc_feature 26..50: note = RF
gttcagggtttgcacaggacttgtaggagtgggtgctctggtcttcgata

SEQ ID NO: 23963 - DNA, 50 bp, unidentified
  source 1..50: mol_type = unassigned DNA; note = target_5a7c4a9
  misc_feature 1..21: note = LF
  misc_feature 22..25: note = Core
  misc_feature 26..50: note = RF
ccagcgtgggccagggactcgctcatgacggcttctacccgctgcagcgt

SEQ ID NO: 23964 - DNA, 50 bp, unidentified
  source 1..50: mol_type = unassigned DNA; note = target_5a7c886
  misc_feature 1..23: note = LF
  misc_feature 24..25: note = Core
  misc_feature 26..50: note = RF
accgctcccgttgtgggccggatctttcgggagttcctcagtggcagggg

SEQ ID NO: 23965 - DNA, 50 bp, unidentified
  source 1..50: mol_type = unassigned DNA; note = target_5a9d652
  misc_feature 1..23: note = LF
  misc_feature 24..25: note = Core
  misc_feature 26..50: note = RF
ggaacggtggtatccgtcgtcataggcgtatcgctcctctggaggttcgg

SEQ ID NO: 23966 - DNA, 50 bp, unidentified
  source 1..50: mol_type = unassigned DNA; note = target_5aa5eb3
  misc_feature 1..23: note = LF
  misc_feature 24..25: note = Core
  misc_feature 26..50: note = RF
gcagcctcgtacctcggcagcggctacagggtttttgcaggattcaaaaa

SEQ ID NO: 23967 - DNA, 50 bp, unidentified
  source 1..50: mol_type = unassigned DNA; note = target_5aa690f
  misc_feature 1..23: note = LF
  misc_feature 24..25: note = Core
  misc_feature 26..50: note = RF
tcaatttgcgaaacttattgtaccttatctttgaaacatacgcagaagtc

SEQ ID NO: 23968 - DNA, 50 bp, unidentified
  source 1..50: mol_type = unassigned DNA; note = target_5ab1693
  misc_feature 1..24: note = LF
  misc_feature 25: note = Core
  misc_feature 26..50: note = RF
aggggcaatgatgttgccgcgatcctccactgcgcacgaagcgtgctccg

SEQ ID NO: 23969 - DNA, 50 bp, unidentified
  source 1..50: mol_type = unassigned DNA; note = target_5ab9fc6
  misc_feature 1..23: note = LF
  misc_feature 24..25: note = Core
  misc_feature 26..50: note = RF
gttcaggaacaagcactgagcttgttccttatcgtcgggcccggtcgtgt

SEQ ID NO: 23970 - DNA, 50 bp, unidentified
  source 1..50: mol_type = unassigned DNA; note = target_5abeb6a
  misc_feature 1..23: note = LF
  misc_feature 24..25: note = Core
  misc_feature 26..50: note = RF
atggttacgtattaaatcccctcctgtctttagaaaaggaatcctctttc

SEQ ID NO: 23971 - DNA, 50 bp, unidentified
  source 1..50: mol_type = unassigned DNA; note = target_5ac114d
  misc_feature 1..23: note = LF
  misc_feature 24..25: note = Core
  misc_feature 26..50: note = RF
aagcctgcggagtgatttttactagaacctatctcaaaatcgactgaaga

SEQ ID NO: 23972 - DNA, 50 bp, unidentified
  source 1..50: mol_type = unassigned DNA; note = target_5ac4804
  misc_feature 1..24: note = LF
  misc_feature 25: note = Core
  misc_feature 26..50: note = RF
acgcacgggcacctgcacgactgaccgtcaggcctcgtgcagcacccggc

SEQ ID NO: 23973 - DNA, 50 bp, unidentified
  source 1..50: mol_type = unassigned DNA; note = target_5ac7e76
  misc_feature 1..23: note = LF
  misc_feature 24..25: note = Core
  misc_feature 26..50: note = RF
gctttccgaaaatcattctatttctcctctagcaatttggaaattgtttc

SEQ ID NO: 23974 - DNA, 50 bp, unidentified
  source 1..50: mol_type = unassigned DNA; note = target_5aceb13
  misc_feature 1..23: note = LF
  misc_feature 24..25: note = Core
  misc_feature 26..50: note = RF
gacggtgagcgatggaacgccactggtccgagagacatcgcgaacgcgtc

SEQ ID NO: 23975 - DNA, 50 bp, unidentified
  source 1..50: mol_type = unassigned DNA; note = target_5ad39af
  misc_feature 1..21: note = LF
  misc_feature 22..25: note = Core
  misc_feature 26..50: note = RF
cggtaaccccgcactgcgccaccccccgtaacagcaaccggctctgagtt

SEQ ID NO: 23976 - DNA, 50 bp, unidentified
  source 1..50: mol_type = unassigned DNA; note = target_5ade38f
  misc_feature 1..23: note = LF
  misc_feature 24..25: note = Core
  misc_feature 26..50: note = RF
gtcggacttttcacgtagcgagcctaggccgtttttcagacgggaataac

SEQ ID NO: 23977 - DNA, 50 bp, unidentified
  source 1..50: mol_type = unassigned DNA; note = target_5ae7246
  misc_feature 1..24: note = LF
  misc_feature 25: note = Core
  misc_feature 26..50: note = RF
tgcaggatttctcgtgatgtccgctcggggtcattagggcggcgcaggaa

SEQ ID NO: 23978 - DNA, 50 bp, unidentified
  source 1..50: mol_type = unassigned DNA; note = target_5af01bd
  misc_feature 1..24: note = LF
  misc_feature 25: note = Core
  misc_feature 26..50: note = RF
ttaaggactggttttccgacaggctgtgtaaaaactattgatcacctttt

SEQ ID NO: 23979 - DNA, 50 bp, unidentified
  source 1..50: mol_type = unassigned DNA; note = target_5af7dfe
  misc_feature 1..23: note = LF
  misc_feature 24..25: note = Core
  misc_feature 26..50: note = RF
attcattctcgcatacctccaatctgtaaaaatcgggcgtccatcgcgcc

SEQ ID NO: 23980 - DNA, 50 bp, unidentified
  source 1..50: mol_type = unassigned DNA; note = target_5afc5f5
  misc_feature 1..22: note = LF
  misc_feature 23..25: note = Core
  misc_feature 26..50: note = RF
ccgcgggatcgccgctgaagcggctcctacagaaagccagtccacagaaa

SEQ ID NO: 23981 - DNA, 50 bp, unidentified
  source 1..50: mol_type = unassigned DNA; note = target_5b06b90
  misc_feature 1..23: note = LF
  misc_feature 24..25: note = Core
  misc_feature 26..50: note = RF
cgtcgagtggtcggggtctggggagcaacggaaccgaaagttcgattcga

SEQ ID NO: 23982 - DNA, 50 bp, unidentified
  source 1..50: mol_type = unassigned DNA; note = target_5b07631
  misc_feature 1..23: note = LF
  misc_feature 24..25: note = Core
  misc_feature 26..50: note = RF
gggataaagcccctttgcccatcctacaattcacgcgttttaaacactta

SEQ ID NO: 23983 - DNA, 50 bp, unidentified
  source 1..50: mol_type = unassigned DNA; note = target_5b08017
  misc_feature 1..23: note = LF
  misc_feature 24..25: note = Core
  misc_feature 26..50: note = RF
gccgccttttttagcacttccctctcctcgcgcagaaggcagacttcttt

SEQ ID NO: 23984 - DNA, 50 bp, unidentified
  source 1..50: mol_type = unassigned DNA; note = target_5b08717
  misc_feature 1..23: note = LF
  misc_feature 24..25: note = Core
  misc_feature 26..50: note = RF
cttgcccttgtgcgatccgagattgatgacgatgtcaccgggcttgaggg

SEQ ID NO: 23985 - DNA, 50 bp, unidentified
  source 1..50: mol_type = unassigned DNA; note = target_5b15f06
  misc_feature 1..24: note = LF
  misc_feature 25: note = Core
  misc_feature 26..50: note = RF
aaaacggctgaatcgcgacgcacctgggatagtgcggctccaaccgttga

SEQ ID NO: 23986 - DNA, 50 bp, unidentified
  source 1..50: mol_type = unassigned DNA; note = target_5b20e9f
  misc_feature 1..23: note = LF
  misc_feature 24..25: note = Core
  misc_feature 26..50: note = RF
tggggttcgttcctcaccccaacctacggcctgtggattgccggaacgac

SEQ ID NO: 23987 - DNA, 50 bp, unidentified
  source 1..50: mol_type = unassigned DNA; note = target_5b21dba
  misc_feature 1..22: note = LF
  misc_feature 23..25: note = Core
  misc_feature 26..50: note = RF
cgggcatagcgcagatcactggagagttcatgcatgaagttgccgacctt

SEQ ID NO: 23988 - DNA, 50 bp, unidentified
  source 1..50: mol_type = unassigned DNA; note = target_5b23924
  misc_feature 1..23: note = LF
  misc_feature 24..25: note = Core
  misc_feature 26..50: note = RF
gatcctaccggcgtcagccggtaaggtcattcagtggaacctctgcaacg

SEQ ID NO: 23989 - DNA, 50 bp, unidentified
  source 1..50: mol_type = unassigned DNA; note = target_5b2b783
  misc_feature 1..24: note = LF
  misc_feature 25: note = Core
  misc_feature 26..50: note = RF
gtggccaccggttgtaaccgccccccccccgtgcggcacacgctcgccgc

SEQ ID NO: 23990 - DNA, 50 bp, unidentified
  source 1..50: mol_type = unassigned DNA; note = target_5b31d6e
  misc_feature 1..23: note = LF
  misc_feature 24..25: note = Core
  misc_feature 26..50: note = RF
aatagttctggaacgacggcttttggcccttctctaccgtcctcgccccg

SEQ ID NO: 23991 - DNA, 50 bp, unidentified
  source 1..50: mol_type = unassigned DNA; note = target_5b3d676
  misc_feature 1..24: note = LF
  misc_feature 25: note = Core
  misc_feature 26..50: note = RF
gcttcccgcgcatccgctcatcggcagtttcggacgtgggtcgacacccg

SEQ ID NO: 23992 - DNA, 50 bp, unidentified
  source 1..50: mol_type = unassigned DNA; note = target_5b3fbf2
  misc_feature 1..23: note = LF
  misc_feature 24..25: note = Core
  misc_feature 26..50: note = RF
ggctgtaactgaatttacaccatcttgacggactcaaccaaacattctgg

SEQ ID NO: 23993 - DNA, 50 bp, unidentified
  source 1..50: mol_type = unassigned DNA; note = target_5b40560
  misc_feature 1..23: note = LF
  misc_feature 24..25: note = Core
  misc_feature 26..50: note = RF
tcctcatgagcagcgcattctcgtacgctaaggcaatgttgaaacggagg

SEQ ID NO: 23994 - DNA, 50 bp, unidentified
  source 1..50: mol_type = unassigned DNA; note = target_5b43397
  misc_feature 1..23: note = LF
  misc_feature 24..25: note = Core
  misc_feature 26..50: note = RF
aaggccgggatctatgcctgccatggacaccggcattcgccggcatgacg

SEQ ID NO: 23995 - DNA, 50 bp, unidentified
  source 1..50: mol_type = unassigned DNA; note = target_5b47b76
  misc_feature 1..24: note = LF
  misc_feature 25: note = Core
  misc_feature 26..50: note = RF
tggccgaggacaccaaaagccagttggtgataaacccgtttgtcaggagc

SEQ ID NO: 23996 - DNA, 50 bp, unidentified
  source 1..50: mol_type = unassigned DNA; note = target_5b4878b
  misc_feature 1..24: note = LF
  misc_feature 25: note = Core
  misc_feature 26..50: note = RF
accatgcgaactccagtgcctaacgttcgatttgagcggcgcgcgggttt

SEQ ID NO: 23997 - DNA, 50 bp, unidentified
  source 1..50: mol_type = unassigned DNA; note = target_5b51ad4
  misc_feature 1..22: note = LF
  misc_feature 23..25: note = Core
  misc_feature 26..50: note = RF
aactgtcttcattttactcctcctttcatttctgtgtttcatagatttca

SEQ ID NO: 23998 - DNA, 50 bp, unidentified
  source 1..50: mol_type = unassigned DNA; note = target_5b589d4
  misc_feature 1..23: note = LF
  misc_feature 24..25: note = Core
  misc_feature 26..50: note = RF
gcatagataatgtgctggcttattttttttgccataatttacatattttt

SEQ ID NO: 23999 - DNA, 50 bp, unidentified
  source 1..50: mol_type = unassigned DNA; note = target_5b6bb0b
  misc_feature 1..24: note = LF
  misc_feature 25: note = Core
  misc_feature 26..50: note = RF
ctcgcataggcggccggagtccgttccgggtcatgtgtggacgacgcccg

SEQ ID NO: 24000 - DNA, 50 bp, unidentified
  source 1..50: mol_type = unassigned DNA; note = target_5b6fc0b
  misc_feature 1..23: note = LF
  misc_feature 24..25: note = Core
  misc_feature 26..50: note = RF
gggcctcatcgccggcaagccagctcccacaaggatcgcgcaacggcgac

SEQ ID NO: 24001 - DNA, 50 bp, unidentified
  source 1..50: mol_type = unassigned DNA; note = target_5b77bd9
  misc_feature 1..24: note = LF
  misc_feature 25: note = Core
  misc_feature 26..50: note = RF
ttaaatcgctattttttatatacgttgttggcagctgcctttattctttt

SEQ ID NO: 24002 - DNA, 50 bp, unidentified
  source 1..50: mol_type = unassigned DNA; note = target_5b7d69e
  misc_feature 1..23: note = LF
  misc_feature 24..25: note = Core
  misc_feature 26..50: note = RF
gggcacgcttcgctttgcccaccctacgacctgctcgcttcgaccgtggg

SEQ ID NO: 24003 - DNA, 50 bp, unidentified
  source 1..50: mol_type = unassigned DNA; note = target_5b8969b
  misc_feature 1..24: note = LF
  misc_feature 25: note = Core
  misc_feature 26..50: note = RF
cgggatcttgctgactcctagacccaccccccaggccgaatggccaggaa

SEQ ID NO: 24004 - DNA, 50 bp, unidentified
  source 1..50: mol_type = unassigned DNA; note = target_5b9824e
  misc_feature 1..24: note = LF
  misc_feature 25: note = Core
  misc_feature 26..50: note = RF
aatacattcttttattcatatttatcacacattttattaataaatactat

SEQ ID NO: 24005 - DNA, 50 bp, unidentified; identical to SEQ ID NO: 21190
  source 1..50: mol_type = unassigned DNA; note = target_5ba3e2e
  misc_feature 1..22: note = LF
  misc_feature 23..25: note = Core
  misc_feature 26..50: note = RF

SEQ ID NO: 24006 - DNA, 50 bp, unidentified
  source 1..50: mol_type = unassigned DNA; note = target_5bad4bd
  misc_feature 1..24: note = LF
  misc_feature 25: note = Core
  misc_feature 26..50: note = RF
taattggcgcggccccttttgcggcggaaagacgcaccgtcctaggagcc

SEQ ID NO: 24007 - DNA, 50 bp, unidentified
  source 1..50: mol_type = unassigned DNA; note = target_5bb0863
  misc_feature 1..23: note = LF
  misc_feature 24..25: note = Core
  misc_feature 26..50: note = RF
gaggctaggactgcacgagaacaaaaagcggccacgatttgtttcgtggc

SEQ ID NO: 24008 - DNA, 50 bp, unidentified
  source 1..50: mol_type = unassigned DNA; note = target_5bc85ac
  misc_feature 1..22: note = LF
  misc_feature 23..25: note = Core
  misc_feature 26..50: note = RF
gaatagttcatcagattacctccttattatgcccggtagaatgtccggtg

SEQ ID NO: 24009 - DNA, 50 bp, unidentified
  source 1..50: mol_type = unassigned DNA; note = target_5bd8a04
  misc_feature 1..22: note = LF
  misc_feature 23..25: note = Core
  misc_feature 26..50: note = RF
gtgggttcctgcgtcatgtgtgtccttcctcggcccttccgcgacctgtc

SEQ ID NO: 24010 - DNA, 50 bp, unidentified
  source 1..50: mol_type = unassigned DNA; note = target_5bdbb88
  misc_feature 1..21: note = LF
  misc_feature 22..25: note = Core
  misc_feature 26..50: note = RF
ggggcgcgacgctcctgacggctcatgcggagcgctgggagacgtcgtcg

SEQ ID NO: 24011 - DNA, 50 bp, unidentified
  source 1..50: mol_type = unassigned DNA; note = target_5bdc853
  misc_feature 1..24: note = LF
  misc_feature 25: note = Core
  misc_feature 26..50: note = RF
gagcctgtcgatgagtcccccctttttacccccgctgccgaaacgtgagc

SEQ ID NO: 24012 - DNA, 50 bp, unidentified
  source 1..50: mol_type = unassigned DNA; note = target_5be6fca
  misc_feature 1..24: note = LF
  misc_feature 25: note = Core
  misc_feature 26..50: note = RF
atgtcgtccgccatcgcgcctaacgtgccgttaacccgcgcgcgctccat

SEQ ID NO: 24013 - DNA, 50 bp, unidentified
  source 1..50: mol_type = unassigned DNA; note = target_5bf0662
  misc_feature 1..23: note = LF
  misc_feature 24..25: note = Core
  misc_feature 26..50: note = RF
gtgttcgggtccatggcggcaacctatcaaccccactgcagaaggcaagc

SEQ ID NO: 24014 - DNA, 50 bp, unidentified
  source 1..50: mol_type = unassigned DNA; note = target_5bf0d82
  misc_feature 1..23: note = LF
  misc_feature 24..25: note = Core
  misc_feature 26..50: note = RF
cgggcacgcttcgctaacccaccctacgaagctcgctcatccgggctacg

SEQ ID NO: 24015 - DNA, 50 bp, unidentified
  source 1..50: mol_type = unassigned DNA; note = target_5c04ee3
  misc_feature 1..23: note = LF
  misc_feature 24..25: note = Core
  misc_feature 26..50: note = RF
ctgcaccgcgttatctcggcttctggcacttaactgccgattttggatgt

SEQ ID NO: 24016 - DNA, 50 bp, unidentified
  source 1..50: mol_type = unassigned DNA; note = target_5c05ec7
  misc_feature 1..24: note = LF
  misc_feature 25: note = Core
  misc_feature 26..50: note = RF
gcgctcgtgtgtacctgaaccgccccccccagttcgcggaaatactggtc

SEQ ID NO: 24017 - DNA, 50 bp, unidentified
  source 1..50: mol_type = unassigned DNA; note = target_5c0cf66
  misc_feature 1..23: note = LF
  misc_feature 24..25: note = Core
  misc_feature 26..50: note = RF
tggcggactgggggcacctcccgcttgcgggggaccatgatcacggcctg

SEQ ID NO: 24018 - DNA, 50 bp, unidentified
  source 1..50: mol_type = unassigned DNA; note = target_5c11efd
  misc_feature 1..24: note = LF
  misc_feature 25: note = Core
  misc_feature 26..50: note = RF
cccgggcggattcgaaaaactccccaccccccgcggggaaattggtgacg

SEQ ID NO: 24019 - DNA, 50 bp, unidentified
  source 1..50: mol_type = unassigned DNA; note = target_5c13414
  misc_feature 1..24: note = LF
  misc_feature 25: note = Core
  misc_feature 26..50: note = RF
aaacgcgcatgcgcactaataaaatgttaagtgctcaaggtctcagcact

SEQ ID NO: 24020 - DNA, 50 bp, unidentified
  source 1..50: mol_type = unassigned DNA; note = target_5c16860
  misc_feature 1..22: note = LF
  misc_feature 23..25: note = Core
  misc_feature 26..50: note = RF
tatgaggaagaaccggttaatgtgacaccccagtgtactattgagttgat

SEQ ID NO: 24021 - DNA, 50 bp, unidentified
  source 1..50: mol_type = unassigned DNA; note = target_5c24ac3
  misc_feature 1..23: note = LF
  misc_feature 24..25: note = Core
  misc_feature 26..50: note = RF
tcagtcgctcagcggacatacatacggtcttacggagtgcaaggcggccg

SEQ ID NO: 24022 - DNA, 50 bp, unidentified
  source 1..50: mol_type = unassigned DNA; note = target_5c2b977
  misc_feature 1..21: note = LF
  misc_feature 22..25: note = Core
  misc_feature 26..50: note = RF
gcgcggcggacggcgacccggctcactcccgcacctccttcaccgcgccg

SEQ ID NO: 24023 - DNA, 50 bp, unidentified
  source 1..50: mol_type = unassigned DNA; note = target_5c3a63d
  misc_feature 1..24: note = LF
  misc_feature 25: note = Core
  misc_feature 26..50: note = RF
caatcgtccgctatcgaccgaggctgtgtgaaaacgccgccgctaatggc

SEQ ID NO: 24024 - DNA, 50 bp, unidentified
  source 1..50: mol_type = unassigned DNA; note = target_5c3ccf8
  misc_feature 1..23: note = LF
  misc_feature 24..25: note = Core
  misc_feature 26..50: note = RF
catactttggcgatcatgggcgttggtgcacggatcgttagcggtggtgc

SEQ ID NO: 24025 - DNA, 50 bp, unidentified
  source 1..50: mol_type = unassigned DNA; note = target_5c52f76
  misc_feature 1..23: note = LF
  misc_feature 24..25: note = Core
  misc_feature 26..50: note = RF
aggtcggcttctgggcgagggcgtgtgaaaaggccctaacgtgataggtt

SEQ ID NO: 24026 - DNA, 50 bp, unidentified
  source 1..50: mol_type = unassigned DNA; note = target_5c540ff
  misc_feature 1..23: note = LF
  misc_feature 24..25: note = Core
  misc_feature 26..50: note = RF
gtgggccatgtcgaacgggaaaccttcgccgcggccactctcgtggcgcg

SEQ ID NO: 24027 - DNA, 50 bp, unidentified
  source 1..50: mol_type = unassigned DNA; note = target_5c57a84
  misc_feature 1..24: note = LF
  misc_feature 25: note = Core
  misc_feature 26..50: note = RF
gtgaaataggcacgaaacaagacctgaccctctagtactttgaccctcta

SEQ ID NO: 24028 - DNA, 50 bp, unidentified
  source 1..50: mol_type = unassigned DNA; note = target_5c6fee7
  misc_feature 1..23: note = LF
  misc_feature 24..25: note = Core
  misc_feature 26..50: note = RF
caccagcttcgctggtcccccccccccttgcaggggaagaataaaaaagg

SEQ ID NO: 24029 - DNA, 50 bp, unidentified
  source 1..50: mol_type = unassigned DNA; note = target_5c7e8c8
  misc_feature 1..23: note = LF
  misc_feature 24..25: note = Core
  misc_feature 26..50: note = RF
cacgcactgcatgagtccggaattggcccgctgccgccgacgccgcaccg

SEQ ID NO: 24030 - DNA, 50 bp, unidentified
  source 1..50: mol_type = unassigned DNA; note = target_5c919f5
  misc_feature 1..24: note = LF
  misc_feature 25: note = Core
  misc_feature 26..50: note = RF
agcagaggcgctacatggcctagttttgcaccggcgctcataccttagta

SEQ ID NO: 24031 - DNA, 50 bp, unidentified
  source 1..50: mol_type = unassigned DNA; note = target_5c935d1
  misc_feature 1..23: note = LF
  misc_feature 24..25: note = Core
  misc_feature 26..50: note = RF
ctttatcacccatggttatgctcctttctattacagactatattttatca

SEQ ID NO: 24032 - DNA, 50 bp, unidentified
  source 1..50: mol_type = unassigned DNA; note = target_5c97e40
  misc_feature 1..24: note = LF
  misc_feature 25: note = Core
  misc_feature 26..50: note = RF
agaacaagcaattacttatagccattgttgggtgtaggttttttatcaaa

SEQ ID NO: 24033 - DNA, 50 bp, unidentified
  source 1..50: mol_type = unassigned DNA; note = target_5c9e560
  misc_feature 1..23: note = LF
  misc_feature 24..25: note = Core
  misc_feature 26..50: note = RF
tgtaccttgtcgctcatttttaactcctttctatcctgtatctaaagaac

SEQ ID NO: 24034 - DNA, 50 bp, unidentified
  source 1..50: mol_type = unassigned DNA; note = target_5cc0bb2
  misc_feature 1..24: note = LF
  misc_feature 25: note = Core
  misc_feature 26..50: note = RF
gcacgtcgttcccgcgaagtgcgggaacccatacctccgaagatgagtga

SEQ ID NO: 24035 - DNA, 50 bp, unidentified
  source 1..50: mol_type = unassigned DNA; note = target_5cc6661
  misc_feature 1..23: note = LF
  misc_feature 24..25: note = Core
  misc_feature 26..50: note = RF
ttgcggatcatggcagaactctcctttcctctgtgtctgttgtgggctgg

SEQ ID NO: 24036 - DNA, 50 bp, unidentified
  source 1..50: mol_type = unassigned DNA; note = target_5ccae1a
  misc_feature 1..22: note = LF
  misc_feature 23..25: note = Core
  misc_feature 26..50: note = RF
gcggcggtggtcatgggcgggttcctttccaactggggctccggacggcg

SEQ ID NO: 24037 - DNA, 50 bp, unidentified
  source 1..50: mol_type = unassigned DNA; note = target_5cd4aaa
  misc_feature 1..24: note = LF
  misc_feature 25: note = Core
  misc_feature 26..50: note = RF
cgcagcagggcaagttgaagcccccaccccccctttttgcggcgcatgcg

SEQ ID NO: 24038 - DNA, 50 bp, unidentified
  source 1..50: mol_type = unassigned DNA; note = target_5ce342b
  misc_feature 1..23: note = LF
  misc_feature 24..25: note = Core
  misc_feature 26..50: note = RF
tgcgtgctaccgccagctttgtgttgtcgtacaggattgagcgcggcacc

SEQ ID NO: 24039 - DNA, 50 bp, unidentified
  source 1..50: mol_type = unassigned DNA; note = target_5cef718
  misc_feature 1..24: note = LF
  misc_feature 25: note = Core
  misc_feature 26..50: note = RF
gcgccgtcgatcagggcttagaagtttcccgaggcgatgtccttcaacac

SEQ ID NO: 24040 - DNA, 50 bp, unidentified
  source 1..50: mol_type = unassigned DNA; note = target_5cefee0
  misc_feature 1..23: note = LF
  misc_feature 24..25: note = Core
  misc_feature 26..50: note = RF
tcttcgaccacctctgaaagacgtggatgcctcggcctttggcgctctcg

SEQ ID NO: 24041 - DNA, 50 bp, unidentified
  source 1..50: mol_type = unassigned DNA; note = target_5cf1a6a
  misc_feature 1..24: note = LF
  misc_feature 25: note = Core
  misc_feature 26..50: note = RF
cgcgctgacgcgcacgctacgcggcagatccggacgatcagttcgagcga

SEQ ID NO: 24042 - DNA, 50 bp, unidentified
  source 1..50: mol_type = unassigned DNA; note = target_5cf6bd9
  misc_feature 1..21: note = LF
  misc_feature 22..25: note = Core
  misc_feature 26..50: note = RF
ggcggcatcagagtgtgaacggtcatttcaccacctgttgaccagccggc

SEQ ID NO: 24043 - DNA, 50 bp, unidentified
  source 1..50: mol_type = unassigned DNA; note = target_5cf9c82
  misc_feature 1..20: note = LF
  misc_feature 21..25: note = Core
  misc_feature 26..50: note = RF
tgttgtcgaattatgtcaaaaaacagaagcactgctcggcttctgtttac

SEQ ID NO: 24044 - DNA, 50 bp, unidentified
  source 1..50: mol_type = unassigned DNA; note = target_5d1896d
  misc_feature 1..23: note = LF
  misc_feature 24..25: note = Core
  misc_feature 26..50: note = RF
gacatgtcgggctaaagcccgacctacaagaattcgcgcataagttccgt

SEQ ID NO: 24045 - DNA, 50 bp, unidentified
  source 1..50: mol_type = unassigned DNA; note = target_5d1bfad
  misc_feature 1..23: note = LF
  misc_feature 24..25: note = Core
  misc_feature 26..50: note = RF
ggatgacgctgcgcttatccgacctacaagtgcatgatttcgtgagtcgt

SEQ ID NO: 24046 - DNA, 50 bp, unidentified
  source 1..50: mol_type = unassigned DNA; note = target_5d37fab
  misc_feature 1..23: note = LF
  misc_feature 24..25: note = Core
  misc_feature 26..50: note = RF
ccggcgagggggaccgcggaaaatgtgtaaagtggattggtgggatcatt

SEQ ID NO: 24047 - DNA, 50 bp, unidentified
  source 1..50: mol_type = unassigned DNA; note = target_5d45535
  misc_feature 1..23: note = LF
  misc_feature 24..25: note = Core
  misc_feature 26..50: note = RF
agccgtattccggcctcggtctgtgtggaaacgggcctgagatagcatcg

SEQ ID NO: 24048 - DNA, 50 bp, unidentified
  source 1..50: mol_type = unassigned DNA; note = target_5d46c1b
  misc_feature 1..24: note = LF
  misc_feature 25: note = Core
  misc_feature 26..50: note = RF
ctgccggttcgcctgctggggccccactttttgcgggccccggccgcgtg

SEQ ID NO: 24049 - DNA, 50 bp, unidentified
  source 1..50: mol_type = unassigned DNA; note = target_5d5189f
  misc_feature 1..23: note = LF
  misc_feature 24..25: note = Core
  misc_feature 26..50: note = RF
ttcgacaagctcagcctcgccacctctccccgccggggagaggtcggccg

SEQ ID NO: 24050 - DNA, 50 bp, unidentified
  source 1..50: mol_type = unassigned DNA; note = target_5d56d9e
  misc_feature 1..23: note = LF
  misc_feature 24..25: note = Core
  misc_feature 26..50: note = RF
gcggggcgccgggcctgcgccccctacggtttatgctgtttcaaaatcaa

SEQ ID NO: 24051 - DNA, 50 bp, unidentified
  source 1..50: mol_type = unassigned DNA; note = target_5d6089f
  misc_feature 1..22: note = LF
  misc_feature 23..25: note = Core
  misc_feature 26..50: note = RF
gagccgatttggggtcagaacaagagcagtccgaaatcgtacgctaaggc

SEQ ID NO: 24052 - DNA, 50 bp, unidentified
  source 1..50: mol_type = unassigned DNA; note = target_5d64874
  misc_feature 1..23: note = LF
  misc_feature 24..25: note = Core
  misc_feature 26..50: note = RF
tacgtcgctttaggagcaaagcggacgtcctccgtccgctccaggtttat

SEQ ID NO: 24053 - DNA, 50 bp, unidentified
  source 1..50: mol_type = unassigned DNA; note = target_5d66437
  misc_feature 1..23: note = LF
  misc_feature 24..25: note = Core
  misc_feature 26..50: note = RF
gcgtccctccgagatctcgagattgaaccaccattgcgaaggaagactta

SEQ ID NO: 24054 - DNA, 50 bp, unidentified
  source 1..50: mol_type = unassigned DNA; note = target_5d6656b
  misc_feature 1..23: note = LF
  misc_feature 24..25: note = Core
  misc_feature 26..50: note = RF
cggtgacggtggtggtcttccagtgtccatgcgggaccgccatgcggcag

SEQ ID NO: 24055 - DNA, 50 bp, unidentified
  source 1..50: mol_type = unassigned DNA; note = target_5d6a3cf
  misc_feature 1..22: note = LF
  misc_feature 23..25: note = Core
  misc_feature 26..50: note = RF
cgagggtaacacctcggatcgtttttatgtctgaaaaagacgtgaaacat

SEQ ID NO: 24056 - DNA, 50 bp, unidentified
  source 1..50: mol_type = unassigned DNA; note = target_5d6c6e9
  misc_feature 1..23: note = LF
  misc_feature 24..25: note = Core
  misc_feature 26..50: note = RF
cggtcgggagggcgtgacccggcctcagatctccgccgccgggatgcacc

SEQ ID NO: 24057 - DNA, 50 bp, unidentified
  source 1..50: mol_type = unassigned DNA; note = target_5d70c81
  misc_feature 1..23: note = LF
  misc_feature 24..25: note = Core
  misc_feature 26..50: note = RF
ggttcagcgcattaatgttcatcttctctccatttattatattttaacaa

SEQ ID NO: 24058 - DNA, 50 bp, unidentified
  source 1..50: mol_type = unassigned DNA; note = target_5d7882c
  misc_feature 1..24: note = LF
  misc_feature 25: note = Core
  misc_feature 26..50: note = RF
cgaacttcctgtttcggccagaaccggtcaatcccgtaaacagaaaattc

SEQ ID NO: 24059 - DNA, 50 bp, unidentified
  source 1..50: mol_type = unassigned DNA; note = target_5d81d42
  misc_feature 1..24: note = LF
  misc_feature 25: note = Core
  misc_feature 26..50: note = RF
cgcctacccgtagcctttcccctacaagggaggggatttgcatgctgatt

SEQ ID NO: 24060 - DNA, 50 bp, unidentified
  source 1..50: mol_type = unassigned DNA; note = target_5d85f0c
  misc_feature 1..23: note = LF
  misc_feature 24..25: note = Core
  misc_feature 26..50: note = RF
aggcgcggtcagcagagaggtctccgttcgtgctacagacccaatcacag

SEQ ID NO: 24061 - DNA, 50 bp, unidentified
  source 1..50: mol_type = unassigned DNA; note = target_5d8a99a
  misc_feature 1..23: note = LF
  misc_feature 24..25: note = Core
  misc_feature 26..50: note = RF
gttccgataggcaacccgatgacctactcctacacccagatcagccagta

SEQ ID NO: 24062 - DNA, 50 bp, unidentified
  source 1..50: mol_type = unassigned DNA; note = target_5d90e7a
  misc_feature 1..23: note = LF
  misc_feature 24..25: note = Core
  misc_feature 26..50: note = RF
aaaaaaaccaccgcccgcggtggtttttatgcctatgctggcccgctcgg

SEQ ID NO: 24063 - DNA, 50 bp, unidentified
  source 1..50: mol_type = unassigned DNA; note = target_5d929e2
  misc_feature 1..24: note = LF
  misc_feature 25: note = Core
  misc_feature 26..50: note = RF
cccaagtcctgatcttcggcggctattttttgtgggcggtatcggcgctt

SEQ ID NO: 24064 - DNA, 50 bp, unidentified
  source 1..50: mol_type = unassigned DNA; note = target_5d9ba60
  misc_feature 1..23: note = LF
  misc_feature 24..25: note = Core
  misc_feature 26..50: note = RF
tttcggatgacaattagtaggcttgtcgcaaagattttcgtgggccgcga

SEQ ID NO: 24065 - DNA, 50 bp, unidentified
  source 1..50: mol_type = unassigned DNA; note = target_5da4ea2
  misc_feature 1..24: note = LF
  misc_feature 25: note = Core
  misc_feature 26..50: note = RF
gcgttcgaccggtgcgatatccgccgatatgagtgccagtgttggtctgc

SEQ ID NO: 24066 - DNA, 50 bp, unidentified
  source 1..50: mol_type = unassigned DNA; note = target_5dab766
  misc_feature 1..24: note = LF
  misc_feature 25: note = Core
  misc_feature 26..50: note = RF
actgattgctgacgaaaagccgacttacgaggaccaatttgtttgtaaaa

SEQ ID NO: 24067 - DNA, 50 bp, unidentified
  source 1..50: mol_type = unassigned DNA; note = target_5db2efb
  misc_feature 1..24: note = LF
  misc_feature 25: note = Core
  misc_feature 26..50: note = RF
gacctgcccgcgcacccgtcgcggcagacccctggcagcgacgcacgagc

SEQ ID NO: 24068 - DNA, 50 bp, unidentified
  source 1..50: mol_type = unassigned DNA; note = target_5dc05ec
  misc_feature 1..23: note = LF
  misc_feature 24..25: note = Core
  misc_feature 26..50: note = RF
ggagggggcgcctccaagtccagctagtcctgctcgatctcgcgcttcgc

SEQ ID NO: 24069 - DNA, 50 bp, unidentified
  source 1..50: mol_type = unassigned DNA; note = target_5dc6386
  misc_feature 1..23: note = LF
  misc_feature 24..25: note = Core
  misc_feature 26..50: note = RF
acgcctcagaggctgcctcaaaaagaattgagtgatttcagccgattgtg

SEQ ID NO: 24070 - DNA, 50 bp, unidentified
  source 1..50: mol_type = unassigned DNA; note = target_5dd2041
  misc_feature 1..23: note = LF
  misc_feature 24..25: note = Core
  misc_feature 26..50: note = RF
tcgtctgagggagggcctcaagatgcccagaagccgcccctcatggttgc

SEQ ID NO: 24071 - DNA, 50 bp, unidentified
  source 1..50: mol_type = unassigned DNA; note = target_5dd235d
  misc_feature 1..22: note = LF
  misc_feature 23..25: note = Core
  misc_feature 26..50: note = RF
acacggcgtggatgtccgctaatgacccaaagcggacattggcagtctaa

SEQ ID NO: 24072 - DNA, 50 bp, unidentified
  source 1..50: mol_type = unassigned DNA; note = target_5dda111
  misc_feature 1..24: note = LF
  misc_feature 25: note = Core
  misc_feature 26..50: note = RF
ccgaatctttaggcgactgtccgctttgggtcattcgcgaccgggccacg

SEQ ID NO: 24073 - DNA, 50 bp, unidentified
  source 1..50: mol_type = unassigned DNA; note = target_5dde4a4
  misc_feature 1..23: note = LF
  misc_feature 24..25: note = Core
  misc_feature 26..50: note = RF
tgagagtagccagcggcagctcttggcccaaagcggaccccgttggctca

SEQ ID NO: 24074 - DNA, 50 bp, unidentified
  source 1..50: mol_type = unassigned DNA; note = target_5de19ba
  misc_feature 1..23: note = LF
  misc_feature 24..25: note = Core
  misc_feature 26..50: note = RF
gccgcaggactggtcggcatgggctaccgccttgcggcaggcctcttcac

SEQ ID NO: 24075 - DNA, 50 bp, unidentified
  source 1..50: mol_type = unassigned DNA; note = target_5de61bb
  misc_feature 1..22: note = LF
  misc_feature 23..25: note = Core
  misc_feature 26..50: note = RF
ccccctcatccgcctgcggcaccttctcccccgcgcggcgggggagaagg

SEQ ID NO: 24076 - DNA, 50 bp, unidentified
  source 1..50: mol_type = unassigned DNA; note = target_5de7027
  misc_feature 1..21: note = LF
  misc_feature 22..25: note = Core
  misc_feature 26..50: note = RF
atccagaccaggtcggctccggtcatgcgtcgacccggcggtgagggcga

SEQ ID NO: 24077 - DNA, 50 bp, unidentified
  source 1..50: mol_type = unassigned DNA; note = target_5df75b1
  misc_feature 1..22: note = LF
  misc_feature 23..25: note = Core
  misc_feature 26..50: note = RF
cattgccgacgaggtgatcgaatgaaccggcgcgagttcatcacgctgct

SEQ ID NO: 24078 - DNA, 50 bp, unidentified
  source 1..50: mol_type = unassigned DNA; note = target_5df7d54
  misc_feature 1..21: note = LF
  misc_feature 22..25: note = Core
  misc_feature 26..50: note = RF
tattctaaccattttataaatcctcctaaataatttttatttcttctcca

SEQ ID NO: 24079 - DNA, 50 bp, unidentified
  source 1..50: mol_type = unassigned DNA; note = target_5dfab43
  misc_feature 1..23: note = LF
  misc_feature 24..25: note = Core
  misc_feature 26..50: note = RF
cggccaatcgattcggtgtagatcgggcttcagcccgacggcggcctctc

SEQ ID NO: 24080 - DNA, 50 bp, unidentified
  source 1..50: mol_type = unassigned DNA; note = target_5e04cef
  misc_feature 1..23: note = LF
  misc_feature 24..25: note = Core
  misc_feature 26..50: note = RF
gacgggttgtaccacaacacaccctacaagactattgttttagatcatgg

SEQ ID NO: 24081 - DNA, 50 bp, unidentified
  source 1..50: mol_type = unassigned DNA; note = target_5e0832b
  misc_feature 1..24: note = LF
  misc_feature 25: note = Core
  misc_feature 26..50: note = RF
tgaacacgaataacacgaatttcacggattttttaatgcaatggaggaat

SEQ ID NO: 24082 - DNA, 50 bp, unidentified
  source 1..50: mol_type = unassigned DNA; note = target_5e0c454
  misc_feature 1..24: note = LF
  misc_feature 25: note = Core
  misc_feature 26..50: note = RF
gcaaaaaaaaaggccaacgtccgcttggggtcaatcgcgtcggattcgcg

SEQ ID NO: 24083 - DNA, 50 bp, unidentified
  source 1..50: mol_type = unassigned DNA; note = target_5e0e2a7
  misc_feature 1..22: note = LF
  misc_feature 23..25: note = Core
  misc_feature 26..50: note = RF
tcgtcttcgaatcccatgatggaagggccttggtgccgagtccgaagaaa

SEQ ID NO: 24084 - DNA, 50 bp, unidentified
  source 1..50: mol_type = unassigned DNA; note = target_5e1a9d4
  misc_feature 1..24: note = LF
  misc_feature 25: note = Core
  misc_feature 26..50: note = RF
tttttcaacagaataggccggaagcggtcgttcgtgacaaacgaaaaacc

SEQ ID NO: 24085 - DNA, 50 bp, unidentified
  source 1..50: mol_type = unassigned DNA; note = target_5e1bdd3
  misc_feature 1..23: note = LF
  misc_feature 24..25: note = Core
  misc_feature 26..50: note = RF
tccaagcatccagtcccggcatgaggcgctcatactcgaagctgtacgcg

SEQ ID NO: 24086 - DNA, 50 bp, unidentified
  source 1..50: mol_type = unassigned DNA; note = target_5e1e621
  misc_feature 1..24: note = LF
  misc_feature 25: note = Core
  misc_feature 26..50: note = RF
cttgaagcaatacagtttggtaagcgtccgggcaacgcacattgacgaac

SEQ ID NO: 24087 - DNA, 50 bp, unidentified
  source 1..50: mol_type = unassigned DNA; note = target_5e236a8
  misc_feature 1..23: note = LF
  misc_feature 24..25: note = Core
  misc_feature 26..50: note = RF
cctggcgagaatcctcaccagcccttcgtggctcgcttcgctcgcacctc

SEQ ID NO: 24088 - DNA, 50 bp, unidentified
  source 1..50: mol_type = unassigned DNA; note = target_5e26f4f
  misc_feature 1..23: note = LF
  misc_feature 24..25: note = Core
  misc_feature 26..50: note = RF
gctggccggcacagagccttgtatggggctttctatgtcaagataattgt

SEQ ID NO: 24089 - DNA, 50 bp, unidentified
  source 1..50: mol_type = unassigned DNA; note = target_5e292e4
  misc_feature 1..23: note = LF
  misc_feature 24..25: note = Core
  misc_feature 26..50: note = RF
ttttcagccggcattttttgtttctttttgatgccaaaaagaaagagccc

SEQ ID NO: 24090 - DNA, 50 bp, unidentified
  source 1..50: mol_type = unassigned DNA; note = target_5e2bcd2
  misc_feature 1..24: note = LF
  misc_feature 25: note = Core
  misc_feature 26..50: note = RF
aaatacacttcagcccgcgtagggcgcaataaccaacgggcattgcgccg

SEQ ID NO: 24091 - DNA, 50 bp, unidentified
  source 1..50: mol_type = unassigned DNA; note = target_5e2d583
  misc_feature 1..23: note = LF
  misc_feature 24..25: note = Core
  misc_feature 26..50: note = RF
ggataatctctgtcgcggctgaagctcctacagcagagaggacacatgcc

SEQ ID NO: 24092 - DNA, 50 bp, unidentified
  source 1..50: mol_type = unassigned DNA; note = target_5e3059f
  misc_feature 1..23: note = LF
  misc_feature 24..25: note = Core
  misc_feature 26..50: note = RF
gtccggcagaccggcgagaagctctacggcatcgacgtctcgcccgatct

SEQ ID NO: 24093 - DNA, 50 bp, unidentified
  source 1..50: mol_type = unassigned DNA; note = target_5e3215c
  misc_feature 1..23: note = LF
  misc_feature 24..25: note = Core
  misc_feature 26..50: note = RF
gaggagtcaagcatgggtctaacgataaggctgagcgacgcgcggttgcg

SEQ ID NO: 24094 - DNA, 50 bp, unidentified
  source 1..50: mol_type = unassigned DNA; note = target_5e354bc
  misc_feature 1..22: note = LF
  misc_feature 23..25: note = Core
  misc_feature 26..50: note = RF
acatcaactccaggacttttgcagaccttccctagtgaatggcggtggtt

SEQ ID NO: 24095 - DNA, 50 bp, unidentified
  source 1..50: mol_type = unassigned DNA; note = target_5e3687d
  misc_feature 1..23: note = LF
  misc_feature 24..25: note = Core
  misc_feature 26..50: note = RF
acttccgtctaacgttttggggctttttttgcttaaaatttatgcgcgga

SEQ ID NO: 24096 - DNA, 50 bp, unidentified
  source 1..50: mol_type = unassigned DNA; note = target_5e39219
  misc_feature 1..24: note = LF
  misc_feature 25: note = Core
  misc_feature 26..50: note = RF
atattaaccatactgcgtttcaaatcctaaccatggactaaagagcaggt

SEQ ID NO: 24097 - DNA, 50 bp, unidentified
  source 1..50: mol_type = unassigned DNA; note = target_5e39252
  misc_feature 1..24: note = LF
  misc_feature 25: note = Core
  misc_feature 26..50: note = RF
ctgctcgctggcgtgtgctgtttttttttgaaggtcatcccgtggcggtc

SEQ ID NO: 24098 - DNA, 50 bp, unidentified
  source 1..50: mol_type = unassigned DNA; note = target_5e436b2
  misc_feature 1..23: note = LF
  misc_feature 24..25: note = Core
  misc_feature 26..50: note = RF
gccagcgcagccttcggcagcggctacgggcgttccggggaggctatgca

SEQ ID NO: 24099 - DNA, 50 bp, unidentified
  source 1..50: mol_type = unassigned DNA; note = target_5e4499f
  misc_feature 1..23: note = LF
  misc_feature 24..25: note = Core
  misc_feature 26..50: note = RF
tgtaagaggaagggcaaagttacctttgcccccacacctagcctgcccaa

SEQ ID NO: 24100 - DNA, 50 bp, unidentified
  source 1..50: mol_type = unassigned DNA; note = target_5e4ca28
  misc_feature 1..23: note = LF
  misc_feature 24..25: note = Core
  misc_feature 26..50: note = RF
ttcctttcttgattaaagttcagtttaaatggcaaacaatatatccgtta

SEQ ID NO: 24101 - DNA, 50 bp, unidentified
  source 1..50: mol_type = unassigned DNA; note = target_5e4da7a
  misc_feature 1..22: note = LF
  misc_feature 23..25: note = Core
  misc_feature 26..50: note = RF
tcttcgagacagccgcggagcctgacccggcgatccatccctccgctcct

SEQ ID NO: 24102 - DNA, 50 bp, unidentified
  source 1..50: mol_type = unassigned DNA; note = target_5e4e603
  misc_feature 1..24: note = LF
  misc_feature 25: note = Core
  misc_feature 26..50: note = RF
cggtggatggagcgaagcgtaggtcgtttgacttgagttcgtgttcaacg

SEQ ID NO: 24103 - DNA, 50 bp, unidentified
  source 1..50: mol_type = unassigned DNA; note = target_5e52a49
  misc_feature 1..23: note = LF
  misc_feature 24..25: note = Core
  misc_feature 26..50: note = RF
gcgctcgccctctcccccaacccctctcccccggcccctctcccgcttgc

SEQ ID NO: 24104 - DNA, 50 bp, unidentified
  source 1..50: mol_type = unassigned DNA; note = target_5e5525a
  misc_feature 1..23: note = LF
  misc_feature 24..25: note = Core
  misc_feature 26..50: note = RF
aacatgtaacatgctttaaaccccttttcaatccagtattactggattat

SEQ ID NO: 24105 - DNA, 50 bp, unidentified
  source 1..50: mol_type = unassigned DNA; note = target_5e55e69
  misc_feature 1..21: note = LF
  misc_feature 22..25: note = Core
  misc_feature 26..50: note = RF
ggtccccacgaccaggtcgccttcccagtgacccgggaccgcacggtcct

SEQ ID NO: 24106 - DNA, 50 bp, unidentified
  source 1..50: mol_type = unassigned DNA; note = target_5e58be3
  misc_feature 1..23: note = LF
  misc_feature 24..25: note = Core
  misc_feature 26..50: note = RF
gatggcgtggttttggggcatccctgcaatctggattccggcgatccatg

SEQ ID NO: 24107 - DNA, 50 bp, unidentified
  source 1..50: mol_type = unassigned DNA; note = target_5e5913e
  misc_feature 1..21: note = LF
  misc_feature 22..25: note = Core
  misc_feature 26..50: note = RF
atgcgacggtcgtaagagcttctcctggcgcgactaccgggacctgttga

SEQ ID NO: 24108 - DNA, 50 bp, unidentified
  source 1..50: mol_type = unassigned DNA; note = target_5e5d2ed
  misc_feature 1..23: note = LF
  misc_feature 24..25: note = Core
  misc_feature 26..50: note = RF
tccaagacaacgcgacgaagcccccccccggacccgcacattccacagat

SEQ ID NO: 24109 - DNA, 50 bp, unidentified
  source 1..50: mol_type = unassigned DNA; note = target_5e5e6ac
  misc_feature 1..24: note = LF
  misc_feature 25: note = Core
  misc_feature 26..50: note = RF
gaccggcaccggcagattcatatctttttcaacctcgttggaggtggtga

SEQ ID NO: 24110 - DNA, 50 bp, unidentified
  source 1..50: mol_type = unassigned DNA; note = target_5e7928a
  misc_feature 1..23: note = LF
  misc_feature 24..25: note = Core
  misc_feature 26..50: note = RF
tcggcagtgtgtagattcgccgtctaacgctgcgttctgttgcaacggcc

SEQ ID NO: 24111 - DNA, 50 bp, unidentified
  source 1..50: mol_type = unassigned DNA; note = target_5e7a6c6
  misc_feature 1..24: note = LF
  misc_feature 25: note = Core
  misc_feature 26..50: note = RF
accttctgaccttccggatctcggcagatccggtcgttagtctggaaggc

SEQ ID NO: 24112 - DNA, 50 bp, unidentified
  source 1..50: mol_type = unassigned DNA; note = target_5e7b9d0
  misc_feature 1..23: note = LF
  misc_feature 24..25: note = Core
  misc_feature 26..50: note = RF
ggatccgctgcgcttgatccaccctacttttcttgaaaagagtttaacta

SEQ ID NO: 24113 - DNA, 50 bp, unidentified
  source 1..50: mol_type = unassigned DNA; note = target_5e7c22e
  misc_feature 1..22: note = LF
  misc_feature 23..25: note = Core
  misc_feature 26..50: note = RF
atgcacacttaaaaacaaaataaggaagattatgaagaaaaaattagtga

SEQ ID NO: 24114 - DNA, 50 bp, unidentified
  source 1..50: mol_type = unassigned DNA; note = target_5e7e24c
  misc_feature 1..23: note = LF
  misc_feature 24..25: note = Core
  misc_feature 26..50: note = RF
gggaggcgtgaaccccgacgtctagttgtagtgacccgagacctacccgc

SEQ ID NO: 24115 - DNA, 50 bp, unidentified
  source 1..50: mol_type = unassigned DNA; note = target_5e8c61c
  misc_feature 1..23: note = LF
  misc_feature 24..25: note = Core
  misc_feature 26..50: note = RF
taaagccgcaccgaacccagtcgcaatccccttacggggctcaatccctt

SEQ ID NO: 24116 - DNA, 50 bp, unidentified
  source 1..50: mol_type = unassigned DNA; note = target_5e92b71
  misc_feature 1..23: note = LF
  misc_feature 24..25: note = Core
  misc_feature 26..50: note = RF
ggtgcaccgagcgctcgcggaacctgtcaggacggccgcaagccgtgcgg

SEQ ID NO: 24117 - DNA, 50 bp, unidentified
  source 1..50: mol_type = unassigned DNA; note = target_5e9bc82
  misc_feature 1..24: note = LF
  misc_feature 25: note = Core
  misc_feature 26..50: note = RF
ggattcctgtgacgagcacaggaatgagggaggttgggtcggcgttctcg

SEQ ID NO: 24118 - DNA, 50 bp, unidentified
  source 1..50: mol_type = unassigned DNA; note = target_5e9fcf3
  misc_feature 1..23: note = LF
  misc_feature 24..25: note = Core
  misc_feature 26..50: note = RF
agcctcgccagcaatgacggggctttttgtatctagaatttaagctgttg

SEQ ID NO: 24119 - DNA, 50 bp, unidentified
  source 1..50: mol_type = unassigned DNA; note = target_5eaafea
  misc_feature 1..23: note = LF
  misc_feature 24..25: note = Core
  misc_feature 26..50: note = RF
gcaggtcgcgactaaagtcgctcctacaggggagggctctggtctgttgc

SEQ ID NO: 24120 - DNA, 50 bp, unidentified
  source 1..50: mol_type = unassigned DNA; note = target_5eaf248
  misc_feature 1..23: note = LF
  misc_feature 24..25: note = Core
  misc_feature 26..50: note = RF
acgaggtcgagcgcaagagcagtttttttgggcctgcggcccgggacacg

SEQ ID NO: 24121 - DNA, 50 bp, unidentified
  source 1..50: mol_type = unassigned DNA; note = target_5eb47dd
  misc_feature 1..24: note = LF
  misc_feature 25: note = Core
  misc_feature 26..50: note = RF
ttgggcctttgcgagatccgatagctatcggatgataagggttgtctgtg

SEQ ID NO: 24122 - DNA, 50 bp, unidentified
  source 1..50: mol_type = unassigned DNA; note = target_5eb67b3
  misc_feature 1..23: note = LF
  misc_feature 24..25: note = Core
  misc_feature 26..50: note = RF
gatcttctgggtccggcccatccagggctcgggccggatggccttcaccc

SEQ ID NO: 24123 - DNA, 50 bp, unidentified
  source 1..50: mol_type = unassigned DNA; note = target_5eb764f
  misc_feature 1..23: note = LF
  misc_feature 24..25: note = Core
  misc_feature 26..50: note = RF
gaatccatactcccgatcgtggttggattccgggttcgcgcttcgcgcgc

SEQ ID NO: 24124 - DNA, 50 bp, unidentified
  source 1..50: mol_type = unassigned DNA; note = target_5eca986
  misc_feature 1..23: note = LF
  misc_feature 24..25: note = Core
  misc_feature 26..50: note = RF
taactaccgagcccttcatcgcctgggtgggccgcgtgcgcggcccatga

SEQ ID NO: 24125 - DNA, 50 bp, unidentified
  source 1..50: mol_type = unassigned DNA; note = target_5ed1668
  misc_feature 1..23: note = LF
  misc_feature 24..25: note = Core
  misc_feature 26..50: note = RF
gatacgacagtcccgccgagcggctagatcggagcctctggagcggggga

SEQ ID NO: 24126 - DNA, 50 bp, unidentified
  source 1..50: mol_type = unassigned DNA; note = target_5edb232
  misc_feature 1..23: note = LF
  misc_feature 24..25: note = Core
  misc_feature 26..50: note = RF
caacgtcagacatgttgcagttcctttcggctggcttggagtgaggccga

SEQ ID NO: 24127 - DNA, 50 bp, unidentified
  source 1..50: mol_type = unassigned DNA; note = target_5eddf1e
  misc_feature 1..23: note = LF
  misc_feature 24..25: note = Core
  misc_feature 26..50: note = RF
cgctaattgagctaattcaggaggaaccatcatgcgtgaagcacttatcg

SEQ ID NO: 24128 - DNA, 50 bp, unidentified
  source 1..50: mol_type = unassigned DNA; note = target_5ee4888
  misc_feature 1..23: note = LF
  misc_feature 24..25: note = Core
  misc_feature 26..50: note = RF
tagacgaccggcatcagccggttagttattcagatccatatgaaatcagg

SEQ ID NO: 24129 - DNA, 50 bp, unidentified
  source 1..50: mol_type = unassigned DNA; note = target_5ee56b5
  misc_feature 1..24: note = LF
  misc_feature 25: note = Core
  misc_feature 26..50: note = RF
cagagggtctgcaggccttcaagctgcatggagcgcacctgcacgccggc

SEQ ID NO: 24130 - DNA, 50 bp, unidentified
  source 1..50: mol_type = unassigned DNA; note = target_5ef7c61
  misc_feature 1..24: note = LF
  misc_feature 25: note = Core
  misc_feature 26..50: note = RF
ataataattccatagtaaatctcctgcttttcagtaaattatttttacaa

SEQ ID NO: 24131 - DNA, 50 bp, unidentified
  source 1..50: mol_type = unassigned DNA; note = target_5efcd0a
  misc_feature 1..24: note = LF
  misc_feature 25: note = Core
  misc_feature 26..50: note = RF
agaactagcaattaattatacacgtagttacctgctggcttttttccgca

SEQ ID NO: 24132 - DNA, 50 bp, unidentified
  source 1..50: mol_type = unassigned DNA; note = target_5f035b3
  misc_feature 1..23: note = LF
  misc_feature 24..25: note = Core
  misc_feature 26..50: note = RF
agagtcaattggaacaactgagctggaccccgaaaatgagacagtaggct

SEQ ID NO: 24133 - DNA, 50 bp, unidentified
  source 1..50: mol_type = unassigned DNA; note = target_5f09577
  misc_feature 1..23: note = LF
  misc_feature 24..25: note = Core
  misc_feature 26..50: note = RF
caaagacaaaccatttttacctccttgacaattatattcattatagatag

SEQ ID NO: 24134 - DNA, 50 bp, unidentified
  source 1..50: mol_type = unassigned DNA; note = target_5f0a813
  misc_feature 1..23: note = LF
  misc_feature 24..25: note = Core
  misc_feature 26..50: note = RF
gcttagaaacaggtactcagcttgttctttatggtctggcctggtcgcgt

SEQ ID NO: 24135 - DNA, 50 bp, unidentified
  source 1..50: mol_type = unassigned DNA; note = target_5f0c15e
  misc_feature 1..23: note = LF
  misc_feature 24..25: note = Core
  misc_feature 26..50: note = RF
tttcgcgaagggctcaacccatcctacgatgttgccatgacgaactatcg

SEQ ID NO: 24136 - DNA, 50 bp, unidentified
  source 1..50: mol_type = unassigned DNA; note = target_5f0e99a
  misc_feature 1..22: note = LF
  misc_feature 23..25: note = Core
  misc_feature 26..50: note = RF
cgggccgttccacatatgagtcagagccaatattccacgccgaaacacat

SEQ ID NO: 24137 - DNA, 50 bp, unidentified
  source 1..50: mol_type = unassigned DNA; note = target_5f10b46
  misc_feature 1..24: note = LF
  misc_feature 25: note = Core
  misc_feature 26..50: note = RF
aaacccaataagggtcgattgagttcctaaccatgaacggtaacgaccca

SEQ ID NO: 24138 - DNA, 50 bp, unidentified
  source 1..50: mol_type = unassigned DNA; note = target_5f15c2c
  misc_feature 1..23: note = LF
  misc_feature 24..25: note = Core
  misc_feature 26..50: note = RF
taagcacgggcgatgtccgctattggcacttagccgacatttgccaccag

SEQ ID NO: 24139 - DNA, 50 bp, unidentified
  source 1..50: mol_type = unassigned DNA; note = target_5f1f957
  misc_feature 1..23: note = LF
  misc_feature 24..25: note = Core
  misc_feature 26..50: note = RF
ctgcgttgatggcttagaatgggtggttgccaatcgttcaacggtgccgc

SEQ ID NO: 24140 - DNA, 50 bp, unidentified
  source 1..50: mol_type = unassigned DNA; note = target_5f2197f
  misc_feature 1..23: note = LF
  misc_feature 24..25: note = Core
  misc_feature 26..50: note = RF
tgtttagaaaaactctccgacccctcaattaattaggggttgcgtttttt

SEQ ID NO: 24141 - DNA, 50 bp, unidentified
  source 1..50: mol_type = unassigned DNA; note = target_5f263cb
  misc_feature 1..24: note = LF
  misc_feature 25: note = Core
  misc_feature 26..50: note = RF
gcgattccatctattccgcctaacgttgcaggtaaggggcgcagagccgg

SEQ ID NO: 24142 - DNA, 50 bp, unidentified
  source 1..50: mol_type = unassigned DNA; note = target_5f27fe7
  misc_feature 1..23: note = LF
  misc_feature 24..25: note = Core
  misc_feature 26..50: note = RF
cgaccgatcggggttactggatcccggtcttcggcaagccgaaaccggga

SEQ ID NO: 24143 - DNA, 50 bp, unidentified
  source 1..50: mol_type = unassigned DNA; note = target_5f35c81
  misc_feature 1..23: note = LF
  misc_feature 24..25: note = Core
  misc_feature 26..50: note = RF
tcgaagcggaagtcggctatgcagacctttgagaccttcgcctattttta

SEQ ID NO: 24144 - DNA, 50 bp, unidentified
  source 1..50: mol_type = unassigned DNA; note = target_5f4504e
  misc_feature 1..23: note = LF
  misc_feature 24..25: note = Core
  misc_feature 26..50: note = RF
aggcgacgcttccggaccaaagctgccgttcgtttgtagcgagatgagga

SEQ ID NO: 24145 - DNA, 50 bp, unidentified
  source 1..50: mol_type = unassigned DNA; note = target_5f45959
  misc_feature 1..24: note = LF
  misc_feature 25: note = Core
  misc_feature 26..50: note = RF
cgttgaccggggcgagctctgcggcatgagcggacgtcccatgcctgcgc

SEQ ID NO: 24146 - DNA, 50 bp, unidentified
  source 1..50: mol_type = unassigned DNA; note = target_5f4e001
  misc_feature 1..23: note = LF
  misc_feature 24..25: note = Core
  misc_feature 26..50: note = RF
aaacggaaggtatagttcaaaactgccattctgggcgaagtccgcaagga

SEQ ID NO: 24147 - DNA, 50 bp, unidentified
  source 1..50: mol_type = unassigned DNA; note = target_5f4e365
  misc_feature 1..23: note = LF
  misc_feature 24..25: note = Core
  misc_feature 26..50: note = RF
tccgggcgttccgctcaagggctgtcccgtcatccccggtggatcggcgc

SEQ ID NO: 24148 - DNA, 50 bp, unidentified
  source 1..50: mol_type = unassigned DNA; note = target_5f57c5e
  misc_feature 1..22: note = LF
  misc_feature 23..25: note = Core
  misc_feature 26..50: note = RF
caagtcgctcatacgggcggcttttttattgctgctatcaagaagcgcgg

SEQ ID NO: 24149 - DNA, 50 bp, unidentified
  source 1..50: mol_type = unassigned DNA; note = target_5f59367
  misc_feature 1..23: note = LF
  misc_feature 24..25: note = Core
  misc_feature 26..50: note = RF
gctgccttccgacgctgccccccccccccccgacagacggcaagcgccgc

SEQ ID NO: 24150 - DNA, 50 bp, unidentified
  source 1..50: mol_type = unassigned DNA; note = target_5f6a74e
  misc_feature 1..22: note = LF
  misc_feature 23..25: note = Core
  misc_feature 26..50: note = RF
cgctctgttttgggattgagattgacccggttcggtgggtgtcgcgtcag

SEQ ID NO: 24151 - DNA, 50 bp, unidentified
  source 1..50: mol_type = unassigned DNA; note = target_5f725cc
  misc_feature 1..24: note = LF
  misc_feature 25: note = Core
  misc_feature 26..50: note = RF
tccgccgcgattgctgttctcaacttccgtatggcccgttatcgtggcgg

SEQ ID NO: 24152 - DNA, 50 bp, unidentified
  source 1..50: mol_type = unassigned DNA; note = target_5f74d74
  misc_feature 1..24: note = LF
  misc_feature 25: note = Core
  misc_feature 26..50: note = RF
ggctggtcaggcgtggctcaaaatcggataacactttttcggatgaccat

SEQ ID NO: 24153 - DNA, 50 bp, unidentified
  source 1..50: mol_type = unassigned DNA; note = target_5f7b60c
  misc_feature 1..23: note = LF
  misc_feature 24..25: note = Core
  misc_feature 26..50: note = RF
ttatgaggataatgtcgacgctccttccctcaaccagtttgaagagcttc

SEQ ID NO: 24154 - DNA, 50 bp, unidentified
  source 1..50: mol_type = unassigned DNA; note = target_5f8724d
  misc_feature 1..21: note = LF
  misc_feature 22..25: note = Core
  misc_feature 26..50: note = RF
cctgacagcggacaaatcccgatagaattcgggacctgtcagcggttgaa

SEQ ID NO: 24155 - DNA, 50 bp, unidentified
  source 1..50: mol_type = unassigned DNA; note = target_5f8830f
  misc_feature 1..24: note = LF
  misc_feature 25: note = Core
  misc_feature 26..50: note = RF
cctatcaccagtacgtcaccgagttgactcaagataaatgttaccgaagg

SEQ ID NO: 24156 - DNA, 50 bp, unidentified
  source 1..50: mol_type = unassigned DNA; note = target_5f9248e
  misc_feature 1..23: note = LF
  misc_feature 24..25: note = Core
  misc_feature 26..50: note = RF
aatagacgccgcggcgtatgggtccggatcgcgctcggcgtgcctcgctt

SEQ ID NO: 24157 - DNA, 50 bp, unidentified
  source 1..50: mol_type = unassigned DNA; note = target_5f9d38c
  misc_feature 1..23: note = LF
  misc_feature 24..25: note = Core
  misc_feature 26..50: note = RF
tggggtgtctggctgcgcgtgacctgactccgtatggcgcctggcgtcat

SEQ ID NO: 24158 - DNA, 50 bp, unidentified
  source 1..50: mol_type = unassigned DNA; note = target_5fb0e5d
  misc_feature 1..23: note = LF
  misc_feature 24..25: note = Core
  misc_feature 26..50: note = RF
tcagtgggggcggtaccacgctcctatcaagtcacgccggccggtccttg

SEQ ID NO: 24159 - DNA, 50 bp, unidentified
  source 1..50: mol_type = unassigned DNA; note = target_5fb309a
  misc_feature 1..23: note = LF
  misc_feature 24..25: note = Core
  misc_feature 26..50: note = RF
tttataatctgctatgtttaagggttaagctcaatgataagaaaacatct

SEQ ID NO: 24160 - DNA, 50 bp, unidentified
  source 1..50: mol_type = unassigned DNA; note = target_5fbacae
  misc_feature 1..23: note = LF
  misc_feature 24..25: note = Core
  misc_feature 26..50: note = RF
cgggcaatctttcggacgccggcaggggaggggagtgaagctctcggccg

SEQ ID NO: 24161 - DNA, 50 bp, unidentified
  source 1..50: mol_type = unassigned DNA; note = target_5fbc5b9
  misc_feature 1..23: note = LF
  misc_feature 24..25: note = Core
  misc_feature 26..50: note = RF
tgagcgccgtgcttccggcggtcccggatcttcgcgctgcgcgctcgtcc

SEQ ID NO: 24162 - DNA, 50 bp, unidentified
  source 1..50: mol_type = unassigned DNA; note = target_5fc25b0
  misc_feature 1..23: note = LF
  misc_feature 24..25: note = Core
  misc_feature 26..50: note = RF
agccgtagcaggggagagcctgtagggtgggcaaaggcgcggaacaagga

SEQ ID NO: 24163 - DNA, 50 bp, unidentified
  source 1..50: mol_type = unassigned DNA; note = target_5fc713e
  misc_feature 1..24: note = LF
  misc_feature 25: note = Core
  misc_feature 26..50: note = RF
agattttaccgggaaacgcgttcccgcgggaacgcgtagagcggcggaga

SEQ ID NO: 24164 - DNA, 50 bp, unidentified
  source 1..50: mol_type = unassigned DNA; note = target_5fce928
  misc_feature 1..24: note = LF
  misc_feature 25: note = Core
  misc_feature 26..50: note = RF
ctccgggagacaaccgccagattttgcacgaaaaggacgaataccccatg

SEQ ID NO: 24165 - DNA, 50 bp, unidentified
  source 1..50: mol_type = unassigned DNA; note = target_5fe0f45
  misc_feature 1..21: note = LF
  misc_feature 22..25: note = Core
  misc_feature 26..50: note = RF
gtcggccggcgttcgagcaggctcatgccgcgacaccccggaggatttcg

SEQ ID NO: 24166 - DNA, 50 bp, unidentified
  source 1..50: mol_type = unassigned DNA; note = target_5fe44e7
  misc_feature 1..23: note = LF
  misc_feature 24..25: note = Core
  misc_feature 26..50: note = RF
agccacagtgcctcagagtgtagtggtcaagaaatgccggacacatttct

SEQ ID NO: 24167 - DNA, 50 bp, unidentified
  source 1..50: mol_type = unassigned DNA; note = target_5fe7a54
  misc_feature 1..23: note = LF
  misc_feature 24..25: note = Core
  misc_feature 26..50: note = RF
ctgcaggtgcgtgcggcagaaattggcccaaaccggcatttaatgcccgc

SEQ ID NO: 24168 - DNA, 50 bp, unidentified
  source 1..50: mol_type = unassigned DNA; note = target_5ff063d
  misc_feature 1..23: note = LF
  misc_feature 24..25: note = Core
  misc_feature 26..50: note = RF
taatttacttctgaaaaagggcttgtcgcaaagtttttcgtgttaaccac

SEQ ID NO: 24169 - DNA, 50 bp, unidentified
  source 1..50: mol_type = unassigned DNA; note = target_5ffc09a
  misc_feature 1..23: note = LF
  misc_feature 24..25: note = Core
  misc_feature 26..50: note = RF
ttgtcagccgtcatgaccgctaatggcacttaacggaccacttgaccgcg

SEQ ID NO: 24170 - DNA, 50 bp, unidentified
  source 1..50: mol_type = unassigned DNA; note = target_5fffe37
  misc_feature 1..20: note = LF
  misc_feature 21..25: note = Core
  misc_feature 26..50: note = RF
cccttgatcaattcgaggggcttttttgtgtaaaaaagtgtaaatagtac

SEQ ID NO: 24171 - DNA, 50 bp, unidentified
  source 1..50: mol_type = unassigned DNA; note = target_60068f7
  misc_feature 1..22: note = LF
  misc_feature 23..25: note = Core
  misc_feature 26..50: note = RF
actcgccgacgaggtgatcgagtgaagcgacgcgacgtcatcacgctgct

SEQ ID NO: 24172 - DNA, 50 bp, unidentified
  source 1..50: mol_type = unassigned DNA; note = target_600a6e5
  misc_feature 1..24: note = LF
  misc_feature 25: note = Core
  misc_feature 26..50: note = RF
tgagatagggagtggtatggggatttatcaacatctattcgactttgact

SEQ ID NO: 24173 - DNA, 50 bp, unidentified
  source 1..50: mol_type = unassigned DNA; note = target_601129a
  misc_feature 1..23: note = LF
  misc_feature 24..25: note = Core
  misc_feature 26..50: note = RF
atgtgtgcgggtcctttcgagtcctttcgacagcgcctgcttgccatcgg

SEQ ID NO: 24174 - DNA, 50 bp, unidentified
  source 1..50: mol_type = unassigned DNA; note = target_603435d
  misc_feature 1..23: note = LF
  misc_feature 24..25: note = Core
  misc_feature 26..50: note = RF
gaaatgcaagactcgctacgtagtggtctggcttgtcctttctacggcag

SEQ ID NO: 24175 - DNA, 50 bp, unidentified
  source 1..50: mol_type = unassigned DNA; note = target_60350e9
  misc_feature 1..24: note = LF
  misc_feature 25: note = Core
  misc_feature 26..50: note = RF
ccactccgaaggcgtactagtaacttccgggtgggcgaccatccgggcac

SEQ ID NO: 24176 - DNA, 50 bp, unidentified
  source 1..50: mol_type = unassigned DNA; note = target_6036628
  misc_feature 1..24: note = LF
  misc_feature 25: note = Core
  misc_feature 26..50: note = RF
ccaaggcgtgcgccatagctccgttcgggtcaggaccatcattttggcac

SEQ ID NO: 24177 - DNA, 50 bp, unidentified
  source 1..50: mol_type = unassigned DNA; note = target_6038e48
  misc_feature 1..23: note = LF
  misc_feature 24..25: note = Core
  misc_feature 26..50: note = RF
gcacagcgtgccgcctgctgggtccggtacagcggcgcagcgttatacgc

SEQ ID NO: 24178 - DNA, 50 bp, unidentified
  source 1..50: mol_type = unassigned DNA; note = target_6046924
  misc_feature 1..23: note = LF
  misc_feature 24..25: note = Core
  misc_feature 26..50: note = RF
ggcgtcgaccaatacaggttctcctttcaacgctcaatatacgattccgg

SEQ ID NO: 24179 - DNA, 50 bp, unidentified
  source 1..50: mol_type = unassigned DNA; note = target_60559cd
  misc_feature 1..23: note = LF
  misc_feature 24..25: note = Core
  misc_feature 26..50: note = RF
gatcggtgaacgacgccgtactgtaggagcagggcttgcccgcgaaggcg

SEQ ID NO: 24180 - DNA, 50 bp, unidentified
  source 1..50: mol_type = unassigned DNA; note = target_606fd66
  misc_feature 1..24: note = LF
  misc_feature 25: note = Core
  misc_feature 26..50: note = RF
gtcatagcgcagccacgcgtaaagcggacattaacgtttagggccagtcg

SEQ ID NO: 24181 - DNA, 50 bp, unidentified
  source 1..50: mol_type = unassigned DNA; note = target_607c7e6
  misc_feature 1..23: note = LF
  misc_feature 24..25: note = Core
  misc_feature 26..50: note = RF
ctagttaggctccggaatggatcccggatcggcgcggcttcgccgcttgt

SEQ ID NO: 24182 - DNA, 50 bp, unidentified
  source 1..50: mol_type = unassigned DNA; note = target_607e27e
  misc_feature 1..22: note = LF
  misc_feature 23..25: note = Core
  misc_feature 26..50: note = RF
tggcatatttcttctttctcgctttcttttacagatataataaaaggctg

SEQ ID NO: 24183 - DNA, 50 bp, unidentified; identical to SEQ ID NO: 22013
  source 1..50: mol_type = unassigned DNA; note = target_6088069
  misc_feature 1..23: note = LF
  misc_feature 24..25: note = Core
  misc_feature 26..50: note = RF

SEQ ID NO: 24184 - DNA, 50 bp, unidentified
  source 1..50: mol_type = unassigned DNA; note = target_608b61f
  misc_feature 1..22: note = LF
  misc_feature 23..25: note = Core
  misc_feature 26..50: note = RF
accggaatccttgggaacatcgctttagtgctcaagcaatttcagcccga

SEQ ID NO: 24185 - DNA, 50 bp, unidentified
  source 1..50: mol_type = unassigned DNA; note = target_60905ad
  misc_feature 1..23: note = LF
  misc_feature 24..25: note = Core
  misc_feature 26..50: note = RF
ccgtttccactgcggtcttcatattgtcgtagatgccgcgcgtgcaggac

SEQ ID NO: 24186 - DNA, 50 bp, unidentified
  source 1..50: mol_type = unassigned DNA; note = target_609d3a4
  misc_feature 1..22: note = LF
  misc_feature 23..25: note = Core
  misc_feature 26..50: note = RF
actcgctttaggggtccgaacaagagcagttcacaaatcgatgggatgcg

SEQ ID NO: 24187 - DNA, 50 bp, unidentified
  source 1..50: mol_type = unassigned DNA; note = target_609f099
  misc_feature 1..24: note = LF
  misc_feature 25: note = Core
  misc_feature 26..50: note = RF
ttgcaatctacgaggcaaccggatcatggtttccgtgctgatcgccgatc

SEQ ID NO: 24188 - DNA, 50 bp, unidentified
  source 1..50: mol_type = unassigned DNA; note = target_60a1e20
  misc_feature 1..23: note = LF
  misc_feature 24..25: note = Core
  misc_feature 26..50: note = RF
ttcagccgtaataatcccccaccctgctaagcccaaccagacccgctgaa

SEQ ID NO: 24189 - DNA, 50 bp, unidentified
  source 1..50: mol_type = unassigned DNA; note = target_60a8f81
  misc_feature 1..24: note = LF
  misc_feature 25: note = Core
  misc_feature 26..50: note = RF
ttcgcgggaatctcggaataaaagtaccagtctgaagcctgtaagctgat

SEQ ID NO: 24190 - DNA, 50 bp, unidentified
  source 1..50: mol_type = unassigned DNA; note = target_60aa052
  misc_feature 1..22: note = LF
  misc_feature 23..25: note = Core
  misc_feature 26..50: note = RF
accggttgttccggtacagctctttttttgctgccatgccttgcccgctg

SEQ ID NO: 24191 - DNA, 50 bp, unidentified
  source 1..50: mol_type = unassigned DNA; note = target_60aeccb
  misc_feature 1..22: note = LF
  misc_feature 23..25: note = Core
  misc_feature 26..50: note = RF
atcgccggccgtggtttgcctgccccccaacctgacgctgacgttccgtg

SEQ ID NO: 24192 - DNA, 50 bp, unidentified
  source 1..50: mol_type = unassigned DNA; note = target_60b1ca8
  misc_feature 1..24: note = LF
  misc_feature 25: note = Core
  misc_feature 26..50: note = RF
atttttacgcacaaagaagctaacgccgcgttaagtggtgaacaacgcaa

SEQ ID NO: 24193 - DNA, 50 bp, unidentified
  source 1..50: mol_type = unassigned DNA; note = target_60b3442
  misc_feature 1..23: note = LF
  misc_feature 24..25: note = Core
  misc_feature 26..50: note = RF
gatcaccgacggaagtcaggagttggcccttagcggcggtttttgaatgt

SEQ ID NO: 24194 - DNA, 50 bp, unidentified
  source 1..50: mol_type = unassigned DNA; note = target_60b4b62
  misc_feature 1..23: note = LF
  misc_feature 24..25: note = Core
  misc_feature 26..50: note = RF
ggaggatgccggtgcaatcggggctagatatttcgtttagtttatataag

SEQ ID NO: 24195 - DNA, 50 bp, unidentified
  source 1..50: mol_type = unassigned DNA; note = target_60b5fc2
  misc_feature 1..23: note = LF
  misc_feature 24..25: note = Core
  misc_feature 26..50: note = RF
acgcagtgcctaatgtccgcttttggctataagtggaccttaacggggtg

SEQ ID NO: 24196 - DNA, 50 bp, unidentified
  source 1..50: mol_type = unassigned DNA; note = target_60c137e
  misc_feature 1..23: note = LF
  misc_feature 24..25: note = Core
  misc_feature 26..50: note = RF
gccaaaatctggaagtcttcttcagtttccctaagctacatgaggacgac

SEQ ID NO: 24197 - DNA, 50 bp, unidentified
  source 1..50: mol_type = unassigned DNA; note = target_60c74d9
  misc_feature 1..23: note = LF
  misc_feature 24..25: note = Core
  misc_feature 26..50: note = RF
caggccgttcacccttcgacaggctcaggacgaacggggattttgaagcc

SEQ ID NO: 24198 - DNA, 50 bp, unidentified
  source 1..50: mol_type = unassigned DNA; note = target_60caec3
  misc_feature 1..22: note = LF
  misc_feature 23..25: note = Core
  misc_feature 26..50: note = RF
tggtggccgcccaggtcagcaatgaggatggaaagccagttctgtttagt

SEQ ID NO: 24199 - DNA, 50 bp, unidentified
  source 1..50: mol_type = unassigned DNA; note = target_60ce20f
  misc_feature 1..23: note = LF
  misc_feature 24..25: note = Core
  misc_feature 26..50: note = RF
ggagccgcgacggacagctgagaaggcgttggtggcgttgatccaagagg

SEQ ID NO: 24200 - DNA, 50 bp, unidentified
  source 1..50: mol_type = unassigned DNA; note = target_60d6ac1
  misc_feature 1..23: note = LF
  misc_feature 24..25: note = Core
  misc_feature 26..50: note = RF
cgttgggtggacaccgacatatcccccccaagaaaagaaccgacttcgca

SEQ ID NO: 24201 - DNA, 50 bp, unidentified
  source 1..50: mol_type = unassigned DNA; note = target_60dd69e
  misc_feature 1..23: note = LF
  misc_feature 24..25: note = Core
  misc_feature 26..50: note = RF
aactgcgggacagaaccttcgagagccagttctacagggcgtccgggttg

SEQ ID NO: 24202 - DNA, 50 bp, unidentified
  source 1..50: mol_type = unassigned DNA; note = target_60de799
  misc_feature 1..22: note = LF
  misc_feature 23..25: note = Core
  misc_feature 26..50: note = RF
aaaatacaaagcgttagctaagagagagagtatggatagatggtttttac

SEQ ID NO: 24203 - DNA, 50 bp, unidentified
  source 1..50: mol_type = unassigned DNA; note = target_60e239d
  misc_feature 1..23: note = LF
  misc_feature 24..25: note = Core
  misc_feature 26..50: note = RF
ttgaaaagtccatagttaaatccttcgaaggactgttgtcggagccttcc

SEQ ID NO: 24204 - DNA, 50 bp, unidentified
  source 1..50: mol_type = unassigned DNA; note = target_60e63d2
  misc_feature 1..23: note = LF
  misc_feature 24..25: note = Core
  misc_feature 26..50: note = RF
aacacccgctgcggcgtatgggtcctgctttcgcagggacgacagcgtca

SEQ ID NO: 24205 - DNA, 50 bp, unidentified
  source 1..50: mol_type = unassigned DNA; note = target_60ea839
  misc_feature 1..24: note = LF
  misc_feature 25: note = Core
  misc_feature 26..50: note = RF
tcctcccccgtcctctcacaccaccgggcgtacggttccgtaccacggcg

SEQ ID NO: 24206 - DNA, 50 bp, unidentified
  source 1..50: mol_type = unassigned DNA; note = target_60ed130
  misc_feature 1..24: note = LF
  misc_feature 25: note = Core
  misc_feature 26..50: note = RF
tctctgccactgcggcggggaagttttttttaaactcctcaatggcttgt

SEQ ID NO: 24207 - DNA, 50 bp, unidentified
  source 1..50: mol_type = unassigned DNA; note = target_60f6cc3
  misc_feature 1..23: note = LF
  misc_feature 24..25: note = Core
  misc_feature 26..50: note = RF
gcgcaagcaagtcggaaaggctcctgacaccttattccgatccctgccgt

SEQ ID NO: 24208 - DNA, 50 bp, unidentified
  source 1..50: mol_type = unassigned DNA; note = target_60ff686
  misc_feature 1..23: note = LF
  misc_feature 24..25: note = Core
  misc_feature 26..50: note = RF
tttgatcgaagttaacgtgtacccgtccggtgaggccggtgagggccgcc

SEQ ID NO: 24209 - DNA, 50 bp, unidentified
  source 1..50: mol_type = unassigned DNA; note = target_6106874
  misc_feature 1..23: note = LF
  misc_feature 24..25: note = Core
  misc_feature 26..50: note = RF
attccaccacagacgaccggggttgggtcccggcgttcgccgggacgact

SEQ ID NO: 24210 - DNA, 50 bp, unidentified
  source 1..50: mol_type = unassigned DNA; note = target_610e3cf
  misc_feature 1..23: note = LF
  misc_feature 24..25: note = Core
  misc_feature 26..50: note = RF
cgggcggctttgccgacctactcaggatgacgaaccaaaaagccctccac

SEQ ID NO: 24211 - DNA, 50 bp, unidentified
  source 1..50: mol_type = unassigned DNA; note = target_610e6f0
  misc_feature 1..23: note = LF
  misc_feature 24..25: note = Core
  misc_feature 26..50: note = RF
cgccgtcgccctcccgacggcgcctagttgccggtccccgccagcccgcg

SEQ ID NO: 24212 - DNA, 50 bp, unidentified
  source 1..50: mol_type = unassigned DNA; note = target_6111e8d
  misc_feature 1..23: note = LF
  misc_feature 24..25: note = Core
  misc_feature 26..50: note = RF
tcccggatgacggcgttgggttctgtcgcaaacttttcggcaatgctgac

SEQ ID NO: 24213 - DNA, 50 bp, unidentified
  source 1..50: mol_type = unassigned DNA; note = target_6112637
  misc_feature 1..23: note = LF
  misc_feature 24..25: note = Core
  misc_feature 26..50: note = RF
gttagacccggcatgtccgcttttggcacgtcacgtcgatcggggggatc

SEQ ID NO: 24214 - DNA, 50 bp, unidentified
  source 1..50: mol_type = unassigned DNA; note = target_61148c0
  misc_feature 1..22: note = LF
  misc_feature 23..25: note = Core
  misc_feature 26..50: note = RF
cgcgaatcgcgggcagggcccgcttacaggtgcggtggcctatgccggaa

SEQ ID NO: 24215 - DNA, 50 bp, unidentified
  source 1..50: mol_type = unassigned DNA; note = target_6115907
  misc_feature 1..23: note = LF
  misc_feature 24..25: note = Core
  misc_feature 26..50: note = RF
gccggcggactggtcggcatgggctaccgccttgcggcaggcctctttac

SEQ ID NO: 24216 - DNA, 50 bp, unidentified
  source 1..50: mol_type = unassigned DNA; note = target_6115b9d
  misc_feature 1..23: note = LF
  misc_feature 24..25: note = Core
  misc_feature 26..50: note = RF
atcttttgctcataaaacatctcctttctagttaatgttccctattatac

SEQ ID NO: 24217 - DNA, 50 bp, unidentified
  source 1..50: mol_type = unassigned DNA; note = target_611b1a0
  misc_feature 1..23: note = LF
  misc_feature 24..25: note = Core
  misc_feature 26..50: note = RF
gttatcgctatagacatatatacctccttatgctatctcttcattttctt

SEQ ID NO: 24218 - DNA, 50 bp, unidentified
  source 1..50: mol_type = unassigned DNA; note = target_611d77d
  misc_feature 1..24: note = LF
  misc_feature 25: note = Core
  misc_feature 26..50: note = RF
tgcgtccaggcgcgcggggaagcttttttaaaatcctcgatcgcgctcgc

SEQ ID NO: 24219 - DNA, 50 bp, unidentified
  source 1..50: mol_type = unassigned DNA; note = target_612d5a6
  misc_feature 1..23: note = LF
  misc_feature 24..25: note = Core
  misc_feature 26..50: note = RF
aagttgtcctcaacttagctgtcagagggattgaccaactggcgcccgtg

SEQ ID NO: 24220 - DNA, 50 bp, unidentified
  source 1..50: mol_type = unassigned DNA; note = target_6137b78
  misc_feature 1..24: note = LF
  misc_feature 25: note = Core
  misc_feature 26..50: note = RF
gacacactggcaagtcgcagatagcagccgttcggtgcgatcgactcgcg

SEQ ID NO: 24221 - DNA, 50 bp, unidentified
  source 1..50: mol_type = unassigned DNA; note = target_613dd0b
  misc_feature 1..23: note = LF
  misc_feature 24..25: note = Core
  misc_feature 26..50: note = RF
ggtttcgctgcgctctacccatcctacaaactcgacgccgtccccacgaa

SEQ ID NO: 24222 - DNA, 50 bp, unidentified
  source 1..50: mol_type = unassigned DNA; note = target_6143800
  misc_feature 1..24: note = LF
  misc_feature 25: note = Core
  misc_feature 26..50: note = RF
gcggatcggacctccgcacatcggcacgatcgcggagagcggcataccct

SEQ ID NO: 24223 - DNA, 50 bp, unidentified
  source 1..50: mol_type = unassigned DNA; note = target_6143a5a
  misc_feature 1..22: note = LF
  misc_feature 23..25: note = Core
  misc_feature 26..50: note = RF
ctaaatcgaataggatactcctactcgattatgtctatatcgtagatagg

SEQ ID NO: 24224 - DNA, 50 bp, unidentified
  source 1..50: mol_type = unassigned DNA; note = target_614617f
  misc_feature 1..24: note = LF
  misc_feature 25: note = Core
  misc_feature 26..50: note = RF
tgcaccacggctacccaaatgacttgacgccgtgtcggatggccttgcat

SEQ ID NO: 24225 - DNA, 50 bp, unidentified
  source 1..50: mol_type = unassigned DNA; note = target_6146fe6
  misc_feature 1..24: note = LF
  misc_feature 25: note = Core
  misc_feature 26..50: note = RF
aatcgcgccttgacccgcagggggcatccacacatgacgcacgtgaccct

SEQ ID NO: 24226 - DNA, 50 bp, unidentified
  source 1..50: mol_type = unassigned DNA; note = target_614fa62
  misc_feature 1..23: note = LF
  misc_feature 24..25: note = Core
  misc_feature 26..50: note = RF
ctcaacagcgcaatgtcggcttgtgacccccatagcggacactcggcaag

SEQ ID NO: 24227 - DNA, 50 bp, unidentified
  source 1..50: mol_type = unassigned DNA; note = target_61599a1
  misc_feature 1..24: note = LF
  misc_feature 25: note = Core
  misc_feature 26..50: note = RF
cacaaaactctccctagttctaacgccgcattaaggtgtgagccacgcga

SEQ ID NO: 24228 - DNA, 50 bp, unidentified
  source 1..50: mol_type = unassigned DNA; note = target_615ab86
  misc_feature 1..23: note = LF
  misc_feature 24..25: note = Core
  misc_feature 26..50: note = RF
gggcctggcctccggccgccgcgctcagcccttgatgcagattttcggcc

SEQ ID NO: 24229 - DNA, 50 bp, unidentified
  source 1..50: mol_type = unassigned DNA; note = target_616634a
  misc_feature 1..23: note = LF
  misc_feature 24..25: note = Core
  misc_feature 26..50: note = RF
tcgcggaggcgatggattacatgctcaagcgctggtccacattcagccgg

SEQ ID NO: 24230 - DNA, 50 bp, unidentified
  source 1..50: mol_type = unassigned DNA; note = target_6167794
  misc_feature 1..24: note = LF
  misc_feature 25: note = Core
  misc_feature 26..50: note = RF
gccgtaagtgccgatgtccgcccttggcgcatagcggacaaggtgaggcg

SEQ ID NO: 24231 - DNA, 50 bp, unidentified
  source 1..50: mol_type = unassigned DNA; note = target_616ecb2
  misc_feature 1..22: note = LF
  misc_feature 23..25: note = Core
  misc_feature 26..50: note = RF
tcattcagccatacaaattgaaatttgtcttggatgtttatgagaaatac

SEQ ID NO: 24232 - DNA, 50 bp, unidentified
  source 1..50: mol_type = unassigned DNA; note = target_617438b
  misc_feature 1..22: note = LF
  misc_feature 23..25: note = Core
  misc_feature 26..50: note = RF
aaacgcctgttgaatacccctcctttctcaaatggcttgccaatgacaaa

SEQ ID NO: 24233 - DNA, 50 bp, unidentified
  source 1..50: mol_type = unassigned DNA; note = target_6183dcb
  misc_feature 1..23: note = LF
  misc_feature 24..25: note = Core
  misc_feature 26..50: note = RF
gttcagaattcgcatatctcctcctgagctgtccggggaagactgaaacc

SEQ ID NO: 24234 - DNA, 50 bp, unidentified
  source 1..50: mol_type = unassigned DNA; note = target_618be0b
  misc_feature 1..22: note = LF
  misc_feature 23..25: note = Core
  misc_feature 26..50: note = RF
cgagagcgacatggtcctcgaaatggcccttgtagagcagcagacgcccc

SEQ ID NO: 24235 - DNA, 50 bp, unidentified
  source 1..50: mol_type = unassigned DNA; note = target_619872a
  misc_feature 1..19: note = LF
  misc_feature 20..25: note = Core
  misc_feature 26..50: note = RF
tcagcaagcttaacgccttgtatctacaaagcttctcatctctttaaaaa

SEQ ID NO: 24236 - DNA, 50 bp, unidentified
  source 1..50: mol_type = unassigned DNA; note = target_61a06f0
  misc_feature 1..23: note = LF
  misc_feature 24..25: note = Core
  misc_feature 26..50: note = RF
gtgtcgcttcgctccttcaccccctctctcgtatcgctgcgcgatgcggg

SEQ ID NO: 24237 - DNA, 50 bp, unidentified
  source 1..50: mol_type = unassigned DNA; note = target_61a0e33
  misc_feature 1..23: note = LF
  misc_feature 24..25: note = Core
  misc_feature 26..50: note = RF
aactttttcatgaccagtcctccctaacagcataatttattcatatcata

SEQ ID NO: 24238 - DNA, 50 bp, unidentified
  source 1..50: mol_type = unassigned DNA; note = target_61a240d
  misc_feature 1..23: note = LF
  misc_feature 24..25: note = Core
  misc_feature 26..50: note = RF
aaaaatcttttttttcatgttatctcctttagtaaatgaaatagtttata

SEQ ID NO: 24239 - DNA, 50 bp, unidentified
  source 1..50: mol_type = unassigned DNA; note = target_61a5cad
  misc_feature 1..23: note = LF
  misc_feature 24..25: note = Core
  misc_feature 26..50: note = RF
cggttagcgcaagcgcagggccgctcagtccgaggcaaaggtccgagaca

SEQ ID NO: 24240 - DNA, 50 bp, unidentified
  source 1..50: mol_type = unassigned DNA; note = target_61b1f75
  misc_feature 1..23: note = LF
  misc_feature 24..25: note = Core
  misc_feature 26..50: note = RF
tttgggcaggtccttcgacaggctcaggatgacaattctatttctgacat

SEQ ID NO: 24241 - DNA, 50 bp, unidentified
  source 1..50: mol_type = unassigned DNA; note = target_61c55af
  misc_feature 1..23: note = LF
  misc_feature 24..25: note = Core
  misc_feature 26..50: note = RF
gccgacatcggcggcgcaatcatctgccgcttcccgagcgcggggtcagc

SEQ ID NO: 24242 - DNA, 50 bp, unidentified
  source 1..50: mol_type = unassigned DNA; note = target_61cde0f
  misc_feature 1..24: note = LF
  misc_feature 25: note = Core
  misc_feature 26..50: note = RF
cgacagtctggaatcgacccaaagcagacaatggtaatgaagaccgcttc

SEQ ID NO: 24243 - DNA, 50 bp, unidentified
  source 1..50: mol_type = unassigned DNA; note = target_61cf9a2
  misc_feature 1..23: note = LF
  misc_feature 24..25: note = Core
  misc_feature 26..50: note = RF
gtaaagacgctgcaagtacttccctgtacgctcggattgcgccatccctg

SEQ ID NO: 24244 - DNA, 50 bp, unidentified
  source 1..50: mol_type = unassigned DNA; note = target_61d8ff2
  misc_feature 1..24: note = LF
  misc_feature 25: note = Core
  misc_feature 26..50: note = RF
gaactggcgcttgatcacccggaacggatgctcgaccttggctcgtgtct

SEQ ID NO: 24245 - DNA, 50 bp, unidentified
  source 1..50: mol_type = unassigned DNA; note = target_61de506
  misc_feature 1..23: note = LF
  misc_feature 24..25: note = Core
  misc_feature 26..50: note = RF
accaccaagccgacccccccgttcgccctgagcctgtagaagggtctcga

SEQ ID NO: 24246 - DNA, 50 bp, unidentified
  source 1..50: mol_type = unassigned DNA; note = target_61eec1b
  misc_feature 1..23: note = LF
  misc_feature 24..25: note = Core
  misc_feature 26..50: note = RF
cattcaacgggcctttgatgtgctaattttgtgctaaaactctgcaaaac

SEQ ID NO: 24247 - DNA, 50 bp, unidentified
  source 1..50: mol_type = unassigned DNA; note = target_6203e03
  misc_feature 1..22: note = LF
  misc_feature 23..25: note = Core
  misc_feature 26..50: note = RF
gcaatctattttagatttttcgcgaagtaggtggcggccttttttacgat

SEQ ID NO: 24248 - DNA, 50 bp, unidentified
  source 1..50: mol_type = unassigned DNA; note = target_621ab1c
  misc_feature 1..24: note = LF
  misc_feature 25: note = Core
  misc_feature 26..50: note = RF
ccgagcgatgccagcaacgtccgctgcgggtcacaagcgaccgatcacga

SEQ ID NO: 24249 - DNA, 50 bp, unidentified
  source 1..50: mol_type = unassigned DNA; note = target_621b708
  misc_feature 1..23: note = LF
  misc_feature 24..25: note = Core
  misc_feature 26..50: note = RF
catgtgcctggctgccctggatcaggacactttaactttgcggcgtgtgg

SEQ ID NO: 24250 - DNA, 50 bp, unidentified
  source 1..50: mol_type = unassigned DNA; note = target_6225e25
  misc_feature 1..23: note = LF
  misc_feature 24..25: note = Core
  misc_feature 26..50: note = RF
agcaccacgttttagtccgcttttggcactaagttgcggcgagcggcacg

SEQ ID NO: 24251 - DNA, 50 bp, unidentified
  source 1..50: mol_type = unassigned DNA; note = target_6228bbd
  misc_feature 1..24: note = LF
  misc_feature 25: note = Core
  misc_feature 26..50: note = RF
gtaaggtccgcttccgacccaaagcggacataaaaaagagggatctctcg

SEQ ID NO: 24252 - DNA, 50 bp, unidentified
  source 1..50: mol_type = unassigned DNA; note = target_6228d12
  misc_feature 1..10: note = LF
  misc_feature 11..25: note = Core
  misc_feature 26..50: note = RF
ataaatcctccttgtattatatagttttatctatacacagtccctgttgg

SEQ ID NO: 24253 - DNA, 50 bp, unidentified
  source 1..50: mol_type = unassigned DNA; note = target_622e052
  misc_feature 1..23: note = LF
  misc_feature 24..25: note = Core
  misc_feature 26..50: note = RF
aacggcgcgtgaaccacacaaagtgaggaagaaccaatttaagtgccaag

SEQ ID NO: 24254 - DNA, 50 bp, unidentified
  source 1..50: mol_type = unassigned DNA; note = target_6238fff
  misc_feature 1..23: note = LF
  misc_feature 24..25: note = Core
  misc_feature 26..50: note = RF
tactgtggattagtacattcctcctttcataatcatctgaattataaaac

SEQ ID NO: 24255 - DNA, 50 bp, unidentified
  source 1..50: mol_type = unassigned DNA; note = target_62391cf
  misc_feature 1..22: note = LF
  misc_feature 23..25: note = Core
  misc_feature 26..50: note = RF
ttgaccttacaaaatctatgtttctatgtgtttaataaatttttatgaat

SEQ ID NO: 24256 - DNA, 50 bp, unidentified
  source 1..50: mol_type = unassigned DNA; note = target_62403f0
  misc_feature 1..24: note = LF
  misc_feature 25: note = Core
  misc_feature 26..50: note = RF
gtccggcaatgaactcgcggcgtttcattactcgatcacctcgtcggcgc

SEQ ID NO: 24257 - DNA, 50 bp, unidentified
  source 1..50: mol_type = unassigned DNA; note = target_6248544
  misc_feature 1..24: note = LF
  misc_feature 25: note = Core
  misc_feature 26..50: note = RF
ttgttgttcaatttttgcgcccgatagcttaacaaagtaaatcatgattt

SEQ ID NO: 24258 - DNA, 50 bp, unidentified
  source 1..50: mol_type = unassigned DNA; note = target_6254309
  misc_feature 1..23: note = LF
  misc_feature 24..25: note = Core
  misc_feature 26..50: note = RF
gggccgatccctccatggcgatgctctcaacagcgcctcttgcctttcct

SEQ ID NO: 24259 - DNA, 50 bp, unidentified
  source 1..50: mol_type = unassigned DNA; note = target_625904b
  misc_feature 1..22: note = LF
  misc_feature 23..25: note = Core
  misc_feature 26..50: note = RF
aattattgcactaacctgccccgtttagtcgaataagaaaaagttgccga

SEQ ID NO: 24260 - DNA, 50 bp, unidentified
  source 1..50: mol_type = unassigned DNA; note = target_6263687
  misc_feature 1..23: note = LF
  misc_feature 24..25: note = Core
  misc_feature 26..50: note = RF
agcggacagaaagttggcaaccgctcaataatctcgcaaggcaaaaaagt

SEQ ID NO: 24261 - DNA, 50 bp, unidentified
  source 1..50: mol_type = unassigned DNA; note = target_6263abf
  misc_feature 1..23: note = LF
  misc_feature 24..25: note = Core
  misc_feature 26..50: note = RF
aaagtcgcaaatggcggtcttgatgggatcagaaccgtcgacaacttgac

SEQ ID NO: 24262 - DNA, 50 bp, unidentified
  source 1..50: mol_type = unassigned DNA; note = target_6264d09
  misc_feature 1..23: note = LF
  misc_feature 24..25: note = Core
  misc_feature 26..50: note = RF
aagcggatcggagctttcagcatagcggcggcgcgctcgcaagccgaaaa

SEQ ID NO: 24263 - DNA, 50 bp, unidentified
  source 1..50: mol_type = unassigned DNA; note = target_626551a
  misc_feature 1..23: note = LF
  misc_feature 24..25: note = Core
  misc_feature 26..50: note = RF
gtattcgtcgctttcggcgccaccttctcttttcggagcaaggttaacac

SEQ ID NO: 24264 - DNA, 50 bp, unidentified
  source 1..50: mol_type = unassigned DNA; note = target_6268ece
  misc_feature 1..23: note = LF
  misc_feature 24..25: note = Core
  misc_feature 26..50: note = RF
ctatcagtcggcacatcaccttcctagaccgctggacggctgtcctgaaa

SEQ ID NO: 24265 - DNA, 50 bp, unidentified
  source 1..50: mol_type = unassigned DNA; note = target_6271c19
  misc_feature 1..23: note = LF
  misc_feature 24..25: note = Core
  misc_feature 26..50: note = RF
ccaaatttccggtgtgggtggaaagcggacattttctactgcaacgtgcg

SEQ ID NO: 24266 - DNA, 50 bp, unidentified
  source 1..50: mol_type = unassigned DNA; note = target_627e625
  misc_feature 1..24: note = LF
  misc_feature 25: note = Core
  misc_feature 26..50: note = RF
caaccgctcgaggaaggacggcatcacccccctcgctgtgcgcgagcagt

SEQ ID NO: 24267 - DNA, 50 bp, unidentified
  source 1..50: mol_type = unassigned DNA; note = target_628678a
  misc_feature 1..23: note = LF
  misc_feature 24..25: note = Core
  misc_feature 26..50: note = RF
gcgtacttatgagtctgcggcctagcactactttggcagatttttagcgg

SEQ ID NO: 24268 - DNA, 50 bp, unidentified
  source 1..50: mol_type = unassigned DNA; note = target_62893fd
  misc_feature 1..24: note = LF
  misc_feature 25: note = Core
  misc_feature 26..50: note = RF
gcgactaggtttaccggacatcggcagatccggtaaaccaaaccagcaac

SEQ ID NO: 24269 - DNA, 50 bp, unidentified
  source 1..50: mol_type = unassigned DNA; note = target_6298827
  misc_feature 1..22: note = LF
  misc_feature 23..25: note = Core
  misc_feature 26..50: note = RF
tacagtgaatttgaggtccttttttgtgttgtaatagggatgttcccatg

SEQ ID NO: 24270 - DNA, 50 bp, unidentified
  source 1..50: mol_type = unassigned DNA; note = target_62a167f
  misc_feature 1..23: note = LF
  misc_feature 24..25: note = Core
  misc_feature 26..50: note = RF
ccgtagcccgcccgctcctgccgctgacccctgtgccctgaaggaggggg

SEQ ID NO: 24271 - DNA, 50 bp, unidentified
  source 1..50: mol_type = unassigned DNA; note = target_62a19e3
  misc_feature 1..23: note = LF
  misc_feature 24..25: note = Core
  misc_feature 26..50: note = RF
ggcctttcaggtcagagaggctttgttgcgtaattcagataaaggtaaat

SEQ ID NO: 24272 - DNA, 50 bp, unidentified
  source 1..50: mol_type = unassigned DNA; note = target_62b1ef8
  misc_feature 1..22: note = LF
  misc_feature 23..25: note = Core
  misc_feature 26..50: note = RF
caccccttgtgtcttggcagtttgaaaattgaatcgtcattccgggatgc

SEQ ID NO: 24273 - DNA, 50 bp, unidentified
  source 1..50: mol_type = unassigned DNA; note = target_62b6480
  misc_feature 1..23: note = LF
  misc_feature 24..25: note = Core
  misc_feature 26..50: note = RF
aacataaatccgttaacctccttgtcttccccgttcaggaactccgtttt

SEQ ID NO: 24274 - DNA, 50 bp, unidentified
  source 1..50: mol_type = unassigned DNA; note = target_62b7c8a
  misc_feature 1..24: note = LF
  misc_feature 25: note = Core
  misc_feature 26..50: note = RF
acgccccccacttgcggttatacattgttatagggcgtttttaatttaag

SEQ ID NO: 24275 - DNA, 50 bp, unidentified
  source 1..50: mol_type = unassigned DNA; note = target_62b7ffa
  misc_feature 1..24: note = LF
  misc_feature 25: note = Core
  misc_feature 26..50: note = RF
gtggcatcggcgcttgccgatgccccccctaatagtttaattattcacat

SEQ ID NO: 24276 - DNA, 50 bp, unidentified
  source 1..50: mol_type = unassigned DNA; note = target_62b80c5
  misc_feature 1..21: note = LF
  misc_feature 22..25: note = Core
  misc_feature 26..50: note = RF
ccgcggtcgcgcggatcggcgctcacgacttcacgtccatggcgccccgc

SEQ ID NO: 24277 - DNA, 50 bp, unidentified
  source 1..50: mol_type = unassigned DNA; note = target_62bf87e
  misc_feature 1..23: note = LF
  misc_feature 24..25: note = Core
  misc_feature 26..50: note = RF
acagcttggctggcaatcacggtagcggcggtcgccaatattacgcccgg

SEQ ID NO: 24278 - DNA, 50 bp, unidentified
  source 1..50: mol_type = unassigned DNA; note = target_62c0cb1
  misc_feature 1..23: note = LF
  misc_feature 24..25: note = Core
  misc_feature 26..50: note = RF
agcctgtctccgggttcgggcgcctcagcgctcgtgaggggtggatgccg

SEQ ID NO: 24279 - DNA, 50 bp, unidentified
  source 1..50: mol_type = unassigned DNA; note = target_62c633d
  misc_feature 1..22: note = LF
  misc_feature 23..25: note = Core
  misc_feature 26..50: note = RF
atccaatctttttcttcatatgtatacctctcttataaatgacttatata

SEQ ID NO: 24280 - DNA, 50 bp, unidentified
  source 1..50: mol_type = unassigned DNA; note = target_62d1c1e
  misc_feature 1..23: note = LF
  misc_feature 24..25: note = Core
  misc_feature 26..50: note = RF
tctcggctgcggcgatccagttctgcctgtcgatcaaggtgctgttcagg

SEQ ID NO: 24281 - DNA, 50 bp, unidentified
  source 1..50: mol_type = unassigned DNA; note = target_62d4ab0
  misc_feature 1..23: note = LF
  misc_feature 24..25: note = Core
  misc_feature 26..50: note = RF
cagtttgagtgactcgggcgactagcccgcatttctcacagtagttaggc

SEQ ID NO: 24282 - DNA, 50 bp, unidentified
  source 1..50: mol_type = unassigned DNA; note = target_62d7a56
  misc_feature 1..21: note = LF
  misc_feature 22..25: note = Core
  misc_feature 26..50: note = RF
ggcttgatgccggtctttaacctgctgtgtttgacagccgtatgattatg

SEQ ID NO: 24283 - DNA, 50 bp, unidentified
  source 1..50: mol_type = unassigned DNA; note = target_62d9ca4
  misc_feature 1..24: note = LF
  misc_feature 25: note = Core
  misc_feature 26..50: note = RF
aaatcgcgctattttttatatacgttgttaccctttgttattttttcgca

SEQ ID NO: 24284 - DNA, 50 bp, unidentified
  source 1..50: mol_type = unassigned DNA; note = target_62d9f8e
  misc_feature 1..23: note = LF
  misc_feature 24..25: note = Core
  misc_feature 26..50: note = RF
aaaacttcgggataaatcccgacctacaagtttggttccggcttgtccgg

SEQ ID NO: 24285 - DNA, 50 bp, unidentified
  source 1..50: mol_type = unassigned DNA; note = target_62e13b9
  misc_feature 1..23: note = LF
  misc_feature 24..25: note = Core
  misc_feature 26..50: note = RF
acagggctgcgccgttgtccaccctacgacggtggtacctttgcgggacc

SEQ ID NO: 24286 - DNA, 50 bp, unidentified
  source 1..50: mol_type = unassigned DNA; note = target_62f9b5c
  misc_feature 1..22: note = LF
  misc_feature 23..25: note = Core
  misc_feature 26..50: note = RF
cggtacttgactcttcgacttcgctcagggtaaaccaagcaggaactgta

SEQ ID NO: 24287 - DNA, 50 bp, unidentified
  source 1..50: mol_type = unassigned DNA; note = target_62fb830
  misc_feature 1..23: note = LF
  misc_feature 24..25: note = Core
  misc_feature 26..50: note = RF
accgtcagcctgcaacccgccgcctgacctcaaggaccaacgcccacagc

SEQ ID NO: 24288 - DNA, 50 bp, unidentified
  source 1..50: mol_type = unassigned DNA; note = target_6301214
  misc_feature 1..23: note = LF
  misc_feature 24..25: note = Core
  misc_feature 26..50: note = RF
cagattccatcccccaaccagccctatcgggtcagccgtcaggtaacacg

SEQ ID NO: 24289 - DNA, 50 bp, unidentified
  source 1..50: mol_type = unassigned DNA; note = target_630b70c
  misc_feature 1..23: note = LF
  misc_feature 24..25: note = Core
  misc_feature 26..50: note = RF
tatgatgagaaacgcgcgaaagttggtgatgccctgaagggcggcatatc

SEQ ID NO: 24290 - DNA, 50 bp, unidentified
  source 1..50: mol_type = unassigned DNA; note = target_631183c
  misc_feature 1..22: note = LF
  misc_feature 23..25: note = Core
  misc_feature 26..50: note = RF
tcgtcgaggtcggtcatcgtcttccttttccattgatgtcagttgggtcc

SEQ ID NO: 24291 - DNA, 50 bp, unidentified
  source 1..50: mol_type = unassigned DNA; note = target_63145dc
  misc_feature 1..22: note = LF
  misc_feature 23..25: note = Core
  misc_feature 26..50: note = RF
ctcttgctttgtgtccttcgtgtctttgtggtggatcctccgccggctcg

SEQ ID NO: 24292 - DNA, 50 bp, unidentified
  source 1..50: mol_type = unassigned DNA; note = target_63161ae
  misc_feature 1..24: note = LF
  misc_feature 25: note = Core
  misc_feature 26..50: note = RF
tcgggcggaagggcgcatcaccgcttgtggcacgaagcggcggttaggaa

SEQ ID NO: 24293 - DNA, 50 bp, unidentified
  source 1..50: mol_type = unassigned DNA; note = target_6318faa
  misc_feature 1..23: note = LF
  misc_feature 24..25: note = Core
  misc_feature 26..50: note = RF
gttgctcgtccgatgtctcttgttggcacaaaccggcggttagaggtcgg

SEQ ID NO: 24294 - DNA, 50 bp, unidentified
  source 1..50: mol_type = unassigned DNA; note = target_63195ee
  misc_feature 1..24: note = LF
  misc_feature 25: note = Core
  misc_feature 26..50: note = RF
tccagtcgggagccccggatgtgccgatcggagaaggggacgcgccaaat

SEQ ID NO: 24295 - DNA, 50 bp, unidentified
  source 1..50: mol_type = unassigned DNA; note = target_631a6bb
  misc_feature 1..21: note = LF
  misc_feature 22..25: note = Core
  misc_feature 26..50: note = RF
ccaatcagacaggggcaacttccccccgcacggtgagtgcagctcgtgcg

SEQ ID NO: 24296 - DNA, 50 bp, unidentified
  source 1..50: mol_type = unassigned DNA; note = target_631d60a
  misc_feature 1..24: note = LF
  misc_feature 25: note = Core
  misc_feature 26..50: note = RF
cgcgctagcgagtgataaatccacttagcgtaagtttgcgcttttcattc

SEQ ID NO: 24297 - DNA, 50 bp, unidentified
  source 1..50: mol_type = unassigned DNA; note = target_6328fdc
  misc_feature 1..23: note = LF
  misc_feature 24..25: note = Core
  misc_feature 26..50: note = RF
atttcgccattgcagcaggggcaaggtggaggctgcctgaaccgaaaaac

SEQ ID NO: 24298 - DNA, 50 bp, unidentified
  source 1..50: mol_type = unassigned DNA; note = target_632e1bf
  misc_feature 1..24: note = LF
  misc_feature 25: note = Core
  misc_feature 26..50: note = RF
ctgcgggtaaaggaatgcggagaaaagcgaatgcccggctgtaatggacg

SEQ ID NO: 24299 - DNA, 50 bp, unidentified
  source 1..50: mol_type = unassigned DNA; note = target_63357dc
  misc_feature 1..21: note = LF
  misc_feature 22..25: note = Core
  misc_feature 26..50: note = RF
ggatcgcggtcggacggagtggtcatcggggctccctcgggtgccgggtt

SEQ ID NO: 24300 - DNA, 50 bp, unidentified
  source 1..50: mol_type = unassigned DNA; note = target_6342641
  misc_feature 1..23: note = LF
  misc_feature 24..25: note = Core
  misc_feature 26..50: note = RF
attccttcatcttatccatactaattattcctccatattcagcatttgac

SEQ ID NO: 24301 - DNA, 50 bp, unidentified
  source 1..50: mol_type = unassigned DNA; note = target_6344556
  misc_feature 1..24: note = LF
  misc_feature 25: note = Core
  misc_feature 26..50: note = RF
tttaatgatataacgttccataaaaaatcctccatgaaatcaaagcagta

SEQ ID NO: 24302 - DNA, 50 bp, unidentified
  source 1..50: mol_type = unassigned DNA; note = target_636a922
  misc_feature 1..24: note = LF
  misc_feature 25: note = Core
  misc_feature 26..50: note = RF
tgtttattccggaagcgcgcccttttgcggaagatcaggacaattatttg

SEQ ID NO: 24303 - DNA, 50 bp, unidentified
  source 1..50: mol_type = unassigned DNA; note = target_636f38a
  misc_feature 1..22: note = LF
  misc_feature 23..25: note = Core
  misc_feature 26..50: note = RF
ccatcggctgcagcacgtgctgcccccccccggtattcgccgccgacacg

SEQ ID NO: 24304 - DNA, 50 bp, unidentified
  source 1..50: mol_type = unassigned DNA; note = target_636fb89
  misc_feature 1..24: note = LF
  misc_feature 25: note = Core
  misc_feature 26..50: note = RF
ctcgacactcggccgaatgtcggcttcgggtcaaaaacggctatggcggc

SEQ ID NO: 24305 - DNA, 50 bp, unidentified
  source 1..50: mol_type = unassigned DNA; note = target_6382079
  misc_feature 1..23: note = LF
  misc_feature 24..25: note = Core
  misc_feature 26..50: note = RF
aatggattatgacgatcccaccatggcacatcgatgccgtcggggggcgg

SEQ ID NO: 24306 - DNA, 50 bp, unidentified
  source 1..50: mol_type = unassigned DNA; note = target_638354a
  misc_feature 1..24: note = LF
  misc_feature 25: note = Core
  misc_feature 26..50: note = RF
acgcttggcggcgggccctaccattttttttggagaagctcgcggagtgc

SEQ ID NO: 24307 - DNA, 50 bp, unidentified
  source 1..50: mol_type = unassigned DNA; note = target_638586d
  misc_feature 1..24: note = LF
  misc_feature 25: note = Core
  misc_feature 26..50: note = RF
taattttactttcatttaagtccttctccttttaatgtttcataccacta

SEQ ID NO: 24308 - DNA, 50 bp, unidentified
  source 1..50: mol_type = unassigned DNA; note = target_6386c98
  misc_feature 1..23: note = LF
  misc_feature 24..25: note = Core
  misc_feature 26..50: note = RF
tgtccgctttcgcgcgcaaagcagacgttgaccccgaatgtctgctatcg

SEQ ID NO: 24309 - DNA, 50 bp, unidentified
  source 1..50: mol_type = unassigned DNA; note = target_6389e25
  misc_feature 1..22: note = LF
  misc_feature 23..25: note = Core
  misc_feature 26..50: note = RF
cgattcttgagctattgcacccgttttgtttaagtacaaaatttcacaat

SEQ ID NO: 24310 - DNA, 50 bp, unidentified
  source 1..50: mol_type = unassigned DNA; note = target_638a180
  misc_feature 1..23: note = LF
  misc_feature 24..25: note = Core
  misc_feature 26..50: note = RF
cgacgaacgtcgtcgtcttccagtgcccgtgcggaaccggcgcccggcag

SEQ ID NO: 24311 - DNA, 50 bp, unidentified
  source 1..50: mol_type = unassigned DNA; note = target_638ba0b
  misc_feature 1..23: note = LF
  misc_feature 24..25: note = Core
  misc_feature 26..50: note = RF
gcacgcttgcgtagcgaaccccttgcgggttgatcgtggaaggccgtgcc

SEQ ID NO: 24312 - DNA, 50 bp, unidentified
  source 1..50: mol_type = unassigned DNA; note = target_638dcdf
  misc_feature 1..23: note = LF
  misc_feature 24..25: note = Core
  misc_feature 26..50: note = RF
caagtctgcgtgcatggcacgtcctttcaggaggcgaagatcaggccgac

SEQ ID NO: 24313 - DNA, 50 bp, unidentified
  source 1..50: mol_type = unassigned DNA; note = target_6393d25
  misc_feature 1..24: note = LF
  misc_feature 25: note = Core
  misc_feature 26..50: note = RF
ccagatgggcgggtcggcggcagacgggatggcaggaagaccttctgtcg

SEQ ID NO: 24314 - DNA, 50 bp, unidentified
  source 1..50: mol_type = unassigned DNA; note = target_6393fc0
  misc_feature 1..24: note = LF
  misc_feature 25: note = Core
  misc_feature 26..50: note = RF
cactcatcgtgccgccgcaggggttttgagtgtaaccgcctgctaacagc

SEQ ID NO: 24315 - DNA, 50 bp, unidentified
  source 1..50: mol_type = unassigned DNA; note = target_639892f
  misc_feature 1..23: note = LF
  misc_feature 24..25: note = Core
  misc_feature 26..50: note = RF
ggatgaaattccctccccctccccccccccccgcagatgcggctccggcg

SEQ ID NO: 24316 - DNA, 50 bp, unidentified
  source 1..50: mol_type = unassigned DNA; note = target_639b6b7
  misc_feature 1..23: note = LF
  misc_feature 24..25: note = Core
  misc_feature 26..50: note = RF
gacacatcacagatcaccagatgaggctctacatgacctaccgactgaca

SEQ ID NO: 24317 - DNA, 50 bp, unidentified
  source 1..50: mol_type = unassigned DNA; note = target_639ed83
  misc_feature 1..24: note = LF
  misc_feature 25: note = Core
  misc_feature 26..50: note = RF
cgagcgtaacgaactcgcggcgcttcattcgatcacctcgtcggcgcggg

SEQ ID NO: 24318 - DNA, 50 bp, unidentified
  source 1..50: mol_type = unassigned DNA; note = target_63a54bb
  misc_feature 1..24: note = LF
  misc_feature 25: note = Core
  misc_feature 26..50: note = RF
tcactgaaccgagacggctttaacgtttgaattcagcgtgtggcgaagcc

SEQ ID NO: 24319 - DNA, 50 bp, unidentified
  source 1..50: mol_type = unassigned DNA; note = target_63a7a2f
  misc_feature 1..22: note = LF
  misc_feature 23..25: note = Core
  misc_feature 26..50: note = RF
gactcatatcctctcggctgtttgaaaagtgaagccggtgggtatgcgaa

SEQ ID NO: 24320 - DNA, 50 bp, unidentified
  source 1..50: mol_type = unassigned DNA; note = target_63a9469
  misc_feature 1..21: note = LF
  misc_feature 22..25: note = Core
  misc_feature 26..50: note = RF
atcggccggcgccgacattggagaaatgatggattgggaaccgatttcag

SEQ ID NO: 24321 - DNA, 50 bp, unidentified
  source 1..50: mol_type = unassigned DNA; note = target_63aa017
  misc_feature 1..24: note = LF
  misc_feature 25: note = Core
  misc_feature 26..50: note = RF
ccgcttggcggcgggcgtcagaatttttttgacagaagatccttcatcgc

SEQ ID NO: 24322 - DNA, 50 bp, unidentified
  source 1..50: mol_type = unassigned DNA; note = target_63aac9c
  misc_feature 1..23: note = LF
  misc_feature 24..25: note = Core
  misc_feature 26..50: note = RF
taccctcttgaggtgaagaccgactgagccggacggtggctcaggagcca

SEQ ID NO: 24323 - DNA, 50 bp, unidentified
  source 1..50: mol_type = unassigned DNA; note = target_63b3ce4
  misc_feature 1..23: note = LF
  misc_feature 24..25: note = Core
  misc_feature 26..50: note = RF
agaagcccgcaattttgcgggtttttttcgtccccaaagcggggcgcccg

SEQ ID NO: 24324 - DNA, 50 bp, unidentified
  source 1..50: mol_type = unassigned DNA; note = target_63b4776
  misc_feature 1..24: note = LF
  misc_feature 25: note = Core
  misc_feature 26..50: note = RF
caaggggtgacgcactgatctcggcagagtcggacgtgtcacgcaggtgg

SEQ ID NO: 24325 - DNA, 50 bp, unidentified
  source 1..50: mol_type = unassigned DNA; note = target_63b4cae
  misc_feature 1..23: note = LF
  misc_feature 24..25: note = Core
  misc_feature 26..50: note = RF
aaaactctgtggcctctgtgtcctctgtggtgaaattgttttatctttgt

SEQ ID NO: 24326 - DNA, 50 bp, unidentified
  source 1..50: mol_type = unassigned DNA; note = target_63b9824
  misc_feature 1..24: note = LF
  misc_feature 25: note = Core
  misc_feature 26..50: note = RF
tcatgaagacacggatgtgttgatttgagaactaacccggctcagtactc

SEQ ID NO: 24327 - DNA, 50 bp, unidentified
  source 1..50: mol_type = unassigned DNA; note = target_63c2b16
  misc_feature 1..22: note = LF
  misc_feature 23..25: note = Core
  misc_feature 26..50: note = RF
atcttgatggaaaataccagtgaaacggcggcggcgcaccctgctgcaag

SEQ ID NO: 24328 - DNA, 50 bp, unidentified
  source 1..50: mol_type = unassigned DNA; note = target_63d04bd
  misc_feature 1..24: note = LF
  misc_feature 25: note = Core
  misc_feature 26..50: note = RF
taggctataagcttgttggcctttcaggccgccgtttagcggacaacaat

SEQ ID NO: 24329 - DNA, 50 bp, unidentified
  source 1..50: mol_type = unassigned DNA; note = target_63d91da
  misc_feature 1..24: note = LF
  misc_feature 25: note = Core
  misc_feature 26..50: note = RF
gagtgggcaattatctatgcggattggtataagggccttcaggtaacgtg

SEQ ID NO: 24330 - DNA, 50 bp, unidentified
  source 1..50: mol_type = unassigned DNA; note = target_63dc172
  misc_feature 1..23: note = LF
  misc_feature 24..25: note = Core
  misc_feature 26..50: note = RF
tgtcgcagccgctgagcgtgacctgccactgagctttcatccagtggcga

SEQ ID NO: 24331 - DNA, 50 bp, unidentified
  source 1..50: mol_type = unassigned DNA; note = target_63de5c3
  misc_feature 1..23: note = LF
  misc_feature 24..25: note = Core
  misc_feature 26..50: note = RF
cttgcctttgtgcgagccgagattgtccatgatgactatatcccccggct

SEQ ID NO: 24332 - DNA, 50 bp, unidentified
  source 1..50: mol_type = unassigned DNA; note = target_63e2515
  misc_feature 1..23: note = LF
  misc_feature 24..25: note = Core
  misc_feature 26..50: note = RF
ggattcccgaagcggctaaaagctggttcaaggatttctggctcatctgc

SEQ ID NO: 24333 - DNA, 50 bp, unidentified
  source 1..50: mol_type = unassigned DNA; note = target_63e3694
  misc_feature 1..23: note = LF
  misc_feature 24..25: note = Core
  misc_feature 26..50: note = RF
aacggaaagccggcaacagccggtttttcggctgtcggcagcgcgccgga

SEQ ID NO: 24334 - DNA, 50 bp, unidentified
  source 1..50: mol_type = unassigned DNA; note = target_63e478f
  misc_feature 1..24: note = LF
  misc_feature 25: note = Core
  misc_feature 26..50: note = RF
aagcgctactggatcaccctctgaccgagcggttcggacagctcggtgga

SEQ ID NO: 24335 - DNA, 50 bp, unidentified
  source 1..50: mol_type = unassigned DNA; note = target_63e5bf3
  misc_feature 1..23: note = LF
  misc_feature 24..25: note = Core
  misc_feature 26..50: note = RF
aagagctaccgtcgtgtggtccctgggtcccggctctcgctcgcgcctgg

SEQ ID NO: 24336 - DNA, 50 bp, unidentified
  source 1..50: mol_type = unassigned DNA; note = target_63ee810
  misc_feature 1..23: note = LF
  misc_feature 24..25: note = Core
  misc_feature 26..50: note = RF
gcggaatgccgaggtgccgataacggaccttccgaacttccggaaggggc

SEQ ID NO: 24337 - DNA, 50 bp, unidentified
  source 1..50: mol_type = unassigned DNA; note = target_63f459f
  misc_feature 1..24: note = LF
  misc_feature 25: note = Core
  misc_feature 26..50: note = RF
cgatttctccttaaaacgtataacgcccaattaaggggtgagcaacgcta

SEQ ID NO: 24338 - DNA, 50 bp, unidentified
  source 1..50: mol_type = unassigned DNA; note = target_63f78de
  misc_feature 1..23: note = LF
  misc_feature 24..25: note = Core
  misc_feature 26..50: note = RF
ttaatctcttccattttgttctcctttaaaagaatttaagtcttcatttc

SEQ ID NO: 24339 - DNA, 50 bp, unidentified
  source 1..50: mol_type = unassigned DNA; note = target_6409a54
  misc_feature 1..24: note = LF
  misc_feature 25: note = Core
  misc_feature 26..50: note = RF
acagccctctcgggagttttgaactggcctcttagtacgaaacagcatgg

SEQ ID NO: 24340 - DNA, 50 bp, unidentified
  source 1..50: mol_type = unassigned DNA; note = target_640a766
  misc_feature 1..23: note = LF
  misc_feature 24..25: note = Core
  misc_feature 26..50: note = RF
attgtgaatgtgttcattgcatcctcctgttaatctcaatcctattatac

SEQ ID NO: 24341 - DNA, 50 bp, unidentified
  source 1..50: mol_type = unassigned DNA; note = target_640b3b8
  misc_feature 1..23: note = LF
  misc_feature 24..25: note = Core
  misc_feature 26..50: note = RF
ccgccgtctgcggacccgtagcccggctaaggcgtttacgccgcaagccg

SEQ ID NO: 24342 - DNA, 50 bp, unidentified
  source 1..50: mol_type = unassigned DNA; note = target_6412b76
  misc_feature 1..23: note = LF
  misc_feature 24..25: note = Core
  misc_feature 26..50: note = RF
cgcttttgcaaagtgagccgccgtaagggcggaacctatagtagccgtta

SEQ ID NO: 24343 - DNA, 50 bp, unidentified
  source 1..50: mol_type = unassigned DNA; note = target_6414c48
  misc_feature 1..22: note = LF
  misc_feature 23..25: note = Core
  misc_feature 26..50: note = RF
atgatcttcaagtaaagcccccgtttagttgaacacgtttttgtggtttc

SEQ ID NO: 24344 - DNA, 50 bp, unidentified
  source 1..50: mol_type = unassigned DNA; note = target_64292a8
  misc_feature 1..23: note = LF
  misc_feature 24..25: note = Core
  misc_feature 26..50: note = RF
tgggcacaaaaaccgtgcccaccctacccgacttaaccattcacccttcg

SEQ ID NO: 24345 - DNA, 50 bp, unidentified
  source 1..50: mol_type = unassigned DNA; note = target_642d9b2
  misc_feature 1..24: note = LF
  misc_feature 25: note = Core
  misc_feature 26..50: note = RF
ggcccgaagggccgcaacccaaagcggacatcggcggacggaagtttttg

SEQ ID NO: 24346 - DNA, 50 bp, unidentified
  source 1..50: mol_type = unassigned DNA; note = target_64366da
  misc_feature 1..21: note = LF
  misc_feature 22..25: note = Core
  misc_feature 26..50: note = RF
ctcgccgatgatcagatcgccttcccaatgccccggcgtggcccggtcgt

SEQ ID NO: 24347 - DNA, 50 bp, unidentified
  source 1..50: mol_type = unassigned DNA; note = target_644942d
  misc_feature 1..23: note = LF
  misc_feature 24..25: note = Core
  misc_feature 26..50: note = RF
agttttttggttttcatacgcacctccaaataggagagcgccgcccatag

SEQ ID NO: 24348 - DNA, 50 bp, unidentified
  source 1..50: mol_type = unassigned DNA; note = target_644ddfd
  misc_feature 1..23: note = LF
  misc_feature 24..25: note = Core
  misc_feature 26..50: note = RF
acccaacatcgcaaatgcatcggtgggtcccggctctgcggcgcaccgct

SEQ ID NO: 24349 - DNA, 50 bp, unidentified
  source 1..50: mol_type = unassigned DNA; note = target_6459037
  misc_feature 1..23: note = LF
  misc_feature 24..25: note = Core
  misc_feature 26..50: note = RF
cagagagaactacgaagccgctgtaggagcttgccctgcaagcgaatgga

SEQ ID NO: 24350 - DNA, 50 bp, unidentified
  source 1..50: mol_type = unassigned DNA; note = target_645d7a8
  misc_feature 1..23: note = LF
  misc_feature 24..25: note = Core
  misc_feature 26..50: note = RF
gctgatcgcagcaaggaaagacgtggatgccggccttcgtcggcatgacg

SEQ ID NO: 24351 - DNA, 50 bp, unidentified
  source 1..50: mol_type = unassigned DNA; note = target_646fcbf
  misc_feature 1..24: note = LF
  misc_feature 25: note = Core
  misc_feature 26..50: note = RF
ctggctatgcgctcattgggctttcagcccgcaaaataaggcacacaatc

SEQ ID NO: 24352 - DNA, 50 bp, unidentified
  source 1..50: mol_type = unassigned DNA; note = target_647184f
  misc_feature 1..22: note = LF
  misc_feature 23..25: note = Core
  misc_feature 26..50: note = RF
atgaactcgggaggcgggttctttttttgttaagtaatcggtaacgattg

SEQ ID NO: 24353 - DNA, 50 bp, unidentified
  source 1..50: mol_type = unassigned DNA; note = target_6476821
  misc_feature 1..22: note = LF
  misc_feature 23..25: note = Core
  misc_feature 26..50: note = RF
aagcccgctcccacacaagcccgctcccacattgatctgcgttgaattca

SEQ ID NO: 24354 - DNA, 50 bp, unidentified
  source 1..50: mol_type = unassigned DNA; note = target_647b027
  misc_feature 1..22: note = LF
  misc_feature 23..25: note = Core
  misc_feature 26..50: note = RF
aggtgcaggggtctgctgtgcgggacaaagccgcctgatgcagatgtagc

SEQ ID NO: 24355 - DNA, 50 bp, unidentified
  source 1..50: mol_type = unassigned DNA; note = target_648209d
  misc_feature 1..23: note = LF
  misc_feature 24..25: note = Core
  misc_feature 26..50: note = RF
gatagtactccacattatttctcctattcaactatataaaatactcataa

SEQ ID NO: 24356 - DNA, 50 bp, unidentified
  source 1..50: mol_type = unassigned DNA; note = target_6483cb0
  misc_feature 1..23: note = LF
  misc_feature 24..25: note = Core
  misc_feature 26..50: note = RF
tctacgtaaattgacttttcagacagcctcttccctctcacaacgccttg

SEQ ID NO: 24357 - DNA, 50 bp, unidentified
  source 1..50: mol_type = unassigned DNA; note = target_648aac8
  misc_feature 1..21: note = LF
  misc_feature 22..25: note = Core
  misc_feature 26..50: note = RF
tattgcacaatgaaagaatcgccccccaataatcgtttacttacccccaa

SEQ ID NO: 24358 - DNA, 50 bp, unidentified
  source 1..50: mol_type = unassigned DNA; note = target_64adfa1
  misc_feature 1..23: note = LF
  misc_feature 24..25: note = Core
  misc_feature 26..50: note = RF
ttcgcatctatatccataagaacctccttatggtagcagtattcttttca

SEQ ID NO: 24359 - DNA, 50 bp, unidentified
  source 1..50: mol_type = unassigned DNA; note = target_64aede2
  misc_feature 1..24: note = LF
  misc_feature 25: note = Core
  misc_feature 26..50: note = RF
tgcgtggcaagcgcgcggtgaaattggatcccggcctccgccgggaagac

SEQ ID NO: 24360 - DNA, 50 bp, unidentified
  source 1..50: mol_type = unassigned DNA; note = target_64c4222
  misc_feature 1..23: note = LF
  misc_feature 24..25: note = Core
  misc_feature 26..50: note = RF
ctcgccgagggtgtggccgtcgtagggattgcccggcagcgagcgcgtgc

SEQ ID NO: 24361 - DNA, 50 bp, unidentified
  source 1..50: mol_type = unassigned DNA; note = target_64cca89
  misc_feature 1..23: note = LF
  misc_feature 24..25: note = Core
  misc_feature 26..50: note = RF
tcccgggctttgacgggaattcgctcaggcgcggtcgatcaggcgttcgt

SEQ ID NO: 24362 - DNA, 50 bp, unidentified
  source 1..50: mol_type = unassigned DNA; note = target_64d1e32
  misc_feature 1..24: note = LF
  misc_feature 25: note = Core
  misc_feature 26..50: note = RF
ggggtgtgttttgtgaggcctaacgtttgagctaagctgcacccagcggc

SEQ ID NO: 24363 - DNA, 50 bp, unidentified
  source 1..50: mol_type = unassigned DNA; note = target_64dcbef
  misc_feature 1..23: note = LF
  misc_feature 24..25: note = Core
  misc_feature 26..50: note = RF
aaacacagttgctacttaagagttggagcctccggcaaacccggtgcggt

SEQ ID NO: 24364 - DNA, 50 bp, unidentified
  source 1..50: mol_type = unassigned DNA; note = target_64eae20
  misc_feature 1..23: note = LF
  misc_feature 24..25: note = Core
  misc_feature 26..50: note = RF
ctcggaaatctgtttatacatacctctcatatggcgataatcgtatccga

SEQ ID NO: 24365 - DNA, 50 bp, unidentified
  source 1..50: mol_type = unassigned DNA; note = target_64f7abc
  misc_feature 1..23: note = LF
  misc_feature 24..25: note = Core
  misc_feature 26..50: note = RF
tttgtagcatgaaataaaggggtcggagtcaaaccgcctcaaccacgtcg

SEQ ID NO: 24366 - DNA, 50 bp, unidentified
  source 1..50: mol_type = unassigned DNA; note = target_64fb1f9
  misc_feature 1..24: note = LF
  misc_feature 25: note = Core
  misc_feature 26..50: note = RF
cataattttttcttgttttataacgcccgcattttcggctggtttggagc

SEQ ID NO: 24367 - DNA, 50 bp, unidentified
  source 1..50: mol_type = unassigned DNA; note = target_64fea6f
  misc_feature 1..22: note = LF
  misc_feature 23..25: note = Core
  misc_feature 26..50: note = RF
acactcaaaagggtttatctatgtttattttcaataatattctaccggaa

SEQ ID NO: 24368 - DNA, 50 bp, unidentified
  source 1..50: mol_type = unassigned DNA; note = target_6504c10
  misc_feature 1..23: note = LF
  misc_feature 24..25: note = Core
  misc_feature 26..50: note = RF
atcgttgacgaaaagtttgcaacagttccctccatcctggctccttttga

SEQ ID NO: 24369 - DNA, 50 bp, unidentified
  source 1..50: mol_type = unassigned DNA; note = target_650b95c
  misc_feature 1..23: note = LF
  misc_feature 24..25: note = Core
  misc_feature 26..50: note = RF
cgtttaaccatagaaaaatcagttgagcacgaattttgtggaaaatctgg

SEQ ID NO: 24370 - DNA, 50 bp, unidentified
  source 1..50: mol_type = unassigned DNA; note = target_650fc1b
  misc_feature 1..23: note = LF
  misc_feature 24..25: note = Core
  misc_feature 26..50: note = RF
cggcccatcgcagcgcaaggccgctcccacagtgatcgcgtaatgtcgga

SEQ ID NO: 24371 - DNA, 50 bp, unidentified
  source 1..50: mol_type = unassigned DNA; note = target_6510c0a
  misc_feature 1..22: note = LF
  misc_feature 23..25: note = Core
  misc_feature 26..50: note = RF
caccgcattcgcgagcaagcccgctcccacatgggttatgtatttgcagt

SEQ ID NO: 24372 - DNA, 50 bp, unidentified
  source 1..50: mol_type = unassigned DNA; note = target_651ed9b
  misc_feature 1..23: note = LF
  misc_feature 24..25: note = Core
  misc_feature 26..50: note = RF
tcatcccggccttgatccgggatccagtgcgatcaagtcgttgatcgcaa

SEQ ID NO: 24373 - DNA, 50 bp, unidentified
  source 1..50: mol_type = unassigned DNA; note = target_6528fd8
  misc_feature 1..23: note = LF
  misc_feature 24..25: note = Core
  misc_feature 26..50: note = RF
aaagagctcagacatgccgctcaatcggggctagggtggtagttatccta

SEQ ID NO: 24374 - DNA, 50 bp, unidentified
  source 1..50: mol_type = unassigned DNA; note = target_652a29e
  misc_feature 1..7: note = LF
  misc_feature 8..25: note = Core
  misc_feature 26..50: note = RF
tcgggagactaaggcaacgtgtaataaaagaataggtggctgagcttgtc

SEQ ID NO: 24375 - DNA, 50 bp, unidentified
  source 1..50: mol_type = unassigned DNA; note = target_6537bcd
  misc_feature 1..23: note = LF
  misc_feature 24..25: note = Core
  misc_feature 26..50: note = RF
gggcgtgcggcccggggccgcgcctcaggccgccttcttggccgcgcgct

SEQ ID NO: 24376 - DNA, 50 bp, unidentified
  source 1..50: mol_type = unassigned DNA; note = target_6544904
  misc_feature 1..23: note = LF
  misc_feature 24..25: note = Core
  misc_feature 26..50: note = RF
tcttccactaacgcttccccgttagtttagttagcttttaaactctataa

SEQ ID NO: 24377 - DNA, 50 bp, unidentified
  source 1..50: mol_type = unassigned DNA; note = target_655269d
  misc_feature 1..23: note = LF
  misc_feature 24..25: note = Core
  misc_feature 26..50: note = RF
cgatgcagactgatcggaaaccgctctagtgtctgtcgcggcttgcggtt

SEQ ID NO: 24378 - DNA, 50 bp, unidentified
  source 1..50: mol_type = unassigned DNA; note = target_6559463
  misc_feature 1..24: note = LF
  misc_feature 25: note = Core
  misc_feature 26..50: note = RF
ggggcgcaccgccacggccgcaaatggcacacattctccgttcaccgcgc

SEQ ID NO: 24379 - DNA, 50 bp, unidentified; identical to SEQ ID NO: 23037
  source 1..50: mol_type = unassigned DNA; note = target_6560b99
  misc_feature 1..22: note = LF
  misc_feature 23..25: note = Core
  misc_feature 26..50: note = RF

SEQ ID NO: 24380 - DNA, 50 bp, unidentified
  source 1..50: mol_type = unassigned DNA; note = target_656a0cf
  misc_feature 1..23: note = LF
  misc_feature 24..25: note = Core
  misc_feature 26..50: note = RF
tgctcttctggctgtgatcaacgagtcctgagcctaggaattaaatgcct

SEQ ID NO: 24381 - DNA, 50 bp, unidentified
  source 1..50: mol_type = unassigned DNA; note = target_6573aa6
  misc_feature 1..24: note = LF
  misc_feature 25: note = Core
  misc_feature 26..50: note = RF
cgacgaagttcccgaaaatgtgacttttcaggcggctcgggtcagctttc

SEQ ID NO: 24382 - DNA, 50 bp, unidentified
  source 1..50: mol_type = unassigned DNA; note = target_657a7fb
  misc_feature 1..24: note = LF
  misc_feature 25: note = Core
  misc_feature 26..50: note = RF
ttcgggcggagaatcttccatattattaactccggaaaaacaggatcaga

SEQ ID NO: 24383 - DNA, 50 bp, unidentified
  source 1..50: mol_type = unassigned DNA; note = target_657ef43
  misc_feature 1..23: note = LF
  misc_feature 24..25: note = Core
  misc_feature 26..50: note = RF
ttttttacatatgaaaacacaccctaattatgcattaaccatcaaacgct

SEQ ID NO: 24384 - DNA, 50 bp, unidentified
  source 1..50: mol_type = unassigned DNA; note = target_6583155
  misc_feature 1..24: note = LF
  misc_feature 25: note = Core
  misc_feature 26..50: note = RF
aatgtgtttacattcggcagaggctgtgtaaaaacaaaaaattgcacgct

SEQ ID NO: 24385 - DNA, 50 bp, unidentified
  source 1..50: mol_type = unassigned DNA; note = target_658856b
  misc_feature 1..23: note = LF
  misc_feature 24..25: note = Core
  misc_feature 26..50: note = RF
aaacctaataaggggcgattgggttcaaccatgaaggccgaaatattcgg

SEQ ID NO: 24386 - DNA, 50 bp, unidentified
  source 1..50: mol_type = unassigned DNA; note = target_6588e40
  misc_feature 1..23: note = LF
  misc_feature 24..25: note = Core
  misc_feature 26..50: note = RF
ggcatgaacgctctagacccaagagcggacattcgacagcgctacccgcc

SEQ ID NO: 24387 - DNA, 50 bp, unidentified
  source 1..50: mol_type = unassigned DNA; note = target_658f0e4
  misc_feature 1..23: note = LF
  misc_feature 24..25: note = Core
  misc_feature 26..50: note = RF
gatcgattccaaggggtcagtggtcataggcggtcagggagcgcgggatg

SEQ ID NO: 24388 - DNA, 50 bp, unidentified
  source 1..50: mol_type = unassigned DNA; note = target_6594982
  misc_feature 1..24: note = LF
  misc_feature 25: note = Core
  misc_feature 26..50: note = RF
agaagactgcgcccagatttcttcttcccacaagtcccttccatctggaa

SEQ ID NO: 24389 - DNA, 50 bp, unidentified
  source 1..50: mol_type = unassigned DNA; note = target_659771f
  misc_feature 1..24: note = LF
  misc_feature 25: note = Core
  misc_feature 26..50: note = RF
caaagggtgacgcagtcatctcggcatgaccgcgcactctggccagtact

SEQ ID NO: 24390 - DNA, 50 bp, unidentified
  source 1..50: mol_type = unassigned DNA; note = target_659e577
  misc_feature 1..24: note = LF
  misc_feature 25: note = Core
  misc_feature 26..50: note = RF
ataataagggtttcgatcgattacttcctgtttgtcgctaggcttgatcg

SEQ ID NO: 24391 - DNA, 50 bp, unidentified
  source 1..50: mol_type = unassigned DNA; note = target_65a4472
  misc_feature 1..19: note = LF
  misc_feature 20..25: note = Core
  misc_feature 26..50: note = RF
cttgacggcctcggcgcggctcatttcgccgcctcgaactcgcgccgcgc

SEQ ID NO: 24392 - DNA, 50 bp, unidentified
  source 1..50: mol_type = unassigned DNA; note = target_65ab90e
  misc_feature 1..23: note = LF
  misc_feature 24..25: note = Core
  misc_feature 26..50: note = RF
gagtcagtgacctgtccccgtgactcacctcaaccgacctctggggtagt

SEQ ID NO: 24393 - DNA, 50 bp, unidentified
  source 1..50: mol_type = unassigned DNA; note = target_65b1d60
  misc_feature 1..23: note = LF
  misc_feature 24..25: note = Core
  misc_feature 26..50: note = RF
catcaatgacaggaactacgagccttgaccgggcttactgcccagcgccc

SEQ ID NO: 24394 - DNA, 50 bp, unidentified
  source 1..50: mol_type = unassigned DNA; note = target_65b5e5b
  misc_feature 1..23: note = LF
  misc_feature 24..25: note = Core
  misc_feature 26..50: note = RF
ttttccgctaggcggaaaagacgctcaggcgctgtgtagcgagcgcccgt

SEQ ID NO: 24395 - DNA, 50 bp, unidentified
  source 1..50: mol_type = unassigned DNA; note = target_65b66ff
  misc_feature 1..24: note = LF
  misc_feature 25: note = Core
  misc_feature 26..50: note = RF
ttaatacccaactatcctgcccgttagctgagcggatttccagcaatgca

SEQ ID NO: 24396 - DNA, 50 bp, unidentified
  source 1..50: mol_type = unassigned DNA; note = target_65c0e02
  misc_feature 1..22: note = LF
  misc_feature 23..25: note = Core
  misc_feature 26..50: note = RF
ttcttaatgaagtaaagcctccgtttagcacaataaggctgatattttta

SEQ ID NO: 24397 - DNA, 50 bp, unidentified
  source 1..50: mol_type = unassigned DNA; note = target_65dc4d3
  misc_feature 1..24: note = LF
  misc_feature 25: note = Core
  misc_feature 26..50: note = RF
gcgcgcgatcgcgggcatggcccgcctacaacagctgcgtgtctcgatat

SEQ ID NO: 24398 - DNA, 50 bp, unidentified
  source 1..50: mol_type = unassigned DNA; note = target_65de713
  misc_feature 1..23: note = LF
  misc_feature 24..25: note = Core
  misc_feature 26..50: note = RF
cggtccggggtcgcgccgcgtaactcggttgcttgcgctcgtggcgacgc

SEQ ID NO: 24399 - DNA, 50 bp, unidentified
  source 1..50: mol_type = unassigned DNA; note = target_65e21a7
  misc_feature 1..23: note = LF
  misc_feature 24..25: note = Core
  misc_feature 26..50: note = RF
catggctccaccctctcaggagttggagcctccgatcaacccggggcggt

SEQ ID NO: 24400 - DNA, 50 bp, unidentified
  source 1..50: mol_type = unassigned DNA; note = target_65e48d3
  misc_feature 1..24: note = LF
  misc_feature 25: note = Core
  misc_feature 26..50: note = RF
cggcgcgcgacgcgccatatccggcgatctgtgcgtagagcagcgcgcgt

SEQ ID NO: 24401 - DNA, 50 bp, unidentified
  source 1..50: mol_type = unassigned DNA; note = target_65ef7f7
  misc_feature 1..24: note = LF
  misc_feature 25: note = Core
  misc_feature 26..50: note = RF
ccgctgccgggcaggcttcaaaactttcggcggatcacgtcctgcagcat

SEQ ID NO: 24402 - DNA, 50 bp, unidentified
  source 1..50: mol_type = unassigned DNA; note = target_65fd608
  misc_feature 1..23: note = LF
  misc_feature 24..25: note = Core
  misc_feature 26..50: note = RF
caactaatttcataaaaaacatcctttcttgtttaaaaatatgtgaaatg

SEQ ID NO: 24403 - DNA, 50 bp, unidentified
  source 1..50: mol_type = unassigned DNA; note = target_660895d
  misc_feature 1..21: note = LF
  misc_feature 22..25: note = Core
  misc_feature 26..50: note = RF
ggatcaatgagtcctgaccctagactagcagtactttggcaggttttcag

SEQ ID NO: 24404 - DNA, 50 bp, unidentified
  source 1..50: mol_type = unassigned DNA; note = target_66097bc
  misc_feature 1..24: note = LF
  misc_feature 25: note = Core
  misc_feature 26..50: note = RF
actcgctcataacatttcatctccttattgttataattctattgtattat

SEQ ID NO: 24405 - DNA, 50 bp, unidentified
  source 1..50: mol_type = unassigned DNA; note = target_660aff8
  misc_feature 1..24: note = LF
  misc_feature 25: note = Core
  misc_feature 26..50: note = RF
ttggatacgtcgacggctctgcctcggggtagtttattttgctttagtac

SEQ ID NO: 24406 - DNA, 50 bp, unidentified
  source 1..50: mol_type = unassigned DNA; note = target_6612327
  misc_feature 1..24: note = LF
  misc_feature 25: note = Core
  misc_feature 26..50: note = RF
tgcctctgagcaccctaagtccgcttggggtcaaaaccggtaagtctcag

SEQ ID NO: 24407 - DNA, 50 bp, unidentified
  source 1..50: mol_type = unassigned DNA; note = target_6622338
  misc_feature 1..23: note = LF
  misc_feature 24..25: note = Core
  misc_feature 26..50: note = RF
tcaattcgagataaaataggctttgttgcacaaatcgggttaaagacgtt

SEQ ID NO: 24408 - DNA, 50 bp, unidentified
  source 1..50: mol_type = unassigned DNA; note = target_6636392
  misc_feature 1..21: note = LF
  misc_feature 22..25: note = Core
  misc_feature 26..50: note = RF
acggtgccacttcatgccggcctcctttcggcgaaatgggagttagacag

SEQ ID NO: 24409 - DNA, 50 bp, unidentified
  source 1..50: mol_type = unassigned DNA; note = target_6636f87
  misc_feature 1..23: note = LF
  misc_feature 24..25: note = Core
  misc_feature 26..50: note = RF
tggatcaaacaacgaacgacgggctttagtgctccgttttgagcctttga

SEQ ID NO: 24410 - DNA, 50 bp, unidentified
  source 1..50: mol_type = unassigned DNA; note = target_6639202
  misc_feature 1..22: note = LF
  misc_feature 23..25: note = Core
  misc_feature 26..50: note = RF
gagaaccggccaacctttgatttgactcgttggccggtctcttgccgcca

SEQ ID NO: 24411 - DNA, 50 bp, unidentified
  source 1..50: mol_type = unassigned DNA; note = target_663b69c
  misc_feature 1..23: note = LF
  misc_feature 24..25: note = Core
  misc_feature 26..50: note = RF
gcatccatcctcacgagtacttcctggaaggctagattttgctcgaccga

SEQ ID NO: 24412 - DNA, 50 bp, unidentified
  source 1..50: mol_type = unassigned DNA; note = target_663d0f8
  misc_feature 1..23: note = LF
  misc_feature 24..25: note = Core
  misc_feature 26..50: note = RF
gcccaggtagcttctccgaagcagacgttccggcgattcagcttataggt

SEQ ID NO: 24413 - DNA, 50 bp, unidentified
  source 1..50: mol_type = unassigned DNA; note = target_663d813
  misc_feature 1..21: note = LF
  misc_feature 22..25: note = Core
  misc_feature 26..50: note = RF
tcttctcggttgacatggtggctcccctcgtccgcgtttttctcggcaca

SEQ ID NO: 24414 - DNA, 50 bp, unidentified
  source 1..50: mol_type = unassigned DNA; note = target_664f354
  misc_feature 1..24: note = LF
  misc_feature 25: note = Core
  misc_feature 26..50: note = RF
gctttgcagactggcaacttcggctccgggtcaggtgcgtcgattccgcg

SEQ ID NO: 24415 - DNA, 50 bp, unidentified
  source 1..50: mol_type = unassigned DNA; note = target_6651016
  misc_feature 1..21: note = LF
  misc_feature 22..25: note = Core
  misc_feature 26..50: note = RF
aataacaactttcatagtttcctccagacaagcgaatcactacttactct

SEQ ID NO: 24416 - DNA, 50 bp, unidentified
  source 1..50: mol_type = unassigned DNA; note = target_66533e8
  misc_feature 1..23: note = LF
  misc_feature 24..25: note = Core
  misc_feature 26..50: note = RF
tgtatcgcgcacagagtgagctcctacgcggatgcaggagcctggtctgc

SEQ ID NO: 24417 - DNA, 50 bp, unidentified
  source 1..50: mol_type = unassigned DNA; note = target_66676b2
  misc_feature 1..21: note = LF
  misc_feature 22..25: note = Core
  misc_feature 26..50: note = RF
ggagccgccgggtccgcgtcggtcatgagaccgactgtaggacataccgc

SEQ ID NO: 24418 - DNA, 50 bp, unidentified
  source 1..50: mol_type = unassigned DNA; note = target_667307b
  misc_feature 1..23: note = LF
  misc_feature 24..25: note = Core
  misc_feature 26..50: note = RF
aggttcaccccaacgtgctgtgctaatttgtgctaaaaatcctcacaaac

SEQ ID NO: 24419 - DNA, 50 bp, unidentified
  source 1..50: mol_type = unassigned DNA; note = target_6676e31
  misc_feature 1..23: note = LF
  misc_feature 24..25: note = Core
  misc_feature 26..50: note = RF
aactctgtgattcctctgtgtaactctgtgttccgctttttttcttaagg

SEQ ID NO: 24420 - DNA, 50 bp, unidentified
  source 1..50: mol_type = unassigned DNA; note = target_6678c01
  misc_feature 1..23: note = LF
  misc_feature 24..25: note = Core
  misc_feature 26..50: note = RF
agtgcgacacagaagcatttctcctactgacttgactttttgtttctttt

SEQ ID NO: 24421 - DNA, 50 bp, unidentified
  source 1..50: mol_type = unassigned DNA; note = target_667d285
  misc_feature 1..23: note = LF
  misc_feature 24..25: note = Core
  misc_feature 26..50: note = RF
ccggtgaagggccggtgtgagcccctttgagggcccgcacgtgcgagccg

SEQ ID NO: 24422 - DNA, 50 bp, unidentified
  source 1..50: mol_type = unassigned DNA; note = target_66803d8
  misc_feature 1..22: note = LF
  misc_feature 23..25: note = Core
  misc_feature 26..50: note = RF
cacctgcaagaacaatacctttcatactataatgtatttagtaaactttc

SEQ ID NO: 24423 - DNA, 50 bp, unidentified
  source 1..50: mol_type = unassigned DNA; note = target_6682d1a
  misc_feature 1..23: note = LF
  misc_feature 24..25: note = Core
  misc_feature 26..50: note = RF
cattacattccgaataattccactcgaactgacgatcatgtattctaatc

SEQ ID NO: 24424 - DNA, 50 bp, unidentified
  source 1..50: mol_type = unassigned DNA; note = target_668c931
  misc_feature 1..23: note = LF
  misc_feature 24..25: note = Core
  misc_feature 26..50: note = RF
atgtattttaatcatccatcctcctaatgtattacataaaattaatcacc

SEQ ID NO: 24425 - DNA, 50 bp, unidentified
  source 1..50: mol_type = unassigned DNA; note = target_668dedd
  misc_feature 1..23: note = LF
  misc_feature 24..25: note = Core
  misc_feature 26..50: note = RF
ccttgcaaaggcgactgatgagcctcagtccaatacccactggaaccaat

SEQ ID NO: 24426 - DNA, 50 bp, unidentified
  source 1..50: mol_type = unassigned DNA; note = target_669969b
  misc_feature 1..23: note = LF
  misc_feature 24..25: note = Core
  misc_feature 26..50: note = RF
aaaattagccacagggaatcctccttttttgtttagtatgatttttttgt

SEQ ID NO: 24427 - DNA, 50 bp, unidentified
  source 1..50: mol_type = unassigned DNA; note = target_66b7462
  misc_feature 1..23: note = LF
  misc_feature 24..25: note = Core
  misc_feature 26..50: note = RF
gtggatgggctgcttcgtgcttcctttcggatccagccggccgggcatcc

SEQ ID NO: 24428 - DNA, 50 bp, unidentified
  source 1..50: mol_type = unassigned DNA; note = target_66c50ae
  misc_feature 1..23: note = LF
  misc_feature 24..25: note = Core
  misc_feature 26..50: note = RF
atgccaattggaatggctcccgccttatagcccggatctgaatcccatcg

SEQ ID NO: 24429 - DNA, 50 bp, unidentified
  source 1..50: mol_type = unassigned DNA; note = target_66c9a92
  misc_feature 1..23: note = LF
  misc_feature 24..25: note = Core
  misc_feature 26..50: note = RF
cggcaaatatagtgcggtggttatgggtccctgctttcgcagggacgacg

SEQ ID NO: 24430 - DNA, 50 bp, unidentified
  source 1..50: mol_type = unassigned DNA; note = target_66d0785
  misc_feature 1..23: note = LF
  misc_feature 24..25: note = Core
  misc_feature 26..50: note = RF
tgcgtttcatgatcgttttcctcctatcaaaaacaattagagggccgtcc

SEQ ID NO: 24431 - DNA, 50 bp, unidentified
  source 1..50: mol_type = unassigned DNA; note = target_66d6152
  misc_feature 1..22: note = LF
  misc_feature 23..25: note = Core
  misc_feature 26..50: note = RF
gcggcaattagttataacgttttgcggctaccagatggattttattttgg

SEQ ID NO: 24432 - DNA, 50 bp, unidentified
  source 1..50: mol_type = unassigned DNA; note = target_66ddad6
  misc_feature 1..23: note = LF
  misc_feature 24..25: note = Core
  misc_feature 26..50: note = RF
caccgccggtggcagcatgagacctgccaaccgttcccccgggccgcccg

SEQ ID NO: 24433 - DNA, 50 bp, unidentified
  source 1..50: mol_type = unassigned DNA; note = target_66df92b
  misc_feature 1..23: note = LF
  misc_feature 24..25: note = Core
  misc_feature 26..50: note = RF
aaacgagcaaggcgctcacgagcctacacggacgtacttgcggcgtgtcc

SEQ ID NO: 24434 - DNA, 50 bp, unidentified
  source 1..50: mol_type = unassigned DNA; note = target_66e9815
  misc_feature 1..23: note = LF
  misc_feature 24..25: note = Core
  misc_feature 26..50: note = RF
catacttctatactagctccattagtttaagtacatttcttcacaatctc

SEQ ID NO: 24435 - DNA, 50 bp, unidentified
  source 1..50: mol_type = unassigned DNA; note = target_66f90ef
  misc_feature 1..23: note = LF
  misc_feature 24..25: note = Core
  misc_feature 26..50: note = RF
gctccagaccggcacctttggggtgggtttgcggacgggcggctttggga

SEQ ID NO: 24436 - DNA, 50 bp, unidentified
  source 1..50: mol_type = unassigned DNA; note = target_6700045
  misc_feature 1..24: note = LF
  misc_feature 25: note = Core
  misc_feature 26..50: note = RF
atgaaagagttggcgaattccccccaccccccccagattcccagcaaatg

SEQ ID NO: 24437 - DNA, 50 bp, unidentified
  source 1..50: mol_type = unassigned DNA; note = target_6703f26
  misc_feature 1..23: note = LF
  misc_feature 24..25: note = Core
  misc_feature 26..50: note = RF
aataacggcgaagagcaatgccttgggaatggaaatgccgccaagatcga

SEQ ID NO: 24438 - DNA, 50 bp, unidentified
  source 1..50: mol_type = unassigned DNA; note = target_670a96b
  misc_feature 1..23: note = LF
  misc_feature 24..25: note = Core
  misc_feature 26..50: note = RF
agcccttgtcataagacaagggctttttgtgcctaaaatttatgatgatg

SEQ ID NO: 24439 - DNA, 50 bp, unidentified
  source 1..50: mol_type = unassigned DNA; note = target_670c342
  misc_feature 1..23: note = LF
  misc_feature 24..25: note = Core
  misc_feature 26..50: note = RF
ccggcgtgggccaccgtcagagcctacatgggcgtacttgcggcgcgccc

SEQ ID NO: 24440 - DNA, 50 bp, unidentified
  source 1..50: mol_type = unassigned DNA; note = target_670c800
  misc_feature 1..21: note = LF
  misc_feature 22..25: note = Core
  misc_feature 26..50: note = RF
agatcggagcctgtcacaccgctcatgcagcgccctcctcgacctgttcg

SEQ ID NO: 24441 - DNA, 50 bp, unidentified
  source 1..50: mol_type = unassigned DNA; note = target_670fa1e
  misc_feature 1..24: note = LF
  misc_feature 25: note = Core
  misc_feature 26..50: note = RF
agaaaacccttgccaacggggagccgtccacacatggcacatttcggaag

SEQ ID NO: 24442 - DNA, 50 bp, unidentified
  source 1..50: mol_type = unassigned DNA; note = target_67159d6
  misc_feature 1..24: note = LF
  misc_feature 25: note = Core
  misc_feature 26..50: note = RF
tggcgggctcagagtgacccaaagcggacattcggcagatacgtattttt

SEQ ID NO: 24443 - DNA, 50 bp, unidentified
  source 1..50: mol_type = unassigned DNA; note = target_6717876
  misc_feature 1..23: note = LF
  misc_feature 24..25: note = Core
  misc_feature 26..50: note = RF
gatctccatggtcttattcctctcttttttccttttactcctttttgata

SEQ ID NO: 24444 - DNA, 50 bp, unidentified
  source 1..50: mol_type = unassigned DNA; note = target_672ea7b
  misc_feature 1..24: note = LF
  misc_feature 25: note = Core
  misc_feature 26..50: note = RF
cagggagaacggtcaccgagccgccgatctgtaggccgtcgcgctgctca

SEQ ID NO: 24445 - DNA, 50 bp, unidentified
  source 1..50: mol_type = unassigned DNA; note = target_6741a40
  misc_feature 1..24: note = LF
  misc_feature 25: note = Core
  misc_feature 26..50: note = RF
atcatgccggacggcgatgtccgttattggcacttctcggaagaactgat

SEQ ID NO: 24446 - DNA, 50 bp, unidentified
  source 1..50: mol_type = unassigned DNA; note = target_6746738
  misc_feature 1..22: note = LF
  misc_feature 23..25: note = Core
  misc_feature 26..50: note = RF
tcgtcttcgaatcccatgatggaaggaaattgcggaagccctcagcgtcg

SEQ ID NO: 24447 - DNA, 50 bp, unidentified
  source 1..50: mol_type = unassigned DNA; note = target_674ae72
  misc_feature 1..22: note = LF
  misc_feature 23..25: note = Core
  misc_feature 26..50: note = RF
tcctcaccggctgaccgtaacctgagtcagcgtgggagccccggtgttct

SEQ ID NO: 24448 - DNA, 50 bp, unidentified
  source 1..50: mol_type = unassigned DNA; note = target_67592a0
  misc_feature 1..24: note = LF
  misc_feature 25: note = Core
  misc_feature 26..50: note = RF
aacctttcgccgtatcccagcgactgacttttccgttacgcactcagtaa

SEQ ID NO: 24449 - DNA, 50 bp, unidentified
  source 1..50: mol_type = unassigned DNA; note = target_676bdec
  misc_feature 1..23: note = LF
  misc_feature 24..25: note = Core
  misc_feature 26..50: note = RF
ctgtcagcgggttcgcttcacctctccccggcggggagaggtcgatttgc

SEQ ID NO: 24450 - DNA, 50 bp, unidentified
  source 1..50: mol_type = unassigned DNA; note = target_6778e13
  misc_feature 1..23: note = LF
  misc_feature 24..25: note = Core
  misc_feature 26..50: note = RF
tcttgtaagcatcttttttcctcctcgtataaccgacaaattcacccacc

SEQ ID NO: 24451 - DNA, 50 bp, unidentified
  source 1..50: mol_type = unassigned DNA; note = target_6779282
  misc_feature 1..23: note = LF
  misc_feature 24..25: note = Core
  misc_feature 26..50: note = RF
gggtgatagtgtccaccatcggtagtggacatcttgaggttggtgatggc

SEQ ID NO: 24452 - DNA, 50 bp, unidentified
  source 1..50: mol_type = unassigned DNA; note = target_678181f
  misc_feature 1..24: note = LF
  misc_feature 25: note = Core
  misc_feature 26..50: note = RF
atggcttgtatgcttctgccctttcagggcgtagtcttactgcacgcttt

SEQ ID NO: 24453 - DNA, 50 bp, unidentified
  source 1..50: mol_type = unassigned DNA; note = target_678255f
  misc_feature 1..21: note = LF
  misc_feature 22..25: note = Core
  misc_feature 26..50: note = RF
gcggtcgggtccagatactcgctcatgggtcttcctcccgattacggcgt

SEQ ID NO: 24454 - DNA, 50 bp, unidentified
  source 1..50: mol_type = unassigned DNA; note = target_67a7a3a
  misc_feature 1..23: note = LF
  misc_feature 24..25: note = Core
  misc_feature 26..50: note = RF
tcagtgcgtacaccggttcttgcctgacagaaaccgtcttgacccacgtc

SEQ ID NO: 24455 - DNA, 50 bp, unidentified
  source 1..50: mol_type = unassigned DNA; note = target_67aa0b1
  misc_feature 1..23: note = LF
  misc_feature 24..25: note = Core
  misc_feature 26..50: note = RF
cctgtggggtttagtgcgggaggaacacccatgatgcagtgatccgcttt

SEQ ID NO: 24456 - DNA, 50 bp, unidentified
  source 1..50: mol_type = unassigned DNA; note = target_67ae441
  misc_feature 1..22: note = LF
  misc_feature 23..25: note = Core
  misc_feature 26..50: note = RF
ttccccaaaaaaatgccagcttactcatgactaaagtcacgagcttgtac

SEQ ID NO: 24457 - DNA, 50 bp, unidentified
  source 1..50: mol_type = unassigned DNA; note = target_67aefd4
  misc_feature 1..23: note = LF
  misc_feature 24..25: note = Core
  misc_feature 26..50: note = RF
agtgttgttcatgtgttatcctcctcaaaatctggggaggaaataaacaa

SEQ ID NO: 24458 - DNA, 50 bp, unidentified
  source 1..50: mol_type = unassigned DNA; note = target_67b82c7
  misc_feature 1..23: note = LF
  misc_feature 24..25: note = Core
  misc_feature 26..50: note = RF
tttgctgttcatacaatcagctcctttcggggttagtatagccgaaaaaa

SEQ ID NO: 24459 - DNA, 50 bp, unidentified
  source 1..50: mol_type = unassigned DNA; note = target_67c12ec
  misc_feature 1..24: note = LF
  misc_feature 25: note = Core
  misc_feature 26..50: note = RF
cgccttcagggtcgcggggaagttttttgaacgcctcgatcgtctccgcc

SEQ ID NO: 24460 - DNA, 50 bp, unidentified
  source 1..50: mol_type = unassigned DNA; note = target_67c4d68
  misc_feature 1..23: note = LF
  misc_feature 24..25: note = Core
  misc_feature 26..50: note = RF
gtcgtcggcaaaggattgccgacctaccaatgctctacccatcctacgga

SEQ ID NO: 24461 - DNA, 50 bp, unidentified
  source 1..50: mol_type = unassigned DNA; note = target_67d080b
  misc_feature 1..24: note = LF
  misc_feature 25: note = Core
  misc_feature 26..50: note = RF
gtcgcaattgcgcctcgagtccgcttgggtcaatcacgtcagtttgggta

SEQ ID NO: 24462 - DNA, 50 bp, unidentified
  source 1..50: mol_type = unassigned DNA; note = target_67d58ac
  misc_feature 1..24: note = LF
  misc_feature 25: note = Core
  misc_feature 26..50: note = RF
cgcttcgtgacgcgcggattgcggcatgagcgtacgcctgatcttgcggc

SEQ ID NO: 24463 - DNA, 50 bp, unidentified
  source 1..50: mol_type = unassigned DNA; note = target_67d6c4a
  misc_feature 1..24: note = LF
  misc_feature 25: note = Core
  misc_feature 26..50: note = RF
agaaatctcttgcaccaacgggggcatccatacatgcacaaataggttga

SEQ ID NO: 24464 - DNA, 50 bp, unidentified
  source 1..50: mol_type = unassigned DNA; note = target_67d77ad
  misc_feature 1..23: note = LF
  misc_feature 24..25: note = Core
  misc_feature 26..50: note = RF
ccgaacccacttatggccgcttttggccctaaggcgacatcccagctacc

SEQ ID NO: 24465 - DNA, 50 bp, unidentified
  source 1..50: mol_type = unassigned DNA; note = target_67eb8be
  misc_feature 1..24: note = LF
  misc_feature 25: note = Core
  misc_feature 26..50: note = RF
gcagagggcgaccaacgagaacaccaacgggctgctccggcagtacttcc

SEQ ID NO: 24466 - DNA, 50 bp, unidentified
  source 1..50: mol_type = unassigned DNA; note = target_67ed8c0
  misc_feature 1..20: note = LF
  misc_feature 21..25: note = Core
  misc_feature 26..50: note = RF
ggtcagcgggacgggcggcgcaccccccacaaccggggaacacccgccag

SEQ ID NO: 24467 - DNA, 50 bp, unidentified
  source 1..50: mol_type = unassigned DNA; note = target_67f742d
  misc_feature 1..22: note = LF
  misc_feature 23..25: note = Core
  misc_feature 26..50: note = RF
gaatttagaaaattcaagcttatttttttgaattgcaccgattatctcgc

SEQ ID NO: 24468 - DNA, 50 bp, unidentified
  source 1..50: mol_type = unassigned DNA; note = target_67ffb1c
  misc_feature 1..23: note = LF
  misc_feature 24..25: note = Core
  misc_feature 26..50: note = RF
agccgccggggccagagaggaaaccgttagtcggacagtcccagctggcg

SEQ ID NO: 24469 - DNA, 50 bp, unidentified
  source 1..50: mol_type = unassigned DNA; note = target_6810c2b
  misc_feature 1..22: note = LF
  misc_feature 23..25: note = Core
  misc_feature 26..50: note = RF
attaccccatgttttgtaccggagacatgggtaacacttttcgcttttgg

SEQ ID NO: 24470 - DNA, 50 bp, unidentified
  source 1..50: mol_type = unassigned DNA; note = target_6818883
  misc_feature 1..24: note = LF
  misc_feature 25: note = Core
  misc_feature 26..50: note = RF
ggagagcttacgctggagaacgattttttgtcaggagcgctcagcaaggc

SEQ ID NO: 24471 - DNA, 50 bp, unidentified
  source 1..50: mol_type = unassigned DNA; note = target_6819fbf
  misc_feature 1..23: note = LF
  misc_feature 24..25: note = Core
  misc_feature 26..50: note = RF
ctccgggctttccactactatccctaacgcgggtagtcgcaaagtaattc

SEQ ID NO: 24472 - DNA, 50 bp, unidentified
  source 1..50: mol_type = unassigned DNA; note = target_681d42f
  misc_feature 1..23: note = LF
  misc_feature 24..25: note = Core
  misc_feature 26..50: note = RF
tctaactctgccatttttttctccttttatttattcttcaacatattttt

SEQ ID NO: 24473 - DNA, 50 bp, unidentified
  source 1..50: mol_type = unassigned DNA; note = target_6824804
  misc_feature 1..24: note = LF
  misc_feature 25: note = Core
  misc_feature 26..50: note = RF
acaaaccccttgccccgcaggggccatccatacatggtccgaggacaatg

SEQ ID NO: 24474 - DNA, 50 bp, unidentified
  source 1..50: mol_type = unassigned DNA; note = target_6830109
  misc_feature 1..23: note = LF
  misc_feature 24..25: note = Core
  misc_feature 26..50: note = RF
tgaaatatatccatactataaagcacctatatcctaagttctcctaaatc

SEQ ID NO: 24475 - DNA, 50 bp, unidentified
  source 1..50: mol_type = unassigned DNA; note = target_6830bc6
  misc_feature 1..23: note = LF
  misc_feature 24..25: note = Core
  misc_feature 26..50: note = RF
ccgggatcatcggctgagccggcctagagccggccggtccagctgccggc

SEQ ID NO: 24476 - DNA, 50 bp, unidentified
  source 1..50: mol_type = unassigned DNA; note = target_6838d3e
  misc_feature 1..23: note = LF
  misc_feature 24..25: note = Core
  misc_feature 26..50: note = RF
tgcgagttaatgttcgcaatgagtggaaagcggacaaaagttgctggtcc

SEQ ID NO: 24477 - DNA, 50 bp, unidentified
  source 1..50: mol_type = unassigned DNA; note = target_683ad47
  misc_feature 1..23: note = LF
  misc_feature 24..25: note = Core
  misc_feature 26..50: note = RF
cgcagctggggtgcgattggcgttgttgcataatcgaagaatccgttgac

SEQ ID NO: 24478 - DNA, 50 bp, unidentified
  source 1..50: mol_type = unassigned DNA; note = target_6850723
  misc_feature 1..23: note = LF
  misc_feature 24..25: note = Core
  misc_feature 26..50: note = RF
gctacgcacttttcctggaattgcttgtgggtcgactcaatcgcctaccg

SEQ ID NO: 24479 - DNA, 50 bp, unidentified
  source 1..50: mol_type = unassigned DNA; note = target_685929b
  misc_feature 1..23: note = LF
  misc_feature 24..25: note = Core
  misc_feature 26..50: note = RF
atattagccatgttttctaccccctttcatatatggttattataccaaaa

SEQ ID NO: 24480 - DNA, 50 bp, unidentified
  source 1..50: mol_type = unassigned DNA; note = target_685fb2b
  misc_feature 1..23: note = LF
  misc_feature 24..25: note = Core
  misc_feature 26..50: note = RF
gtcatgtccgctttacccccgaaagcggacatgtgcagtgcactaaccta

SEQ ID NO: 24481 - DNA, 50 bp, unidentified
  source 1..50: mol_type = unassigned DNA; note = target_6861cb3
  misc_feature 1..21: note = LF
  misc_feature 22..25: note = Core
  misc_feature 26..50: note = RF
gcacctgcgggctagaactctccccccttccaccacgatgatgaaaagtt

SEQ ID NO: 24482 - DNA, 50 bp, unidentified
  source 1..50: mol_type = unassigned DNA; note = target_686b695
  misc_feature 1..22: note = LF
  misc_feature 23..25: note = Core
  misc_feature 26..50: note = RF
gccgtaggtacttagggcgggaagcggacgctcggacaacacccaagtcc

SEQ ID NO: 24483 - DNA, 50 bp, unidentified
  source 1..50: mol_type = unassigned DNA; note = target_6872eb7
  misc_feature 1..24: note = LF
  misc_feature 25: note = Core
  misc_feature 26..50: note = RF
gaacgcgtacatccggggcagaaacggacattagtctcgctatagttgtg

SEQ ID NO: 24484 - DNA, 50 bp, unidentified
  source 1..50: mol_type = unassigned DNA; note = target_6878015
  misc_feature 1..22: note = LF
  misc_feature 23..25: note = Core
  misc_feature 26..50: note = RF
ttttattgaacaaacctgccccgtttacttcaattaggaaaagcattccc

SEQ ID NO: 24485 - DNA, 50 bp, unidentified
  source 1..50: mol_type = unassigned DNA; note = target_687facf
  misc_feature 1..24: note = LF
  misc_feature 25: note = Core
  misc_feature 26..50: note = RF
gatcttttctcttgctcataagtatactcctttctaaacaatacggaaat

SEQ ID NO: 24486 - DNA, 50 bp, unidentified
  source 1..50: mol_type = unassigned DNA; note = target_68877e4
  misc_feature 1..24: note = LF
  misc_feature 25: note = Core
  misc_feature 26..50: note = RF
gtaccgctcagtggcgatgtccgatggggtcattcgcgtcgcgcagtacc

SEQ ID NO: 24487 - DNA, 50 bp, unidentified
  source 1..50: mol_type = unassigned DNA; note = target_6889079
  misc_feature 1..23: note = LF
  misc_feature 24..25: note = Core
  misc_feature 26..50: note = RF
cgttgggcgtcatgaacttggggtttctttcgaacacctgggcgggcgcg

SEQ ID NO: 24488 - DNA, 50 bp, unidentified
  source 1..50: mol_type = unassigned DNA; note = target_688d203
  misc_feature 1..22: note = LF
  misc_feature 23..25: note = Core
  misc_feature 26..50: note = RF
gatgaataaaatacgtggcacgttttgttccgtaggaatgaaagtggcga

SEQ ID NO: 24489 - DNA, 50 bp, unidentified
  source 1..50: mol_type = unassigned DNA; note = target_68944b8
  misc_feature 1..24: note = LF
  misc_feature 25: note = Core
  misc_feature 26..50: note = RF
ggcttgccccctccgctgcagatgtgcgacgcttccgccaacaatacggc

SEQ ID NO: 24490 - DNA, 50 bp, unidentified
  source 1..50: mol_type = unassigned DNA; note = target_689eb57
  misc_feature 1..24: note = LF
  misc_feature 25: note = Core
  misc_feature 26..50: note = RF
tcatgcctcagtcctcagggtaagcggtaaccacgcggcgttctgtttct

SEQ ID NO: 24491 - DNA, 50 bp, unidentified
  source 1..50: mol_type = unassigned DNA; note = target_68ae771
  misc_feature 1..24: note = LF
  misc_feature 25: note = Core
  misc_feature 26..50: note = RF
ggccgagtggtagctccgaagtgccgttgtggggcatgcgaggtgaccgg

SEQ ID NO: 24492 - DNA, 50 bp, unidentified
  source 1..50: mol_type = unassigned DNA; note = target_68b17e9
  misc_feature 1..23: note = LF
  misc_feature 24..25: note = Core
  misc_feature 26..50: note = RF
ttcgtcacatggtggctctaatgagtccggaccctagttttgaacatggc

SEQ ID NO: 24493 - DNA, 50 bp, unidentified
  source 1..50: mol_type = unassigned DNA; note = target_68b1d9a
  misc_feature 1..21: note = LF
  misc_feature 22..25: note = Core
  misc_feature 26..50: note = RF
tctttatttttctcatatctatcacctagtctcctactgtttacatttta

SEQ ID NO: 24494 - DNA, 50 bp, unidentified
  source 1..50: mol_type = unassigned DNA; note = target_68b3673
  misc_feature 1..23: note = LF
  misc_feature 24..25: note = Core
  misc_feature 26..50: note = RF
cgtcctttcaacctgacttcttcagcagcctgctctcatgatcgctgtca

SEQ ID NO: 24495 - DNA, 50 bp, unidentified
  source 1..50: mol_type = unassigned DNA; note = target_68b3a4c
  misc_feature 1..22: note = LF
  misc_feature 23..25: note = Core
  misc_feature 26..50: note = RF
gcatggctgtgctcatggtgggctccctgggttcgatgggtgcgggcggc

SEQ ID NO: 24496 - DNA, 50 bp, unidentified
  source 1..50: mol_type = unassigned DNA; note = target_68c02ff
  misc_feature 1..22: note = LF
  misc_feature 23..25: note = Core
  misc_feature 26..50: note = RF
aaagaaagaatactatcgccactttcattgctaaagcaacaaaacgtgcc

SEQ ID NO: 24497 - DNA, 50 bp, unidentified
  source 1..50: mol_type = unassigned DNA; note = target_68c6fa4
  misc_feature 1..23: note = LF
  misc_feature 24..25: note = Core
  misc_feature 26..50: note = RF
gaaaaaggtacgcgatgcgtaccctacaaaaactttctagttatttagac

SEQ ID NO: 24498 - DNA, 50 bp, unidentified
  source 1..50: mol_type = unassigned DNA; note = target_68c8378
  misc_feature 1..24: note = LF
  misc_feature 25: note = Core
  misc_feature 26..50: note = RF
gtcggtgggcggggaggttcgcccccccatgaacgtggcccgacttccga

SEQ ID NO: 24499 - DNA, 50 bp, unidentified
  source 1..50: mol_type = unassigned DNA; note = target_68d1be1
  misc_feature 1..22: note = LF
  misc_feature 23..25: note = Core
  misc_feature 26..50: note = RF
taacagatcagcgatagacaggtgacagtttactgattccctaattagtg

SEQ ID NO: 24500 - DNA, 50 bp, unidentified
  source 1..50: mol_type = unassigned DNA; note = target_68d311b
  misc_feature 1..23: note = LF
  misc_feature 24..25: note = Core
  misc_feature 26..50: note = RF
cggcccatgcatcgtccttttcgaggcttgctcggcgttcactcgcgtta

SEQ ID NO: 24501 - DNA, 50 bp, unidentified
  source 1..50: mol_type = unassigned DNA; note = target_68d7820
  misc_feature 1..24: note = LF
  misc_feature 25: note = Core
  misc_feature 26..50: note = RF
tttccggaccaaaccgtcagaacttgcacgaaacggacgataaccccaaa

SEQ ID NO: 24502 - DNA, 50 bp, unidentified
  source 1..50: mol_type = unassigned DNA; note = target_68d8596
  misc_feature 1..23: note = LF
  misc_feature 24..25: note = Core
  misc_feature 26..50: note = RF
acgcccgaaggcaagggattttaagtccctggcgtctaccgattccgcca

SEQ ID NO: 24503 - DNA, 50 bp, unidentified
  source 1..50: mol_type = unassigned DNA; note = target_68dd72b
  misc_feature 1..23: note = LF
  misc_feature 24..25: note = Core
  misc_feature 26..50: note = RF
tcctttcatagctgtaacacaccctacaaatgatgttattttattgtcta

SEQ ID NO: 24504 - DNA, 50 bp, unidentified
  source 1..50: mol_type = unassigned DNA; note = target_68e3f2a
  misc_feature 1..23: note = LF
  misc_feature 24..25: note = Core
  misc_feature 26..50: note = RF
gatcagcgtcgagcgtccgctcctggcacgaagcggacaccggctgcttc

SEQ ID NO: 24505 - DNA, 50 bp, unidentified
  source 1..50: mol_type = unassigned DNA; note = target_68e490e
  misc_feature 1..23: note = LF
  misc_feature 24..25: note = Core
  misc_feature 26..50: note = RF
tttcttcttcaactaacgggtgctttacttgaagattgttgagctgctta

SEQ ID NO: 24506 - DNA, 50 bp, unidentified
  source 1..50: mol_type = unassigned DNA; note = target_68f73e0
  misc_feature 1..24: note = LF
  misc_feature 25: note = Core
  misc_feature 26..50: note = RF
agtagacggccatcccggaagtgccgatcccggacagcatcgtgcgccgt

SEQ ID NO: 24507 - DNA, 50 bp, unidentified
  source 1..50: mol_type = unassigned DNA; note = target_68fcd0a
  misc_feature 1..23: note = LF
  misc_feature 24..25: note = Core
  misc_feature 26..50: note = RF
aatgcgcttcgcttattgacgccctacaagacaacatgcccaacacccta

SEQ ID NO: 24508 - DNA, 50 bp, unidentified
  source 1..50: mol_type = unassigned DNA; note = target_68fde46
  misc_feature 1..23: note = LF
  misc_feature 24..25: note = Core
  misc_feature 26..50: note = RF
agtcccggatgcgtgttcacccctttttatactgccgctaagaaaaatcc

SEQ ID NO: 24509 - DNA, 50 bp, unidentified
  source 1..50: mol_type = unassigned DNA; note = target_68ff44d
  misc_feature 1..23: note = LF
  misc_feature 24..25: note = Core
  misc_feature 26..50: note = RF
tgttttctcgtgtctatatatccctcctgttcagttaatattatgtaacc

SEQ ID NO: 24510 - DNA, 50 bp, unidentified
  source 1..50: mol_type = unassigned DNA; note = target_68ff599
  misc_feature 1..24: note = LF
  misc_feature 25: note = Core
  misc_feature 26..50: note = RF
ttaaaggccgtcaacgaccgcttccgacccgaagccgacattggcccaga

SEQ ID NO: 24511 - DNA, 50 bp, unidentified
  source 1..50: mol_type = unassigned DNA; note = target_6908653
  misc_feature 1..23: note = LF
  misc_feature 24..25: note = Core
  misc_feature 26..50: note = RF
gtacttcataaatttgcacctcgcttgatggatttacttaattacacggt

SEQ ID NO: 24512 - DNA, 50 bp, unidentified
  source 1..50: mol_type = unassigned DNA; note = target_690e8e9
  misc_feature 1..22: note = LF
  misc_feature 23..25: note = Core
  misc_feature 26..50: note = RF
tgcttaaaaatggcagtataaatcttatgtgcaggtattttttcgagaac

SEQ ID NO: 24513 - DNA, 50 bp, unidentified
  source 1..50: mol_type = unassigned DNA; note = target_69157d6
  misc_feature 1..23: note = LF
  misc_feature 24..25: note = Core
  misc_feature 26..50: note = RF
gacacgcgacggaccgcttggggctcatcgcttcagcccttgtggcaaaa

SEQ ID NO: 24514 - DNA, 50 bp, unidentified
  source 1..50: mol_type = unassigned DNA; note = target_691b19e
  misc_feature 1..23: note = LF
  misc_feature 24..25: note = Core
  misc_feature 26..50: note = RF
atctgtatcataaataatctccctctcataacccgatatttttaaagtta

SEQ ID NO: 24515 - DNA, 50 bp, unidentified
  source 1..50: mol_type = unassigned DNA; note = target_691da6d
  misc_feature 1..23: note = LF
  misc_feature 24..25: note = Core
  misc_feature 26..50: note = RF
ttgcgcttggcggtggtcatgccgcacactctaccgccagtaatctactc

SEQ ID NO: 24516 - DNA, 50 bp, unidentified
  source 1..50: mol_type = unassigned DNA; note = target_691f9dc
  misc_feature 1..22: note = LF
  misc_feature 23..25: note = Core
  misc_feature 26..50: note = RF
acccccaatcggcgtccaattttgacccatcaagaagcattgagctgcgg

SEQ ID NO: 24517 - DNA, 50 bp, unidentified
  source 1..50: mol_type = unassigned DNA; note = target_69273e4
  misc_feature 1..23: note = LF
  misc_feature 24..25: note = Core
  misc_feature 26..50: note = RF
cttccacaagtggcagccttgggtggaaaacggacattgacgaacccgac

SEQ ID NO: 24518 - DNA, 50 bp, unidentified
  source 1..50: mol_type = unassigned DNA; note = target_69346e0
  misc_feature 1..22: note = LF
  misc_feature 23..25: note = Core
  misc_feature 26..50: note = RF
agaacctcaagctcagtgacgtcatcctgaacttgattcaggatcttagt

SEQ ID NO: 24519 - DNA, 50 bp, unidentified
  source 1..50: mol_type = unassigned DNA; note = target_6938b3f
  misc_feature 1..24: note = LF
  misc_feature 25: note = Core
  misc_feature 26..50: note = RF
cgcctacggtacctgtaacatgtgttccgtgtgtatcattcacacctttg

SEQ ID NO: 24520 - DNA, 50 bp, unidentified
  source 1..50: mol_type = unassigned DNA; note = target_69487f0
  misc_feature 1..24: note = LF
  misc_feature 25: note = Core
  misc_feature 26..50: note = RF
tggtcgttgggactcatatataaatgttatacctataaaggagaacgagc

SEQ ID NO: 24521 - DNA, 50 bp, unidentified
  source 1..50: mol_type = unassigned DNA; note = target_69511a8
  misc_feature 1..23: note = LF
  misc_feature 24..25: note = Core
  misc_feature 26..50: note = RF
tgatcgattcaagccgtcagtggtcgtatgcagtcctcgacgacctgagc

SEQ ID NO: 24522 - DNA, 50 bp, unidentified
  source 1..50: mol_type = unassigned DNA; note = target_6951a88
  misc_feature 1..21: note = LF
  misc_feature 22..25: note = Core
  misc_feature 26..50: note = RF
catttgaaatctcctttcatcctccaatcaaattttggtacagcagtagt

SEQ ID NO: 24523 - DNA, 50 bp, unidentified
  source 1..50: mol_type = unassigned DNA; note = target_695a9dd
  misc_feature 1..23: note = LF
  misc_feature 24..25: note = Core
  misc_feature 26..50: note = RF
atcggttccataaaatcacgctcctttctttaatgcgcgttaagtattga

SEQ ID NO: 24524 - DNA, 50 bp, unidentified
  source 1..50: mol_type = unassigned DNA; note = target_6962339
  misc_feature 1..20: note = LF
  misc_feature 21..25: note = Core
  misc_feature 26..50: note = RF
tttttttccatcaacatgtcctccttacttcaactttgtataggcttcac

SEQ ID NO: 24525 - DNA, 50 bp, unidentified
  source 1..50: mol_type = unassigned DNA; note = target_6962484
  misc_feature 1..21: note = LF
  misc_feature 22..25: note = Core
  misc_feature 26..50: note = RF
tccggggggatgttcgagatgctcatgcgttcacccgaatccgtgggtcg

SEQ ID NO: 24526 - DNA, 50 bp, unidentified
  source 1..50: mol_type = unassigned DNA; note = target_6965045
  misc_feature 1..24: note = LF
  misc_feature 25: note = Core
  misc_feature 26..50: note = RF
tatatcccgcagcgcacaaaaaagcagacccctaaatcatgctcttaagc

SEQ ID NO: 24527 - DNA, 50 bp, unidentified
  source 1..50: mol_type = unassigned DNA; note = target_6972775
  misc_feature 1..22: note = LF
  misc_feature 23..25: note = Core
  misc_feature 26..50: note = RF
ataacactttgaatgtacttctcataactcaactttttttagttacaaat

SEQ ID NO: 24528 - DNA, 50 bp, unidentified
  source 1..50: mol_type = unassigned DNA; note = target_6978629
  misc_feature 1..24: note = LF
  misc_feature 25: note = Core
  misc_feature 26..50: note = RF
gggtaggctgcaggacttattcagagtgtttccctagatgacatcgatga

SEQ ID NO: 24529 - DNA, 50 bp, unidentified
  source 1..50: mol_type = unassigned DNA; note = target_6986fd3
  misc_feature 1..23: note = LF
  misc_feature 24..25: note = Core
  misc_feature 26..50: note = RF
ccgcgctcagtatcgccggagcctgtcctcgggccgcgcgaagcgcggac

SEQ ID NO: 24530 - DNA, 50 bp, unidentified
  source 1..50: mol_type = unassigned DNA; note = target_69a18b6
  misc_feature 1..22: note = LF
  misc_feature 23..25: note = Core
  misc_feature 26..50: note = RF
tatactttttcatatgtatctcctttcttttaattaactattaatccttc

SEQ ID NO: 24531 - DNA, 50 bp, unidentified
  source 1..50: mol_type = unassigned DNA; note = target_69a2d9e
  misc_feature 1..22: note = LF
  misc_feature 23..25: note = Core
  misc_feature 26..50: note = RF
gccggggtctgcagccccggctctttttatgccctgagtttccgagaatg

SEQ ID NO: 24532 - DNA, 50 bp, unidentified
  source 1..50: mol_type = unassigned DNA; note = target_69a69d6
  misc_feature 1..24: note = LF
  misc_feature 25: note = Core
  misc_feature 26..50: note = RF
gaagatggcactattatttcgccgtggcgctatgatgccggcgttcgcca

SEQ ID NO: 24533 - DNA, 50 bp, unidentified
  source 1..50: mol_type = unassigned DNA; note = target_69b652e
  misc_feature 1..23: note = LF
  misc_feature 24..25: note = Core
  misc_feature 26..50: note = RF
gcagtaggccggggggtcaattttggacgccgttccacagggagtggacg

SEQ ID NO: 24534 - DNA, 50 bp, unidentified
  source 1..50: mol_type = unassigned DNA; note = target_69b9b3e
  misc_feature 1..24: note = LF
  misc_feature 25: note = Core
  misc_feature 26..50: note = RF
ctcgtcgaggctctcggcgaagttttttttgaacgccgccatggcctcgg

SEQ ID NO: 24535 - DNA, 50 bp, unidentified
  source 1..50: mol_type = unassigned DNA; note = target_69bc491
  misc_feature 1..24: note = LF
  misc_feature 25: note = Core
  misc_feature 26..50: note = RF
gtaagagacgccccttgcagtaactgacaggtggcgctcccacgacccgt

SEQ ID NO: 24536 - DNA, 50 bp, unidentified
  source 1..50: mol_type = unassigned DNA; note = target_69e09a9
  misc_feature 1..23: note = LF
  misc_feature 24..25: note = Core
  misc_feature 26..50: note = RF
ccgatggcgtgtcacatcgggctttgttttgggcgacgcgaaatttacca

SEQ ID NO: 24537 - DNA, 50 bp, unidentified
  source 1..50: mol_type = unassigned DNA; note = target_69eb34d
  misc_feature 1..23: note = LF
  misc_feature 24..25: note = Core
  misc_feature 26..50: note = RF
ctgaaagacaggaacgagtggaaagcggacgctcccactctggtggtgtc

SEQ ID NO: 24538 - DNA, 50 bp, unidentified
  source 1..50: mol_type = unassigned DNA; note = target_69eb91f
  misc_feature 1..23: note = LF
  misc_feature 24..25: note = Core
  misc_feature 26..50: note = RF
atttgaaccaccgacctttgggttatgagtgtagccaaggtcggaaatac

SEQ ID NO: 24539 - DNA, 50 bp, unidentified
  source 1..50: mol_type = unassigned DNA; note = target_69edc10
  misc_feature 1..23: note = LF
  misc_feature 24..25: note = Core
  misc_feature 26..50: note = RF
gtaattcccatccgtttttccttgtctttctgaattatcacaccacgaat

SEQ ID NO: 24540 - DNA, 50 bp, unidentified
  source 1..50: mol_type = unassigned DNA; note = target_69eec8e
  misc_feature 1..24: note = LF
  misc_feature 25: note = Core
  misc_feature 26..50: note = RF
gggagcgactttagggccatcgagagatgcttctgaaaccgggatgaatg

SEQ ID NO: 24541 - DNA, 50 bp, unidentified
  source 1..50: mol_type = unassigned DNA; note = target_69fa375
  misc_feature 1..23: note = LF
  misc_feature 24..25: note = Core
  misc_feature 26..50: note = RF
agccttttcaatcttttcacctcctatccattttttacttcgttaataaa

SEQ ID NO: 24542 - DNA, 50 bp, unidentified
  source 1..50: mol_type = unassigned DNA; note = target_6a03713
  misc_feature 1..23: note = LF
  misc_feature 24..25: note = Core
  misc_feature 26..50: note = RF
ccccgacgtccgtcatcgcgctcctctcaagtggtcagacgtcagtcgtc

SEQ ID NO: 24543 - DNA, 50 bp, unidentified
  source 1..50: mol_type = unassigned DNA; note = target_6a03c46
  misc_feature 1..23: note = LF
  misc_feature 24..25: note = Core
  misc_feature 26..50: note = RF
ctgctcttccatatcctaacctccttcttcaccagctcccaattgatgga

SEQ ID NO: 24544 - DNA, 50 bp, unidentified
  source 1..50: mol_type = unassigned DNA; note = target_6a05d42
  misc_feature 1..24: note = LF
  misc_feature 25: note = Core
  misc_feature 26..50: note = RF
atagtgctgttcgggcgccctaacgtcggagttgaccggcgaccggcggg

SEQ ID NO: 24545 - DNA, 50 bp, unidentified
  source 1..50: mol_type = unassigned DNA; note = target_6a08057
  misc_feature 1..21: note = LF
  misc_feature 22..25: note = Core
  misc_feature 26..50: note = RF
tctcattacccataaaatttgtcattccggaggaatctaaactcatttta

SEQ ID NO: 24546 - DNA, 50 bp, unidentified
  source 1..50: mol_type = unassigned DNA; note = target_6a1090d
  misc_feature 1..23: note = LF
  misc_feature 24..25: note = Core
  misc_feature 26..50: note = RF
gcgagcgtctcgcgagctgagcgctagatcgcgcgcgcgaaaaaggtctc

SEQ ID NO: 24547 - DNA, 50 bp, unidentified
  source 1..50: mol_type = unassigned DNA; note = target_6a13c54
  misc_feature 1..23: note = LF
  misc_feature 24..25: note = Core
  misc_feature 26..50: note = RF
ccgcagcccgagggcgcaccaagaggacgatcgcgcgggcgcgcgacaac

SEQ ID NO: 24548 - DNA, 50 bp, unidentified
  source 1..50: mol_type = unassigned DNA; note = target_6a1716c
  misc_feature 1..24: note = LF
  misc_feature 25: note = Core
  misc_feature 26..50: note = RF
aacaatatctgcttgtcccatatgtcctccataaaaaaacgggcttctgc

SEQ ID NO: 24549 - DNA, 50 bp, unidentified
  source 1..50: mol_type = unassigned DNA; note = target_6a3d590
  misc_feature 1..23: note = LF
  misc_feature 24..25: note = Core
  misc_feature 26..50: note = RF
tttcggttgtcgatctcgaaacctgctattcgtggaagtcggacgtcgac

SEQ ID NO: 24550 - DNA, 50 bp, unidentified
  source 1..50: mol_type = unassigned DNA; note = target_6a43fab
  misc_feature 1..24: note = LF
  misc_feature 25: note = Core
  misc_feature 26..50: note = RF
gactaatcttgcgactacagctcacaaagtgtgagacacgatgtgagaga

SEQ ID NO: 24551 - DNA, 50 bp, unidentified
  source 1..50: mol_type = unassigned DNA; note = target_6a542d1
  misc_feature 1..22: note = LF
  misc_feature 23..25: note = Core
  misc_feature 26..50: note = RF
gtgggcagagtcgttttgagctaaatcacctgatcgtccatctgatcctc

SEQ ID NO: 24552 - DNA, 50 bp, unidentified
  source 1..50: mol_type = unassigned DNA; note = target_6a5c327
  misc_feature 1..24: note = LF
  misc_feature 25: note = Core
  misc_feature 26..50: note = RF
tcgaagaactgcgccgtgatcggcttgtcgtttgtatgcgcaaagacagt

SEQ ID NO: 24553 - DNA, 50 bp, unidentified
  source 1..50: mol_type = unassigned DNA; note = target_6a60d04
  misc_feature 1..23: note = LF
  misc_feature 24..25: note = Core
  misc_feature 26..50: note = RF
tcgcgtcgaccgcgcgaagcgtcctcagtgccgcggaggctcgatcgcgc

SEQ ID NO: 24554 - DNA, 50 bp, unidentified
  source 1..50: mol_type = unassigned DNA; note = target_6a733bb
  misc_feature 1..24: note = LF
  misc_feature 25: note = Core
  misc_feature 26..50: note = RF
tgacccagaacatccgaccatcggcagagtagtgcgtttgcgcgcccctt

SEQ ID NO: 24555 - DNA, 50 bp, unidentified
  source 1..50: mol_type = unassigned DNA; note = target_6a774d5
  misc_feature 1..22: note = LF
  misc_feature 23..25: note = Core
  misc_feature 26..50: note = RF
ggcgccgaaaagcgtccgctaatgacccaaagcggacatctgagaccaca

SEQ ID NO: 24556 - DNA, 50 bp, unidentified
  source 1..50: mol_type = unassigned DNA; note = target_6a882e5
  misc_feature 1..24: note = LF
  misc_feature 25: note = Core
  misc_feature 26..50: note = RF
aaaagccgctcccgaaagagcggcttcttttggggggagggcgtcttcag

SEQ ID NO: 24557 - DNA, 50 bp, unidentified
  source 1..50: mol_type = unassigned DNA; note = target_6a89668
  misc_feature 1..23: note = LF
  misc_feature 24..25: note = Core
  misc_feature 26..50: note = RF
aatacacttaaactaacgggtgctttactttaacatccagctgccaatgg

SEQ ID NO: 24558 - DNA, 50 bp, unidentified
  source 1..50: mol_type = unassigned DNA; note = target_6a8bcd6
  misc_feature 1..23: note = LF
  misc_feature 24..25: note = Core
  misc_feature 26..50: note = RF
ttttcttcatgtttttttacctcctttcgcatatattaatatgatcatat

SEQ ID NO: 24559 - DNA, 50 bp, unidentified
  source 1..50: mol_type = unassigned DNA; note = target_6a9990b
  misc_feature 1..23: note = LF
  misc_feature 24..25: note = Core
  misc_feature 26..50: note = RF
ggcgcgtcgcgttttgtgctgaaagatcgcataaggtatcctgcggaacg

SEQ ID NO: 24560 - DNA, 50 bp, unidentified
  source 1..50: mol_type = unassigned DNA; note = target_6aa16f6
  misc_feature 1..22: note = LF
  misc_feature 23..25: note = Core
  misc_feature 26..50: note = RF
acgggctgggaagggcaacggcctagctggcgcgcctagcgcgtttcgta

SEQ ID NO: 24561 - DNA, 50 bp, unidentified
  source 1..50: mol_type = unassigned DNA; note = target_6aa5cc0
  misc_feature 1..23: note = LF
  misc_feature 24..25: note = Core
  misc_feature 26..50: note = RF
ggcaatacgcgtctcaccttgattgccgcgctgcacttacgcccgctccc

SEQ ID NO: 24562 - DNA, 50 bp, unidentified
  source 1..50: mol_type = unassigned DNA; note = target_6aa91b8
  misc_feature 1..21: note = LF
  misc_feature 22..25: note = Core
  misc_feature 26..50: note = RF
gaaccaaatatagacatacattcacctcataataaaaaatgtatcatttt

SEQ ID NO: 24563 - DNA, 50 bp, unidentified
  source 1..50: mol_type = unassigned DNA; note = target_6acc002
  misc_feature 1..23: note = LF
  misc_feature 24..25: note = Core
  misc_feature 26..50: note = RF
agaggggggaaggtgcgcagcacctcaggggggaacccctccatccgggg

SEQ ID NO: 24564 - DNA, 50 bp, unidentified
  source 1..50: mol_type = unassigned DNA; note = target_6ad47e9
  misc_feature 1..24: note = LF
  misc_feature 25: note = Core
  misc_feature 26..50: note = RF
caggattacttacgagttggggatttcacaacagctatccgccgctgact

SEQ ID NO: 24565 - DNA, 50 bp, unidentified
  source 1..50: mol_type = unassigned DNA; note = target_6ad6ba0
  misc_feature 1..23: note = LF
  misc_feature 24..25: note = Core
  misc_feature 26..50: note = RF
gttcctgaaatggagcctgcttttttatatggtgagatttggttgtaact

SEQ ID NO: 24566 - DNA, 50 bp, unidentified
  source 1..50: mol_type = unassigned DNA; note = target_6ada746
  misc_feature 1..23: note = LF
  misc_feature 24..25: note = Core
  misc_feature 26..50: note = RF
ggaggggacccaaggtccgcttctggcgccaagtaggagcagccgctcgg

SEQ ID NO: 24567 - DNA, 50 bp, unidentified
  source 1..50: mol_type = unassigned DNA; note = target_6adda01
  misc_feature 1..23: note = LF
  misc_feature 24..25: note = Core
  misc_feature 26..50: note = RF
acgacgacgtggtcatgagaggtgttccttgggccgggccgtatcggccg

SEQ ID NO: 24568 - DNA, 50 bp, unidentified
  source 1..50: mol_type = unassigned DNA; note = target_6addbf0
  misc_feature 1..23: note = LF
  misc_feature 24..25: note = Core
  misc_feature 26..50: note = RF
cggacccgattgaacgcgacatgctttagcctgatctctcaccctgaaat

SEQ ID NO: 24569 - DNA, 50 bp, unidentified
  source 1..50: mol_type = unassigned DNA; note = target_6adee18
  misc_feature 1..24: note = LF
  misc_feature 25: note = Core
  misc_feature 26..50: note = RF
gcaagggtgtctgccgaagtccgtttcggtcaatcacgtcgttcgcaaat

SEQ ID NO: 24570 - DNA, 50 bp, unidentified
  source 1..50: mol_type = unassigned DNA; note = target_6ae047e
  misc_feature 1..23: note = LF
  misc_feature 24..25: note = Core
  misc_feature 26..50: note = RF
agatttttttttaaaatagccctgtcaaggttttaaaccttgacagggct

SEQ ID NO: 24571 - DNA, 50 bp, unidentified
  source 1..50: mol_type = unassigned DNA; note = target_6afb6ea
  misc_feature 1..23: note = LF
  misc_feature 24..25: note = Core
  misc_feature 26..50: note = RF
ggttcccacttttgcgctcgatgctctatggtcgcagcagggtcagcatg

SEQ ID NO: 24572 - DNA, 50 bp, unidentified
  source 1..50: mol_type = unassigned DNA; note = target_6b03382
  misc_feature 1..24: note = LF
  misc_feature 25: note = Core
  misc_feature 26..50: note = RF
gaaagaccgctttgcccccgaaagcggacattgggctgataatatggtga

SEQ ID NO: 24573 - DNA, 50 bp, unidentified
  source 1..50: mol_type = unassigned DNA; note = target_6b0a80e
  misc_feature 1..24: note = LF
  misc_feature 25: note = Core
  misc_feature 26..50: note = RF
ggcacgcgcggtccgccccagtggcagatccggacgcttcactccccccg

SEQ ID NO: 24574 - DNA, 50 bp, unidentified
  source 1..50: mol_type = unassigned DNA; note = target_6b0b3da
  misc_feature 1..23: note = LF
  misc_feature 24..25: note = Core
  misc_feature 26..50: note = RF
gtcggatcagggaccaagtccagctagtccgaaggcacgctcagggttcg

SEQ ID NO: 24575 - DNA, 50 bp, unidentified
  source 1..50: mol_type = unassigned DNA; note = target_6b0dfd3
  misc_feature 1..23: note = LF
  misc_feature 24..25: note = Core
  misc_feature 26..50: note = RF
tccgttgcactttgcaaatccactcgaagtgacatttaggttatttgtca

SEQ ID NO: 24576 - DNA, 50 bp, unidentified
  source 1..50: mol_type = unassigned DNA; note = target_6b17c83
  misc_feature 1..24: note = LF
  misc_feature 25: note = Core
  misc_feature 26..50: note = RF
taccaccctactttgatttccaattataataagtcgcattactgatccca

SEQ ID NO: 24577 - DNA, 50 bp, unidentified
  source 1..50: mol_type = unassigned DNA; note = target_6b27458
  misc_feature 1..23: note = LF
  misc_feature 24..25: note = Core
  misc_feature 26..50: note = RF
cggccccttcgcgaatgaattcgctcccacggatttgtgtttgcaggtga

SEQ ID NO: 24578 - DNA, 50 bp, unidentified
  source 1..50: mol_type = unassigned DNA; note = target_6b2827f
  misc_feature 1..23: note = LF
  misc_feature 24..25: note = Core
  misc_feature 26..50: note = RF
cgggcggcggaaaacgtcctcatctgccgctgaccgcgcgattctcccga

SEQ ID NO: 24579 - DNA, 50 bp, unidentified
  source 1..50: mol_type = unassigned DNA; note = target_6b2cd95
  misc_feature 1..23: note = LF
  misc_feature 24..25: note = Core
  misc_feature 26..50: note = RF
gtgagccgaccatggggtcggctctaccattgaccgatcgcggcgccacg

SEQ ID NO: 24580 - DNA, 50 bp, unidentified
  source 1..50: mol_type = unassigned DNA; note = target_6b2eef2
  misc_feature 1..24: note = LF
  misc_feature 25: note = Core
  misc_feature 26..50: note = RF
ggtttacttcggcggatgggtcagtttacatcggcgctaacaacttgttc

SEQ ID NO: 24581 - DNA, 50 bp, unidentified
  source 1..50: mol_type = unassigned DNA; note = target_6b39604
  misc_feature 1..21: note = LF
  misc_feature 22..25: note = Core
  misc_feature 26..50: note = RF
tcatgttaatgcatggctgttttttatagttacgaatatcaagattcttc

SEQ ID NO: 24582 - DNA, 50 bp, unidentified
  source 1..50: mol_type = unassigned DNA; note = target_6b3d4ef
  misc_feature 1..23: note = LF
  misc_feature 24..25: note = Core
  misc_feature 26..50: note = RF
ccttctggagaatccgaaagtcttgacttttgcgaaatggtccgtcgaac

SEQ ID NO: 24583 - DNA, 50 bp, unidentified
  source 1..50: mol_type = unassigned DNA; note = target_6b453a5
  misc_feature 1..24: note = LF
  misc_feature 25: note = Core
  misc_feature 26..50: note = RF
aaccgtggggaaaggtcggtgttcatgcggtcccggtgagtggctggtcg

SEQ ID NO: 24584 - DNA, 50 bp, unidentified
  source 1..50: mol_type = unassigned DNA; note = target_6b4651c
  misc_feature 1..23: note = LF
  misc_feature 24..25: note = Core
  misc_feature 26..50: note = RF
gtccgtcctcgcgagcaagctcgctcccacgcaggccacgcactcgcgtg

SEQ ID NO: 24585 - DNA, 50 bp, unidentified
  source 1..50: mol_type = unassigned DNA; note = target_6b517e1
  misc_feature 1..23: note = LF
  misc_feature 24..25: note = Core
  misc_feature 26..50: note = RF
ggctctcggcattggccgtgacgtggctcaacgaccacatcattgcacag

SEQ ID NO: 24586 - DNA, 50 bp, unidentified
  source 1..50: mol_type = unassigned DNA; note = target_6b592a7
  misc_feature 1..24: note = LF
  misc_feature 25: note = Core
  misc_feature 26..50: note = RF
tcgcagacggccagacttcagagctttcgccgaatgatgtcctgcaacat

SEQ ID NO: 24587 - DNA, 50 bp, unidentified
  source 1..50: mol_type = unassigned DNA; note = target_6b5d8cf
  misc_feature 1..24: note = LF
  misc_feature 25: note = Core
  misc_feature 26..50: note = RF
tttttttgagtttcagccaggactcgaaatccggcgcaagctacacgagc

SEQ ID NO: 24588 - DNA, 50 bp, unidentified
  source 1..50: mol_type = unassigned DNA; note = target_6b5de75
  misc_feature 1..23: note = LF
  misc_feature 24..25: note = Core
  misc_feature 26..50: note = RF
gttgcgttgcgctccacccaacctacggaactacggaacacctgttgtat

SEQ ID NO: 24589 - DNA, 50 bp, unidentified
  source 1..50: mol_type = unassigned DNA; note = target_6b60848
  misc_feature 1..24: note = LF
  misc_feature 25: note = Core
  misc_feature 26..50: note = RF
agactatccgccctgggtcacgagcggtcattggaattgctggaaatcat

SEQ ID NO: 24590 - DNA, 50 bp, unidentified
  source 1..50: mol_type = unassigned DNA; note = target_6b61184
  misc_feature 1..24: note = LF
  misc_feature 25: note = Core
  misc_feature 26..50: note = RF
ggcttaaacgcagctccgccccttcgcggaggtgcgatttttccgattag

SEQ ID NO: 24591 - DNA, 50 bp, unidentified
  source 1..50: mol_type = unassigned DNA; note = target_6b62b00
  misc_feature 1..23: note = LF
  misc_feature 24..25: note = Core
  misc_feature 26..50: note = RF
ttcggatgagcgtgcacgccaatcactaccttgcgctgttcgatggggtc

SEQ ID NO: 24592 - DNA, 50 bp, unidentified
  source 1..50: mol_type = unassigned DNA; note = target_6b690d9
  misc_feature 1..21: note = LF
  misc_feature 22..25: note = Core
  misc_feature 26..50: note = RF
atgcccgcaacacgtgcgggcatgacgccgagtaggaaccagatgtcagg

SEQ ID NO: 24593 - DNA, 50 bp, unidentified
  source 1..50: mol_type = unassigned DNA; note = target_6b74b90
  misc_feature 1..24: note = LF
  misc_feature 25: note = Core
  misc_feature 26..50: note = RF
gacagtaatattcatctgagatttctccaatacgatttgcgatttccgtt

SEQ ID NO: 24594 - DNA, 50 bp, unidentified
  source 1..50: mol_type = unassigned DNA; note = target_6b7a2f7
  misc_feature 1..23: note = LF
  misc_feature 24..25: note = Core
  misc_feature 26..50: note = RF
gctccgagagttatttcggaacctgggtgatgacggattgagaaaggcga

SEQ ID NO: 24595 - DNA, 50 bp, unidentified
  source 1..50: mol_type = unassigned DNA; note = target_6b7b678
  misc_feature 1..21: note = LF
  misc_feature 22..25: note = Core
  misc_feature 26..50: note = RF
gacgtaccgctgctcatagctctcctcgcagtcgctccaacaggaccagg

SEQ ID NO: 24596 - DNA, 50 bp, unidentified
  source 1..50: mol_type = unassigned DNA; note = target_6b7dfc1
  misc_feature 1..23: note = LF
  misc_feature 24..25: note = Core
  misc_feature 26..50: note = RF
gtttcttgccataaaatcaactcctttcgttggggcgtggacggtcgcgg

SEQ ID NO: 24597 - DNA, 50 bp, unidentified
  source 1..50: mol_type = unassigned DNA; note = target_6b86663
  misc_feature 1..24: note = LF
  misc_feature 25: note = Core
  misc_feature 26..50: note = RF
caattgacggtggcgaagtgtcgctttgggtcaaaagcggacatcacgct

SEQ ID NO: 24598 - DNA, 50 bp, unidentified
  source 1..50: mol_type = unassigned DNA; note = target_6b890c0
  misc_feature 1..24: note = LF
  misc_feature 25: note = Core
  misc_feature 26..50: note = RF
gggcttggacctgtgagttcgcccctttttagccctgacatgcgcggagt

SEQ ID NO: 24599 - DNA, 50 bp, unidentified
  source 1..50: mol_type = unassigned DNA; note = target_6b93302
  misc_feature 1..22: note = LF
  misc_feature 23..25: note = Core
  misc_feature 26..50: note = RF
cgttgtcgcctgcggcgactgccttcagattccctcgggcgcatcgaggt

SEQ ID NO: 24600 - DNA, 50 bp, unidentified
  source 1..50: mol_type = unassigned DNA; note = target_6b94d47
  misc_feature 1..23: note = LF
  misc_feature 24..25: note = Core
  misc_feature 26..50: note = RF
tgcgatcctcgtcattccataaccgctcattacgcgaacggccagtgtag

SEQ ID NO: 24601 - DNA, 50 bp, unidentified
  source 1..50: mol_type = unassigned DNA; note = target_6ba3525
  misc_feature 1..20: note = LF
  misc_feature 21..25: note = Core
  misc_feature 26..50: note = RF
tctcatctgccgtgtaggcgctcatgcggcgactcccagccgcttgagca

SEQ ID NO: 24602 - DNA, 50 bp, unidentified
  source 1..50: mol_type = unassigned DNA; note = target_6ba65b8
  misc_feature 1..23: note = LF
  misc_feature 24..25: note = Core
  misc_feature 26..50: note = RF
acagctcgtgcgcgcttcatgtggctccctcgattccgctggccatcagg

SEQ ID NO: 24603 - DNA, 50 bp, unidentified
  source 1..50: mol_type = unassigned DNA; note = target_6bb096f
  misc_feature 1..24: note = LF
  misc_feature 25: note = Core
  misc_feature 26..50: note = RF
tcattgcgagcctgcctagccgtccaggcaggcctagcgcggcaatctgc

SEQ ID NO: 24604 - DNA, 50 bp, unidentified
  source 1..50: mol_type = unassigned DNA; note = target_6bb4e2f
  misc_feature 1..24: note = LF
  misc_feature 25: note = Core
  misc_feature 26..50: note = RF
tcctgaaggacggggtttctcggagcaactgatgaaaaacgccgaccaag

SEQ ID NO: 24605 - DNA, 50 bp, unidentified
  source 1..50: mol_type = unassigned DNA; note = target_6bb92b0
  misc_feature 1..23: note = LF
  misc_feature 24..25: note = Core
  misc_feature 26..50: note = RF
cttctgagagacatccctcctttctatctcgtccaatttttttagcagtg

SEQ ID NO: 24606 - DNA, 50 bp, unidentified
  source 1..50: mol_type = unassigned DNA; note = target_6bbd5d4
  misc_feature 1..24: note = LF
  misc_feature 25: note = Core
  misc_feature 26..50: note = RF
cctgaaaatggtaacagcgacggcctctgcgggaagtaaatgactgattt

SEQ ID NO: 24607 - DNA, 50 bp, unidentified
  source 1..50: mol_type = unassigned DNA; note = target_6bc5423
  misc_feature 1..24: note = LF
  misc_feature 25: note = Core
  misc_feature 26..50: note = RF
gctaacttaaaagccatgtcattgcgaggagcagcatgggcaaaagagca

SEQ ID NO: 24608 - DNA, 50 bp, unidentified
  source 1..50: mol_type = unassigned DNA; note = target_6bcc68d
  misc_feature 1..23: note = LF
  misc_feature 24..25: note = Core
  misc_feature 26..50: note = RF
ccctccagccggcccacccgacgctagctccgagcctgcgcggacgacgc

SEQ ID NO: 24609 - DNA, 50 bp, unidentified
  source 1..50: mol_type = unassigned DNA; note = target_6bd06b2
  misc_feature 1..23: note = LF
  misc_feature 24..25: note = Core
  misc_feature 26..50: note = RF
ggcatgcgggcccagaagccgacctagcccgccggggtcgtaggttgggg

SEQ ID NO: 24610 - DNA, 50 bp, unidentified
  source 1..50: mol_type = unassigned DNA; note = target_6bd3a65
  misc_feature 1..23: note = LF
  misc_feature 24..25: note = Core
  misc_feature 26..50: note = RF
ccgcggatcatgcgcgaggtccgctagttgatgcgctcgatgatcgccgc

SEQ ID NO: 24611 - DNA, 50 bp, unidentified
  source 1..50: mol_type = unassigned DNA; note = target_6bdc36d
  misc_feature 1..24: note = LF
  misc_feature 25: note = Core
  misc_feature 26..50: note = RF
acgttaaatacttcactcattttttcatctcctccgtttcacatgcaggc

SEQ ID NO: 24612 - DNA, 50 bp, unidentified
  source 1..50: mol_type = unassigned DNA; note = target_6bddbb4
  misc_feature 1..23: note = LF
  misc_feature 24..25: note = Core
  misc_feature 26..50: note = RF
ggcagcgcggccatgcgcgaaccagaccgtatcatccgcctgaaaaccgt

SEQ ID NO: 24613 - DNA, 50 bp, unidentified
  source 1..50: mol_type = unassigned DNA; note = target_6be3042
  misc_feature 1..23: note = LF
  misc_feature 24..25: note = Core
  misc_feature 26..50: note = RF
aacggatcgaccgttggtagggttggtgcactgatttcatggcctaattt

SEQ ID NO: 24614 - DNA, 50 bp, unidentified
  source 1..50: mol_type = unassigned DNA; note = target_6bf0894
  misc_feature 1..22: note = LF
  misc_feature 23..25: note = Core
  misc_feature 26..50: note = RF
cttcgcctaagaatctcaatgtcattccgacagagaagctctttttactt

SEQ ID NO: 24615 - DNA, 50 bp, unidentified
  source 1..50: mol_type = unassigned DNA; note = target_6bf5c9e
  misc_feature 1..23: note = LF
  misc_feature 24..25: note = Core
  misc_feature 26..50: note = RF
ggtggcgggcctcttcattctgaagcacatgcacaacctctcggacgagg

SEQ ID NO: 24616 - DNA, 50 bp, unidentified
  source 1..50: mol_type = unassigned DNA; note = target_6bffffe
  misc_feature 1..24: note = LF
  misc_feature 25: note = Core
  misc_feature 26..50: note = RF
ttaataacgtccctatttgctaacgccgcgttaatgggccgtagtgtagg

SEQ ID NO: 24617 - DNA, 50 bp, unidentified
  source 1..50: mol_type = unassigned DNA; note = target_6c09553
  misc_feature 1..24: note = LF
  misc_feature 25: note = Core
  misc_feature 26..50: note = RF
aaacacgcatgcgcactattaaaatgttatgtttacaggagagtatggtg

SEQ ID NO: 24618 - DNA, 50 bp, unidentified
  source 1..50: mol_type = unassigned DNA; note = target_6c0fd75
  misc_feature 1..24: note = LF
  misc_feature 25: note = Core
  misc_feature 26..50: note = RF
ttccatgattttataaattaagcattgtttttatatcttgttatgccaat

SEQ ID NO: 24619 - DNA, 50 bp, unidentified
  source 1..50: mol_type = unassigned DNA; note = target_6c157e1
  misc_feature 1..23: note = LF
  misc_feature 24..25: note = Core
  misc_feature 26..50: note = RF
aagttattcatacttctaagctccttaaataaacagttaagttttatgac

SEQ ID NO: 24620 - DNA, 50 bp, unidentified
  source 1..50: mol_type = unassigned DNA; note = target_6c17cf0
  misc_feature 1..23: note = LF
  misc_feature 24..25: note = Core
  misc_feature 26..50: note = RF
gttttgctcggcggattcggacgctcattcgactacgactcccgcgccgc

SEQ ID NO: 24621 - DNA, 50 bp, unidentified
  source 1..50: mol_type = unassigned DNA; note = target_6c1d429
  misc_feature 1..24: note = LF
  misc_feature 25: note = Core
  misc_feature 26..50: note = RF
ccaagccccgcagcgatgcggggctttttttgttgtcgccgccgcaacaa

SEQ ID NO: 24622 - DNA, 50 bp, unidentified
  source 1..50: mol_type = unassigned DNA; note = target_6c1ef74
  misc_feature 1..23: note = LF
  misc_feature 24..25: note = Core
  misc_feature 26..50: note = RF
tacttgcggagatttctcgttcctcgaaatgacaagattgtgtttgatgt

SEQ ID NO: 24623 - DNA, 50 bp, unidentified
  source 1..50: mol_type = unassigned DNA; note = target_6c2d736
  misc_feature 1..24: note = LF
  misc_feature 25: note = Core
  misc_feature 26..50: note = RF
atgtttgaccgggagcccccatggacgggttcacggcgttcccggaaggg

SEQ ID NO: 24624 - DNA, 50 bp, unidentified
  source 1..50: mol_type = unassigned DNA; note = target_6c34e14
  misc_feature 1..23: note = LF
  misc_feature 24..25: note = Core
  misc_feature 26..50: note = RF
cactactaagtttcattattaacctcctgattcagatcagtttctttagt

SEQ ID NO: 24625 - DNA, 50 bp, unidentified
  source 1..50: mol_type = unassigned DNA; note = target_6c3c9eb
  misc_feature 1..23: note = LF
  misc_feature 24..25: note = Core
  misc_feature 26..50: note = RF
acgatcgagcgggtaagcaccgagatgagccttcaggtgttggcctacaa

SEQ ID NO: 24626 - DNA, 50 bp, unidentified
  source 1..50: mol_type = unassigned DNA; note = target_6c3fa0c
  misc_feature 1..22: note = LF
  misc_feature 23..25: note = Core
  misc_feature 26..50: note = RF
tctaaacttgcccataacgttttgcagcttagattatcgtgttaaagggt

SEQ ID NO: 24627 - DNA, 50 bp, unidentified
  source 1..50: mol_type = unassigned DNA; note = target_6c45e88
  misc_feature 1..23: note = LF
  misc_feature 24..25: note = Core
  misc_feature 26..50: note = RF
cgccccgcggacacctagagctcctatcaagttcgattgctgagtcgtcg

SEQ ID NO: 24628 - DNA, 50 bp, unidentified
  source 1..50: mol_type = unassigned DNA; note = target_6c5abd2
  misc_feature 1..24: note = LF
  misc_feature 25: note = Core
  misc_feature 26..50: note = RF
cgctgaacttgctttctagttacccgcgctacgggttgtgcttccactgt

SEQ ID NO: 24629 - DNA, 50 bp, unidentified
  source 1..50: mol_type = unassigned DNA; note = target_6c5d4ea
  misc_feature 1..23: note = LF
  misc_feature 24..25: note = Core
  misc_feature 26..50: note = RF
gtcgatgtccgctttgggtcaaaagcagacatcagcgcatgtctgtgcaa

SEQ ID NO: 24630 - DNA, 50 bp, unidentified
  source 1..50: mol_type = unassigned DNA; note = target_6c6e031
  misc_feature 1..23: note = LF
  misc_feature 24..25: note = Core
  misc_feature 26..50: note = RF
ctgttgtcataattgctttcatcctttctcatgttgtttcgcatatggtg

SEQ ID NO: 24631 - DNA, 50 bp, unidentified
  source 1..50: mol_type = unassigned DNA; note = target_6c71ae9
  misc_feature 1..23: note = LF
  misc_feature 24..25: note = Core
  misc_feature 26..50: note = RF
tttacagccattagtcttccttcctttcctttttggtaacggcaaacata

SEQ ID NO: 24632 - DNA, 50 bp, unidentified
  source 1..50: mol_type = unassigned DNA; note = target_6c735e9
  misc_feature 1..22: note = LF
  misc_feature 23..25: note = Core
  misc_feature 26..50: note = RF
gacgttgggtcatgtctgctattgacccaaagcggcggcgtcaggtcggc

SEQ ID NO: 24633 - DNA, 50 bp, unidentified
  source 1..50: mol_type = unassigned DNA; note = target_6c77f62
  misc_feature 1..23: note = LF
  misc_feature 24..25: note = Core
  misc_feature 26..50: note = RF
gatccgtcatcacgtctcatctcctagggcgcggcgggctgggcctgcag

SEQ ID NO: 24634 - DNA, 50 bp, unidentified
  source 1..50: mol_type = unassigned DNA; note = target_6c85f80
  misc_feature 1..21: note = LF
  misc_feature 22..25: note = Core
  misc_feature 26..50: note = RF
gcatcgctcggcgagcaaagccttgttgcacggccatgttgtgcggttca

SEQ ID NO: 24635 - DNA, 50 bp, unidentified
  source 1..50: mol_type = unassigned DNA; note = target_6c8c57e
  misc_feature 1..22: note = LF
  misc_feature 23..25: note = Core
  misc_feature 26..50: note = RF
ccctagatatagggagagactttttttgtttgtacagatgctctagtgct

SEQ ID NO: 24636 - DNA, 50 bp, unidentified
  source 1..50: mol_type = unassigned DNA; note = target_6c8d01e
  misc_feature 1..22: note = LF
  misc_feature 23..25: note = Core
  misc_feature 26..50: note = RF
tggccggcctgagatccgccagcccccctgtcgagagtgcacgacacgcc

SEQ ID NO: 24637 - DNA, 50 bp, unidentified
  source 1..50: mol_type = unassigned DNA; note = target_6c91983
  misc_feature 1..24: note = LF
  misc_feature 25: note = Core
  misc_feature 26..50: note = RF
taggaggcaatctccggccataagcagaccctcaaaaaactgaggtaggc

SEQ ID NO: 24638 - DNA, 50 bp, unidentified
  source 1..50: mol_type = unassigned DNA; note = target_6c92f55
  misc_feature 1..23: note = LF
  misc_feature 24..25: note = Core
  misc_feature 26..50: note = RF
tgctggctgcctctgatcttagatggggtaacgggccgacgccagcctag

SEQ ID NO: 24639 - DNA, 50 bp, unidentified
  source 1..50: mol_type = unassigned DNA; note = target_6c99564
  misc_feature 1..23: note = LF
  misc_feature 24..25: note = Core
  misc_feature 26..50: note = RF
acggcaataaatccttcgctgcgctcagaatgacagcttaccgttttcct

SEQ ID NO: 24640 - DNA, 50 bp, unidentified
  source 1..50: mol_type = unassigned DNA; note = target_6c9ea6b
  misc_feature 1..24: note = LF
  misc_feature 25: note = Core
  misc_feature 26..50: note = RF
gacaggcccgtgcctgatagccggcttacttggcgaaggacagcgcctgc

SEQ ID NO: 24641 - DNA, 50 bp, unidentified
  source 1..50: mol_type = unassigned DNA; note = target_6ca440e
  misc_feature 1..24: note = LF
  misc_feature 25: note = Core
  misc_feature 26..50: note = RF
tcataggattagtgatatagggatttttcgtcaacctccttctggagttg

SEQ ID NO: 24642 - DNA, 50 bp, unidentified
  source 1..50: mol_type = unassigned DNA; note = target_6ca7abd
  misc_feature 1..24: note = LF
  misc_feature 25: note = Core
  misc_feature 26..50: note = RF
gcggacctgcagtcgcaacgtaagcgcccagtgaacccatcttgagttga

SEQ ID NO: 24643 - DNA, 50 bp, unidentified
  source 1..50: mol_type = unassigned DNA; note = target_6cb1f21
  misc_feature 1..22: note = LF
  misc_feature 23..25: note = Core
  misc_feature 26..50: note = RF
ttgggggaactggtgctttgcgggacaaagtaccatttcgctgcaatcgc

SEQ ID NO: 24644 - DNA, 50 bp, unidentified
  source 1..50: mol_type = unassigned DNA; note = target_6cc9708
  misc_feature 1..24: note = LF
  misc_feature 25: note = Core
  misc_feature 26..50: note = RF
ctcaccaccccggcccccgcctgacccccacgacgcctctgcgggaggca

SEQ ID NO: 24645 - DNA, 50 bp, unidentified
  source 1..50: mol_type = unassigned DNA; note = target_6ccc6d1
  misc_feature 1..22: note = LF
  misc_feature 23..25: note = Core
  misc_feature 26..50: note = RF
agccacgaaacaactcgcaaggagacgacatgcaagtcaccggtatgttg

SEQ ID NO: 24646 - DNA, 50 bp, unidentified
  source 1..50: mol_type = unassigned DNA; note = target_6cceed6
  misc_feature 1..24: note = LF
  misc_feature 25: note = Core
  misc_feature 26..50: note = RF
gccctgtgtagcgaagtaaagaagaggagaaggcggccgcaggccgccgc

SEQ ID NO: 24647 - DNA, 50 bp, unidentified
  source 1..50: mol_type = unassigned DNA; note = target_6cd7457
  misc_feature 1..24: note = LF
  misc_feature 25: note = Core
  misc_feature 26..50: note = RF
ttggcgaggtgcctcaggctctcttggctatgctgaatcgctcggcggat

SEQ ID NO: 24648 - DNA, 50 bp, unidentified
  source 1..50: mol_type = unassigned DNA; note = target_6cd8bd4
  misc_feature 1..23: note = LF
  misc_feature 24..25: note = Core
  misc_feature 26..50: note = RF
gatcggccaagacggcctggctttgggcttatgcccgggatgacagaccc

SEQ ID NO: 24649 - DNA, 50 bp, unidentified
  source 1..50: mol_type = unassigned DNA; note = target_6cddd73
  misc_feature 1..23: note = LF
  misc_feature 24..25: note = Core
  misc_feature 26..50: note = RF
cggccacgtcaggggaaacgcccctgtccctgccttgcgccggtcaggac

SEQ ID NO: 24650 - DNA, 50 bp, unidentified
  source 1..50: mol_type = unassigned DNA; note = target_6cdf503
  misc_feature 1..23: note = LF
  misc_feature 24..25: note = Core
  misc_feature 26..50: note = RF
tttcaacgaaatccagaccctgctgccgttcgccgctactgcgaggtttc

SEQ ID NO: 24651 - DNA, 50 bp, unidentified
  source 1..50: mol_type = unassigned DNA; note = target_6ce019d
  misc_feature 1..23: note = LF
  misc_feature 24..25: note = Core
  misc_feature 26..50: note = RF
ggttactcatggaaaatacactcctttcatgtcataattgcaatgatttc

SEQ ID NO: 24652 - DNA, 50 bp, unidentified
  source 1..50: mol_type = unassigned DNA; note = target_6ce09a8
  misc_feature 1..24: note = LF
  misc_feature 25: note = Core
  misc_feature 26..50: note = RF
ccgttaaagcttacctcactgacttgacggcttatcgggataaaattttt

SEQ ID NO: 24653 - DNA, 50 bp, unidentified
  source 1..50: mol_type = unassigned DNA; note = target_6ce296b
  misc_feature 1..24: note = LF
  misc_feature 25: note = Core
  misc_feature 26..50: note = RF
tccctatatgtattcatcataaaaatactgcatgtcattttgaccgccag

SEQ ID NO: 24654 - DNA, 50 bp, unidentified
  source 1..50: mol_type = unassigned DNA; note = target_6ce2abb
  misc_feature 1..23: note = LF
  misc_feature 24..25: note = Core
  misc_feature 26..50: note = RF
aggtgtacgatatcctccaaagcaggaagccgcgggccacggatgctgac

SEQ ID NO: 24655 - DNA, 50 bp, unidentified
  source 1..50: mol_type = unassigned DNA; note = target_6ce98c6
  misc_feature 1..23: note = LF
  misc_feature 24..25: note = Core
  misc_feature 26..50: note = RF
aaaaacgcagcctgtaagctgcgttttttatggataaaacttggtttgtg

SEQ ID NO: 24656 - DNA, 50 bp, unidentified
  source 1..50: mol_type = unassigned DNA; note = target_6cef44c
  misc_feature 1..23: note = LF
  misc_feature 24..25: note = Core
  misc_feature 26..50: note = RF
acttgggcacctgcgcctatcgctgtccataaggacagtactcaacaaca

SEQ ID NO: 24657 - DNA, 50 bp, unidentified
  source 1..50: mol_type = unassigned DNA; note = target_6cf4f81
  misc_feature 1..23: note = LF
  misc_feature 24..25: note = Core
  misc_feature 26..50: note = RF
ggttacgctgtcgctaacccgacctacattcttctaagccccatttgatg

SEQ ID NO: 24658 - DNA, 50 bp, unidentified
  source 1..50: mol_type = unassigned DNA; note = target_6d046c7
  misc_feature 1..24: note = LF
  misc_feature 25: note = Core
  misc_feature 26..50: note = RF
acgaatttcagttcacacaaatagcgcgaacacagccaataaaaaacggg

SEQ ID NO: 24659 - DNA, 50 bp, unidentified
  source 1..50: mol_type = unassigned DNA; note = target_6d0922a
  misc_feature 1..23: note = LF
  misc_feature 24..25: note = Core
  misc_feature 26..50: note = RF
tctcagtacccatggtcatgctcctttctcagcgatggatgagacccgcg

SEQ ID NO: 24660 - DNA, 50 bp, unidentified
  source 1..50: mol_type = unassigned DNA; note = target_6d147c7
  misc_feature 1..24: note = LF
  misc_feature 25: note = Core
  misc_feature 26..50: note = RF
ctctttcaaatcagatctgaaggagccgatatggacgcagacttctcgaa

SEQ ID NO: 24661 - DNA, 50 bp, unidentified
  source 1..50: mol_type = unassigned DNA; note = target_6d15ab0
  misc_feature 1..23: note = LF
  misc_feature 24..25: note = Core
  misc_feature 26..50: note = RF
tcctcacccgctgtcacgtaattccccaccctggggcgtgtcggtgcggg

SEQ ID NO: 24662 - DNA, 50 bp, unidentified
  source 1..50: mol_type = unassigned DNA; note = target_6d22c30
  misc_feature 1..23: note = LF
  misc_feature 24..25: note = Core
  misc_feature 26..50: note = RF
acggcagccgactgaagtcggctctacccggtactcgcgcgcggggaatg

SEQ ID NO: 24663 - DNA, 50 bp, unidentified
  source 1..50: mol_type = unassigned DNA; note = target_6d234ff
  misc_feature 1..23: note = LF
  misc_feature 24..25: note = Core
  misc_feature 26..50: note = RF
aaaaatcatcaagaaagatcaacagcccctaactttagccaacccctcca

SEQ ID NO: 24664 - DNA, 50 bp, unidentified
  source 1..50: mol_type = unassigned DNA; note = target_6d38699
  misc_feature 1..23: note = LF
  misc_feature 24..25: note = Core
  misc_feature 26..50: note = RF
aacgaggaaaaacctcgatgggatggttttacggtttcaagttacacttg

SEQ ID NO: 24665 - DNA, 50 bp, unidentified
  source 1..50: mol_type = unassigned DNA; note = target_6d3f3ec
  misc_feature 1..23: note = LF
  misc_feature 24..25: note = Core
  misc_feature 26..50: note = RF
gtcgcgtctggtttacccccaaaagcggacatcggctcgccgccaaatga

SEQ ID NO: 24666 - DNA, 50 bp, unidentified
  source 1..50: mol_type = unassigned DNA; note = target_6d45404
  misc_feature 1..23: note = LF
  misc_feature 24..25: note = Core
  misc_feature 26..50: note = RF
agactcaaaaaggacttcatatccttttttatagctttcaaatttatcct

SEQ ID NO: 24667 - DNA, 50 bp, unidentified
  source 1..50: mol_type = unassigned DNA; note = target_6d46530
  misc_feature 1..23: note = LF
  misc_feature 24..25: note = Core
  misc_feature 26..50: note = RF
tgccaaaacgggagtcctcggcgtgggtcccggctcaaggccgggacgac

SEQ ID NO: 24668 - DNA, 50 bp, unidentified
  source 1..50: mol_type = unassigned DNA; note = target_6d4dcf3
  misc_feature 1..24: note = LF
  misc_feature 25: note = Core
  misc_feature 26..50: note = RF
ctcggcacaagtgtcgtctcggtctgacccaaacgcgatcccgatccttc

SEQ ID NO: 24669 - DNA, 50 bp, unidentified
  source 1..50: mol_type = unassigned DNA; note = target_6d50e74
  misc_feature 1..24: note = LF
  misc_feature 25: note = Core
  misc_feature 26..50: note = RF
ctaaacgagattccctactacgctcgttcctcgctatagggaatgacgac

SEQ ID NO: 24670 - DNA, 50 bp, unidentified
  source 1..50: mol_type = unassigned DNA; note = target_6d5a0bb
  misc_feature 1..24: note = LF
  misc_feature 25: note = Core
  misc_feature 26..50: note = RF
gtgcggaccgcgcgttgtacgcggcatgagagtgcgccgtgccgagattt

SEQ ID NO: 24671 - DNA, 50 bp, unidentified
  source 1..50: mol_type = unassigned DNA; note = target_6d5ef14
  misc_feature 1..23: note = LF
  misc_feature 24..25: note = Core
  misc_feature 26..50: note = RF
cctaacggccgcggcgtatgggtccggatcaagcccgggacgacgtggag

SEQ ID NO: 24672 - DNA, 50 bp, unidentified
  source 1..50: mol_type = unassigned DNA; note = target_6d6da48
  misc_feature 1..23: note = LF
  misc_feature 24..25: note = Core
  misc_feature 26..50: note = RF
gatgccggccggagggggcatccaccccatcagttcacattctgccccat

SEQ ID NO: 24673 - DNA, 50 bp, unidentified
  source 1..50: mol_type = unassigned DNA; note = target_6d8229d
  misc_feature 1..23: note = LF
  misc_feature 24..25: note = Core
  misc_feature 26..50: note = RF
gaattcccaagaagctgattttctgattcatcggaccgagcaagaggagg

SEQ ID NO: 24674 - DNA, 50 bp, unidentified
  source 1..50: mol_type = unassigned DNA; note = target_6d840b1
  misc_feature 1..22: note = LF
  misc_feature 23..25: note = Core
  misc_feature 26..50: note = RF
ggccctttcgcgacgcaaggccgctcccacagtcttctcccaccgatggt

SEQ ID NO: 24675 - DNA, 50 bp, unidentified
  source 1..50: mol_type = unassigned DNA; note = target_6d881f3
  misc_feature 1..23: note = LF
  misc_feature 24..25: note = Core
  misc_feature 26..50: note = RF
cgagcgattcatcgctgactgttctgatcggtgcctcagggcccgaggac

SEQ ID NO: 24676 - DNA, 50 bp, unidentified
  source 1..50: mol_type = unassigned DNA; note = target_6d91bdd
  misc_feature 1..23: note = LF
  misc_feature 24..25: note = Core
  misc_feature 26..50: note = RF
ttatttctatcataatttgtcttgtctcctttatcaccacccaatgggct

SEQ ID NO: 24677 - DNA, 50 bp, unidentified
  source 1..50: mol_type = unassigned DNA; note = target_6d95eb6
  misc_feature 1..22: note = LF
  misc_feature 23..25: note = Core
  misc_feature 26..50: note = RF
atcaaggccagcgggagcgtctacaccttcagatccataccaatatccgc

SEQ ID NO: 24678 - DNA, 50 bp, unidentified
  source 1..50: mol_type = unassigned DNA; note = target_6d9f5dd
  misc_feature 1..23: note = LF
  misc_feature 24..25: note = Core
  misc_feature 26..50: note = RF
agggaaacctcagtgtctgacaccttattttcatttaataattagagttg

SEQ ID NO: 24679 - DNA, 50 bp, unidentified
  source 1..50: mol_type = unassigned DNA; note = target_6daaa8e
  misc_feature 1..20: note = LF
  misc_feature 21..25: note = Core
  misc_feature 26..50: note = RF
aaagcgccaagccttttctcctgcttcgccgcttgcggcttctccctctg

SEQ ID NO: 24680 - DNA, 50 bp, unidentified
  source 1..50: mol_type = unassigned DNA; note = target_6dadef7
  misc_feature 1..24: note = LF
  misc_feature 25: note = Core
  misc_feature 26..50: note = RF
cgatgaccacccgaacatgatgcccgttctggagcgcgctcgccacgaca

SEQ ID NO: 24681 - DNA, 50 bp, unidentified
  source 1..50: mol_type = unassigned DNA; note = target_6dafa02
  misc_feature 1..23: note = LF
  misc_feature 24..25: note = Core
  misc_feature 26..50: note = RF
gacattgggtctttgcctggaagcggacattccgcgcttcggggctgagc

SEQ ID NO: 24682 - DNA, 50 bp, unidentified
  source 1..50: mol_type = unassigned DNA; note = target_6dbd815
  misc_feature 1..23: note = LF
  misc_feature 24..25: note = Core
  misc_feature 26..50: note = RF
cctgtgcaatgtatgctttgtagtggtcaacaaaaactggccacggcttt

SEQ ID NO: 24683 - DNA, 50 bp, unidentified
  source 1..50: mol_type = unassigned DNA; note = target_6dc0ed2
  misc_feature 1..22: note = LF
  misc_feature 23..25: note = Core
  misc_feature 26..50: note = RF
agatcctatggtcaagccataggatgacagaacattttttcagaatactt

SEQ ID NO: 24684 - DNA, 50 bp, unidentified
  source 1..50: mol_type = unassigned DNA; note = target_6dc953f
  misc_feature 1..23: note = LF
  misc_feature 24..25: note = Core
  misc_feature 26..50: note = RF
atcaccagtattgccggatgtagttcggtagggacagccggatatagttc

SEQ ID NO: 24685 - DNA, 50 bp, unidentified
  source 1..50: mol_type = unassigned DNA; note = target_6dc9fd9
  misc_feature 1..23: note = LF
  misc_feature 24..25: note = Core
  misc_feature 26..50: note = RF
gttccttggaacaggggtggtttttttgatgtccgggatccggttgccaa

SEQ ID NO: 24686 - DNA, 50 bp, unidentified
  source 1..50: mol_type = unassigned DNA; note = target_6dca0e0
  misc_feature 1..23: note = LF
  misc_feature 24..25: note = Core
  misc_feature 26..50: note = RF
cacataaatcctatggcgctttgtgccccttagtgagctagaacagcaaa

SEQ ID NO: 24687 - DNA, 50 bp, unidentified
  source 1..50: mol_type = unassigned DNA; note = target_6dccb95
  misc_feature 1..24: note = LF
  misc_feature 25: note = Core
  misc_feature 26..50: note = RF
taactgcttattatatctgcaagtggctggacaggtacttataatcacag

SEQ ID NO: 24688 - DNA, 50 bp, unidentified
  source 1..50: mol_type = unassigned DNA; note = target_6dd0c78
  misc_feature 1..24: note = LF
  misc_feature 25: note = Core
  misc_feature 26..50: note = RF
tgccgcaagccggcctcgaagtgaatacacatgatcgtcaaagaacagat

SEQ ID NO: 24689 - DNA, 50 bp, unidentified
  source 1..50: mol_type = unassigned DNA; note = target_6dd3790
  misc_feature 1..23: note = LF
  misc_feature 24..25: note = Core
  misc_feature 26..50: note = RF
ccaccaggtcccgcccctatcacgccacctcagcgcaagccccctcgacc

SEQ ID NO: 24690 - DNA, 50 bp, unidentified
  source 1..50: mol_type = unassigned DNA; note = target_6dd407a
  misc_feature 1..24: note = LF
  misc_feature 25: note = Core
  misc_feature 26..50: note = RF
agactcttatatttttcatctaacgccaagttaaggtgtgaacaacgcta

SEQ ID NO: 24691 - DNA, 50 bp, unidentified
  source 1..50: mol_type = unassigned DNA; note = target_6dd6f88
  misc_feature 1..23: note = LF
  misc_feature 24..25: note = Core
  misc_feature 26..50: note = RF
aactggacgcttcatgatcgggcctagaaccactccagtgccttcgcggt

SEQ ID NO: 24692 - DNA, 50 bp, unidentified
  source 1..50: mol_type = unassigned DNA; note = target_6dd72fa
  misc_feature 1..23: note = LF
  misc_feature 24..25: note = Core
  misc_feature 26..50: note = RF
tcaagggcgaatgtaattcgcccctacaactctaaaaataatcattgaaa

SEQ ID NO: 24693 - DNA, 50 bp, unidentified
  source 1..50: mol_type = unassigned DNA; note = target_6debf91
  misc_feature 1..22: note = LF
  misc_feature 23..25: note = Core
  misc_feature 26..50: note = RF
gctaattgagagatgcgattggatcccctttccgctatccggcagcgtaa

SEQ ID NO: 24694 - DNA, 50 bp, unidentified
  source 1..50: mol_type = unassigned DNA; note = target_6df9252
  misc_feature 1..23: note = LF
  misc_feature 24..25: note = Core
  misc_feature 26..50: note = RF
gggcttcgcctgcaagcaggctcctacacaccgatagccgcccggcatta

SEQ ID NO: 24695 - DNA, 50 bp, unidentified
  source 1..50: mol_type = unassigned DNA; note = target_6dfb807
  misc_feature 1..24: note = LF
  misc_feature 25: note = Core
  misc_feature 26..50: note = RF
tgacaggccgtaatcggcagaggttgtgtaaaaacgcagccttgttcgcc

SEQ ID NO: 24696 - DNA, 50 bp, unidentified
  source 1..50: mol_type = unassigned DNA; note = target_6dfc214
  misc_feature 1..21: note = LF
  misc_feature 22..25: note = Core
  misc_feature 26..50: note = RF
aaattcggtatttcataccattaatagcctgctattttgtgaaagtttta

SEQ ID NO: 24697 - DNA, 50 bp, unidentified
  source 1..50: mol_type = unassigned DNA; note = target_6e011d9
  misc_feature 1..21: note = LF
  misc_feature 22..25: note = Core
  misc_feature 26..50: note = RF
aaaggaatcgaatatttctttgtttaccgcaatgcacaatttatcctatg

SEQ ID NO: 24698 - DNA, 50 bp, unidentified
  source 1..50: mol_type = unassigned DNA; note = target_6e0de64
  misc_feature 1..20: note = LF
  misc_feature 21..25: note = Core
  misc_feature 26..50: note = RF
ccaaatcaaatgattgcaggctttttttgttttccgaatagcagcaaaat

SEQ ID NO: 24699 - DNA, 50 bp, unidentified
  source 1..50: mol_type = unassigned DNA; note = target_6e112c7
  misc_feature 1..23: note = LF
  misc_feature 24..25: note = Core
  misc_feature 26..50: note = RF
ttttctcatattaagcaatcctccttccaaatatatttatccaatataaa

SEQ ID NO: 24700 - DNA, 50 bp, unidentified
  source 1..50: mol_type = unassigned DNA; note = target_6e114cd
  misc_feature 1..24: note = LF
  misc_feature 25: note = Core
  misc_feature 26..50: note = RF
ctgttaaataaccaagggctttgttgaataaatcagagttagccgacaga

SEQ ID NO: 24701 - DNA, 50 bp, unidentified
  source 1..50: mol_type = unassigned DNA; note = target_6e11f3c
  misc_feature 1..21: note = LF
  misc_feature 22..25: note = Core
  misc_feature 26..50: note = RF
ggagggggacttgacccttaaccccccggagctcgaatgtgtcccagtgg

SEQ ID NO: 24702 - DNA, 50 bp, unidentified
  source 1..50: mol_type = unassigned DNA; note = target_6e17e95
  misc_feature 1..22: note = LF
  misc_feature 23..25: note = Core
  misc_feature 26..50: note = RF
acaagggttgaggaggttcgcgcccccctggagcgcgaacctcctcaacc

SEQ ID NO: 24703 - DNA, 50 bp, unidentified
  source 1..50: mol_type = unassigned DNA; note = target_6e1b3fc
  misc_feature 1..24: note = LF
  misc_feature 25: note = Core
  misc_feature 26..50: note = RF
gtccctccccgggaccggggtcacttttgtccttgccaaaagtaaccaaa

SEQ ID NO: 24704 - DNA, 50 bp, unidentified
  source 1..50: mol_type = unassigned DNA; note = target_6e29179
  misc_feature 1..24: note = LF
  misc_feature 25: note = Core
  misc_feature 26..50: note = RF
gcggcgccggacgggcctcaccacttttttgcgagcatttccttgagcgt

SEQ ID NO: 24705 - DNA, 50 bp, unidentified
  source 1..50: mol_type = unassigned DNA; note = target_6e30601
  misc_feature 1..23: note = LF
  misc_feature 24..25: note = Core
  misc_feature 26..50: note = RF
cgcgcaccgacccgttgaccgcactagcggcgtgtcctcaacggctgccg

SEQ ID NO: 24706 - DNA, 50 bp, unidentified
  source 1..50: mol_type = unassigned DNA; note = target_6e30610
  misc_feature 1..23: note = LF
  misc_feature 24..25: note = Core
  misc_feature 26..50: note = RF
cgtggcgccggtcgatgccgacgtggttcttgtagccgaaagccggcacc

SEQ ID NO: 24707 - DNA, 50 bp, unidentified
  source 1..50: mol_type = unassigned DNA; note = target_6e30a92
  misc_feature 1..23: note = LF
  misc_feature 24..25: note = Core
  misc_feature 26..50: note = RF
ggcaaggcgcttgattgagcaatagctagctattgctcaatcaagcgcct

SEQ ID NO: 24708 - DNA, 50 bp, unidentified
  source 1..50: mol_type = unassigned DNA; note = target_6e3201d
  misc_feature 1..23: note = LF
  misc_feature 24..25: note = Core
  misc_feature 26..50: note = RF
aagacggagcgtgtgaacgccattggtccgagagaacacgcgacgctcga

SEQ ID NO: 24709 - DNA, 50 bp, unidentified
  source 1..50: mol_type = unassigned DNA; note = target_6e3384b
  misc_feature 1..23: note = LF
  misc_feature 24..25: note = Core
  misc_feature 26..50: note = RF
ggccgccttcgcgagcaagcccgcttggattgtggggtatcaggtagata

SEQ ID NO: 24710 - DNA, 50 bp, unidentified
  source 1..50: mol_type = unassigned DNA; note = target_6e3ae4a
  misc_feature 1..24: note = LF
  misc_feature 25: note = Core
  misc_feature 26..50: note = RF
ttggtaaatttcatgtataaacctcttgtatttacgcagctttttgtccg

SEQ ID NO: 24711 - DNA, 50 bp, unidentified
  source 1..50: mol_type = unassigned DNA; note = target_6e431b0
  misc_feature 1..22: note = LF
  misc_feature 23..25: note = Core
  misc_feature 26..50: note = RF
tcgccgcataagcggcgagagcctaggctgcctgcgagatcccgatcagg

SEQ ID NO: 24712 - DNA, 50 bp, unidentified
  source 1..50: mol_type = unassigned DNA; note = target_6e4aa44
  misc_feature 1..24: note = LF
  misc_feature 25: note = Core
  misc_feature 26..50: note = RF
ccttaccccggtgacgacgaagaatgtgctgaggcacgaagcgcatcaat

SEQ ID NO: 24713 - DNA, 50 bp, unidentified
  source 1..50: mol_type = unassigned DNA; note = target_6e4dfbc
  misc_feature 1..24: note = LF
  misc_feature 25: note = Core
  misc_feature 26..50: note = RF
cgggcgcggagcgttcgcgacaacggagctaaggggcgggcgcgatagcg

SEQ ID NO: 24714 - DNA, 50 bp, unidentified
  source 1..50: mol_type = unassigned DNA; note = target_6e59b9e
  misc_feature 1..22: note = LF
  misc_feature 23..25: note = Core
  misc_feature 26..50: note = RF
tccgtgacatacttctcacctcactttaattataacatatttgcattatg

SEQ ID NO: 24715 - DNA, 50 bp, unidentified
  source 1..50: mol_type = unassigned DNA; note = target_6e6f882
  misc_feature 1..23: note = LF
  misc_feature 24..25: note = Core
  misc_feature 26..50: note = RF
aaacaaaaagacgtttgcccaccctgcccggctgcgttattgaaaatcgc

SEQ ID NO: 24716 - DNA, 50 bp, unidentified
  source 1..50: mol_type = unassigned DNA; note = target_6e790f1
  misc_feature 1..24: note = LF
  misc_feature 25: note = Core
  misc_feature 26..50: note = RF
tatcaaataaaaacattcttctcttctccttttaaaactcaaacttaata

SEQ ID NO: 24717 - DNA, 50 bp, unidentified
  source 1..50: mol_type = unassigned DNA; note = target_6e7ec61
  misc_feature 1..23: note = LF
  misc_feature 24..25: note = Core
  misc_feature 26..50: note = RF
cgccgcgagcgcggatccgtagttgccgtgttgcccgccggctcccgaga

SEQ ID NO: 24718 - DNA, 50 bp, unidentified
  source 1..50: mol_type = unassigned DNA; note = target_6e87fc5
  misc_feature 1..24: note = LF
  misc_feature 25: note = Core
  misc_feature 26..50: note = RF
catgtggcggcgtgggagcccgaccggaaactgagccagtgggggtgcgg

SEQ ID NO: 24719 - DNA, 50 bp, unidentified
  source 1..50: mol_type = unassigned DNA; note = target_6e89c66
  misc_feature 1..22: note = LF
  misc_feature 23..25: note = Core
  misc_feature 26..50: note = RF
attcattcaaactaaactgcccgtttagcttaataaaatgagcaggccac

SEQ ID NO: 24720 - DNA, 50 bp, unidentified
  source 1..50: mol_type = unassigned DNA; note = target_6e8d180
  misc_feature 1..23: note = LF
  misc_feature 24..25: note = Core
  misc_feature 26..50: note = RF
gcggaaatcaatgggtcctgaccctaggttccagactcattgatttacag

SEQ ID NO: 24721 - DNA, 50 bp, unidentified
  source 1..50: mol_type = unassigned DNA; note = target_6e9acd6
  misc_feature 1..23: note = LF
  misc_feature 24..25: note = Core
  misc_feature 26..50: note = RF
cttctatttgtcataattgacaccttgtataattaatttaccacatatgt

SEQ ID NO: 24722 - DNA, 50 bp, unidentified
  source 1..50: mol_type = unassigned DNA; note = target_6eaee76
  misc_feature 1..24: note = LF
  misc_feature 25: note = Core
  misc_feature 26..50: note = RF
tcatgcagcgtgctgtggcctatttttactccggcgctcataacatcagg

SEQ ID NO: 24723 - DNA, 50 bp, unidentified
  source 1..50: mol_type = unassigned DNA; note = target_6eb8afe
  misc_feature 1..22: note = LF
  misc_feature 23..25: note = Core
  misc_feature 26..50: note = RF
taggcaggcgtggggacttagcggacgttagaagctttaaaatttgattt

SEQ ID NO: 24724 - DNA, 50 bp, unidentified
  source 1..50: mol_type = unassigned DNA; note = target_6eba732
  misc_feature 1..23: note = LF
  misc_feature 24..25: note = Core
  misc_feature 26..50: note = RF
cgctgtggtcgggaccgcgacgactgattgcccgttgtggttgtgcccgc

SEQ ID NO: 24725 - DNA, 50 bp, unidentified
  source 1..50: mol_type = unassigned DNA; note = target_6ebbfbe
  misc_feature 1..22: note = LF
  misc_feature 23..25: note = Core
  misc_feature 26..50: note = RF
ttgcggttccggtcctccctatttttttttagccggacttgcgttgttga

SEQ ID NO: 24726 - DNA, 50 bp, unidentified
  source 1..50: mol_type = unassigned DNA; note = target_6ec8205
  misc_feature 1..23: note = LF
  misc_feature 24..25: note = Core
  misc_feature 26..50: note = RF
aagcgaacgcatggcctgcgctcaggatgacactactccagggcttccgg

SEQ ID NO: 24727 - DNA, 50 bp, unidentified
  source 1..50: mol_type = unassigned DNA; note = target_6ecb6c4
  misc_feature 1..23: note = LF
  misc_feature 24..25: note = Core
  misc_feature 26..50: note = RF
tcctgggcccagaacgtccgcatctgccgcagtccgcgcggtcatgccga

SEQ ID NO: 24728 - DNA, 50 bp, unidentified
  source 1..50: mol_type = unassigned DNA; note = target_6ecc40d
  misc_feature 1..22: note = LF
  misc_feature 23..25: note = Core
  misc_feature 26..50: note = RF
ctgcactctgcctcatacattacacctccattccaaacacatgattcacc

SEQ ID NO: 24729 - DNA, 50 bp, unidentified
  source 1..50: mol_type = unassigned DNA; note = target_6ed1f38
  misc_feature 1..21: note = LF
  misc_feature 22..25: note = Core
  misc_feature 26..50: note = RF
ctcaccggtgatcaaatcgccttcccggtgcccgggcacggcccggtcgg

SEQ ID NO: 24730 - DNA, 50 bp, unidentified
  source 1..50: mol_type = unassigned DNA; note = target_6ed271d
  misc_feature 1..23: note = LF
  misc_feature 24..25: note = Core
  misc_feature 26..50: note = RF
ccgacccgttggctccacccatcctacgcgctgccgtatcaaggattggc

SEQ ID NO: 24731 - DNA, 50 bp, unidentified; identical to SEQ ID NO: 23575
  source 1..50: mol_type = unassigned DNA; note = target_6ed46db
  misc_feature 1..23: note = LF
  misc_feature 24..25: note = Core
  misc_feature 26..50: note = RF

SEQ ID NO: 24732 - DNA, 50 bp, unidentified
  source 1..50: mol_type = unassigned DNA; note = target_6edde7e
  misc_feature 1..24: note = LF
  misc_feature 25: note = Core
  misc_feature 26..50: note = RF
ggctgatgtctaacgctcaagctgagctgcaagcgatcggctcaatatgc

SEQ ID NO: 24733 - DNA, 50 bp, unidentified
  source 1..50: mol_type = unassigned DNA; note = target_6ee7911
  misc_feature 1..21: note = LF
  misc_feature 22..25: note = Core
  misc_feature 26..50: note = RF
ttttacctcggcccaggtcgcctccttccatgcggtgacagcctgctcgt

SEQ ID NO: 24734 - DNA, 50 bp, unidentified
  source 1..50: mol_type = unassigned DNA; note = target_6efb8e4
  misc_feature 1..22: note = LF
  misc_feature 23..25: note = Core
  misc_feature 26..50: note = RF
tcggctattaccattaacgttttgcgactacaagtagttggcgtttggaa

SEQ ID NO: 24735 - DNA, 50 bp, unidentified
  source 1..50: mol_type = unassigned DNA; note = target_6f0520f
  misc_feature 1..24: note = LF
  misc_feature 25: note = Core
  misc_feature 26..50: note = RF
ccacatctccattcgcgccctaacgttcgcggtgaaatgcgcgtgcgagc

SEQ ID NO: 24736 - DNA, 50 bp, unidentified
  source 1..50: mol_type = unassigned DNA; note = target_6f0a019
  misc_feature 1..23: note = LF
  misc_feature 24..25: note = Core
  misc_feature 26..50: note = RF
ggggtgccgccaaaaccgtcacgctcacattctgaaggccaacccatgtc

SEQ ID NO: 24737 - DNA, 50 bp, unidentified
  source 1..50: mol_type = unassigned DNA; note = target_6f0f0c9
  misc_feature 1..22: note = LF
  misc_feature 23..25: note = Core
  misc_feature 26..50: note = RF
ctgatcgcaagacccacgcgaatgacccgaagcggactcacgctcggctg

SEQ ID NO: 24738 - DNA, 50 bp, unidentified
  source 1..50: mol_type = unassigned DNA; note = target_6f15fca
  misc_feature 1..24: note = LF
  misc_feature 25: note = Core
  misc_feature 26..50: note = RF
tccgacatcaagagcgcggtagccttttaatatggatttttcccgttcaa

SEQ ID NO: 24739 - DNA, 50 bp, unidentified
  source 1..50: mol_type = unassigned DNA; note = target_6f208fd
  misc_feature 1..22: note = LF
  misc_feature 23..25: note = Core
  misc_feature 26..50: note = RF
tgcctagcctgatccggccaatagcggacatccgattagcgtcagtgcat

SEQ ID NO: 24740 - DNA, 50 bp, unidentified
  source 1..50: mol_type = unassigned DNA; note = target_6f25595
  misc_feature 1..23: note = LF
  misc_feature 24..25: note = Core
  misc_feature 26..50: note = RF
cgattccatttagccctgaagcgctctaactgcgcaccagatcctcttcc

SEQ ID NO: 24741 - DNA, 50 bp, unidentified
  source 1..50: mol_type = unassigned DNA; note = target_6f2e2da
  misc_feature 1..22: note = LF
  misc_feature 23..25: note = Core
  misc_feature 26..50: note = RF
accataaatccatctatttctcctttctcttaatgacgttgatgtgattg

SEQ ID NO: 24742 - DNA, 50 bp, unidentified
  source 1..50: mol_type = unassigned DNA; note = target_6f2e833
  misc_feature 1..24: note = LF
  misc_feature 25: note = Core
  misc_feature 26..50: note = RF
gtggtggtggtctttccagtgcctctttctgattgaccaccgcaatgatg

SEQ ID NO: 24743 - DNA, 50 bp, unidentified
  source 1..50: mol_type = unassigned DNA; note = target_6f32523
  misc_feature 1..23: note = LF
  misc_feature 24..25: note = Core
  misc_feature 26..50: note = RF
cctgcgaggattcttctcaatgaagcgacaggaagtcgcgacccgccagc

SEQ ID NO: 24744 - DNA, 50 bp, unidentified
  source 1..50: mol_type = unassigned DNA; note = target_6f375b1
  misc_feature 1..24: note = LF
  misc_feature 25: note = Core
  misc_feature 26..50: note = RF
gagtggcaagtatcccggcaaaagcggacattgagtgtctgcggcacatg

SEQ ID NO: 24745 - DNA, 50 bp, unidentified
  source 1..50: mol_type = unassigned DNA; note = target_6f5304c
  misc_feature 1..23: note = LF
  misc_feature 24..25: note = Core
  misc_feature 26..50: note = RF
ggccgcgtcgatctcctcatccttgacgactggggacccgaaccgctcac

SEQ ID NO: 24746 - DNA, 50 bp, unidentified
  source 1..50: mol_type = unassigned DNA; note = target_6f59151
  misc_feature 1..24: note = LF
  misc_feature 25: note = Core
  misc_feature 26..50: note = RF
ttattgatttccctccaggactcaaaattcggtatactggtctccagtat

SEQ ID NO: 24747 - DNA, 50 bp, unidentified; identical to SEQ ID NO: 24075
  source 1..50: mol_type = unassigned DNA; note = target_6f5ad9a
  misc_feature 1..22: note = LF
  misc_feature 23..25: note = Core
  misc_feature 26..50: note = RF

SEQ ID NO: 24748 - DNA, 50 bp, unidentified
  source 1..50: mol_type = unassigned DNA; note = target_6f6072c
  misc_feature 1..21: note = LF
  misc_feature 22..25: note = Core
  misc_feature 26..50: note = RF
tcgggcgccgccgtggggtcgctcatgccgggtcctttccgaacaaggtg

SEQ ID NO: 24749 - DNA, 50 bp, unidentified
  source 1..50: mol_type = unassigned DNA; note = target_6f656a5
  misc_feature 1..23: note = LF
  misc_feature 24..25: note = Core
  misc_feature 26..50: note = RF
tggccggaagatgagaacagaaccttggaacgtaaaatagacccacgtct

SEQ ID NO: 24750 - DNA, 50 bp, unidentified
  source 1..50: mol_type = unassigned DNA; note = target_6f6589c
  misc_feature 1..22: note = LF
  misc_feature 23..25: note = Core
  misc_feature 26..50: note = RF
aataaattttcattcatatatttctccttttcctatagcagatccataac

SEQ ID NO: 24751 - DNA, 50 bp, unidentified
  source 1..50: mol_type = unassigned DNA; note = target_6f688e6
  misc_feature 1..22: note = LF
  misc_feature 23..25: note = Core
  misc_feature 26..50: note = RF
aatacttaatctattttgaaaaactgaaattttgaatcataataattcaa

SEQ ID NO: 24752 - DNA, 50 bp, unidentified
  source 1..50: mol_type = unassigned DNA; note = target_6f6c762
  misc_feature 1..22: note = LF
  misc_feature 23..25: note = Core
  misc_feature 26..50: note = RF
cgccgacgtggcttgcccgtttagaaatgtccggttttgaagttcagaaa

SEQ ID NO: 24753 - DNA, 50 bp, unidentified
  source 1..50: mol_type = unassigned DNA; note = target_6f7863a
  misc_feature 1..24: note = LF
  misc_feature 25: note = Core
  misc_feature 26..50: note = RF
ctgcgccagcttcgccgggaaactttttttaaaatcctcaatcgctccct

SEQ ID NO: 24754 - DNA, 50 bp, unidentified
  source 1..50: mol_type = unassigned DNA; note = target_6f7d07a
  misc_feature 1..23: note = LF
  misc_feature 24..25: note = Core
  misc_feature 26..50: note = RF
agtttctgtgaaaagctgaagggctctagccgcgttcgaaaaccgacctc

SEQ ID NO: 24755 - DNA, 50 bp, unidentified
  source 1..50: mol_type = unassigned DNA; note = target_6f965de
  misc_feature 1..23: note = LF
  misc_feature 24..25: note = Core
  misc_feature 26..50: note = RF
gcgtagggtacgcattgcgtaccctacaacattgcctaaggacggaattt

SEQ ID NO: 24756 - DNA, 50 bp, unidentified
  source 1..50: mol_type = unassigned DNA; note = target_6f96615
  misc_feature 1..23: note = LF
  misc_feature 24..25: note = Core
  misc_feature 26..50: note = RF
tcttcccaggcaaagacgcgttcgatggtcctgaagcgctcctcgaagat

SEQ ID NO: 24757 - DNA, 50 bp, unidentified
  source 1..50: mol_type = unassigned DNA; note = target_6f9cf35
  misc_feature 1..24: note = LF
  misc_feature 25: note = Core
  misc_feature 26..50: note = RF
caaagtgctattggttgcctttcttggtctggtgcatctcgggcggtccg

SEQ ID NO: 24758 - DNA, 50 bp, unidentified
  source 1..50: mol_type = unassigned DNA; note = target_6fa7fc1
  misc_feature 1..23: note = LF
  misc_feature 24..25: note = Core
  misc_feature 26..50: note = RF
aaggatttccactattatcggggctaaaaaaaacactgaaatagattcag

SEQ ID NO: 24759 - DNA, 50 bp, unidentified
  source 1..50: mol_type = unassigned DNA; note = target_6fac22c
  misc_feature 1..24: note = LF
  misc_feature 25: note = Core
  misc_feature 26..50: note = RF
aggaagaggttgaattatgtattgtgtccccagaattgttatcatgaaaa

SEQ ID NO: 24760 - DNA, 50 bp, unidentified
  source 1..50: mol_type = unassigned DNA; note = target_6fad233
  misc_feature 1..23: note = LF
  misc_feature 24..25: note = Core
  misc_feature 26..50: note = RF
agtgattacctagtcacttccctagcacctagtcactttaacctcttact

SEQ ID NO: 24761 - DNA, 50 bp, unidentified
  source 1..50: mol_type = unassigned DNA; note = target_6fb237c
  misc_feature 1..23: note = LF
  misc_feature 24..25: note = Core
  misc_feature 26..50: note = RF
ctactctttttataacatgtattacctcatttaactgattcatacagtta

SEQ ID NO: 24762 - DNA, 50 bp, unidentified
  source 1..50: mol_type = unassigned DNA; note = target_6fb2a32
  misc_feature 1..23: note = LF
  misc_feature 24..25: note = Core
  misc_feature 26..50: note = RF
aaataccggctgccatccacccatgggatcttttcccctctcatcattcc

SEQ ID NO: 24763 - DNA, 50 bp, unidentified
  source 1..50: mol_type = unassigned DNA; note = target_6fc1859
  misc_feature 1..23: note = LF
  misc_feature 24..25: note = Core
  misc_feature 26..50: note = RF
gggatgaaggagacctcaggccttgtggtgtggtgaaacgggggtggtaa

SEQ ID NO: 24764 - DNA, 50 bp, unidentified
  source 1..50: mol_type = unassigned DNA; note = target_6fc2501
  misc_feature 1..23: note = LF
  misc_feature 24..25: note = Core
  misc_feature 26..50: note = RF
tggaccctgtaggggcgagggcgtgtgaaaacgtcctaacgtgataggtt

SEQ ID NO: 24765 - DNA, 50 bp, unidentified
  source 1..50: mol_type = unassigned DNA; note = target_6fc4b8f
  misc_feature 1..22: note = LF
  misc_feature 23..25: note = Core
  misc_feature 26..50: note = RF
ttgaaccgagcgacaaattggaatttgattagatgttttacaggtgctgt

SEQ ID NO: 24766 - DNA, 50 bp, unidentified
  source 1..50: mol_type = unassigned DNA; note = target_6fc639e
  misc_feature 1..23: note = LF
  misc_feature 24..25: note = Core
  misc_feature 26..50: note = RF
cgggggacgtcacggctttcccccccccccgctgcgcggcgggctcaaaa

SEQ ID NO: 24767 - DNA, 50 bp, unidentified
  source 1..50: mol_type = unassigned DNA; note = target_6fdab1e
  misc_feature 1..24: note = LF
  misc_feature 25: note = Core
  misc_feature 26..50: note = RF
gtagggcgcgtaagacgtagggcaacaataagcgaaacgcattgcgccgt

SEQ ID NO: 24768 - DNA, 50 bp, unidentified
  source 1..50: mol_type = unassigned DNA; note = target_6fdbb6d
  misc_feature 1..23: note = LF
  misc_feature 24..25: note = Core
  misc_feature 26..50: note = RF
cttcgcgggggtgccctgcgatgctcggagcgccggccccgcggcgaaac

SEQ ID NO: 24769 - DNA, 50 bp, unidentified
  source 1..50: mol_type = unassigned DNA; note = target_6fde59e
  misc_feature 1..20: note = LF
  misc_feature 21..25: note = Core
  misc_feature 26..50: note = RF
ggcacaaagaatagaaaacgaggaggaaaactaagatgaatcattaccgt

SEQ ID NO: 24770 - DNA, 50 bp, unidentified
  source 1..50: mol_type = unassigned DNA; note = target_6fe18c5
  misc_feature 1..23: note = LF
  misc_feature 24..25: note = Core
  misc_feature 26..50: note = RF
taaaggtctggtcatggaaaatcctccttttatagatagtgttattcagt

SEQ ID NO: 24771 - DNA, 50 bp, unidentified
  source 1..50: mol_type = unassigned DNA; note = target_6feebac
  misc_feature 1..24: note = LF
  misc_feature 25: note = Core
  misc_feature 26..50: note = RF
cgctcgatgacatgggaccgcgggttggagatggccaagcacaaggcgtt

SEQ ID NO: 24772 - DNA, 50 bp, unidentified
  source 1..50: mol_type = unassigned DNA; note = target_6ff5fc4
  misc_feature 1..23: note = LF
  misc_feature 24..25: note = Core
  misc_feature 26..50: note = RF
ttggctaaaataagcgacgaaggagcaaaaaccaactattattttttgag

SEQ ID NO: 24773 - DNA, 50 bp, unidentified
  source 1..50: mol_type = unassigned DNA; note = target_7007676
  misc_feature 1..23: note = LF
  misc_feature 24..25: note = Core
  misc_feature 26..50: note = RF
aggccggaccctcaccccccgccctctcccgcaagcgggcgagggggccg

SEQ ID NO: 24774 - DNA, 50 bp, unidentified
  source 1..50: mol_type = unassigned DNA; note = target_7012020
  misc_feature 1..23: note = LF
  misc_feature 24..25: note = Core
  misc_feature 26..50: note = RF
actgcagtgcgttagtccgcttttggcactaagcggacatgcctagactc

SEQ ID NO: 24775 - DNA, 50 bp, unidentified
  source 1..50: mol_type = unassigned DNA; note = target_7013da5
  misc_feature 1..23: note = LF
  misc_feature 24..25: note = Core
  misc_feature 26..50: note = RF
ccgcttgagggcttgactttttatttgcaggcttccttacttccggtttt

SEQ ID NO: 24776 - DNA, 50 bp, unidentified
  source 1..50: mol_type = unassigned DNA; note = target_701b617
  misc_feature 1..24: note = LF
  misc_feature 25: note = Core
  misc_feature 26..50: note = RF
atcaaaagccatttgaattcccccttttaaacaaacatcttttcaagaca

SEQ ID NO: 24777 - DNA, 50 bp, unidentified
  source 1..50: mol_type = unassigned DNA; note = target_702afc3
  misc_feature 1..22: note = LF
  misc_feature 23..25: note = Core
  misc_feature 26..50: note = RF
gatagatttcttcatcattttcctttcttaatgcaataaaaaaacactta

SEQ ID NO: 24778 - DNA, 50 bp, unidentified
  source 1..50: mol_type = unassigned DNA; note = target_70385d0
  misc_feature 1..21: note = LF
  misc_feature 22..25: note = Core
  misc_feature 26..50: note = RF
caagggcgcccgcaagagcttctcctggaaggactaccgcgacctactgg

SEQ ID NO: 24779 - DNA, 50 bp, unidentified
  source 1..50: mol_type = unassigned DNA; note = target_7039632
  misc_feature 1..20: note = LF
  misc_feature 21..25: note = Core
  misc_feature 26..50: note = RF
ggagcccgggccgggtgactcacccccctcgcgccccggcgtgagggggg

SEQ ID NO: 24780 - DNA, 50 bp, unidentified
  source 1..50: mol_type = unassigned DNA; note = target_7043e11
  misc_feature 1..23: note = LF
  misc_feature 24..25: note = Core
  misc_feature 26..50: note = RF
taggcacagtgcaacatggtgggaggtggtttacccgccgatggcttaca

SEQ ID NO: 24781 - DNA, 50 bp, unidentified
  source 1..50: mol_type = unassigned DNA; note = target_7043e9e
  misc_feature 1..23: note = LF
  misc_feature 24..25: note = Core
  misc_feature 26..50: note = RF
cccgggctagctcagtctgacacctttatttaataaataggttaatgtta

SEQ ID NO: 24782 - DNA, 50 bp, unidentified
  source 1..50: mol_type = unassigned DNA; note = target_7046113
  misc_feature 1..23: note = LF
  misc_feature 24..25: note = Core
  misc_feature 26..50: note = RF
gcacgcggggagcacacacggccctatgcaccgactgcgccggaccgcgg

SEQ ID NO: 24783 - DNA, 50 bp, unidentified
  source 1..50: mol_type = unassigned DNA; note = target_704875d
  misc_feature 1..24: note = LF
  misc_feature 25: note = Core
  misc_feature 26..50: note = RF
gcaagggaaacaaagcggtcaactgcggtttctaggctgaaccttgccgg

SEQ ID NO: 24784 - DNA, 50 bp, unidentified
  source 1..50: mol_type = unassigned DNA; note = target_70527cc
  misc_feature 1..23: note = LF
  misc_feature 24..25: note = Core
  misc_feature 26..50: note = RF
gcattcgctgcgcttaatgcaccctacgcccgaacggcaacggtcggcga

SEQ ID NO: 24785 - DNA, 50 bp, unidentified
  source 1..50: mol_type = unassigned DNA; note = target_7057e54
  misc_feature 1..23: note = LF
  misc_feature 24..25: note = Core
  misc_feature 26..50: note = RF
cgctgacgcggtcccccttccccaaggggctactcgtatttcatgtaata

SEQ ID NO: 24786 - DNA, 50 bp, unidentified
  source 1..50: mol_type = unassigned DNA; note = target_705b3b9
  misc_feature 1..23: note = LF
  misc_feature 24..25: note = Core
  misc_feature 26..50: note = RF
tcaaaatacgcatatcagccctccttcacataccgttctccgtccacgct

SEQ ID NO: 24787 - DNA, 50 bp, unidentified
  source 1..50: mol_type = unassigned DNA; note = target_705d5df
  misc_feature 1..23: note = LF
  misc_feature 24..25: note = Core
  misc_feature 26..50: note = RF
gccctcaggctctcttgactatgctgtatcgctcgacggactgccgctgt

SEQ ID NO: 24788 - DNA, 50 bp, unidentified
  source 1..50: mol_type = unassigned DNA; note = target_706216d
  misc_feature 1..23: note = LF
  misc_feature 24..25: note = Core
  misc_feature 26..50: note = RF
caccggccgccgtcggctgcaagcgctggttagccggccttgcggaattc

SEQ ID NO: 24789 - DNA, 50 bp, unidentified
  source 1..50: mol_type = unassigned DNA; note = target_7070905
  misc_feature 1..23: note = LF
  misc_feature 24..25: note = Core
  misc_feature 26..50: note = RF
cccgcgtccaaaggacacggggctttttcgtcgggcggatttacacctgg

SEQ ID NO: 24790 - DNA, 50 bp, unidentified
  source 1..50: mol_type = unassigned DNA; note = target_7073cb4
  misc_feature 1..23: note = LF
  misc_feature 24..25: note = Core
  misc_feature 26..50: note = RF
gaatctgggggctgtccttgacctgccactgaactttcatccggctgcga

SEQ ID NO: 24791 - DNA, 50 bp, unidentified
  source 1..50: mol_type = unassigned DNA; note = target_707c465
  misc_feature 1..24: note = LF
  misc_feature 25: note = Core
  misc_feature 26..50: note = RF
attcatatttatattattcatatttatagtagtccctcataccgatacca

SEQ ID NO: 24792 - DNA, 50 bp, unidentified
  source 1..50: mol_type = unassigned DNA; note = target_707fc7e
  misc_feature 1..23: note = LF
  misc_feature 24..25: note = Core
  misc_feature 26..50: note = RF
gcccggccgtccgggcatgcggcctgggggccggtcccggacggcagcgg

SEQ ID NO: 24793 - DNA, 50 bp, unidentified
  source 1..50: mol_type = unassigned DNA; note = target_7080f4a
  misc_feature 1..21: note = LF
  misc_feature 22..25: note = Core
  misc_feature 26..50: note = RF
aacagacaaattgatttgacttttttgtacgcaagaataaaataatggcg

SEQ ID NO: 24794 - DNA, 50 bp, unidentified
  source 1..50: mol_type = unassigned DNA; note = target_7082a06
  misc_feature 1..23: note = LF
  misc_feature 24..25: note = Core
  misc_feature 26..50: note = RF
aagcttcgcgctaacccacatggatgtggggaatgcagaaagtacatgga

SEQ ID NO: 24795 - DNA, 50 bp, unidentified
  source 1..50: mol_type = unassigned DNA; note = target_708d3f6
  misc_feature 1..23: note = LF
  misc_feature 24..25: note = Core
  misc_feature 26..50: note = RF
tcgaaaacaacgcaaaaagtaaccgtccggtctgaccgctaccggttcca

SEQ ID NO: 24796 - DNA, 50 bp, unidentified
  source 1..50: mol_type = unassigned DNA; note = target_70956b0
  misc_feature 1..23: note = LF
  misc_feature 24..25: note = Core
  misc_feature 26..50: note = RF
gagacgcccgcaagagcgggctcctcaggatgaggactgccttggcagct

SEQ ID NO: 24797 - DNA, 50 bp, unidentified
  source 1..50: mol_type = unassigned DNA; note = target_7096a0e
  misc_feature 1..22: note = LF
  misc_feature 23..25: note = Core
  misc_feature 26..50: note = RF
gcaagattttctgaagatacccccccccgctttctttagcaagcaacagg

SEQ ID NO: 24798 - DNA, 50 bp, unidentified
  source 1..50: mol_type = unassigned DNA; note = target_70a0a48
  misc_feature 1..23: note = LF
  misc_feature 24..25: note = Core
  misc_feature 26..50: note = RF
cggacataatggggttgaaagcagacataatcgtcggaaaagcggacatt

SEQ ID NO: 24799 - DNA, 50 bp, unidentified
  source 1..50: mol_type = unassigned DNA; note = target_70a1396
  misc_feature 1..24: note = LF
  misc_feature 25: note = Core
  misc_feature 26..50: note = RF
cgtccagacctacaagctgttggttttccacgcggtttccgatcttcttc

SEQ ID NO: 24800 - DNA, 50 bp, unidentified
  source 1..50: mol_type = unassigned DNA; note = target_70a951d
  misc_feature 1..23: note = LF
  misc_feature 24..25: note = Core
  misc_feature 26..50: note = RF
cccatcgcggtcagcgcccgctcctacacaattaggtaattttgtaggag

SEQ ID NO: 24801 - DNA, 50 bp, unidentified
  source 1..50: mol_type = unassigned DNA; note = target_70b5582
  misc_feature 1..23: note = LF
  misc_feature 24..25: note = Core
  misc_feature 26..50: note = RF
gattttttcataaaattattttcctttcatttttttgaacaccgcccagt

SEQ ID NO: 24802 - DNA, 50 bp, unidentified
  source 1..50: mol_type = unassigned DNA; note = target_70b6d8c
  misc_feature 1..22: note = LF
  misc_feature 23..25: note = Core
  misc_feature 26..50: note = RF
attccatggaggtcagacattgagacgtaacgctttgctggtgctttgcg

SEQ ID NO: 24803 - DNA, 50 bp, unidentified
  source 1..50: mol_type = unassigned DNA; note = target_70bbf27
  misc_feature 1..24: note = LF
  misc_feature 25: note = Core
  misc_feature 26..50: note = RF
ttaaaccgctattttttatatacgttgttggcaactggtttttttcataa

SEQ ID NO: 24804 - DNA, 50 bp, unidentified
  source 1..50: mol_type = unassigned DNA; note = target_70c0ddd
  misc_feature 1..22: note = LF
  misc_feature 23..25: note = Core
  misc_feature 26..50: note = RF
tccccatcccatcgacataaagtctttccgagcgcagcgaggaatcttta

SEQ ID NO: 24805 - DNA, 50 bp, unidentified
  source 1..50: mol_type = unassigned DNA; note = target_70c1701
  misc_feature 1..23: note = LF
  misc_feature 24..25: note = Core
  misc_feature 26..50: note = RF
aagctggccttcagcgtaactcgttctgccccattccgagctacagccgc

SEQ ID NO: 24806 - DNA, 50 bp, unidentified
  source 1..50: mol_type = unassigned DNA; note = target_70d066f
  misc_feature 1..23: note = LF
  misc_feature 24..25: note = Core
  misc_feature 26..50: note = RF
aacgcggaaaaacttcactgggttggttttacggttttaagttacatttg

SEQ ID NO: 24807 - DNA, 50 bp, unidentified
  source 1..50: mol_type = unassigned DNA; note = target_70d67b2
  misc_feature 1..23: note = LF
  misc_feature 24..25: note = Core
  misc_feature 26..50: note = RF
tttatttaagaatcgcaccctatagttcaataacggcaatgaaaaaggac

SEQ ID NO: 24808 - DNA, 50 bp, unidentified
  source 1..50: mol_type = unassigned DNA; note = target_70d9ed7
  misc_feature 1..24: note = LF
  misc_feature 25: note = Core
  misc_feature 26..50: note = RF
ctttaatcagagttttctctgaagtgggggatatacaaggggctaggtgg

SEQ ID NO: 24809 - DNA, 50 bp, unidentified
  source 1..50: mol_type = unassigned DNA; note = target_70e1d9f
  misc_feature 1..23: note = LF
  misc_feature 24..25: note = Core
  misc_feature 26..50: note = RF
acacaacgccgaggcgcactcatctgccgccgaccgcgcgcgcaacaggt

SEQ ID NO: 24810 - DNA, 50 bp, unidentified
  source 1..50: mol_type = unassigned DNA; note = target_70e8a99
  misc_feature 1..23: note = LF
  misc_feature 24..25: note = Core
  misc_feature 26..50: note = RF
ccggtgccctctgtaagataaggagttgttatgtcccgttttgtcctcgg

SEQ ID NO: 24811 - DNA, 50 bp, unidentified
  source 1..50: mol_type = unassigned DNA; note = target_70f05e8
  misc_feature 1..23: note = LF
  misc_feature 24..25: note = Core
  misc_feature 26..50: note = RF
gaagtacaggccgcgccagggtcctttcagtttggtgatgtcccaggtcc

SEQ ID NO: 24812 - DNA, 50 bp, unidentified
  source 1..50: mol_type = unassigned DNA; note = target_70f090c
  misc_feature 1..23: note = LF
  misc_feature 24..25: note = Core
  misc_feature 26..50: note = RF
ttttaggtctcatgtgactcccccccccccccggagcagcctgaccgaag

SEQ ID NO: 24813 - DNA, 50 bp, unidentified
  source 1..50: mol_type = unassigned DNA; note = target_70f53b7
  misc_feature 1..23: note = LF
  misc_feature 24..25: note = Core
  misc_feature 26..50: note = RF
tacccgcggtcatcagcctgcccccccccgcgccctgagcctgagccgca

SEQ ID NO: 24814 - DNA, 50 bp, unidentified
  source 1..50: mol_type = unassigned DNA; note = target_70f94b9
  misc_feature 1..23: note = LF
  misc_feature 24..25: note = Core
  misc_feature 26..50: note = RF
tacctttgcggccataaaaccgtctcctttaattcgtgagccaacctgtt

SEQ ID NO: 24815 - DNA, 50 bp, unidentified
  source 1..50: mol_type = unassigned DNA; note = target_70fba03
  misc_feature 1..22: note = LF
  misc_feature 23..25: note = Core
  misc_feature 26..50: note = RF
tggtgcccatgatccccggcaaaaaagatgatgggcagcacgcggcgcgg

SEQ ID NO: 24816 - DNA, 50 bp, unidentified
  source 1..50: mol_type = unassigned DNA; note = target_7103cb0
  misc_feature 1..15: note = LF
  misc_feature 16..25: note = Core
  misc_feature 26..50: note = RF
ggggagaagtacgcgtcattgcgaggaggtacgacgaagcaatctttgga

SEQ ID NO: 24817 - DNA, 50 bp, unidentified
  source 1..50: mol_type = unassigned DNA; note = target_7106135
  misc_feature 1..23: note = LF
  misc_feature 24..25: note = Core
  misc_feature 26..50: note = RF
tggttttacggcttatacgtgctctccccggggagcggcctttgttgtca

SEQ ID NO: 24818 - DNA, 50 bp, unidentified
  source 1..50: mol_type = unassigned DNA; note = target_710f947
  misc_feature 1..22: note = LF
  misc_feature 23..25: note = Core
  misc_feature 26..50: note = RF
ctttttcaacatagggcatcacctcctgtgaaaaatcaggctctgtgcat

SEQ ID NO: 24819 - DNA, 50 bp, unidentified
  source 1..50: mol_type = unassigned DNA; note = target_7117dc2
  misc_feature 1..24: note = LF
  misc_feature 25: note = Core
  misc_feature 26..50: note = RF
gctggtgaacctggctgtcctaacgagagcagacgcagtgccggcacctc

SEQ ID NO: 24820 - DNA, 50 bp, unidentified
  source 1..50: mol_type = unassigned DNA; note = target_711b6f2
  misc_feature 1..23: note = LF
  misc_feature 24..25: note = Core
  misc_feature 26..50: note = RF
ttcatgtccgctttacccccgaaagcggacatatgatggaagggccctgg

SEQ ID NO: 24821 - DNA, 50 bp, unidentified
  source 1..50: mol_type = unassigned DNA; note = target_711f43d
  misc_feature 1..22: note = LF
  misc_feature 23..25: note = Core
  misc_feature 26..50: note = RF
atttcgcacaattaacctgcccgtttagcgcaatcttctcacaccatttt

SEQ ID NO: 24822 - DNA, 50 bp, unidentified
  source 1..50: mol_type = unassigned DNA; note = target_7126ded
  misc_feature 1..23: note = LF
  misc_feature 24..25: note = Core
  misc_feature 26..50: note = RF
cggttttctaaacctcaagtccgacgctgctagtttggagtacacagcca

SEQ ID NO: 24823 - DNA, 50 bp, unidentified
  source 1..50: mol_type = unassigned DNA; note = target_71302bd
  misc_feature 1..23: note = LF
  misc_feature 24..25: note = Core
  misc_feature 26..50: note = RF
tgcccgcgtcgcttcgctcaagactagtagtcacttctgatgccggcgtt

SEQ ID NO: 24824 - DNA, 50 bp, unidentified
  source 1..50: mol_type = unassigned DNA; note = target_7130489
  misc_feature 1..23: note = LF
  misc_feature 24..25: note = Core
  misc_feature 26..50: note = RF
cggcgggcagggcgtccaggacgctcaccgcgggtgctcctcgaagaacc

SEQ ID NO: 24825 - DNA, 50 bp, unidentified
  source 1..50: mol_type = unassigned DNA; note = target_71342bb
  misc_feature 1..24: note = LF
  misc_feature 25: note = Core
  misc_feature 26..50: note = RF
ttgagcgtctgctctcgccgagagcggtcattcgttcatgttccttgtta

SEQ ID NO: 24826 - DNA, 50 bp, unidentified
  source 1..50: mol_type = unassigned DNA; note = target_7138fb5
  misc_feature 1..23: note = LF
  misc_feature 24..25: note = Core
  misc_feature 26..50: note = RF
ccgcaatcgaccgaggctgtcgtctaatagcggcccattctagtagtgaa

SEQ ID NO: 24827 - DNA, 50 bp, unidentified
  source 1..50: mol_type = unassigned DNA; note = target_713ae99
  misc_feature 1..23: note = LF
  misc_feature 24..25: note = Core
  misc_feature 26..50: note = RF
aaatctctgaatcaggttccaacctttcgacaggctcgtgccgcctttga

SEQ ID NO: 24828 - DNA, 50 bp, unidentified
  source 1..50: mol_type = unassigned DNA; note = target_713bbac
  misc_feature 1..23: note = LF
  misc_feature 24..25: note = Core
  misc_feature 26..50: note = RF
ggcggctcacaaggaacaagatctgtccctgatcatcgccgcgagcccgg

SEQ ID NO: 24829 - DNA, 50 bp, unidentified
  source 1..50: mol_type = unassigned DNA; note = target_713c393
  misc_feature 1..21: note = LF
  misc_feature 22..25: note = Core
  misc_feature 26..50: note = RF
ttaggacacttaatcacattatcacctatataaattatatcaaaaaagac

SEQ ID NO: 24830 - DNA, 50 bp, unidentified
  source 1..50: mol_type = unassigned DNA; note = target_7143580
  misc_feature 1..22: note = LF
  misc_feature 23..25: note = Core
  misc_feature 26..50: note = RF
gccgttcttttgtttgagcgtcctagagctgcttgaccaggcgcagctct

SEQ ID NO: 24831 - DNA, 50 bp, unidentified
  source 1..50: mol_type = unassigned DNA; note = target_7148b97
  misc_feature 1..21: note = LF
  misc_feature 22..25: note = Core
  misc_feature 26..50: note = RF
gcgccgacccgttggctcgcaatgacgaggcagcgagacccaacaaaaag

SEQ ID NO: 24832 - DNA, 50 bp, unidentified
  source 1..50: mol_type = unassigned DNA; note = target_716b11c
  misc_feature 1..23: note = LF
  misc_feature 24..25: note = Core
  misc_feature 26..50: note = RF
ggtttcgcttcgctctacccatcctacaaggtgcacgaagcaacatcacc

SEQ ID NO: 24833 - DNA, 50 bp, unidentified
  source 1..50: mol_type = unassigned DNA; note = target_716bacf
  misc_feature 1..24: note = LF
  misc_feature 25: note = Core
  misc_feature 26..50: note = RF
cctcacgaattcaggtccgaagagcggtcgttcgcggcgctgccagttat

SEQ ID NO: 24834 - DNA, 50 bp, unidentified
  source 1..50: mol_type = unassigned DNA; note = target_716cd09
  misc_feature 1..22: note = LF
  misc_feature 23..25: note = Core
  misc_feature 26..50: note = RF
tacgagcgccgacttccgagtttgacccattaccggaccatcccattcta

SEQ ID NO: 24835 - DNA, 50 bp, unidentified
  source 1..50: mol_type = unassigned DNA; note = target_717a9cf
  misc_feature 1..24: note = LF
  misc_feature 25: note = Core
  misc_feature 26..50: note = RF
tataatttggagaagtcgcataacgcctcgcatcagcggcccagctctgc

SEQ ID NO: 24836 - DNA, 50 bp, unidentified
  source 1..50: mol_type = unassigned DNA; note = target_717b27e
  misc_feature 1..23: note = LF
  misc_feature 24..25: note = Core
  misc_feature 26..50: note = RF
atttaaatccataccttttcctcctctattttagtcttcttacatccaca

SEQ ID NO: 24837 - DNA, 50 bp, unidentified
  source 1..50: mol_type = unassigned DNA; note = target_717e67e
  misc_feature 1..23: note = LF
  misc_feature 24..25: note = Core
  misc_feature 26..50: note = RF
aaaatgtcacccgtctgccaattagagatgacactgcctcggggccgccg

SEQ ID NO: 24838 - DNA, 50 bp, unidentified
  source 1..50: mol_type = unassigned DNA; note = target_7184fb4
  misc_feature 1..23: note = LF
  misc_feature 24..25: note = Core
  misc_feature 26..50: note = RF
gaaaacttctgtctgccatttttcacctctctgatctcactctgaggtct

SEQ ID NO: 24839 - DNA, 50 bp, unidentified
  source 1..50: mol_type = unassigned DNA; note = target_71865a0
  misc_feature 1..22: note = LF
  misc_feature 23..25: note = Core
  misc_feature 26..50: note = RF
ggccggcaagaaggttctgctccttgtatcttggcttgcctcgcgcgcca

SEQ ID NO: 24840 - DNA, 50 bp, unidentified
  source 1..50: mol_type = unassigned DNA; note = target_7189b12
  misc_feature 1..21: note = LF
  misc_feature 22..25: note = Core
  misc_feature 26..50: note = RF
gattttttagcagtttctttgtcatttcgtgtcgttttgtcgtgcggtgg

SEQ ID NO: 24841 - DNA, 50 bp, unidentified
  source 1..50: mol_type = unassigned DNA; note = target_718ccbe
  misc_feature 1..23: note = LF
  misc_feature 24..25: note = Core
  misc_feature 26..50: note = RF
ttgtatgggtgacttcgagagcctcagccaccaatgctccggttaagtta

SEQ ID NO: 24842 - DNA, 50 bp, unidentified
  source 1..50: mol_type = unassigned DNA; note = target_71910ba
  misc_feature 1..23: note = LF
  misc_feature 24..25: note = Core
  misc_feature 26..50: note = RF
gctccaacccgttgtccgctatggtgtagaactttccgcacttggcattc

SEQ ID NO: 24843 - DNA, 50 bp, unidentified
  source 1..50: mol_type = unassigned DNA; note = target_7195ae1
  misc_feature 1..22: note = LF
  misc_feature 23..25: note = Core
  misc_feature 26..50: note = RF
ggaattctgtcatatgaagacttgaatcacagcttggctcctagccccat

SEQ ID NO: 24844 - DNA, 50 bp, unidentified
  source 1..50: mol_type = unassigned DNA; note = target_7198600
  misc_feature 1..22: note = LF
  misc_feature 23..25: note = Core
  misc_feature 26..50: note = RF
tccgcatctgtcgtccgaaagctgactttccggatcgtccgacaatcacg

SEQ ID NO: 24845 - DNA, 50 bp, unidentified
  source 1..50: mol_type = unassigned DNA; note = target_71a9e2b
  misc_feature 1..23: note = LF
  misc_feature 24..25: note = Core
  misc_feature 26..50: note = RF
aggcaatgacctgacggcttttttgtaccagcggatgagagactactgca

SEQ ID NO: 24846 - DNA, 50 bp, unidentified
  source 1..50: mol_type = unassigned DNA; note = target_71b036a
  misc_feature 1..24: note = LF
  misc_feature 25: note = Core
  misc_feature 26..50: note = RF
ttaacctccactacgctagctcgttatgtccaattgtgagttacgatacc

SEQ ID NO: 24847 - DNA, 50 bp, unidentified
  source 1..50: mol_type = unassigned DNA; note = target_71b3644
  misc_feature 1..23: note = LF
  misc_feature 24..25: note = Core
  misc_feature 26..50: note = RF
atgttggtgccgcactgctttggtagggtcggttcccaaacgactgccat

SEQ ID NO: 24848 - DNA, 50 bp, unidentified
  source 1..50: mol_type = unassigned DNA; note = target_71bece9
  misc_feature 1..23: note = LF
  misc_feature 24..25: note = Core
  misc_feature 26..50: note = RF
atcggcgggcccggcccttagcagacattcggtcgccgcgcctcagggat

SEQ ID NO: 24849 - DNA, 50 bp, unidentified
  source 1..50: mol_type = unassigned DNA; note = target_71bf443
  misc_feature 1..23: note = LF
  misc_feature 24..25: note = Core
  misc_feature 26..50: note = RF
caccgccatcgcaggcaagccagctcccacactgattaggcccaaccccc

SEQ ID NO: 24850 - DNA, 50 bp, unidentified
  source 1..50: mol_type = unassigned DNA; note = target_71c5ca8
  misc_feature 1..24: note = LF
  misc_feature 25: note = Core
  misc_feature 26..50: note = RF
aatcaacccttgcgcaaacggagccgtccacacatgacaataccccatgc

SEQ ID NO: 24851 - DNA, 50 bp, unidentified
  source 1..50: mol_type = unassigned DNA; note = target_71c8591
  misc_feature 1..23: note = LF
  misc_feature 24..25: note = Core
  misc_feature 26..50: note = RF
ctaattattttcattatttactccttattgattgataaaattaattttct

SEQ ID NO: 24852 - DNA, 50 bp, unidentified
  source 1..50: mol_type = unassigned DNA; note = target_71cb72b
  misc_feature 1..23: note = LF
  misc_feature 24..25: note = Core
  misc_feature 26..50: note = RF
tggcctcatcgccggcaagccggctcccacaaggtcagcggtgatccctg

SEQ ID NO: 24853 - DNA, 50 bp, unidentified
  source 1..50: mol_type = unassigned DNA; note = target_71cfc57
  misc_feature 1..22: note = LF
  misc_feature 23..25: note = Core
  misc_feature 26..50: note = RF
ctcttggactcccttcgactacgctcaggataaacttctcgcccaaaaac

SEQ ID NO: 24854 - DNA, 50 bp, unidentified
  source 1..50: mol_type = unassigned DNA; note = target_71d709a
  misc_feature 1..23: note = LF
  misc_feature 24..25: note = Core
  misc_feature 26..50: note = RF
acgctacgcgttgtttcacgctaatggattgtttgggttgaacgcaggcg

SEQ ID NO: 24855 - DNA, 50 bp, unidentified
  source 1..50: mol_type = unassigned DNA; note = target_71f30f7
  misc_feature 1..24: note = LF
  misc_feature 25: note = Core
  misc_feature 26..50: note = RF
gtccatttttaacttcgctatacacgcgtaggctatacggggggcgacgt

SEQ ID NO: 24856 - DNA, 50 bp, unidentified
  source 1..50: mol_type = unassigned DNA; note = target_71f3d6b
  misc_feature 1..24: note = LF
  misc_feature 25: note = Core
  misc_feature 26..50: note = RF
caaatgccctatgttttttataccttgttagcaatagtgatttttttata

SEQ ID NO: 24857 - DNA, 50 bp, unidentified
  source 1..50: mol_type = unassigned DNA; note = target_71f5f78
  misc_feature 1..23: note = LF
  misc_feature 24..25: note = Core
  misc_feature 26..50: note = RF
gcactaaccatctcctgaaagcagacatcgctattagagaggctgcaggc

SEQ ID NO: 24858 - DNA, 50 bp, unidentified
  source 1..50: mol_type = unassigned DNA; note = target_7202f46
  misc_feature 1..24: note = LF
  misc_feature 25: note = Core
  misc_feature 26..50: note = RF
tcgcacatttggcgttagtgacaaaaagggctcatcagctcccactccgc

SEQ ID NO: 24859 - DNA, 50 bp, unidentified
  source 1..50: mol_type = unassigned DNA; note = target_7206de5
  misc_feature 1..23: note = LF
  misc_feature 24..25: note = Core
  misc_feature 26..50: note = RF
taagccaaactccgagttttcacacagtctgggtcgtttttggaaggccg

SEQ ID NO: 24860 - DNA, 50 bp, unidentified
  source 1..50: mol_type = unassigned DNA; note = target_7216473
  misc_feature 1..23: note = LF
  misc_feature 24..25: note = Core
  misc_feature 26..50: note = RF
ccgacagtcgcgggcatggcccgctcccacggggagaatcgcaggctcag

SEQ ID NO: 24861 - DNA, 50 bp, unidentified
  source 1..50: mol_type = unassigned DNA; note = target_7217c38
  misc_feature 1..24: note = LF
  misc_feature 25: note = Core
  misc_feature 26..50: note = RF
ggcagatccgtgagctcaacgcggcagatccgggcgttcggagtggcccg

SEQ ID NO: 24862 - DNA, 50 bp, unidentified
  source 1..50: mol_type = unassigned DNA; note = target_72209e1
  misc_feature 1..24: note = LF
  misc_feature 25: note = Core
  misc_feature 26..50: note = RF
tcaagcccgccgcacacacatcggcatgaccgggtgctggcaagtggcat

SEQ ID NO: 24863 - DNA, 50 bp, unidentified
  source 1..50: mol_type = unassigned DNA; note = target_7224463
  misc_feature 1..23: note = LF
  misc_feature 24..25: note = Core
  misc_feature 26..50: note = RF
ctttaaacgcgctaaagcacgacctacaaacgcgtgaaaaaatattaggc

SEQ ID NO: 24864 - DNA, 50 bp, unidentified
  source 1..50: mol_type = unassigned DNA; note = target_7229d32
  misc_feature 1..24: note = LF
  misc_feature 25: note = Core
  misc_feature 26..50: note = RF
cggggtcgttcgcgaaaacccgactttgcgggaagtccaattgcatattt

SEQ ID NO: 24865 - DNA, 50 bp, unidentified
  source 1..50: mol_type = unassigned DNA; note = target_7233bbe
  misc_feature 1..21: note = LF
  misc_feature 22..25: note = Core
  misc_feature 26..50: note = RF
gcggcgtattgcggcatggtgtcctcctgtaccgatcatgatccgggctt

SEQ ID NO: 24866 - DNA, 50 bp, unidentified
  source 1..50: mol_type = unassigned DNA; note = target_7238b3f
  misc_feature 1..23: note = LF
  misc_feature 24..25: note = Core
  misc_feature 26..50: note = RF
agtgcgcggcccacggcgcggcgctcaccgcccctcctcctgctcccgct

SEQ ID NO: 24867 - DNA, 50 bp, unidentified
  source 1..50: mol_type = unassigned DNA; note = target_7241d12
  misc_feature 1..24: note = LF
  misc_feature 25: note = Core
  misc_feature 26..50: note = RF
gacattgcacttttaatttagaaatggaattaaagggcagtaaggtgcca

SEQ ID NO: 24868 - DNA, 50 bp, unidentified
  source 1..50: mol_type = unassigned DNA; note = target_724806a
  misc_feature 1..23: note = LF
  misc_feature 24..25: note = Core
  misc_feature 26..50: note = RF
ctgatgcgctacgcttatcaggcctacgccatctctgcaatatattgaat

SEQ ID NO: 24869 - DNA, 50 bp, unidentified
  source 1..50: mol_type = unassigned DNA; note = target_724ea7d
  misc_feature 1..24: note = LF
  misc_feature 25: note = Core
  misc_feature 26..50: note = RF
ttcattcactatttcttatacgcgtttttgccaaatgcaacgaaagagta

SEQ ID NO: 24870 - DNA, 50 bp, unidentified
  source 1..50: mol_type = unassigned DNA; note = target_7252828
  misc_feature 1..23: note = LF
  misc_feature 24..25: note = Core
  misc_feature 26..50: note = RF
gcgcgtgtccgccagggttggtttgacggacacccctggccctggctgcc

SEQ ID NO: 24871 - DNA, 50 bp, unidentified
  source 1..50: mol_type = unassigned DNA; note = target_72607c1
  misc_feature 1..23: note = LF
  misc_feature 24..25: note = Core
  misc_feature 26..50: note = RF
acgagatatcacaaagtcgtagcagcgattttacatcgcgacagaagcaa

SEQ ID NO: 24872 - DNA, 50 bp, unidentified
  source 1..50: mol_type = unassigned DNA; note = target_72652db
  misc_feature 1..21: note = LF
  misc_feature 22..25: note = Core
  misc_feature 26..50: note = RF
agccggcatcgacgaagattcatgagtacgcgccctaacaagccgggcgt

SEQ ID NO: 24873 - DNA, 50 bp, unidentified
  source 1..50: mol_type = unassigned DNA; note = target_72684df
  misc_feature 1..23: note = LF
  misc_feature 24..25: note = Core
  misc_feature 26..50: note = RF
cggcgtttctgttcgtgcaacccctcacccgacctccttcggaggccacc

SEQ ID NO: 24874 - DNA, 50 bp, unidentified
  source 1..50: mol_type = unassigned DNA; note = target_726a924
  misc_feature 1..23: note = LF
  misc_feature 24..25: note = Core
  misc_feature 26..50: note = RF
gcgatcaagccctgacatcgcgcctcattcggaactctatcgaagtgccc

SEQ ID NO: 24875 - DNA, 50 bp, unidentified
  source 1..50: mol_type = unassigned DNA; note = target_726c463
  misc_feature 1..23: note = LF
  misc_feature 24..25: note = Core
  misc_feature 26..50: note = RF
tgcaattctcataatattatctcctttcggtttttcgtgcatcggatgga

SEQ ID NO: 24876 - DNA, 50 bp, unidentified
  source 1..50: mol_type = unassigned DNA; note = target_7293972
  misc_feature 1..24: note = LF
  misc_feature 25: note = Core
  misc_feature 26..50: note = RF
cagtgagcgaagcgaacggtttgaacgcattgttatgtccctgcgcacga

SEQ ID NO: 24877 - DNA, 50 bp, unidentified
  source 1..50: mol_type = unassigned DNA; note = target_72972e0
  misc_feature 1..23: note = LF
  misc_feature 24..25: note = Core
  misc_feature 26..50: note = RF
aaaatagggcaaatgtcatttgcccaccaacaaactatttagaaattact

SEQ ID NO: 24878 - DNA, 50 bp, unidentified
  source 1..50: mol_type = unassigned DNA; note = target_729bb49
  misc_feature 1..24: note = LF
  misc_feature 25: note = Core
  misc_feature 26..50: note = RF
ggccatgctcccgaaaagtcgggttttgggcaagttcgccgtaatttccc

SEQ ID NO: 24879 - DNA, 50 bp, unidentified
  source 1..50: mol_type = unassigned DNA; note = target_729d451
  misc_feature 1..22: note = LF
  misc_feature 23..25: note = Core
  misc_feature 26..50: note = RF
aacagcctctagctagctccgttgaaaaaagagcggtgcgaagcatgaat

SEQ ID NO: 24880 - DNA, 50 bp, unidentified
  source 1..50: mol_type = unassigned DNA; note = target_729fc02
  misc_feature 1..23: note = LF
  misc_feature 24..25: note = Core
  misc_feature 26..50: note = RF
atccttgtacaaaaagagccgacctactttggccgatagcataaaaaaag

SEQ ID NO: 24881 - DNA, 50 bp, unidentified
  source 1..50: mol_type = unassigned DNA; note = target_72a56a5
  misc_feature 1..23: note = LF
  misc_feature 24..25: note = Core
  misc_feature 26..50: note = RF
atattgttccataactttctctcctttccgcacgatcgtactgcagatca

SEQ ID NO: 24882 - DNA, 50 bp, unidentified
  source 1..50: mol_type = unassigned DNA; note = target_72a7553
  misc_feature 1..23: note = LF
  misc_feature 24..25: note = Core
  misc_feature 26..50: note = RF
ctcagacccaggatgaaagaggttcactgacctttccgttgagttgtcgg

SEQ ID NO: 24883 - DNA, 50 bp, unidentified
  source 1..50: mol_type = unassigned DNA; note = target_72ae286
  misc_feature 1..24: note = LF
  misc_feature 25: note = Core
  misc_feature 26..50: note = RF
gataggggtcggcgcctgctccccccccccacgaccgctgtgcagacgtc

SEQ ID NO: 24884 - DNA, 50 bp, unidentified
  source 1..50: mol_type = unassigned DNA; note = target_72af692
  misc_feature 1..22: note = LF
  misc_feature 23..25: note = Core
  misc_feature 26..50: note = RF
gtcgtccagttctcctcgtcatactcgatttttggtatgaaactccccgg

SEQ ID NO: 24885 - DNA, 50 bp, unidentified
  source 1..50: mol_type = unassigned DNA; note = target_72b8221
  misc_feature 1..23: note = LF
  misc_feature 24..25: note = Core
  misc_feature 26..50: note = RF
gtctgggcgtctctgcacacagcctccacaggcacagcaagttggatctt

SEQ ID NO: 24886 - DNA, 50 bp, unidentified
  source 1..50: mol_type = unassigned DNA; note = target_72b8f29
  misc_feature 1..24: note = LF
  misc_feature 25: note = Core
  misc_feature 26..50: note = RF
cacctcgaggagttcgtgcgccagttcaagtgggcgctcaccagccggca

SEQ ID NO: 24887 - DNA, 50 bp, unidentified
  source 1..50: mol_type = unassigned DNA; note = target_72ba9c9
  misc_feature 1..23: note = LF
  misc_feature 24..25: note = Core
  misc_feature 26..50: note = RF
ttcccagtgtcaacgacacttctagctgagccgggcgtgacgccgcttcg

SEQ ID NO: 24888 - DNA, 50 bp, unidentified; identical to SEQ ID NO: 21190
  source 1..50: mol_type = unassigned DNA; note = target_72bec91
  misc_feature 1..22: note = LF
  misc_feature 23..25: note = Core
  misc_feature 26..50: note = RF

SEQ ID NO: 24889 - DNA, 50 bp, unidentified
  source 1..50: mol_type = unassigned DNA; note = target_72cb42b
  misc_feature 1..24: note = LF
  misc_feature 25: note = Core
  misc_feature 26..50: note = RF
tgttgaatcagatgccttctgatttagggtatctgcgagggccgcgagac

SEQ ID NO: 24890 - DNA, 50 bp, unidentified
  source 1..50: mol_type = unassigned DNA; note = target_72d086b
  misc_feature 1..24: note = LF
  misc_feature 25: note = Core
  misc_feature 26..50: note = RF
ttccgccgtaattaattatacacgttgttgccagtagttttttattcata

SEQ ID NO: 24891 - DNA, 50 bp, unidentified
  source 1..50: mol_type = unassigned DNA; note = target_72da1de
  misc_feature 1..23: note = LF
  misc_feature 24..25: note = Core
  misc_feature 26..50: note = RF
cccctggccctggccacccccacctgacccttcccgccatccggggttcc

SEQ ID NO: 24892 - DNA, 50 bp, unidentified
  source 1..50: mol_type = unassigned DNA; note = target_72f7853
  misc_feature 1..21: note = LF
  misc_feature 22..25: note = Core
  misc_feature 26..50: note = RF
tgactttgttcatgcctgcgcctcctttttcttgcgcgatggcagccgca

SEQ ID NO: 24893 - DNA, 50 bp, unidentified
  source 1..50: mol_type = unassigned DNA; note = target_72f8640
  misc_feature 1..24: note = LF
  misc_feature 25: note = Core
  misc_feature 26..50: note = RF
gtgctgggtggcctcggcgtctgacccgagcaccggcgggagatcttggt

SEQ ID NO: 24894 - DNA, 50 bp, unidentified
  source 1..50: mol_type = unassigned DNA; note = target_72feabe
  misc_feature 1..23: note = LF
  misc_feature 24..25: note = Core
  misc_feature 26..50: note = RF
gatatcgctacgctcaacccatcctacgcttgctacgcttgctgaactca

SEQ ID NO: 24895 - DNA, 50 bp, unidentified
  source 1..50: mol_type = unassigned DNA; note = target_72ffc9b
  misc_feature 1..23: note = LF
  misc_feature 24..25: note = Core
  misc_feature 26..50: note = RF
catttagaatatttcttagcttcctgaaatcctcaaaatgtcaatctttg

SEQ ID NO: 24896 - DNA, 50 bp, unidentified
  source 1..50: mol_type = unassigned DNA; note = target_7304084
  misc_feature 1..23: note = LF
  misc_feature 24..25: note = Core
  misc_feature 26..50: note = RF
ataaagcgccataggcacctaacgatgagcttcagcggccatccgctgat

SEQ ID NO: 24897 - DNA, 50 bp, unidentified
  source 1..50: mol_type = unassigned DNA; note = target_7304582
  misc_feature 1..24: note = LF
  misc_feature 25: note = Core
  misc_feature 26..50: note = RF
cggctcccaggcgttcctattcggcgttcggtagtccctgaccggtgtct

SEQ ID NO: 24898 - DNA, 50 bp, unidentified
  source 1..50: mol_type = unassigned DNA; note = target_7310e08
  misc_feature 1..23: note = LF
  misc_feature 24..25: note = Core
  misc_feature 26..50: note = RF
agcaaccatatttgatatagctcctctcatacccctgctgtccactcaga

SEQ ID NO: 24899 - DNA, 50 bp, unidentified
  source 1..50: mol_type = unassigned DNA; note = target_731277f
  misc_feature 1..24: note = LF
  misc_feature 25: note = Core
  misc_feature 26..50: note = RF
gcattattccacaatagcgcccgattgttgaatattggattgaagtaaaa

SEQ ID NO: 24900 - DNA, 50 bp, unidentified
  source 1..50: mol_type = unassigned DNA; note = target_73205a0
  misc_feature 1..23: note = LF
  misc_feature 24..25: note = Core
  misc_feature 26..50: note = RF
atggcacatcgcgaccccggctttgttgcgcaaagggggtgcagcccgga

SEQ ID NO: 24901 - DNA, 50 bp, unidentified
  source 1..50: mol_type = unassigned DNA; note = target_732e091
  misc_feature 1..24: note = LF
  misc_feature 25: note = Core
  misc_feature 26..50: note = RF
ctgtatttgttatcatagaatgaactccttgtttggccaattctttcatc

SEQ ID NO: 24902 - DNA, 50 bp, unidentified
  source 1..50: mol_type = unassigned DNA; note = target_732f200
  misc_feature 1..23: note = LF
  misc_feature 24..25: note = Core
  misc_feature 26..50: note = RF
ggtgaactgaagtgaaacaccccctgagtcgcttcgcgccttccccctct

SEQ ID NO: 24903 - DNA, 50 bp, unidentified; identical to SEQ ID NO: 22509
  source 1..50: mol_type = unassigned DNA; note = target_7331a7b
  misc_feature 1..23: note = LF
  misc_feature 24..25: note = Core
  misc_feature 26..50: note = RF

SEQ ID NO: 24904 - DNA, 50 bp, unidentified
  source 1..50: mol_type = unassigned DNA; note = target_7335199
  misc_feature 1..24: note = LF
  misc_feature 25: note = Core
  misc_feature 26..50: note = RF
ttgacaggaagaagccatatcaacgtttgagctgaggggctgtcaccggc

SEQ ID NO: 24905 - DNA, 50 bp, unidentified
  source 1..50: mol_type = unassigned DNA; note = target_7337fee
  misc_feature 1..22: note = LF
  misc_feature 23..25: note = Core
  misc_feature 26..50: note = RF
tttgccattaatacagtttgccctttaaagttggcacttcctttagctct

SEQ ID NO: 24906 - DNA, 50 bp, unidentified
  source 1..50: mol_type = unassigned DNA; note = target_733f1e6
  misc_feature 1..23: note = LF
  misc_feature 24..25: note = Core
  misc_feature 26..50: note = RF
tcaaattttttcatataacgcttgtctcctgttctatatggaaaaatcga

SEQ ID NO: 24907 - DNA, 50 bp, unidentified
  source 1..50: mol_type = unassigned DNA; note = target_7356aba
  misc_feature 1..23: note = LF
  misc_feature 24..25: note = Core
  misc_feature 26..50: note = RF
tttcagcacatccaaataatttttctctttcgttggaaatccaacggact

SEQ ID NO: 24908 - DNA, 50 bp, unidentified
  source 1..50: mol_type = unassigned DNA; note = target_7357500
  misc_feature 1..23: note = LF
  misc_feature 24..25: note = Core
  misc_feature 26..50: note = RF
ggcaaagcgaggcatggagtctcctgtctgtcttgtctgggtttgcatgc

SEQ ID NO: 24909 - DNA, 50 bp, unidentified
  source 1..50: mol_type = unassigned DNA; note = target_7357d32
  misc_feature 1..22: note = LF
  misc_feature 23..25: note = Core
  misc_feature 26..50: note = RF
ggcgtcgcactttgtccgcttatgacccaaagcggacatcaaacttaaat

SEQ ID NO: 24910 - DNA, 50 bp, unidentified
  source 1..50: mol_type = unassigned DNA; note = target_7359fc9
  misc_feature 1..23: note = LF
  misc_feature 24..25: note = Core
  misc_feature 26..50: note = RF
tcctgcattgcggcgtttacctcctttcgttggaatgattatggggactg

SEQ ID NO: 24911 - DNA, 50 bp, unidentified
  source 1..50: mol_type = unassigned DNA; note = target_7360296
  misc_feature 1..23: note = LF
  misc_feature 24..25: note = Core
  misc_feature 26..50: note = RF
ttgaatacttttttcatttattactcctaaaaattaaaataaataaatgg

SEQ ID NO: 24912 - DNA, 50 bp, unidentified
  source 1..50: mol_type = unassigned DNA; note = target_7362463
  misc_feature 1..23: note = LF
  misc_feature 24..25: note = Core
  misc_feature 26..50: note = RF
cttccttcccgactgaacacgctctcagcgcatcgtcacgaactcctctg

SEQ ID NO: 24913 - DNA, 50 bp, unidentified
  source 1..50: mol_type = unassigned DNA; note = target_7363ac2
  misc_feature 1..23: note = LF
  misc_feature 24..25: note = Core
  misc_feature 26..50: note = RF
tccacctgttgccatttcatcacctcctttcttcataaaaataaaaagtg

SEQ ID NO: 24914 - DNA, 50 bp, unidentified
  source 1..50: mol_type = unassigned DNA; note = target_7371882
  misc_feature 1..23: note = LF
  misc_feature 24..25: note = Core
  misc_feature 26..50: note = RF
cccgaccagcccgaccagcccgactagctcggtgcgttctgcccgactcg

SEQ ID NO: 24915 - DNA, 50 bp, unidentified
  source 1..50: mol_type = unassigned DNA; note = target_7374758
  misc_feature 1..23: note = LF
  misc_feature 24..25: note = Core
  misc_feature 26..50: note = RF
agtaactggttctcgactgtcgctcgatatgacagggatttggagtggta

SEQ ID NO: 24916 - DNA, 50 bp, unidentified
  source 1..50: mol_type = unassigned DNA; note = target_7375d05
  misc_feature 1..23: note = LF
  misc_feature 24..25: note = Core
  misc_feature 26..50: note = RF
aatgatggcggatctagcgtaagcgtccggtctgaccgcctttatgatgt

SEQ ID NO: 24917 - DNA, 50 bp, unidentified
  source 1..50: mol_type = unassigned DNA; note = target_7377086
  misc_feature 1..24: note = LF
  misc_feature 25: note = Core
  misc_feature 26..50: note = RF
acgcttcactgcgggccataccacttttttagggggctatatacctaact

SEQ ID NO: 24918 - DNA, 50 bp, unidentified
  source 1..50: mol_type = unassigned DNA; note = target_737732d
  misc_feature 1..22: note = LF
  misc_feature 23..25: note = Core
  misc_feature 26..50: note = RF
ccaaatatacttcatgtttctcctttctcctcataaaacaaatccacaat

SEQ ID NO: 24919 - DNA, 50 bp, unidentified
  source 1..50: mol_type = unassigned DNA; note = target_737f839
  misc_feature 1..23: note = LF
  misc_feature 24..25: note = Core
  misc_feature 26..50: note = RF
ctccctttcgcgggcaaggcccgctcccacaagagctccgtttcaggggc

SEQ ID NO: 24920 - DNA, 50 bp, unidentified
  source 1..50: mol_type = unassigned DNA; note = target_7384b98
  misc_feature 1..21: note = LF
  misc_feature 22..25: note = Core
  misc_feature 26..50: note = RF
ggtagactggagcagggctgtccccggaggagggcgggggctgcgctcga

SEQ ID NO: 24921 - DNA, 50 bp, unidentified
  source 1..50: mol_type = unassigned DNA; note = target_7386dbf
  misc_feature 1..24: note = LF
  misc_feature 25: note = Core
  misc_feature 26..50: note = RF
cgagcgtagccgccctcagcgcggcaatagcgtgcgaccacgctcctggc

SEQ ID NO: 24922 - DNA, 50 bp, unidentified
  source 1..50: mol_type = unassigned DNA; note = target_7388778
  misc_feature 1..23: note = LF
  misc_feature 24..25: note = Core
  misc_feature 26..50: note = RF
cgaccgcgatgacgcccctggattgcttcgctccgctcgcaatgacggaa

SEQ ID NO: 24923 - DNA, 50 bp, unidentified
  source 1..50: mol_type = unassigned DNA; note = target_7388ef9
  misc_feature 1..23: note = LF
  misc_feature 24..25: note = Core
  misc_feature 26..50: note = RF
ccacaggtccaatgaaactttaatgacactgccatgagcccaactgcccc

SEQ ID NO: 24924 - DNA, 50 bp, unidentified
  source 1..50: mol_type = unassigned DNA; note = target_7390de4
  misc_feature 1..24: note = LF
  misc_feature 25: note = Core
  misc_feature 26..50: note = RF
aaaaagagcttgcatgaaacggggcatccacacatggagcctccggcaaa

SEQ ID NO: 24925 - DNA, 50 bp, unidentified
  source 1..50: mol_type = unassigned DNA; note = target_73934a5
  misc_feature 1..21: note = LF
  misc_feature 22..25: note = Core
  misc_feature 26..50: note = RF
actataacttttttcataatatcacatccaaactaaaataattatatcac

SEQ ID NO: 24926 - DNA, 50 bp, unidentified
  source 1..50: mol_type = unassigned DNA; note = target_7393610
  misc_feature 1..22: note = LF
  misc_feature 23..25: note = Core
  misc_feature 26..50: note = RF
cgtgacgaacgccctcgccttgaacggagtcgcaaaaagtcactggaatt

SEQ ID NO: 24927 - DNA, 50 bp, unidentified
  source 1..50: mol_type = unassigned DNA; note = target_73a85ea
  misc_feature 1..23: note = LF
  misc_feature 24..25: note = Core
  misc_feature 26..50: note = RF
atatcttctctctttgggagcgtctactttgccggcgacaaaccagaagc

SEQ ID NO: 24928 - DNA, 50 bp, unidentified
  source 1..50: mol_type = unassigned DNA; note = target_73aa53d
  misc_feature 1..23: note = LF
  misc_feature 24..25: note = Core
  misc_feature 26..50: note = RF
gaccggttctgtggtcatggcattccccctttccggagtatgcggggttg

SEQ ID NO: 24929 - DNA, 50 bp, unidentified
  source 1..50: mol_type = unassigned DNA; note = target_73ab88e
  misc_feature 1..23: note = LF
  misc_feature 24..25: note = Core
  misc_feature 26..50: note = RF
agaaaaactcatctggctttgcgtaggagccggcttgccggcgatgctct

SEQ ID NO: 24930 - DNA, 50 bp, unidentified
  source 1..50: mol_type = unassigned DNA; note = target_73b05d3
  misc_feature 1..23: note = LF
  misc_feature 24..25: note = Core
  misc_feature 26..50: note = RF
tagctgtaatattcatttatgatctcctttcatttttggtcaaataaacc

SEQ ID NO: 24931 - DNA, 50 bp, unidentified
  source 1..50: mol_type = unassigned DNA; note = target_73b0e7a
  misc_feature 1..24: note = LF
  misc_feature 25: note = Core
  misc_feature 26..50: note = RF
ggcgaggccggcctgctcgcctgaccgacggcaacgatctcgtcacggag

SEQ ID NO: 24932 - DNA, 50 bp, unidentified
  source 1..50: mol_type = unassigned DNA; note = target_73b1cb8
  misc_feature 1..22: note = LF
  misc_feature 23..25: note = Core
  misc_feature 26..50: note = RF
atcgatggctgccgtcatggattcctttcgtcgagcacccagctcgctgc

SEQ ID NO: 24933 - DNA, 50 bp, unidentified
  source 1..50: mol_type = unassigned DNA; note = target_73bac5a
  misc_feature 1..24: note = LF
  misc_feature 25: note = Core
  misc_feature 26..50: note = RF
ttgcactcaatatcaatgccgatgtgtttcacggatgggcggtgcaggac

SEQ ID NO: 24934 - DNA, 50 bp, unidentified
  source 1..50: mol_type = unassigned DNA; note = target_73bb2d4
  misc_feature 1..24: note = LF
  misc_feature 25: note = Core
  misc_feature 26..50: note = RF
gcggtcactgaatcctcttagcgctgcgcgaccaggacgtctttgcgcag

SEQ ID NO: 24935 - DNA, 50 bp, unidentified
  source 1..50: mol_type = unassigned DNA; note = target_73bc40b
  misc_feature 1..23: note = LF
  misc_feature 24..25: note = Core
  misc_feature 26..50: note = RF
atttatttcgtatatgagataggaggtgattcaaatggtagagaagcgtg

SEQ ID NO: 24936 - DNA, 50 bp, unidentified
  source 1..50: mol_type = unassigned DNA; note = target_73c5f38
  misc_feature 1..24: note = LF
  misc_feature 25: note = Core
  misc_feature 26..50: note = RF
tgtgagcgcgcttgctgacacagctgtagtctggtgcgcacagcggtaca

SEQ ID NO: 24937 - DNA, 50 bp, unidentified
  source 1..50: mol_type = unassigned DNA; note = target_73c7700
  misc_feature 1..23: note = LF
  misc_feature 24..25: note = Core
  misc_feature 26..50: note = RF
aaattatattttatcagattctcctaaattaattatactataaaatcact

SEQ ID NO: 24938 - DNA, 50 bp, unidentified
  source 1..50: mol_type = unassigned DNA; note = target_73c9792
  misc_feature 1..23: note = LF
  misc_feature 24..25: note = Core
  misc_feature 26..50: note = RF
ccgcatcctgaatcgcactcagccccccgcccaccctgtgatcgcgccgc

SEQ ID NO: 24939 - DNA, 50 bp, unidentified
  source 1..50: mol_type = unassigned DNA; note = target_73ca8ca
  misc_feature 1..24: note = LF
  misc_feature 25: note = Core
  misc_feature 26..50: note = RF
actggcagcaattatttatacacgttgttatgcacaggtttttttatttt

SEQ ID NO: 24940 - DNA, 50 bp, unidentified
  source 1..50: mol_type = unassigned DNA; note = target_73cadef
  misc_feature 1..23: note = LF
  misc_feature 24..25: note = Core
  misc_feature 26..50: note = RF
ctgcaactgctcaggaccgttgttggcactcaagagaaggcgtttgtacg

SEQ ID NO: 24941 - DNA, 50 bp, unidentified
  source 1..50: mol_type = unassigned DNA; note = target_73d086b
  misc_feature 1..23: note = LF
  misc_feature 24..25: note = Core
  misc_feature 26..50: note = RF
cgccgcttggccccctccctaccctctcccaagaggcgagagtgaaacag

SEQ ID NO: 24942 - DNA, 50 bp, unidentified
  source 1..50: mol_type = unassigned DNA; note = target_73ecbc1
  misc_feature 1..23: note = LF
  misc_feature 24..25: note = Core
  misc_feature 26..50: note = RF
gtttcataagcgttgtctcctatcttaaaaatagttgggccagggtcgct

SEQ ID NO: 24943 - DNA, 50 bp, unidentified
  source 1..50: mol_type = unassigned DNA; note = target_73ef0b3
  misc_feature 1..23: note = LF
  misc_feature 24..25: note = Core
  misc_feature 26..50: note = RF
ataaaatgttgaagtttgaggttagtcggtgcagcccagattatgaaatg

SEQ ID NO: 24944 - DNA, 50 bp, unidentified
  source 1..50: mol_type = unassigned DNA; note = target_73fc51d
  misc_feature 1..23: note = LF
  misc_feature 24..25: note = Core
  misc_feature 26..50: note = RF
accccgcggggcgggtcttggcttgtgataaccgtgcttcccgcaagcca

SEQ ID NO: 24945 - DNA, 50 bp, unidentified
  source 1..50: mol_type = unassigned DNA; note = target_73ff858
  misc_feature 1..23: note = LF
  misc_feature 24..25: note = Core
  misc_feature 26..50: note = RF
ataaaatgtttgttcactatgccctcctactgtattatacgaaaaaattt

SEQ ID NO: 24946 - DNA, 50 bp, unidentified
  source 1..50: mol_type = unassigned DNA; note = target_74173c9
  misc_feature 1..21: note = LF
  misc_feature 22..25: note = Core
  misc_feature 26..50: note = RF
caggcgaggccgaacaggccgctcatgccgccgcctccaccagttcgccg

SEQ ID NO: 24947 - DNA, 50 bp, unidentified
  source 1..50: mol_type = unassigned DNA; note = target_741974f
  misc_feature 1..23: note = LF
  misc_feature 24..25: note = Core
  misc_feature 26..50: note = RF
gtgccctgaatgatggcagcttctggcaccaactccccatcaacgtggtg

SEQ ID NO: 24948 - DNA, 50 bp, unidentified
  source 1..50: mol_type = unassigned DNA; note = target_741de28
  misc_feature 1..23: note = LF
  misc_feature 24..25: note = Core
  misc_feature 26..50: note = RF
ggatcgataaaacgtgatccaccctacaagagcaccctgacgactcagcc

SEQ ID NO: 24949 - DNA, 50 bp, unidentified
  source 1..50: mol_type = unassigned DNA; note = target_7423083
  misc_feature 1..23: note = LF
  misc_feature 24..25: note = Core
  misc_feature 26..50: note = RF
gccgcgtgcaggttcttggggtcctttctgaggatctcctcgtacgcgcg

SEQ ID NO: 24950 - DNA, 50 bp, unidentified
  source 1..50: mol_type = unassigned DNA; note = target_74244ad
  misc_feature 1..23: note = LF
  misc_feature 24..25: note = Core
  misc_feature 26..50: note = RF
tgacgcgccactctcatcctgattgtcgcgctatagtctgaaggacggtt

SEQ ID NO: 24951 - DNA, 50 bp, unidentified
  source 1..50: mol_type = unassigned DNA; note = target_74277e7
  misc_feature 1..24: note = LF
  misc_feature 25: note = Core
  misc_feature 26..50: note = RF
gggcgccccaaaaacaaggtgacgcgagggcagcccggcaaagccgggcc

SEQ ID NO: 24952 - DNA, 50 bp, unidentified
  source 1..50: mol_type = unassigned DNA; note = target_7427f77
  misc_feature 1..23: note = LF
  misc_feature 24..25: note = Core
  misc_feature 26..50: note = RF
gaaacagttccactaacgggtgctttagcaaaatctggccatcaattcga

SEQ ID NO: 24953 - DNA, 50 bp, unidentified
  source 1..50: mol_type = unassigned DNA; note = target_74299f2
  misc_feature 1..23: note = LF
  misc_feature 24..25: note = Core
  misc_feature 26..50: note = RF
tttgtgaattcgagagatttctccttaaatttttataatattcgtaagcg

SEQ ID NO: 24954 - DNA, 50 bp, unidentified
  source 1..50: mol_type = unassigned DNA; note = target_7432895
  misc_feature 1..22: note = LF
  misc_feature 23..25: note = Core
  misc_feature 26..50: note = RF
cttcctttttcccgctgttcgaagtctcagacttcgaattactatgcctg

SEQ ID NO: 24955 - DNA, 50 bp, unidentified
  source 1..50: mol_type = unassigned DNA; note = target_7437d39
  misc_feature 1..23: note = LF
  misc_feature 24..25: note = Core
  misc_feature 26..50: note = RF
cacgacgcccccacctgaaacacagttgctacttaagagttgatggagtg

SEQ ID NO: 24956 - DNA, 50 bp, unidentified
  source 1..50: mol_type = unassigned DNA; note = target_744b582
  misc_feature 1..23: note = LF
  misc_feature 24..25: note = Core
  misc_feature 26..50: note = RF
gctcctgtagcgaacatccgcttctgccgccgagtgttcgattgacctgc

SEQ ID NO: 24957 - DNA, 50 bp, unidentified
  source 1..50: mol_type = unassigned DNA; note = target_7450fe5
  misc_feature 1..22: note = LF
  misc_feature 23..25: note = Core
  misc_feature 26..50: note = RF
ccaacattctttttttcatataaatccctcctaattgtcacaatagtaaa

SEQ ID NO: 24958 - DNA, 50 bp, unidentified
  source 1..50: mol_type = unassigned DNA; note = target_746dd8a
  misc_feature 1..21: note = LF
  misc_feature 22..25: note = Core
  misc_feature 26..50: note = RF
cagcccgatcaggaggtcgccttcccagtgcccaggaaccgcgcggtcct

SEQ ID NO: 24959 - DNA, 50 bp, unidentified
  source 1..50: mol_type = unassigned DNA; note = target_7474f6d
  misc_feature 1..23: note = LF
  misc_feature 24..25: note = Core
  misc_feature 26..50: note = RF
tatggacgcgccgcagccggtggctacaacttcgatgctgtagcgtgcgc

SEQ ID NO: 24960 - DNA, 50 bp, unidentified
  source 1..50: mol_type = unassigned DNA; note = target_747c5ec
  misc_feature 1..24: note = LF
  misc_feature 25: note = Core
  misc_feature 26..50: note = RF
tcgttcgtgagactgtcccgaaagcgggccactagcggttgatctcaatt

SEQ ID NO: 24961 - DNA, 50 bp, unidentified
  source 1..50: mol_type = unassigned DNA; note = target_748a397
  misc_feature 1..23: note = LF
  misc_feature 24..25: note = Core
  misc_feature 26..50: note = RF
ggcgcccacggtccggcgatcattggcacttggacgaggtcttcatcaag

SEQ ID NO: 24962 - DNA, 50 bp, unidentified
  source 1..50: mol_type = unassigned DNA; note = target_748ecf8
  misc_feature 1..23: note = LF
  misc_feature 24..25: note = Core
  misc_feature 26..50: note = RF
tttggtcggctacggttatgcccctagccgcgctctagcatggctagcgg

SEQ ID NO: 24963 - DNA, 50 bp, unidentified
  source 1..50: mol_type = unassigned DNA; note = target_749937c
  misc_feature 1..23: note = LF
  misc_feature 24..25: note = Core
  misc_feature 26..50: note = RF
acacccgggcgggaaggggagtttgaggggagggggaatcgggcctcccc

SEQ ID NO: 24964 - DNA, 50 bp, unidentified
  source 1..50: mol_type = unassigned DNA; note = target_74a55bb
  misc_feature 1..23: note = LF
  misc_feature 24..25: note = Core
  misc_feature 26..50: note = RF
cggcggatggcgattcgctgacccgccctacgtcccgccgccaaccgatg

SEQ ID NO: 24965 - DNA, 50 bp, unidentified
  source 1..50: mol_type = unassigned DNA; note = target_74a7496
  misc_feature 1..24: note = LF
  misc_feature 25: note = Core
  misc_feature 26..50: note = RF
gcccctgtgcggggcggcacttacttctttgcggcggcgtaactattcag

SEQ ID NO: 24966 - DNA, 50 bp, unidentified
  source 1..50: mol_type = unassigned DNA; note = target_74ac94c
  misc_feature 1..23: note = LF
  misc_feature 24..25: note = Core
  misc_feature 26..50: note = RF
aataattattcccttgactttgcttagctggtctacaaattgcaagtcaa

SEQ ID NO: 24967 - DNA, 50 bp, unidentified
  source 1..50: mol_type = unassigned DNA; note = target_74af2ef
  misc_feature 1..23: note = LF
  misc_feature 24..25: note = Core
  misc_feature 26..50: note = RF
cacgacacgggtgggcacagtcgtctcctgagctaggggaagaaaagggg

SEQ ID NO: 24968 - DNA, 50 bp, unidentified
  source 1..50: mol_type = unassigned DNA; note = target_74b03ba
  misc_feature 1..23: note = LF
  misc_feature 24..25: note = Core
  misc_feature 26..50: note = RF
cgactccgatcaaacatccggccctacggctacgcgggggtcgtcgcacg

SEQ ID NO: 24969 - DNA, 50 bp, unidentified
  source 1..50: mol_type = unassigned DNA; note = target_74b305d
  misc_feature 1..24: note = LF
  misc_feature 25: note = Core
  misc_feature 26..50: note = RF
ctaacccgcgccctgcgcgcctgacccccaccccccaccccccaccccac

SEQ ID NO: 24970 - DNA, 50 bp, unidentified
  source 1..50: mol_type = unassigned DNA; note = target_74b3520
  misc_feature 1..21: note = LF
  misc_feature 22..25: note = Core
  misc_feature 26..50: note = RF
cggatcgcctcacccgcaccgctcatccgcccacccccttcaacgggatc

SEQ ID NO: 24971 - DNA, 50 bp, unidentified
  source 1..50: mol_type = unassigned DNA; note = target_74ba17a
  misc_feature 1..24: note = LF
  misc_feature 25: note = Core
  misc_feature 26..50: note = RF
gaagctggaagccgggccgtaggcgtcagcgatgtggaaggctggcgaat

SEQ ID NO: 24972 - DNA, 50 bp, unidentified
  source 1..50: mol_type = unassigned DNA; note = target_74bf55e
  misc_feature 1..23: note = LF
  misc_feature 24..25: note = Core
  misc_feature 26..50: note = RF
gaatttggcgttcgctcgctgctagcccgtcttattcatttattcatgac

SEQ ID NO: 24973 - DNA, 50 bp, unidentified
  source 1..50: mol_type = unassigned DNA; note = target_74c277b
  misc_feature 1..24: note = LF
  misc_feature 25: note = Core
  misc_feature 26..50: note = RF
cgctcataaaagggcccccttccccccccggggggaggttgcggagagac

SEQ ID NO: 24974 - DNA, 50 bp, unidentified
  source 1..50: mol_type = unassigned DNA; note = target_74c43db
  misc_feature 1..23: note = LF
  misc_feature 24..25: note = Core
  misc_feature 26..50: note = RF
tactcttttcatattgagttctcctttttagagtaaatgttaaaaattga

SEQ ID NO: 24975 - DNA, 50 bp, unidentified
  source 1..50: mol_type = unassigned DNA; note = target_74ce447
  misc_feature 1..23: note = LF
  misc_feature 24..25: note = Core
  misc_feature 26..50: note = RF
accaggggacagttcattcccggagcggttcattgtcggccgcgactgag

SEQ ID NO: 24976 - DNA, 50 bp, unidentified
  source 1..50: mol_type = unassigned DNA; note = target_74d101d
  misc_feature 1..23: note = LF
  misc_feature 24..25: note = Core
  misc_feature 26..50: note = RF
gacaggctccggaagaagggagcctgtcccctttcttttccccgcgccac

SEQ ID NO: 24977 - DNA, 50 bp, unidentified
  source 1..50: mol_type = unassigned DNA; note = target_74d4e8e
  misc_feature 1..22: note = LF
  misc_feature 23..25: note = Core
  misc_feature 26..50: note = RF
tacctgcgggcgaggttgcctccccccggcgccggcggcttcgacgtcgg

SEQ ID NO: 24978 - DNA, 50 bp, unidentified
  source 1..50: mol_type = unassigned DNA; note = target_74d80cf
  misc_feature 1..24: note = LF
  misc_feature 25: note = Core
  misc_feature 26..50: note = RF
tcaatttataaaaattatcactggtgtcccgttaacttaaaatatgtcgt

SEQ ID NO: 24979 - DNA, 50 bp, unidentified
  source 1..50: mol_type = unassigned DNA; note = target_74dd3aa
  misc_feature 1..22: note = LF
  misc_feature 23..25: note = Core
  misc_feature 26..50: note = RF
cactcggcccggaccttgccgttgaaggactcgatgaagctgttgtcggt

SEQ ID NO: 24980 - DNA, 50 bp, unidentified
  source 1..50: mol_type = unassigned DNA; note = target_74dfb36
  misc_feature 1..24: note = LF
  misc_feature 25: note = Core
  misc_feature 26..50: note = RF
gggacggaaacgcactggttgcggcagatcaggaaggacgcctcgaacga

SEQ ID NO: 24981 - DNA, 50 bp, unidentified
  source 1..50: mol_type = unassigned DNA; note = target_74e4c09
  misc_feature 1..24: note = LF
  misc_feature 25: note = Core
  misc_feature 26..50: note = RF
tttagagtattattcctaaggcgctaacgcccccgttaacgagatagaac

SEQ ID NO: 24982 - DNA, 50 bp, unidentified
  source 1..50: mol_type = unassigned DNA; note = target_74f6154
  misc_feature 1..23: note = LF
  misc_feature 24..25: note = Core
  misc_feature 26..50: note = RF
cggcgggatacgcttcgctatcccgctctacggaggtacgcggccgtacc

SEQ ID NO: 24983 - DNA, 50 bp, unidentified
  source 1..50: mol_type = unassigned DNA; note = target_74fb065
  misc_feature 1..23: note = LF
  misc_feature 24..25: note = Core
  misc_feature 26..50: note = RF
tacgctcacctcgaagatgatcgctcccacgctccagcgtgggagcgcat

SEQ ID NO: 24984 - DNA, 50 bp, unidentified
  source 1..50: mol_type = unassigned DNA; note = target_74fbc22
  misc_feature 1..24: note = LF
  misc_feature 25: note = Core
  misc_feature 26..50: note = RF
aaaacaagatacagagtcataggatgtgccgacgataggaggagcatcat

SEQ ID NO: 24985 - DNA, 50 bp, unidentified
  source 1..50: mol_type = unassigned DNA; note = target_74fefbf
  misc_feature 1..23: note = LF
  misc_feature 24..25: note = Core
  misc_feature 26..50: note = RF
tctaccggcccggcgtctgagccctagctgccggtttgggcgtgggccgc

SEQ ID NO: 24986 - DNA, 50 bp, unidentified
  source 1..50: mol_type = unassigned DNA; note = target_75004d6
  misc_feature 1..24: note = LF
  misc_feature 25: note = Core
  misc_feature 26..50: note = RF
aatcgtcgttcgccgcagatctactgtgggagctggcttgccagcgatgg

SEQ ID NO: 24987 - DNA, 50 bp, unidentified
  source 1..50: mol_type = unassigned DNA; note = target_750377e
  misc_feature 1..23: note = LF
  misc_feature 24..25: note = Core
  misc_feature 26..50: note = RF
tggtatcgcgctctcaccttgattgtcgcgcggcaaatgtgggcaaatgc

SEQ ID NO: 24988 - DNA, 50 bp, unidentified
  source 1..50: mol_type = unassigned DNA; note = target_750bdba
  misc_feature 1..23: note = LF
  misc_feature 24..25: note = Core
  misc_feature 26..50: note = RF
tgcaatcgcgactgaagtcgctcctacactggggtggtggcacctcgtta

SEQ ID NO: 24989 - DNA, 50 bp, unidentified
  source 1..50: mol_type = unassigned DNA; note = target_7512b74
  misc_feature 1..23: note = LF
  misc_feature 24..25: note = Core
  misc_feature 26..50: note = RF
cttcgaggaggatcacccgtgcgctcatccggaccgcaggagggtaccga

SEQ ID NO: 24990 - DNA, 50 bp, unidentified
  source 1..50: mol_type = unassigned DNA; note = target_7513884
  misc_feature 1..23: note = LF
  misc_feature 24..25: note = Core
  misc_feature 26..50: note = RF
cggtcgcggcacgggggccgctcctacaggtgaccgcgatagcctgcaac

SEQ ID NO: 24991 - DNA, 50 bp, unidentified
  source 1..50: mol_type = unassigned DNA; note = target_751658e
  misc_feature 1..24: note = LF
  misc_feature 25: note = Core
  misc_feature 26..50: note = RF
gaggcataaactgatggccaaggagccactttatgccacgcaaacgcaag

SEQ ID NO: 24992 - DNA, 50 bp, unidentified
  source 1..50: mol_type = unassigned DNA; note = target_7525de3
  misc_feature 1..23: note = LF
  misc_feature 24..25: note = Core
  misc_feature 26..50: note = RF
tttaatactattcatgtattcacctcattttatgatatgtatttcaatat

SEQ ID NO: 24993 - DNA, 50 bp, unidentified
  source 1..50: mol_type = unassigned DNA; note = target_7526066
  misc_feature 1..23: note = LF
  misc_feature 24..25: note = Core
  misc_feature 26..50: note = RF
ggtgaccaccgctatcgagctacaccactctctgggacgtcatcagacac

SEQ ID NO: 24994 - DNA, 50 bp, unidentified
  source 1..50: mol_type = unassigned DNA; note = target_7527887
  misc_feature 1..23: note = LF
  misc_feature 24..25: note = Core
  misc_feature 26..50: note = RF
cttctccgaccagggatctggggagcaacggaacgtaaaacctatgtaag

SEQ ID NO: 24995 - DNA, 50 bp, unidentified
  source 1..50: mol_type = unassigned DNA; note = target_7529ed8
  misc_feature 1..21: note = LF
  misc_feature 22..25: note = Core
  misc_feature 26..50: note = RF
ctccatcgttcaggcggctcgctcatcgcccgatcatcccgcccacctgg

SEQ ID NO: 24996 - DNA, 50 bp, unidentified
  source 1..50: mol_type = unassigned DNA; note = target_752a18d
  misc_feature 1..22: note = LF
  misc_feature 23..25: note = Core
  misc_feature 26..50: note = RF
gtgaagtggaaaaagtaaacctaattttgaacgggatgtaatcatggaga

SEQ ID NO: 24997 - DNA, 50 bp, unidentified
  source 1..50: mol_type = unassigned DNA; note = target_753e1a3
  misc_feature 1..23: note = LF
  misc_feature 24..25: note = Core
  misc_feature 26..50: note = RF
aattgccgtagcgccggctcacctgcgatgcggagggttatcgcaggtaa

SEQ ID NO: 24998 - DNA, 50 bp, unidentified
  source 1..50: mol_type = unassigned DNA; note = target_753e7df
  misc_feature 1..23: note = LF
  misc_feature 24..25: note = Core
  misc_feature 26..50: note = RF
gggcgccggagcccgcggagcagctaggcgggggcttggtccacgcgcac

SEQ ID NO: 24999 - DNA, 50 bp, unidentified
  source 1..50: mol_type = unassigned DNA; note = target_753f3ca
  misc_feature 1..23: note = LF
  misc_feature 24..25: note = Core
  misc_feature 26..50: note = RF
tggaaaaaacatgatataaactccttttttataaaaccgggtttttcgca

SEQ ID NO: 25000 - DNA, 50 bp, unidentified
  source 1..50: mol_type = unassigned DNA; note = target_7542186
  misc_feature 1..23: note = LF
  misc_feature 24..25: note = Core
  misc_feature 26..50: note = RF
caccgctatcgcgagcaggctcgctcccacaggggatttgaggtgaacat

SEQ ID NO: 25001 - DNA, 50 bp, unidentified
  source 1..50: mol_type = unassigned DNA; note = target_7544c5c
  misc_feature 1..21: note = LF
  misc_feature 22..25: note = Core
  misc_feature 26..50: note = RF
cttcgttcgcggtcatgggatctccttcgtttcggacggcccgggggtca

SEQ ID NO: 25002 - DNA, 50 bp, unidentified
  source 1..50: mol_type = unassigned DNA; note = target_7546ef6
  misc_feature 1..23: note = LF
  misc_feature 24..25: note = Core
  misc_feature 26..50: note = RF
ggaaatgctcacccgtttccggatttttatgcatatcggacaggctcttg

SEQ ID NO: 25003 - DNA, 50 bp, unidentified
  source 1..50: mol_type = unassigned DNA; note = target_7548491
  misc_feature 1..23: note = LF
  misc_feature 24..25: note = Core
  misc_feature 26..50: note = RF
aaaacaggctaaacgtaggatattttcgttttccaggcatcccctatatg

SEQ ID NO: 25004 - DNA, 50 bp, unidentified
  source 1..50: mol_type = unassigned DNA; note = target_75489da
  misc_feature 1..22: note = LF
  misc_feature 23..25: note = Core
  misc_feature 26..50: note = RF
atggcaaaacggtccatataagcacctcccggatgtagagaatcgtggat

SEQ ID NO: 25005 - DNA, 50 bp, unidentified
  source 1..50: mol_type = unassigned DNA; note = target_7562e6a
  misc_feature 1..24: note = LF
  misc_feature 25: note = Core
  misc_feature 26..50: note = RF
gtagcggtattaggcgctaatgaaaagctatttagtttagctaccaagca

SEQ ID NO: 25006 - DNA, 50 bp, unidentified
  source 1..50: mol_type = unassigned DNA; note = target_7566e73
  misc_feature 1..22: note = LF
  misc_feature 23..25: note = Core
  misc_feature 26..50: note = RF
gttaccaagagtcatccctctaagaacccagcgtgcaactttcaccgcac

SEQ ID NO: 25007 - DNA, 50 bp, unidentified
  source 1..50: mol_type = unassigned DNA; note = target_757dcfe
  misc_feature 1..23: note = LF
  misc_feature 24..25: note = Core
  misc_feature 26..50: note = RF
cggccggtgtgagattgttcaggctctcgtgataccggcgatgattgtag

SEQ ID NO: 25008 - DNA, 50 bp, unidentified
  source 1..50: mol_type = unassigned DNA; note = target_75829da
  misc_feature 1..21: note = LF
  misc_feature 22..25: note = Core
  misc_feature 26..50: note = RF
aaggggaccaagacaggttcgcccccctttgaagggggcaagatcgttcg

SEQ ID NO: 25009 - DNA, 50 bp, unidentified
  source 1..50: mol_type = unassigned DNA; note = target_7587aa1
  misc_feature 1..23: note = LF
  misc_feature 24..25: note = Core
  misc_feature 26..50: note = RF
acgctacctgctatgtcgccttttggcacaaagcggacatcctgacaggc

SEQ ID NO: 25010 - DNA, 50 bp, unidentified
  source 1..50: mol_type = unassigned DNA; note = target_7589d8f
  misc_feature 1..23: note = LF
  misc_feature 24..25: note = Core
  misc_feature 26..50: note = RF
cacgtctgatcctgggacatacctgccgtttgcgggctgcccgtccaacg

SEQ ID NO: 25011 - DNA, 50 bp, unidentified
  source 1..50: mol_type = unassigned DNA; note = target_7595a44
  misc_feature 1..23: note = LF
  misc_feature 24..25: note = Core
  misc_feature 26..50: note = RF
cgtttagttatcgtagtctagcgtggattttcgtaggcgggagtggtgcc

SEQ ID NO: 25012 - DNA, 50 bp, unidentified
  source 1..50: mol_type = unassigned DNA; note = target_7596e0d
  misc_feature 1..24: note = LF
  misc_feature 25: note = Core
  misc_feature 26..50: note = RF
cgtccggcccttgttggtcaattttttttgacagatcggcgaccgcatcc

SEQ ID NO: 25013 - DNA, 50 bp, unidentified
  source 1..50: mol_type = unassigned DNA; note = target_7599f0e
  misc_feature 1..23: note = LF
  misc_feature 24..25: note = Core
  misc_feature 26..50: note = RF
tgcagagatggcagtcgagcaagctcgactctactgtccgcctgcaacgg

SEQ ID NO: 25014 - DNA, 50 bp, unidentified
  source 1..50: mol_type = unassigned DNA; note = target_759c0f6
  misc_feature 1..20: note = LF
  misc_feature 21..25: note = Core
  misc_feature 26..50: note = RF
gaactaatttgttgtaaataaaaaagaccaataatttattggtcaatttc

SEQ ID NO: 25015 - DNA, 50 bp, unidentified
  source 1..50: mol_type = unassigned DNA; note = target_75a1281
  misc_feature 1..23: note = LF
  misc_feature 24..25: note = Core
  misc_feature 26..50: note = RF
catcttcattcgttttattcctccttgttattgttatttgtctgcagcgt

SEQ ID NO: 25016 - DNA, 50 bp, unidentified
  source 1..50: mol_type = unassigned DNA; note = target_75b910c
  misc_feature 1..24: note = LF
  misc_feature 25: note = Core
  misc_feature 26..50: note = RF
atgtccgcttctcttatcggccgtttggggtcaagcgctttcagactatc

SEQ ID NO: 25017 - DNA, 50 bp, unidentified
  source 1..50: mol_type = unassigned DNA; note = target_75ba03f
  misc_feature 1..23: note = LF
  misc_feature 24..25: note = Core
  misc_feature 26..50: note = RF
cgtggatgcgaggcgcaccccaaagcggacctgctaggaacagttctatg

SEQ ID NO: 25018 - DNA, 50 bp, unidentified
  source 1..50: mol_type = unassigned DNA; note = target_75d043f
  misc_feature 1..22: note = LF
  misc_feature 23..25: note = Core
  misc_feature 26..50: note = RF
aaatactatgacagacttacgaagttttcaaaacttcgtaagtctccttt

SEQ ID NO: 25019 - DNA, 50 bp, unidentified
  source 1..50: mol_type = unassigned DNA; note = target_75d1fa5
  misc_feature 1..22: note = LF
  misc_feature 23..25: note = Core
  misc_feature 26..50: note = RF
aatcaaatgtgcgagcaagcccgctcccacattttgctctgtgtcagtcg

SEQ ID NO: 25020 - DNA, 50 bp, unidentified
  source 1..50: mol_type = unassigned DNA; note = target_75d64ad
  misc_feature 1..24: note = LF
  misc_feature 25: note = Core
  misc_feature 26..50: note = RF
cacaggtgctgtgatcgccgacaaaaggctatgactcggatgccttcgtg

SEQ ID NO: 25021 - DNA, 50 bp, unidentified
  source 1..50: mol_type = unassigned DNA; note = target_75df7cf
  misc_feature 1..22: note = LF
  misc_feature 23..25: note = Core
  misc_feature 26..50: note = RF
taggttccatatatttattctcctttttattacaaaatttcattaactat

SEQ ID NO: 25022 - DNA, 50 bp, unidentified
  source 1..50: mol_type = unassigned DNA; note = target_75ee3e0
  misc_feature 1..22: note = LF
  misc_feature 23..25: note = Core
  misc_feature 26..50: note = RF
taggatagttatttttcataggaatacctcggcataatgataaacgatat

SEQ ID NO: 25023 - DNA, 50 bp, unidentified
  source 1..50: mol_type = unassigned DNA; note = target_760452a
  misc_feature 1..22: note = LF
  misc_feature 23..25: note = Core
  misc_feature 26..50: note = RF
tattgttcaactcttctgccgcgtttagttgaataacgatctttaattca

SEQ ID NO: 25024 - DNA, 50 bp, unidentified
  source 1..50: mol_type = unassigned DNA; note = target_76060aa
  misc_feature 1..22: note = LF
  misc_feature 23..25: note = Core
  misc_feature 26..50: note = RF
ttgagctgctttctcttgcccacttctctttgcagccggcaaagagaagt

SEQ ID NO: 25025 - DNA, 50 bp, unidentified
  source 1..50: mol_type = unassigned DNA; note = target_7609010
  misc_feature 1..23: note = LF
  misc_feature 24..25: note = Core
  misc_feature 26..50: note = RF
acgcggtacgcgatacgcacaggaggtaccatggccgattccctgcacat

SEQ ID NO: 25026 - DNA, 50 bp, unidentified
  source 1..50: mol_type = unassigned DNA; note = target_760b060
  misc_feature 1..24: note = LF
  misc_feature 25: note = Core
  misc_feature 26..50: note = RF
ttcgttcattttcttgcgtcccttcggtagcaagcggcaaagccgagcgg

SEQ ID NO: 25027 - DNA, 50 bp, unidentified
  source 1..50: mol_type = unassigned DNA; note = target_760bbd2
  misc_feature 1..22: note = LF
  misc_feature 23..25: note = Core
  misc_feature 26..50: note = RF
aaaataggtcaatcgacttgaaggaggtcagcgataatgagcaatctaat

SEQ ID NO: 25028 - DNA, 50 bp, unidentified
  source 1..50: mol_type = unassigned DNA; note = target_761a68c
  misc_feature 1..24: note = LF
  misc_feature 25: note = Core
  misc_feature 26..50: note = RF
accagcagccggcgcggcggttgttgacccatagcgtcatttcgcgaccg

SEQ ID NO: 25029 - DNA, 50 bp, unidentified
  source 1..50: mol_type = unassigned DNA; note = target_761c096
  misc_feature 1..21: note = LF
  misc_feature 22..25: note = Core
  misc_feature 26..50: note = RF
gtgggtcccgctttgcattgcttgccgctttcttacttccgtttcttcac

SEQ ID NO: 25030 - DNA, 50 bp, unidentified
  source 1..50: mol_type = unassigned DNA; note = target_762635b
  misc_feature 1..22: note = LF
  misc_feature 23..25: note = Core
  misc_feature 26..50: note = RF
accgccggattccccccataagagatattcttgcgctcgaccaggaccag

SEQ ID NO: 25031 - DNA, 50 bp, unidentified
  source 1..50: mol_type = unassigned DNA; note = target_763fa64
  misc_feature 1..23: note = LF
  misc_feature 24..25: note = Core
  misc_feature 26..50: note = RF
tcaaataccttctccataattacctcctaattaacaatatacaaatagat

SEQ ID NO: 25032 - DNA, 50 bp, unidentified
  source 1..50: mol_type = unassigned DNA; note = target_7643b14
  misc_feature 1..23: note = LF
  misc_feature 24..25: note = Core
  misc_feature 26..50: note = RF
acacggcgcctgtggatcatggagttctctacgcttcaagatccacgaag

SEQ ID NO: 25033 - DNA, 50 bp, unidentified
  source 1..50: mol_type = unassigned DNA; note = target_7653395
  misc_feature 1..24: note = LF
  misc_feature 25: note = Core
  misc_feature 26..50: note = RF
caccacagaacgtccgctcatcggcatgagagtgcgtccgcggacgtcaa

SEQ ID NO: 25034 - DNA, 50 bp, unidentified
  source 1..50: mol_type = unassigned DNA; note = target_766a256
  misc_feature 1..24: note = LF
  misc_feature 25: note = Core
  misc_feature 26..50: note = RF
gtgttatgccgtaactgcgcccgtttataagtaattattttggaataacg

SEQ ID NO: 25035 - DNA, 50 bp, unidentified
  source 1..50: mol_type = unassigned DNA; note = target_766d6b7
  misc_feature 1..23: note = LF
  misc_feature 24..25: note = Core
  misc_feature 26..50: note = RF
atcgaggtcatgagcgttgtctccttttatgaatttcttcgacgcccctc

SEQ ID NO: 25036 - DNA, 50 bp, unidentified
  source 1..50: mol_type = unassigned DNA; note = target_76755a7
  misc_feature 1..23: note = LF
  misc_feature 24..25: note = Core
  misc_feature 26..50: note = RF
gcaccggaaccaaggtcggctaatggcgctcgccggccagtgcgtttcgt

SEQ ID NO: 25037 - DNA, 50 bp, unidentified
  source 1..50: mol_type = unassigned DNA; note = target_7675cf7
  misc_feature 1..23: note = LF
  misc_feature 24..25: note = Core
  misc_feature 26..50: note = RF
ggtcgtcgaccccgattgtgttcctatcagcaccgccgtggtaccgcgga

SEQ ID NO: 25038 - DNA, 50 bp, unidentified
  source 1..50: mol_type = unassigned DNA; note = target_76916c0
  misc_feature 1..23: note = LF
  misc_feature 24..25: note = Core
  misc_feature 26..50: note = RF
atgagccccggcccgcgccggggtttagtttctgcacattcccgccacaa

SEQ ID NO: 25039 - DNA, 50 bp, unidentified
  source 1..50: mol_type = unassigned DNA; note = target_7697203
  misc_feature 1..23: note = LF
  misc_feature 24..25: note = Core
  misc_feature 26..50: note = RF
gtaggtacgctatttacttcttcctgaacttaataaattcagcctataat

SEQ ID NO: 25040 - DNA, 50 bp, unidentified
  source 1..50: mol_type = unassigned DNA; note = target_7698b33
  misc_feature 1..23: note = LF
  misc_feature 24..25: note = Core
  misc_feature 26..50: note = RF
tatgtacgccatttcttctcctccttttaggttctattttactaaatggg

SEQ ID NO: 25041 - DNA, 50 bp, unidentified
  source 1..50: mol_type = unassigned DNA; note = target_769f566
  misc_feature 1..23: note = LF
  misc_feature 24..25: note = Core
  misc_feature 26..50: note = RF
gaacctagggctctgaataaagtagcaagttaggctcgataggtaaacat

SEQ ID NO: 25042 - DNA, 50 bp, unidentified
  source 1..50: mol_type = unassigned DNA; note = target_76a2c81
  misc_feature 1..24: note = LF
  misc_feature 25: note = Core
  misc_feature 26..50: note = RF
cgggcttgatttcggtgccaaaagtgccgctaggaaatgccgagaattat

SEQ ID NO: 25043 - DNA, 50 bp, unidentified
  source 1..50: mol_type = unassigned DNA; note = target_76a468b
  misc_feature 1..22: note = LF
  misc_feature 23..25: note = Core
  misc_feature 26..50: note = RF
ggccagcgccctcaggctcgcttgactatgctgtatcgctcgacggatcg

SEQ ID NO: 25044 - DNA, 50 bp, unidentified
  source 1..50: mol_type = unassigned DNA; note = target_76a6f46
  misc_feature 1..23: note = LF
  misc_feature 24..25: note = Core
  misc_feature 26..50: note = RF
aagggagcctcttataagttcttctttctacaggtttttcttgatatcag

SEQ ID NO: 25045 - DNA, 50 bp, unidentified
  source 1..50: mol_type = unassigned DNA; note = target_76a72d3
  misc_feature 1..24: note = LF
  misc_feature 25: note = Core
  misc_feature 26..50: note = RF
tctgtgatactattcatgtatcctcctcctttgatatttagtccaagaaa

SEQ ID NO: 25046 - DNA, 50 bp, unidentified
  source 1..50: mol_type = unassigned DNA; note = target_76aeb0d
  misc_feature 1..23: note = LF
  misc_feature 24..25: note = Core
  misc_feature 26..50: note = RF
ggatggcctggccgaaatggttcctggcacctttatatgggtgagtcaat

SEQ ID NO: 25047 - DNA, 50 bp, unidentified
  source 1..50: mol_type = unassigned DNA; note = target_76af956
  misc_feature 1..22: note = LF
  misc_feature 23..25: note = Core
  misc_feature 26..50: note = RF
aactgatactcagaacgtcgtctgacatttcgccaaacgcaccgccaagg

SEQ ID NO: 25048 - DNA, 50 bp, unidentified
  source 1..50: mol_type = unassigned DNA; note = target_76c3ed6
  misc_feature 1..22: note = LF
  misc_feature 23..25: note = Core
  misc_feature 26..50: note = RF
aaaactactactatataatacgaggatattgttgatgaatgtaattataa

SEQ ID NO: 25049 - DNA, 50 bp, unidentified
  source 1..50: mol_type = unassigned DNA; note = target_76c4504
  misc_feature 1..23: note = LF
  misc_feature 24..25: note = Core
  misc_feature 26..50: note = RF
cgactgcccccggcgcggctgcgctactcggcggctcgcaggggccccaa

SEQ ID NO: 25050 - DNA, 50 bp, unidentified
  source 1..50: mol_type = unassigned DNA; note = target_76cbebf
  misc_feature 1..23: note = LF
  misc_feature 24..25: note = Core
  misc_feature 26..50: note = RF
gcactcccaatgtctgcaagtggtggaaagcggacgttgcggagtagcac

SEQ ID NO: 25051 - DNA, 50 bp, unidentified
  source 1..50: mol_type = unassigned DNA; note = target_76d005e
  misc_feature 1..22: note = LF
  misc_feature 23..25: note = Core
  misc_feature 26..50: note = RF
gcgatgccgtcggggggcgtccacaccatcacccttcttgttgtcggcgc

SEQ ID NO: 25052 - DNA, 50 bp, unidentified
  source 1..50: mol_type = unassigned DNA; note = target_76d1cac
  misc_feature 1..22: note = LF
  misc_feature 23..25: note = Core
  misc_feature 26..50: note = RF
acgcctctctgtgttctccgtgtctccgcggcgagccaggcctcactcct

SEQ ID NO: 25053 - DNA, 50 bp, unidentified
  source 1..50: mol_type = unassigned DNA; note = target_76d62d9
  misc_feature 1..23: note = LF
  misc_feature 24..25: note = Core
  misc_feature 26..50: note = RF
accgtgcaagcataaatgctcgcctacaatataatcgctaaaccacctca

SEQ ID NO: 25054 - DNA, 50 bp, unidentified
  source 1..50: mol_type = unassigned DNA; note = target_76daa93
  misc_feature 1..23: note = LF
  misc_feature 24..25: note = Core
  misc_feature 26..50: note = RF
cgaaaaagccgctttcgagcggctttttgtgcccgcgatttgatcaggag

SEQ ID NO: 25055 - DNA, 50 bp, unidentified
  source 1..50: mol_type = unassigned DNA; note = target_76ddcbd
  misc_feature 1..23: note = LF
  misc_feature 24..25: note = Core
  misc_feature 26..50: note = RF
cgacggggaagaacgaccctgagcgacctcccgaacttcggttggggtgg

SEQ ID NO: 25056 - DNA, 50 bp, unidentified
  source 1..50: mol_type = unassigned DNA; note = target_76e4f35
  misc_feature 1..23: note = LF
  misc_feature 24..25: note = Core
  misc_feature 26..50: note = RF
taaaaatgcgcaaagtcgagcttagcattacagttgcgggtccccttctc

SEQ ID NO: 25057 - DNA, 50 bp, unidentified
  source 1..50: mol_type = unassigned DNA; note = target_76e9904
  misc_feature 1..22: note = LF
  misc_feature 23..25: note = Core
  misc_feature 26..50: note = RF
tcactgccacttgttacacctcactttctatcaaactgtaggcatattcc

SEQ ID NO: 25058 - DNA, 50 bp, unidentified
  source 1..50: mol_type = unassigned DNA; note = target_76ec493
  misc_feature 1..24: note = LF
  misc_feature 25: note = Core
  misc_feature 26..50: note = RF
ccacaaacaccttgcctgtcgggccgttccacatatgaatcagaccctaa

SEQ ID NO: 25059 - DNA, 50 bp, unidentified
  source 1..50: mol_type = unassigned DNA; note = target_76fb172
  misc_feature 1..24: note = LF
  misc_feature 25: note = Core
  misc_feature 26..50: note = RF
agcccaagactcacaggcacgcaacgggcatggccgtgcgacgaattagg

SEQ ID NO: 25060 - DNA, 50 bp, unidentified
  source 1..50: mol_type = unassigned DNA; note = target_76fd535
  misc_feature 1..24: note = LF
  misc_feature 25: note = Core
  misc_feature 26..50: note = RF
ataggtgtgaaaacgggacttaacttccgtgttgccggtgactcggtagt

SEQ ID NO: 25061 - DNA, 50 bp, unidentified
  source 1..50: mol_type = unassigned DNA; note = target_76ff73e
  misc_feature 1..23: note = LF
  misc_feature 24..25: note = Core
  misc_feature 26..50: note = RF
atgtcccatttgtatcttacctccttctataaatagcataatataacttt

SEQ ID NO: 25062 - DNA, 50 bp, unidentified
  source 1..50: mol_type = unassigned DNA; note = target_7705517
  misc_feature 1..23: note = LF
  misc_feature 24..25: note = Core
  misc_feature 26..50: note = RF
gctgggttgggtcgcaatgtcacctgctttgatgctgtgcggttatggtc

SEQ ID NO: 25063 - DNA, 50 bp, unidentified
  source 1..50: mol_type = unassigned DNA; note = target_7719b77
  misc_feature 1..23: note = LF
  misc_feature 24..25: note = Core
  misc_feature 26..50: note = RF
acagggcgacagcggcgaatgtgctcatgagttccgctccgcgggtgtcg

SEQ ID NO: 25064 - DNA, 50 bp, unidentified
  source 1..50: mol_type = unassigned DNA; note = target_771e82e
  misc_feature 1..23: note = LF
  misc_feature 24..25: note = Core
  misc_feature 26..50: note = RF
atttgggccgtcagattccccctctcaggcatgtaaacatgccctgccgg

SEQ ID NO: 25065 - DNA, 50 bp, unidentified
  source 1..50: mol_type = unassigned DNA; note = target_7734c1a
  misc_feature 1..22: note = LF
  misc_feature 23..25: note = Core
  misc_feature 26..50: note = RF
aatatctgtaataattatcctccttttcattgccaagagttaataacttc

SEQ ID NO: 25066 - DNA, 50 bp, unidentified
  source 1..50: mol_type = unassigned DNA; note = target_77366cb
  misc_feature 1..23: note = LF
  misc_feature 24..25: note = Core
  misc_feature 26..50: note = RF
atcttttctcatatttgtcactccttatgtgctaagtataactctttttt

SEQ ID NO: 25067 - DNA, 50 bp, unidentified
  source 1..50: mol_type = unassigned DNA; note = target_773c8ae
  misc_feature 1..24: note = LF
  misc_feature 25: note = Core
  misc_feature 26..50: note = RF
tgcaaattccggggtcagggaggaggaatactggcttgcaggccagtatc

SEQ ID NO: 25068 - DNA, 50 bp, unidentified
  source 1..50: mol_type = unassigned DNA; note = target_773d176
  misc_feature 1..24: note = LF
  misc_feature 25: note = Core
  misc_feature 26..50: note = RF
agcaagcgcagcttgcgcagtgagagttccgcggcggggccgcgagaccg

SEQ ID NO: 25069 - DNA, 50 bp, unidentified
  source 1..50: mol_type = unassigned DNA; note = target_773ee7a
  misc_feature 1..24: note = LF
  misc_feature 25: note = Core
  misc_feature 26..50: note = RF
gtgcgttgtttgcaaacctccaagcaacgctcgtcgtgaacgtcaggcgg

SEQ ID NO: 25070 - DNA, 50 bp, unidentified
  source 1..50: mol_type = unassigned DNA; note = target_7742f1c
  misc_feature 1..24: note = LF
  misc_feature 25: note = Core
  misc_feature 26..50: note = RF
gaaataaaaatatgtagaaactaaaaaatatagaaatgccacagcatata

SEQ ID NO: 25071 - DNA, 50 bp, unidentified
  source 1..50: mol_type = unassigned DNA; note = target_774a361
  misc_feature 1..21: note = LF
  misc_feature 22..25: note = Core
  misc_feature 26..50: note = RF
gcgcggtaggcgcgctcatcgctcatcgcgccgggcgacccgtcgcccgc

SEQ ID NO: 25072 - DNA, 50 bp, unidentified
  source 1..50: mol_type = unassigned DNA; note = target_774e085
  misc_feature 1..21: note = LF
  misc_feature 22..25: note = Core
  misc_feature 26..50: note = RF
cccctggaggcgatcaggtgtctcaagcgcaggatctccgacgccatcta

SEQ ID NO: 25073 - DNA, 50 bp, unidentified
  source 1..50: mol_type = unassigned DNA; note = target_7751f1a
  misc_feature 1..23: note = LF
  misc_feature 24..25: note = Core
  misc_feature 26..50: note = RF
gctttgctcacgggtgacattttagctttgcggtgtggactcacgccgaa

SEQ ID NO: 25074 - DNA, 50 bp, unidentified
  source 1..50: mol_type = unassigned DNA; note = target_77551e9
  misc_feature 1..23: note = LF
  misc_feature 24..25: note = Core
  misc_feature 26..50: note = RF
catactacgaatccaaattgtagtggtcaagtcatagccttcaatcaggc

SEQ ID NO: 25075 - DNA, 50 bp, unidentified
  source 1..50: mol_type = unassigned DNA; note = target_775cc71
  misc_feature 1..23: note = LF
  misc_feature 24..25: note = Core
  misc_feature 26..50: note = RF
tcagtcaatcagagaaccgtcccctttcttgtttgtgcagaatgaagagt

SEQ ID NO: 25076 - DNA, 50 bp, unidentified
  source 1..50: mol_type = unassigned DNA; note = target_7762628
  misc_feature 1..21: note = LF
  misc_feature 22..25: note = Core
  misc_feature 26..50: note = RF
actggtggcagaagcagccctagactagttccgttgcacagaggtttgga

SEQ ID NO: 25077 - DNA, 50 bp, unidentified
  source 1..50: mol_type = unassigned DNA; note = target_7765657
  misc_feature 1..24: note = LF
  misc_feature 25: note = Core
  misc_feature 26..50: note = RF
gcgtggtggtcgggactgaatcgccccgggttccgtggaacccaggacac

SEQ ID NO: 25078 - DNA, 50 bp, unidentified
  source 1..50: mol_type = unassigned DNA; note = target_7767200
  misc_feature 1..23: note = LF
  misc_feature 24..25: note = Core
  misc_feature 26..50: note = RF
acattgcgccgaagagaggccggagcctgtggtaaacgggagtggggcgg

SEQ ID NO: 25079 - DNA, 50 bp, unidentified
  source 1..50: mol_type = unassigned DNA; note = target_7767b72
  misc_feature 1..23: note = LF
  misc_feature 24..25: note = Core
  misc_feature 26..50: note = RF
gccggttgaactgatggggtcgtctaatcgccggactttttgcttttggc

SEQ ID NO: 25080 - DNA, 50 bp, unidentified
  source 1..50: mol_type = unassigned DNA; note = target_776db52
  misc_feature 1..23: note = LF
  misc_feature 24..25: note = Core
  misc_feature 26..50: note = RF
cctccttggcgtcggcggaggcgctcaccgccgctccctcctgtgccgtg

SEQ ID NO: 25081 - DNA, 50 bp, unidentified
  source 1..50: mol_type = unassigned DNA; note = target_776e302
  misc_feature 1..24: note = LF
  misc_feature 25: note = Core
  misc_feature 26..50: note = RF
ccagatgggtgttcggttgtcaacgtccacatgagggggaaccccctcat

SEQ ID NO: 25082 - DNA, 50 bp, unidentified
  source 1..50: mol_type = unassigned DNA; note = target_777c640
  misc_feature 1..23: note = LF
  misc_feature 24..25: note = Core
  misc_feature 26..50: note = RF
gaacggccccgtacttccgatattggcaacctttgagacatgctgaggga

SEQ ID NO: 25083 - DNA, 50 bp, unidentified
  source 1..50: mol_type = unassigned DNA; note = target_777f535
  misc_feature 1..23: note = LF
  misc_feature 24..25: note = Core
  misc_feature 26..50: note = RF
agcatatgctccttcctctatttttttatggggaaaatcatgtaagcaaa

SEQ ID NO: 25084 - DNA, 50 bp, unidentified
  source 1..50: mol_type = unassigned DNA; note = target_777fc4c
  misc_feature 1..22: note = LF
  misc_feature 23..25: note = Core
  misc_feature 26..50: note = RF
caaagcgtgaaaagcgccgaaaaagggggtgaggaagatttgtttgaact

SEQ ID NO: 25085 - DNA, 50 bp, unidentified
  source 1..50: mol_type = unassigned DNA; note = target_7783216
  misc_feature 1..23: note = LF
  misc_feature 24..25: note = Core
  misc_feature 26..50: note = RF
cgttggtctgagtcagctatcctagtactactttggcagaattgaatttg

SEQ ID NO: 25086 - DNA, 50 bp, unidentified
  source 1..50: mol_type = unassigned DNA; note = target_7789ed0
  misc_feature 1..23: note = LF
  misc_feature 24..25: note = Core
  misc_feature 26..50: note = RF
caaaacatcatcgagaatgagtcagcccccttattccatgcctaatcaca

SEQ ID NO: 25087 - DNA, 50 bp, unidentified
  source 1..50: mol_type = unassigned DNA; note = target_7792eba
  misc_feature 1..24: note = LF
  misc_feature 25: note = Core
  misc_feature 26..50: note = RF
ccatttcacctccaaacacataacgcccaattaaggggtgaacaacgcta

SEQ ID NO: 25088 - DNA, 50 bp, unidentified
  source 1..50: mol_type = unassigned DNA; note = target_779d4a0
  misc_feature 1..23: note = LF
  misc_feature 24..25: note = Core
  misc_feature 26..50: note = RF
tgtaggtgttcatagctgtcgtcctttctcttgttgtcaggaagcagcat

SEQ ID NO: 25089 - DNA, 50 bp, unidentified
  source 1..50: mol_type = unassigned DNA; note = target_77a91fc
  misc_feature 1..23: note = LF
  misc_feature 24..25: note = Core
  misc_feature 26..50: note = RF
attacccggggccgatcgttcggctaacgggccttcagcacccgccccgc

SEQ ID NO: 25090 - DNA, 50 bp, unidentified
  source 1..50: mol_type = unassigned DNA; note = target_77ae454
  misc_feature 1..23: note = LF
  misc_feature 24..25: note = Core
  misc_feature 26..50: note = RF
aattaaaattgtgtaattgcctgttgatatgttcactccaacagcggaga

SEQ ID NO: 25091 - DNA, 50 bp, unidentified
  source 1..50: mol_type = unassigned DNA; note = target_77c2eef
  misc_feature 1..23: note = LF
  misc_feature 24..25: note = Core
  misc_feature 26..50: note = RF
ggtctaggcacatggctgttcacctttcgagaggcattcgcggtgggagg

SEQ ID NO: 25092 - DNA, 50 bp, unidentified
  source 1..50: mol_type = unassigned DNA; note = target_77c7ac7
  misc_feature 1..24: note = LF
  misc_feature 25: note = Core
  misc_feature 26..50: note = RF
gcctgctcattgaagctccccagacgggacgtaattcgaaccactttaaa

SEQ ID NO: 25093 - DNA, 50 bp, unidentified
  source 1..50: mol_type = unassigned DNA; note = target_77c9e5d
  misc_feature 1..23: note = LF
  misc_feature 24..25: note = Core
  misc_feature 26..50: note = RF
gcgcacgtttcaaaccggaaatgctttaaaggaaatatactttgaaaatg

SEQ ID NO: 25094 - DNA, 50 bp, unidentified
  source 1..50: mol_type = unassigned DNA; note = target_77cef68
  misc_feature 1..22: note = LF
  misc_feature 23..25: note = Core
  misc_feature 26..50: note = RF
tgaccgcgaaatgaatgggtcctgaccctaagtctctcccttagggacgc

SEQ ID NO: 25095 - DNA, 50 bp, unidentified
  source 1..50: mol_type = unassigned DNA; note = target_77cf59e
  misc_feature 1..23: note = LF
  misc_feature 24..25: note = Core
  misc_feature 26..50: note = RF
aggtcggcggggtcggtcatggggttccttgggggtgctggagacggtcg

SEQ ID NO: 25096 - DNA, 50 bp, unidentified
  source 1..50: mol_type = unassigned DNA; note = target_77d9ea5
  misc_feature 1..23: note = LF
  misc_feature 24..25: note = Core
  misc_feature 26..50: note = RF
atattcgcgggcatggcccgctcctacaaaatgcttcatccggaaggtga

SEQ ID NO: 25097 - DNA, 50 bp, unidentified
  source 1..50: mol_type = unassigned DNA; note = target_77dfd89
  misc_feature 1..23: note = LF
  misc_feature 24..25: note = Core
  misc_feature 26..50: note = RF
gtttcggttgtcgagatcctcccctaacggggcgcacgaattcccgatac

SEQ ID NO: 25098 - DNA, 50 bp, unidentified
  source 1..50: mol_type = unassigned DNA; note = target_77e305f
  misc_feature 1..22: note = LF
  misc_feature 23..25: note = Core
  misc_feature 26..50: note = RF
ggcctccgcccagccagcatcttgaaccggatcggccccgtcatgggcat

SEQ ID NO: 25099 - DNA, 50 bp, unidentified
  source 1..50: mol_type = unassigned DNA; note = target_77ea57b
  misc_feature 1..22: note = LF
  misc_feature 23..25: note = Core
  misc_feature 26..50: note = RF
taacgtcttcgcggatgaatccgctcctacggggaggatttttaaatgtt

SEQ ID NO: 25100 - DNA, 50 bp, unidentified
  source 1..50: mol_type = unassigned DNA; note = target_77ea6b8
  misc_feature 1..23: note = LF
  misc_feature 24..25: note = Core
  misc_feature 26..50: note = RF
aggcattgctcggtcaccgattctgtcgcaaaacgacgaagtgcactcaa

SEQ ID NO: 25101 - DNA, 50 bp, unidentified
  source 1..50: mol_type = unassigned DNA; note = target_77f23cd
  misc_feature 1..24: note = LF
  misc_feature 25: note = Core
  misc_feature 26..50: note = RF
cggatcaccccgctctatatgtgccgatatgtgcggcggactcaatggag

SEQ ID NO: 25102 - DNA, 50 bp, unidentified
  source 1..50: mol_type = unassigned DNA; note = target_77f89a0
  misc_feature 1..23: note = LF
  misc_feature 24..25: note = Core
  misc_feature 26..50: note = RF
ctgcaatgcgttttggtcgcttgtggcccgtttcgccagatattgcggcg

SEQ ID NO: 25103 - DNA, 50 bp, unidentified
  source 1..50: mol_type = unassigned DNA; note = target_77f93cd
  misc_feature 1..24: note = LF
  misc_feature 25: note = Core
  misc_feature 26..50: note = RF
gcccggcaaattttttcttccagttgtaaaatgtggcctcagaaattccc

SEQ ID NO: 25104 - DNA, 50 bp, unidentified
  source 1..50: mol_type = unassigned DNA; note = target_7804c80
  misc_feature 1..23: note = LF
  misc_feature 24..25: note = Core
  misc_feature 26..50: note = RF
ggttcccacttcgcgtgaagacgctttaaaagctccgatgcgggctggaa

SEQ ID NO: 25105 - DNA, 50 bp, unidentified
  source 1..50: mol_type = unassigned DNA; note = target_7804ee1
  misc_feature 1..23: note = LF
  misc_feature 24..25: note = Core
  misc_feature 26..50: note = RF
aatggttttccttggttataatggtttgagctatattttttcaatgacgg

SEQ ID NO: 25106 - DNA, 50 bp, unidentified
  source 1..50: mol_type = unassigned DNA; note = target_780a77c
  misc_feature 1..22: note = LF
  misc_feature 23..25: note = Core
  misc_feature 26..50: note = RF
actgttgattgccactgagaactgacccagcgtggcctgatatttccatt

SEQ ID NO: 25107 - DNA, 50 bp, unidentified
  source 1..50: mol_type = unassigned DNA; note = target_7814589
  misc_feature 1..24: note = LF
  misc_feature 25: note = Core
  misc_feature 26..50: note = RF
gcggcccgcgtgccattaacgtgccattagcaggggcgaacaacggtcaa

SEQ ID NO: 25108 - DNA, 50 bp, unidentified
  source 1..50: mol_type = unassigned DNA; note = target_7815827
  misc_feature 1..24: note = LF
  misc_feature 25: note = Core
  misc_feature 26..50: note = RF
cttctcgaccttggcgtccagccacagatacgggtagcgaccctccagcg

SEQ ID NO: 25109 - DNA, 50 bp, unidentified
  source 1..50: mol_type = unassigned DNA; note = target_781ecd6
  misc_feature 1..23: note = LF
  misc_feature 24..25: note = Core
  misc_feature 26..50: note = RF
aaaggatatcactcccatcggggctagattagaggtttttgttttttaca

SEQ ID NO: 25110 - DNA, 50 bp, unidentified
  source 1..50: mol_type = unassigned DNA; note = target_7821b5d
  misc_feature 1..22: note = LF
  misc_feature 23..25: note = Core
  misc_feature 26..50: note = RF
cagagactggttcgcattcgtctgacagcaccgttcaaactgcagccact

SEQ ID NO: 25111 - DNA, 50 bp, unidentified
  source 1..50: mol_type = unassigned DNA; note = target_7823c38
  misc_feature 1..23: note = LF
  misc_feature 24..25: note = Core
  misc_feature 26..50: note = RF
ggaagcggcaggctcatgagacggacctctgtaatgcggcaaccaacccg

SEQ ID NO: 25112 - DNA, 50 bp, unidentified
  source 1..50: mol_type = unassigned DNA; note = target_78250cb
  misc_feature 1..23: note = LF
  misc_feature 24..25: note = Core
  misc_feature 26..50: note = RF
aacttcgctcatttttaactctcctttctataataaaaaagcctaggttg

SEQ ID NO: 25113 - DNA, 50 bp, unidentified
  source 1..50: mol_type = unassigned DNA; note = target_782beb4
  misc_feature 1..23: note = LF
  misc_feature 24..25: note = Core
  misc_feature 26..50: note = RF
tgtagcaggggcacattctaaactgggttgcgacaaattccctatcttgc

SEQ ID NO: 25114 - DNA, 50 bp, unidentified
  source 1..50: mol_type = unassigned DNA; note = target_7834120
  misc_feature 1..22: note = LF
  misc_feature 23..25: note = Core
  misc_feature 26..50: note = RF
tactaaattaccggtaacgatttgcggctaccagatggattttgttttgg

SEQ ID NO: 25115 - DNA, 50 bp, unidentified
  source 1..50: mol_type = unassigned DNA; note = target_78373ae
  misc_feature 1..24: note = LF
  misc_feature 25: note = Core
  misc_feature 26..50: note = RF
tgcttggcaaagtacgctgcggccttttttaggatgtcgcgctcctcggt

SEQ ID NO: 25116 - DNA, 50 bp, unidentified
  source 1..50: mol_type = unassigned DNA; note = target_783e583
  misc_feature 1..22: note = LF
  misc_feature 23..25: note = Core
  misc_feature 26..50: note = RF
cattcgtcccgaaagcgcccgttgaagctctctacgaaggcgttctgggt

SEQ ID NO: 25117 - DNA, 50 bp, unidentified
  source 1..50: mol_type = unassigned DNA; note = target_7840163
  misc_feature 1..24: note = LF
  misc_feature 25: note = Core
  misc_feature 26..50: note = RF
acgcatcgacaggaccagaaggagagacaacacatgggcgcgagcatcca

SEQ ID NO: 25118 - DNA, 50 bp, unidentified
  source 1..50: mol_type = unassigned DNA; note = target_7841cd6
  misc_feature 1..23: note = LF
  misc_feature 24..25: note = Core
  misc_feature 26..50: note = RF
cagctggaaaggccgcgggcctttggaaacctgttcacttgtggggtggc

SEQ ID NO: 25119 - DNA, 50 bp, unidentified
  source 1..50: mol_type = unassigned DNA; note = target_784c8b0
  misc_feature 1..23: note = LF
  misc_feature 24..25: note = Core
  misc_feature 26..50: note = RF
caagctcgcgcttgcgaccaggcctcagagctttcggcggatcacgtcac

SEQ ID NO: 25120 - DNA, 50 bp, unidentified
  source 1..50: mol_type = unassigned DNA; note = target_784f8bd
  misc_feature 1..23: note = LF
  misc_feature 24..25: note = Core
  misc_feature 26..50: note = RF
gcaggtgcgtcggtcgtcatcgatcctccttgctcgctcgccgagtatgg

SEQ ID NO: 25121 - DNA, 50 bp, unidentified; identical to SEQ ID NO: 22831
  source 1..50: mol_type = unassigned DNA; note = target_785a9d9
  misc_feature 1..23: note = LF
  misc_feature 24..25: note = Core
  misc_feature 26..50: note = RF

SEQ ID NO: 25122 - DNA, 50 bp, unidentified
  source 1..50: mol_type = unassigned DNA; note = target_785df2a
  misc_feature 1..23: note = LF
  misc_feature 24..25: note = Core
  misc_feature 26..50: note = RF
ccgctcgtgccgtatctcgacacctgcgctgggtgttcatccttgtggcg

SEQ ID NO: 25123 - DNA, 50 bp, unidentified
  source 1..50: mol_type = unassigned DNA; note = target_78600db
  misc_feature 1..24: note = LF
  misc_feature 25: note = Core
  misc_feature 26..50: note = RF
aggttcatctggtgatacagatggttcactcgttgagcggtgaacagcgc

SEQ ID NO: 25124 - DNA, 50 bp, unidentified
  source 1..50: mol_type = unassigned DNA; note = target_787101e
  misc_feature 1..24: note = LF
  misc_feature 25: note = Core
  misc_feature 26..50: note = RF
agcggcggccaatcgggcacgcagcgggcacggcggccacgcgtgattcc

SEQ ID NO: 25125 - DNA, 50 bp, unidentified
  source 1..50: mol_type = unassigned DNA; note = target_78a6711
  misc_feature 1..21: note = LF
  misc_feature 22..25: note = Core
  misc_feature 26..50: note = RF
gtgccgtctccagctctgaatccccccggcgtgttccggggggactgtcc

SEQ ID NO: 25126 - DNA, 50 bp, unidentified
  source 1..50: mol_type = unassigned DNA; note = target_78a92a3
  misc_feature 1..23: note = LF
  misc_feature 24..25: note = Core
  misc_feature 26..50: note = RF
atttttttcatttctctttactcctaacctactaataagattgttgtagc

SEQ ID NO: 25127 - DNA, 50 bp, unidentified
  source 1..50: mol_type = unassigned DNA; note = target_78b5109
  misc_feature 1..23: note = LF
  misc_feature 24..25: note = Core
  misc_feature 26..50: note = RF
aaatccgggcgggaaggggagtttgaggggagggggaatcgagcctcccc

SEQ ID NO: 25128 - DNA, 50 bp, unidentified
  source 1..50: mol_type = unassigned DNA; note = target_78ce472
  misc_feature 1..22: note = LF
  misc_feature 23..25: note = Core
  misc_feature 26..50: note = RF
agccgttcttctttcataaaaacacctcagatgaattctgactggccggg

SEQ ID NO: 25129 - DNA, 50 bp, unidentified
  source 1..50: mol_type = unassigned DNA; note = target_78d1df5
  misc_feature 1..23: note = LF
  misc_feature 24..25: note = Core
  misc_feature 26..50: note = RF
tcccgcattccattccatgcgggctacttgctaagctattcagcatgata

SEQ ID NO: 25130 - DNA, 50 bp, unidentified
  source 1..50: mol_type = unassigned DNA; note = target_78db4cf
  misc_feature 1..22: note = LF
  misc_feature 23..25: note = Core
  misc_feature 26..50: note = RF
acgctcgccacaccggttgtgcagactgtccctagaggagaagcgcaggt

SEQ ID NO: 25131 - DNA, 50 bp, unidentified
  source 1..50: mol_type = unassigned DNA; note = target_78dec47
  misc_feature 1..22: note = LF
  misc_feature 23..25: note = Core
  misc_feature 26..50: note = RF
aacccgccagaatgtctgcttctgacccaaagcggacattcctcaacttt

SEQ ID NO: 25132 - DNA, 50 bp, unidentified
  source 1..50: mol_type = unassigned DNA; note = target_78ee40e
  misc_feature 1..23: note = LF
  misc_feature 24..25: note = Core
  misc_feature 26..50: note = RF
ggtcatcgcgaacaagttcgctcctacctgcgtggcaggagtgggagatt

SEQ ID NO: 25133 - DNA, 50 bp, unidentified
  source 1..50: mol_type = unassigned DNA; note = target_78f461b
  misc_feature 1..22: note = LF
  misc_feature 23..25: note = Core
  misc_feature 26..50: note = RF
gtgcaagttctgctcgttcccaaacctcgccgaagagaacatcgtctgtg

SEQ ID NO: 25134 - DNA, 50 bp, unidentified
  source 1..50: mol_type = unassigned DNA; note = target_78faaff
  misc_feature 1..24: note = LF
  misc_feature 25: note = Core
  misc_feature 26..50: note = RF
aagcgcgaggatccgcgcgactgaccccggcgggcgggccccgtaccggc

SEQ ID NO: 25135 - DNA, 50 bp, unidentified
  source 1..50: mol_type = unassigned DNA; note = target_78fcedf
  misc_feature 1..22: note = LF
  misc_feature 23..25: note = Core
  misc_feature 26..50: note = RF
gctgacgttcctgaagagacggagaacttataaatttctgagacggtaag

SEQ ID NO: 25136 - DNA, 50 bp, unidentified
  source 1..50: mol_type = unassigned DNA; note = target_7902765
  misc_feature 1..23: note = LF
  misc_feature 24..25: note = Core
  misc_feature 26..50: note = RF
acacttgcgtcgtgacaacaggagaaaacatgacgaatcgaacccgaata

SEQ ID NO: 25137 - DNA, 50 bp, unidentified
  source 1..50: mol_type = unassigned DNA; note = target_79176e8
  misc_feature 1..24: note = LF
  misc_feature 25: note = Core
  misc_feature 26..50: note = RF
ccttgacgctctgtgctgagtaagcgtccggcgaacccatcttgagattt

SEQ ID NO: 25138 - DNA, 50 bp, unidentified
  source 1..50: mol_type = unassigned DNA; note = target_791a840
  misc_feature 1..24: note = LF
  misc_feature 25: note = Core
  misc_feature 26..50: note = RF
tcgcttcgcgtcgggcgtcaccatttttttgcggcgacatccttgaggat

SEQ ID NO: 25139 - DNA, 50 bp, unidentified
  source 1..50: mol_type = unassigned DNA; note = target_791f60f
  misc_feature 1..22: note = LF
  misc_feature 23..25: note = Core
  misc_feature 26..50: note = RF
tccgggtcgcaaagtgtcgcgaatggcacgacgcgacgtgttgcaccgcc

SEQ ID NO: 25140 - DNA, 50 bp, unidentified
  source 1..50: mol_type = unassigned DNA; note = target_79227c2
  misc_feature 1..24: note = LF
  misc_feature 25: note = Core
  misc_feature 26..50: note = RF
cccggagattacgccacccagaatttccacacactccgcgacaggaccca

SEQ ID NO: 25141 - DNA, 50 bp, unidentified
  source 1..50: mol_type = unassigned DNA; note = target_7928684
  misc_feature 1..23: note = LF
  misc_feature 24..25: note = Core
  misc_feature 26..50: note = RF
accccgaccccgcgcgtcctcacctgacccctcaccggaagggccgcgcg

SEQ ID NO: 25142 - DNA, 50 bp, unidentified
  source 1..50: mol_type = unassigned DNA; note = target_792bcc6
  misc_feature 1..24: note = LF
  misc_feature 25: note = Core
  misc_feature 26..50: note = RF
tccgacatcaagagcgcggtagcctttttaatatcgatttttcccgttca

SEQ ID NO: 25143 - DNA, 50 bp, unidentified
  source 1..50: mol_type = unassigned DNA; note = target_7932a2e
  misc_feature 1..22: note = LF
  misc_feature 23..25: note = Core
  misc_feature 26..50: note = RF
ctacgcggccggattacccgttttcttcacctctccgcggtttcaaccta

SEQ ID NO: 25144 - DNA, 50 bp, unidentified
  source 1..50: mol_type = unassigned DNA; note = target_793e085
  misc_feature 1..24: note = LF
  misc_feature 25: note = Core
  misc_feature 26..50: note = RF
tcaaagtctggcttgcgccataacgccgcattaaggtgtgagcaacgcta

SEQ ID NO: 25145 - DNA, 50 bp, unidentified
  source 1..50: mol_type = unassigned DNA; note = target_7953fb2
  misc_feature 1..24: note = LF
  misc_feature 25: note = Core
  misc_feature 26..50: note = RF
tgagtagattgtcttcgacaatgacaaaatggggatgaaaatgggaagta

SEQ ID NO: 25146 - DNA, 50 bp, unidentified
  source 1..50: mol_type = unassigned DNA; note = target_79570f0
  misc_feature 1..23: note = LF
  misc_feature 24..25: note = Core
  misc_feature 26..50: note = RF
gtcgcgacgtgagcaatcgtcgtagcccggatggagcgcagcgaaatccg

SEQ ID NO: 25147 - DNA, 50 bp, unidentified
  source 1..50: mol_type = unassigned DNA; note = target_795ab3d
  misc_feature 1..23: note = LF
  misc_feature 24..25: note = Core
  misc_feature 26..50: note = RF
ggtggcgctcgcgcttaccgtacctaccagagcaaaaatccgtaggtacg

SEQ ID NO: 25148 - DNA, 50 bp, unidentified
  source 1..50: mol_type = unassigned DNA; note = target_796baad
  misc_feature 1..24: note = LF
  misc_feature 25: note = Core
  misc_feature 26..50: note = RF
agtcaacgacttttcccggagcaaaacaacatgagtgcaaaagacgtcaa

SEQ ID NO: 25149 - DNA, 50 bp, unidentified
  source 1..50: mol_type = unassigned DNA; note = target_7970815
  misc_feature 1..23: note = LF
  misc_feature 24..25: note = Core
  misc_feature 26..50: note = RF
gcacgcttcgcacagcgaagcggctacaacgctacaacctggaacgttca

SEQ ID NO: 25150 - DNA, 50 bp, unidentified
  source 1..50: mol_type = unassigned DNA; note = target_7975646
  misc_feature 1..23: note = LF
  misc_feature 24..25: note = Core
  misc_feature 26..50: note = RF
catcccccaaactgcatcaaaagtgagtcagagccaatattgcaggccga

SEQ ID NO: 25151 - DNA, 50 bp, unidentified
  source 1..50: mol_type = unassigned DNA; note = target_79827c1
  misc_feature 1..23: note = LF
  misc_feature 24..25: note = Core
  misc_feature 26..50: note = RF
aaatactgccatgttctcaactcctttcactcgaaatgtcaccgcgtcgt

SEQ ID NO: 25152 - DNA, 50 bp, unidentified
  source 1..50: mol_type = unassigned DNA; note = target_7989f64
  misc_feature 1..22: note = LF
  misc_feature 23..25: note = Core
  misc_feature 26..50: note = RF
agccgacctccaaaagccagcttgaatctgatttggcgcctgatgggaat

SEQ ID NO: 25153 - DNA, 50 bp, unidentified
  source 1..50: mol_type = unassigned DNA; note = target_7991895
  misc_feature 1..21: note = LF
  misc_feature 22..25: note = Core
  misc_feature 26..50: note = RF
caacttcatccgggagagacacccccctccaccggtggtgccgtcgccgc

SEQ ID NO: 25154 - DNA, 50 bp, unidentified
  source 1..50: mol_type = unassigned DNA; note = target_799ed3e
  misc_feature 1..24: note = LF
  misc_feature 25: note = Core
  misc_feature 26..50: note = RF
attcggggccgagcgagctgtacgcgaagggagcccgaacgggcggacga

SEQ ID NO: 25155 - DNA, 50 bp, unidentified
  source 1..50: mol_type = unassigned DNA; note = target_79a9fc9
  misc_feature 1..24: note = LF
  misc_feature 25: note = Core
  misc_feature 26..50: note = RF
atccgaggctggagtggtgtgacgtggtttactgaaaccggacactccag

SEQ ID NO: 25156 - DNA, 50 bp, unidentified
  source 1..50: mol_type = unassigned DNA; note = target_79ad03d
  misc_feature 1..23: note = LF
  misc_feature 24..25: note = Core
  misc_feature 26..50: note = RF
cttccccgcaggtggccgtgtccctattcagcggtccctcgatgcaccag

SEQ ID NO: 25157 - DNA, 50 bp, unidentified
  source 1..50: mol_type = unassigned DNA; note = target_79b30b7
  misc_feature 1..24: note = LF
  misc_feature 25: note = Core
  misc_feature 26..50: note = RF
acgtgtaagcatgaattatacacgttgttacctgctggctttattttttc

SEQ ID NO: 25158 - DNA, 50 bp, unidentified
  source 1..50: mol_type = unassigned DNA; note = target_79b6940
  misc_feature 1..21: note = LF
  misc_feature 22..25: note = Core
  misc_feature 26..50: note = RF
acacaatcaaactcgacaaagtcattgcgacgaaggaagcaatcacgttt

SEQ ID NO: 25159 - DNA, 50 bp, unidentified
  source 1..50: mol_type = unassigned DNA; note = target_79b8113
  misc_feature 1..23: note = LF
  misc_feature 24..25: note = Core
  misc_feature 26..50: note = RF
tggaagcgtccctattcgtcatgctgaacttgattcagcatctcggtatt

SEQ ID NO: 25160 - DNA, 50 bp, unidentified
  source 1..50: mol_type = unassigned DNA; note = target_79bc638
  misc_feature 1..23: note = LF
  misc_feature 24..25: note = Core
  misc_feature 26..50: note = RF
acgcaacaatcggcatttgtggttgggtccctgtgtcttggaagtgtgtc

SEQ ID NO: 25161 - DNA, 50 bp, unidentified
  source 1..50: mol_type = unassigned DNA; note = target_79d1340
  misc_feature 1..23: note = LF
  misc_feature 24..25: note = Core
  misc_feature 26..50: note = RF
tggccagggtgacgggcatgggtgttccttttcggttcgggtctgttggc

SEQ ID NO: 25162 - DNA, 50 bp, unidentified
  source 1..50: mol_type = unassigned DNA; note = target_79f05f8
  misc_feature 1..24: note = LF
  misc_feature 25: note = Core
  misc_feature 26..50: note = RF
aatgaaattcccgtgaaacggggtttgcggtaaagaccccggcggaccca

SEQ ID NO: 25163 - DNA, 50 bp, unidentified
  source 1..50: mol_type = unassigned DNA; note = target_79faf3a
  misc_feature 1..23: note = LF
  misc_feature 24..25: note = Core
  misc_feature 26..50: note = RF
aattttttttccatgtcaaactcctttttattttataagtaagttacaac

SEQ ID NO: 25164 - DNA, 50 bp, unidentified
  source 1..50: mol_type = unassigned DNA; note = target_7a0852f
  misc_feature 1..23: note = LF
  misc_feature 24..25: note = Core
  misc_feature 26..50: note = RF
tcttcgagtcaattcatatgatgtcagacttgccgaaccctataagtcaa

SEQ ID NO: 25165 - DNA, 50 bp, unidentified
  source 1..50: mol_type = unassigned DNA; note = target_7a0f34f
  misc_feature 1..23: note = LF
  misc_feature 24..25: note = Core
  misc_feature 26..50: note = RF
tgtggttgccatagaagggcctcctttctaaaaaagaaacggcctgcatg

SEQ ID NO: 25166 - DNA, 50 bp, unidentified
  source 1..50: mol_type = unassigned DNA; note = target_7a1ea2e
  misc_feature 1..23: note = LF
  misc_feature 24..25: note = Core
  misc_feature 26..50: note = RF
cagatagcagacagacaaaggggtcaggcctttattttcgaataggaatg

SEQ ID NO: 25167 - DNA, 50 bp, unidentified
  source 1..50: mol_type = unassigned DNA; note = target_7a27021
  misc_feature 1..22: note = LF
  misc_feature 23..25: note = Core
  misc_feature 26..50: note = RF
atcggtacgcagataaaccggaatttgtcgctatctatatttgtttctcg

SEQ ID NO: 25168 - DNA, 50 bp, unidentified
  source 1..50: mol_type = unassigned DNA; note = target_7a34fce
  misc_feature 1..23: note = LF
  misc_feature 24..25: note = Core
  misc_feature 26..50: note = RF
gggccggagtcccgcccatcctcctgacccccggcgggtttcttggcctc

SEQ ID NO: 25169 - DNA, 50 bp, unidentified
  source 1..50: mol_type = unassigned DNA; note = target_7a3d299
  misc_feature 1..23: note = LF
  misc_feature 24..25: note = Core
  misc_feature 26..50: note = RF
ttggtgtgcccgaagctggcgccctgcttggtcttgccgtacaccggccg

SEQ ID NO: 25170 - DNA, 50 bp, unidentified
  source 1..50: mol_type = unassigned DNA; note = target_7a45ba6
  misc_feature 1..24: note = LF
  misc_feature 25: note = Core
  misc_feature 26..50: note = RF
tacttcaatcgccaccacttgccccacccccccgagggcgagacctcgat

SEQ ID NO: 25171 - DNA, 50 bp, unidentified
  source 1..50: mol_type = unassigned DNA; note = target_7a4dad3
  misc_feature 1..24: note = LF
  misc_feature 25: note = Core
  misc_feature 26..50: note = RF
catcgacggttcgccaatgtccggttgggtcattagcgaccgaatgaggc

SEQ ID NO: 25172 - DNA, 50 bp, unidentified
  source 1..50: mol_type = unassigned DNA; note = target_7a500bf
  misc_feature 1..23: note = LF
  misc_feature 24..25: note = Core
  misc_feature 26..50: note = RF
ggccgtcgtcatctctcctatcgtcgagatgacggaacaatgtttgttga

SEQ ID NO: 25173 - DNA, 50 bp, unidentified
  source 1..50: mol_type = unassigned DNA; note = target_7a532f0
  misc_feature 1..24: note = LF
  misc_feature 25: note = Core
  misc_feature 26..50: note = RF
cgccgccgaccccgctggcctccccacccccccgatcgccgagaccgcgc

SEQ ID NO: 25174 - DNA, 50 bp, unidentified
  source 1..50: mol_type = unassigned DNA; note = target_7a5d159
  misc_feature 1..22: note = LF
  misc_feature 23..25: note = Core
  misc_feature 26..50: note = RF
tactgccgacgaggtgatcgaatgaagcggcgcgagttcatcacgatgct

SEQ ID NO: 25175 - DNA, 50 bp, unidentified
  source 1..50: mol_type = unassigned DNA; note = target_7a5dd7e
  misc_feature 1..24: note = LF
  misc_feature 25: note = Core
  misc_feature 26..50: note = RF
aagttcaaattgaccgccagattgcggtcattggttggcacgagctttgt

SEQ ID NO: 25176 - DNA, 50 bp, unidentified
  source 1..50: mol_type = unassigned DNA; note = target_7a617da
  misc_feature 1..23: note = LF
  misc_feature 24..25: note = Core
  misc_feature 26..50: note = RF
agcggggggaaggcgcgaagcgcctcaggggggtgttgtttcatctcagg

SEQ ID NO: 25177 - DNA, 50 bp, unidentified
  source 1..50: mol_type = unassigned DNA; note = target_7a78f79
  misc_feature 1..22: note = LF
  misc_feature 23..25: note = Core
  misc_feature 26..50: note = RF
tcgaaccaagattaacggagtcagagtccgctttaaggagcccaacagaa

SEQ ID NO: 25178 - DNA, 50 bp, unidentified
  source 1..50: mol_type = unassigned DNA; note = target_7a7c564
  misc_feature 1..23: note = LF
  misc_feature 24..25: note = Core
  misc_feature 26..50: note = RF
tgagtcacccaattcagccgggagagcagtcatgactacgacacgtctgc

SEQ ID NO: 25179 - DNA, 50 bp, unidentified
  source 1..50: mol_type = unassigned DNA; note = target_7a7f641
  misc_feature 1..21: note = LF
  misc_feature 22..25: note = Core
  misc_feature 26..50: note = RF
tcggtggaagcggattgattcagattagtcgttggacgtctcctttgaaa

SEQ ID NO: 25180 - DNA, 50 bp, unidentified
  source 1..50: mol_type = unassigned DNA; note = target_7a8d61e
  misc_feature 1..22: note = LF
  misc_feature 23..25: note = Core
  misc_feature 26..50: note = RF
cctgttgattgtcactgagaactgacccggcattgtcaccgagatctgac

SEQ ID NO: 25181 - DNA, 50 bp, unidentified
  source 1..50: mol_type = unassigned DNA; note = target_7a932f7
  misc_feature 1..23: note = LF
  misc_feature 24..25: note = Core
  misc_feature 26..50: note = RF
ctctatgaacaggactttttggacagccccatttctatttattgtgcaaa

SEQ ID NO: 25182 - DNA, 50 bp, unidentified
  source 1..50: mol_type = unassigned DNA; note = target_7a983cc
  misc_feature 1..23: note = LF
  misc_feature 24..25: note = Core
  misc_feature 26..50: note = RF
cgcgagtccgctttacccccgttagcgaccaaactgctgcactgcactaa

SEQ ID NO: 25183 - DNA, 50 bp, unidentified
  source 1..50: mol_type = unassigned DNA; note = target_7a9ea7e
  misc_feature 1..23: note = LF
  misc_feature 24..25: note = Core
  misc_feature 26..50: note = RF
atttaaataatgtgtgttatggcagtatgtttatcaatatttttaaatca

SEQ ID NO: 25184 - DNA, 50 bp, unidentified
  source 1..50: mol_type = unassigned DNA; note = target_7aa27a7
  misc_feature 1..24: note = LF
  misc_feature 25: note = Core
  misc_feature 26..50: note = RF
tttaataccttagtgaaacgtaagcggctaattatctgtacctagtcact

SEQ ID NO: 25185 - DNA, 50 bp, unidentified
  source 1..50: mol_type = unassigned DNA; note = target_7aa8d1d
  misc_feature 1..24: note = LF
  misc_feature 25: note = Core
  misc_feature 26..50: note = RF
cccgcacgaaggcgcctccatgagcaccccccccgcccgcaggaggcact

SEQ ID NO: 25186 - DNA, 50 bp, unidentified
  source 1..50: mol_type = unassigned DNA; note = target_7aa9232
  misc_feature 1..23: note = LF
  misc_feature 24..25: note = Core
  misc_feature 26..50: note = RF
ggatatacgtgttgtctctttactcgttacatcctgattcttttaaattt

SEQ ID NO: 25187 - DNA, 50 bp, unidentified
  source 1..50: mol_type = unassigned DNA; note = target_7ab6127
  misc_feature 1..23: note = LF
  misc_feature 24..25: note = Core
  misc_feature 26..50: note = RF
aggacctggcggcgcctgagttttgtctcgcgaggaggcgcttcagtgcc

SEQ ID NO: 25188 - DNA, 50 bp, unidentified
  source 1..50: mol_type = unassigned DNA; note = target_7ab7214
  misc_feature 1..21: note = LF
  misc_feature 22..25: note = Core
  misc_feature 26..50: note = RF
tccaccacatcggtctccgtgccccccgggatgaccggggaccacggaga

SEQ ID NO: 25189 - DNA, 50 bp, unidentified
  source 1..50: mol_type = unassigned DNA; note = target_7ab7847
  misc_feature 1..23: note = LF
  misc_feature 24..25: note = Core
  misc_feature 26..50: note = RF
ggagggacagaggatttacaccgtggatctttatctgaaggttcgtctgg

SEQ ID NO: 25190 - DNA, 50 bp, unidentified
  source 1..50: mol_type = unassigned DNA; note = target_7ab94f5
  misc_feature 1..24: note = LF
  misc_feature 25: note = Core
  misc_feature 26..50: note = RF
acgctgcgctgcctacggcagtacttttcgtacagaacctagggcctgtt

SEQ ID NO: 25191 - DNA, 50 bp, unidentified
  source 1..50: mol_type = unassigned DNA; note = target_7abf5d8
  misc_feature 1..24: note = LF
  misc_feature 25: note = Core
  misc_feature 26..50: note = RF
gtcccttggctcaggctaacgtgctattttccgtttcctgaagcgccccc

SEQ ID NO: 25192 - DNA, 50 bp, unidentified
  source 1..50: mol_type = unassigned DNA; note = target_7ac6748
  misc_feature 1..22: note = LF
  misc_feature 23..25: note = Core
  misc_feature 26..50: note = RF
aactgtcttcattttactcctcctttcttctatcttccattatatcatac

SEQ ID NO: 25193 - DNA, 50 bp, unidentified
  source 1..50: mol_type = unassigned DNA; note = target_7ac83d8
  misc_feature 1..24: note = LF
  misc_feature 25: note = Core
  misc_feature 26..50: note = RF
cagacgcgcactggtgaggtctgctaagtgccaatagccgtcggacgttc

SEQ ID NO: 25194 - DNA, 50 bp, unidentified
  source 1..50: mol_type = unassigned DNA; note = target_7acd090
  misc_feature 1..23: note = LF
  misc_feature 24..25: note = Core
  misc_feature 26..50: note = RF
accatgcacaagacgttgtgggcaattcaaaacaaagactggataagtaa

SEQ ID NO: 25195 - DNA, 50 bp, unidentified
  source 1..50: mol_type = unassigned DNA; note = target_7acd84e
  misc_feature 1..23: note = LF
  misc_feature 24..25: note = Core
  misc_feature 26..50: note = RF
gaaaatcgcctctcaccccaaccctctcccccttcgacaaggctcagggc

SEQ ID NO: 25196 - DNA, 50 bp, unidentified
  source 1..50: mol_type = unassigned DNA; note = target_7ad4216
  misc_feature 1..21: note = LF
  misc_feature 22..25: note = Core
  misc_feature 26..50: note = RF
tggaagacgtagtgcgtcaggctcaccggaagagcccctccgccttgcgc

SEQ ID NO: 25197 - DNA, 50 bp, unidentified
  source 1..50: mol_type = unassigned DNA; note = target_7ad44a4
  misc_feature 1..24: note = LF
  misc_feature 25: note = Core
  misc_feature 26..50: note = RF
gatgccggaggggcgcctatgtgccgatcggcgcggatccccgggcgcgg

SEQ ID NO: 25198 - DNA, 50 bp, unidentified
  source 1..50: mol_type = unassigned DNA; note = target_7ad63db
  misc_feature 1..24: note = LF
  misc_feature 25: note = Core
  misc_feature 26..50: note = RF
acgtcgtggcgatgcgtgcagccttttttttatgagcgtcgccccgagcg

SEQ ID NO: 25199 - DNA, 50 bp, unidentified
  source 1..50: mol_type = unassigned DNA; note = target_7ad8c85
  misc_feature 1..23: note = LF
  misc_feature 24..25: note = Core
  misc_feature 26..50: note = RF
acgaaacgcgcggcagcatcgctagacatcatgtcctgacccacggtttt

SEQ ID NO: 25200 - DNA, 50 bp, unidentified
  source 1..50: mol_type = unassigned DNA; note = target_7adf34f
  misc_feature 1..22: note = LF
  misc_feature 23..25: note = Core
  misc_feature 26..50: note = RF
atccgaagaggtcatgatcctcctttcctggcgtgaaggtacgccagagc

SEQ ID NO: 25201 - DNA, 50 bp, unidentified
  source 1..50: mol_type = unassigned DNA; note = target_7ae0d25
  misc_feature 1..23: note = LF
  misc_feature 24..25: note = Core
  misc_feature 26..50: note = RF
tgggtatcagcatcatatctctccttttatgtatgtgggactgtcttgcg

SEQ ID NO: 25202 - DNA, 50 bp, unidentified
  source 1..50: mol_type = unassigned DNA; note = target_7aea4c2
  misc_feature 1..24: note = LF
  misc_feature 25: note = Core
  misc_feature 26..50: note = RF
tcatagataaaaatttcttcatagtaactttcctttcctatcttgccttt

SEQ ID NO: 25203 - DNA, 50 bp, unidentified
  source 1..50: mol_type = unassigned DNA; note = target_7aea9c9
  misc_feature 1..23: note = LF
  misc_feature 24..25: note = Core
  misc_feature 26..50: note = RF
aacacaaggcatttcggcgtaagcgtccggggaacctgcctttgagattg

SEQ ID NO: 25204 - DNA, 50 bp, unidentified
  source 1..50: mol_type = unassigned DNA; note = target_7aec33b
  misc_feature 1..23: note = LF
  misc_feature 24..25: note = Core
  misc_feature 26..50: note = RF
ggctgcggaagggagcccgtccccccccgagggtctgcagcccgttaggg

SEQ ID NO: 25205 - DNA, 50 bp, unidentified
  source 1..50: mol_type = unassigned DNA; note = target_7af6b83
  misc_feature 1..23: note = LF
  misc_feature 24..25: note = Core
  misc_feature 26..50: note = RF
gatacggccgccatgtctgtttctggcccactgcgtcggatagtgcggtg

SEQ ID NO: 25206 - DNA, 50 bp, unidentified
  source 1..50: mol_type = unassigned DNA; note = target_7af8542
  misc_feature 1..23: note = LF
  misc_feature 24..25: note = Core
  misc_feature 26..50: note = RF
atgatgtggcgaagcggcacgaacgcaggacggctgtggcaaaaggaatt

SEQ ID NO: 25207 - DNA, 50 bp, unidentified
  source 1..50: mol_type = unassigned DNA; note = target_7afaddd
  misc_feature 1..23: note = LF
  misc_feature 24..25: note = Core
  misc_feature 26..50: note = RF
tcgtgtcatttttgtattctgtcctccggcaaaaaataaatccatcacaa

SEQ ID NO: 25208 - DNA, 50 bp, unidentified
  source 1..50: mol_type = unassigned DNA; note = target_7b0641f
  misc_feature 1..24: note = LF
  misc_feature 25: note = Core
  misc_feature 26..50: note = RF
ccgcggacaacatccgagaagtgccgttcctcccgacctctgaggctcac

SEQ ID NO: 25209 - DNA, 50 bp, unidentified
  source 1..50: mol_type = unassigned DNA; note = target_7b0b9f4
  misc_feature 1..22: note = LF
  misc_feature 23..25: note = Core
  misc_feature 26..50: note = RF
aattgattcatcttattttctccttaaaagctcttccacaggttttgacc

SEQ ID NO: 25210 - DNA, 50 bp, unidentified
  source 1..50: mol_type = unassigned DNA; note = target_7b0f892
  misc_feature 1..23: note = LF
  misc_feature 24..25: note = Core
  misc_feature 26..50: note = RF
atcgttactcagcgaacaaaccttgcgatgacgccgataggatggaaaaa

SEQ ID NO: 25211 - DNA, 50 bp, unidentified
  source 1..50: mol_type = unassigned DNA; note = target_7b0f907
  misc_feature 1..24: note = LF
  misc_feature 25: note = Core
  misc_feature 26..50: note = RF
atttacattttaaacatacataatcctttagcagccaaaggatactttgc

SEQ ID NO: 25212 - DNA, 50 bp, unidentified
  source 1..50: mol_type = unassigned DNA; note = target_7b17084
  misc_feature 1..24: note = LF
  misc_feature 25: note = Core
  misc_feature 26..50: note = RF
tcccggcagggagcgcataggtgccgatatgggcggtctcggttggctgc

SEQ ID NO: 25213 - DNA, 50 bp, unidentified
  source 1..50: mol_type = unassigned DNA; note = target_7b2ab35
  misc_feature 1..23: note = LF
  misc_feature 24..25: note = Core
  misc_feature 26..50: note = RF
taatttcattctctacaccttacctttcttgctattcattctacactata

SEQ ID NO: 25214 - DNA, 50 bp, unidentified
  source 1..50: mol_type = unassigned DNA; note = target_7b2dd55
  misc_feature 1..24: note = LF
  misc_feature 25: note = Core
  misc_feature 26..50: note = RF
cgtggcacgcaagtgctccggggctttcttttgtccgcgcgccaggggat

SEQ ID NO: 25215 - DNA, 50 bp, unidentified
  source 1..50: mol_type = unassigned DNA; note = target_7b32eab
  misc_feature 1..23: note = LF
  misc_feature 24..25: note = Core
  misc_feature 26..50: note = RF
tgccaagtcgccttttgacccaaagcagacttggacggtcggacacctgt

SEQ ID NO: 25216 - DNA, 50 bp, unidentified
  source 1..50: mol_type = unassigned DNA; note = target_7b375a1
  misc_feature 1..24: note = LF
  misc_feature 25: note = Core
  misc_feature 26..50: note = RF
cgcacccgaccgccagcgcgcgcataaggcggctacgtgcgcgcctcacc

SEQ ID NO: 25217 - DNA, 50 bp, unidentified
  source 1..50: mol_type = unassigned DNA; note = target_7b3d452
  misc_feature 1..23: note = LF
  misc_feature 24..25: note = Core
  misc_feature 26..50: note = RF
gcccaagggacaatgtccgcttttggcccttaacggactcggcacgggac

SEQ ID NO: 25218 - DNA, 50 bp, unidentified
  source 1..50: mol_type = unassigned DNA; note = target_7b46c7e
  misc_feature 1..23: note = LF
  misc_feature 24..25: note = Core
  misc_feature 26..50: note = RF
gcccgacccgatccgcctgtggttgggtccctgcgttcgcagggacgaca

SEQ ID NO: 25219 - DNA, 50 bp, unidentified
  source 1..50: mol_type = unassigned DNA; note = target_7b49e27
  misc_feature 1..21: note = LF
  misc_feature 22..25: note = Core
  misc_feature 26..50: note = RF
acttcatcaataaacatattatcacctcaacaaacatattataccttaaa

SEQ ID NO: 25220 - DNA, 50 bp, unidentified
  source 1..50: mol_type = unassigned DNA; note = target_7b4a6f9
  misc_feature 1..23: note = LF
  misc_feature 24..25: note = Core
  misc_feature 26..50: note = RF
ggattgcttcgcgttgctcgcaatgacgtccaccgggctggaacgacaag

SEQ ID NO: 25221 - DNA, 50 bp, unidentified
  source 1..50: mol_type = unassigned DNA; note = target_7b56e43
  misc_feature 1..24: note = LF
  misc_feature 25: note = Core
  misc_feature 26..50: note = RF
ctaaatcatccattccgagtccgcttcgggtcacaagcggcggtcgaagg

SEQ ID NO: 25222 - DNA, 50 bp, unidentified
  source 1..50: mol_type = unassigned DNA; note = target_7b593b1
  misc_feature 1..22: note = LF
  misc_feature 23..25: note = Core
  misc_feature 26..50: note = RF
gaacttaatgaaacccttgcgctctttgcgtttaaaaaactacttttgca

SEQ ID NO: 25223 - DNA, 50 bp, unidentified
  source 1..50: mol_type = unassigned DNA; note = target_7b63e51
  misc_feature 1..23: note = LF
  misc_feature 24..25: note = Core
  misc_feature 26..50: note = RF
gctgcaccgcatatgtccgcttttggcacaaagcggacattgccaccgtg

SEQ ID NO: 25224 - DNA, 50 bp, unidentified
  source 1..50: mol_type = unassigned DNA; note = target_7b73709
  misc_feature 1..23: note = LF
  misc_feature 24..25: note = Core
  misc_feature 26..50: note = RF
aagctaccagcacgtcgtatatgtgcctatcgcagcggcgagggcagcga

SEQ ID NO: 25225 - DNA, 50 bp, unidentified
  source 1..50: mol_type = unassigned DNA; note = target_7b847cd
  misc_feature 1..23: note = LF
  misc_feature 24..25: note = Core
  misc_feature 26..50: note = RF
aatgtccctgtttaaacataggatgtgccgacgacaggaggcgcatcgtt

SEQ ID NO: 25226 - DNA, 50 bp, unidentified
  source 1..50: mol_type = unassigned DNA; note = target_7b873ea
  misc_feature 1..24: note = LF
  misc_feature 25: note = Core
  misc_feature 26..50: note = RF
gaggcggtttgcgtgaaatttaacgtaatgtagaccgcaaaacctgcggg

SEQ ID NO: 25227 - DNA, 50 bp, unidentified
  source 1..50: mol_type = unassigned DNA; note = target_7b8744d
  misc_feature 1..21: note = LF
  misc_feature 22..25: note = Core
  misc_feature 26..50: note = RF
cgagtcaatatcgatggctcttttttatacccgaaatcgaaaggagaacc

SEQ ID NO: 25228 - DNA, 50 bp, unidentified
  source 1..50: mol_type = unassigned DNA; note = target_7b8768f
  misc_feature 1..21: note = LF
  misc_feature 22..25: note = Core
  misc_feature 26..50: note = RF
ttacatttgaactcattttaatcacctaatttactaaacattatacataa

SEQ ID NO: 25229 - DNA, 50 bp, unidentified
  source 1..50: mol_type = unassigned DNA; note = target_7b97d44
  misc_feature 1..24: note = LF
  misc_feature 25: note = Core
  misc_feature 26..50: note = RF
ataactagtaatgaattatacacattgttggcaatagttatttttttatt

SEQ ID NO: 25230 - DNA, 50 bp, unidentified
  source 1..50: mol_type = unassigned DNA; note = target_7b9c8bb
  misc_feature 1..24: note = LF
  misc_feature 25: note = Core
  misc_feature 26..50: note = RF
ccagccgctggtactgcactcggacaatggcagcgcgatgaagggctcga

SEQ ID NO: 25231 - DNA, 50 bp, unidentified
  source 1..50: mol_type = unassigned DNA; note = target_7bb73bf
  misc_feature 1..21: note = LF
  misc_feature 22..25: note = Core
  misc_feature 26..50: note = RF
ttgacctcgagcagcatgtcgctcatgcgcggccgccgaccggcgcgggc

SEQ ID NO: 25232 - DNA, 50 bp, unidentified
  source 1..50: mol_type = unassigned DNA; note = target_7bc6939
  misc_feature 1..22: note = LF
  misc_feature 23..25: note = Core
  misc_feature 26..50: note = RF
accttattaagttaacctgctcgtttagtttaagtgaaaaatttcacaaa

SEQ ID NO: 25233 - DNA, 50 bp, unidentified
  source 1..50: mol_type = unassigned DNA; note = target_7bcc94e
  misc_feature 1..24: note = LF
  misc_feature 25: note = Core
  misc_feature 26..50: note = RF
ctgttggatacgggttcctccacccacccccgctgcagtgcccaacgcga

SEQ ID NO: 25234 - DNA, 50 bp, unidentified
  source 1..50: mol_type = unassigned DNA; note = target_7bcd781
  misc_feature 1..23: note = LF
  misc_feature 24..25: note = Core
  misc_feature 26..50: note = RF
ttcgtttcagctattgacttttgtttgcaggctgttaccgagtccgctga

SEQ ID NO: 25235 - DNA, 50 bp, unidentified
  source 1..50: mol_type = unassigned DNA; note = target_7bce501
  misc_feature 1..24: note = LF
  misc_feature 25: note = Core
  misc_feature 26..50: note = RF
ggaggtggaggttaggacaggatttgaacctgcgatgagtccctggtgcg

SEQ ID NO: 25236 - DNA, 50 bp, unidentified
  source 1..50: mol_type = unassigned DNA; note = target_7bcef95
  misc_feature 1..21: note = LF
  misc_feature 22..25: note = Core
  misc_feature 26..50: note = RF
ccgccccggcgggaagagcgcaccccccggcaggaaggcccggcggcccc

SEQ ID NO: 25237 - DNA, 50 bp, unidentified
  source 1..50: mol_type = unassigned DNA; note = target_7bd969d
  misc_feature 1..23: note = LF
  misc_feature 24..25: note = Core
  misc_feature 26..50: note = RF
atcaaacctaatacaccttttttctaatttcttcttacctacatacaaca

SEQ ID NO: 25238 - DNA, 50 bp, unidentified
  source 1..50: mol_type = unassigned DNA; note = target_7beaae3
  misc_feature 1..24: note = LF
  misc_feature 25: note = Core
  misc_feature 26..50: note = RF
ctgaccacgccaaggggtttcccgtgttgcgcgcgcttcccttgtgtaca

SEQ ID NO: 25239 - DNA, 50 bp, unidentified
  source 1..50: mol_type = unassigned DNA; note = target_7beca9d
  misc_feature 1..23: note = LF
  misc_feature 24..25: note = Core
  misc_feature 26..50: note = RF
gaggatttaccctacgggaaagctgtcattcgcttgatcttcctacgatt

SEQ ID NO: 25240 - DNA, 50 bp, unidentified
  source 1..50: mol_type = unassigned DNA; note = target_7bf5f92
  misc_feature 1..21: note = LF
  misc_feature 22..25: note = Core
  misc_feature 26..50: note = RF
tcttttggcgttctcatactctcacctcggttcggttatacgctttgcca

SEQ ID NO: 25241 - DNA, 50 bp, unidentified
  source 1..50: mol_type = unassigned DNA; note = target_7c034c3
  misc_feature 1..24: note = LF
  misc_feature 25: note = Core
  misc_feature 26..50: note = RF
caggactcattggcccgaaacagatgtgggagctggcttgccagcgatgc

SEQ ID NO: 25242 - DNA, 50 bp, unidentified
  source 1..50: mol_type = unassigned DNA; note = target_7c0c260
  misc_feature 1..24: note = LF
  misc_feature 25: note = Core
  misc_feature 26..50: note = RF
tagacaccccacggggagtctctacttgtcctaccgttatttcatgcgtg

SEQ ID NO: 25243 - DNA, 50 bp, unidentified
  source 1..50: mol_type = unassigned DNA; note = target_7c12115
  misc_feature 1..21: note = LF
  misc_feature 22..25: note = Core
  misc_feature 26..50: note = RF
gtggatgtcccagccatgtcgctcataccccgcccttcgctcgggacaac

SEQ ID NO: 25244 - DNA, 50 bp, unidentified
  source 1..50: mol_type = unassigned DNA; note = target_7c1db41
  misc_feature 1..19: note = LF
  misc_feature 20..25: note = Core
  misc_feature 26..50: note = RF
tcttggcagatccaccacgcaccccccgtacattggttctccgacctccg

SEQ ID NO: 25245 - DNA, 50 bp, unidentified
  source 1..50: mol_type = unassigned DNA; note = target_7c39615
  misc_feature 1..22: note = LF
  misc_feature 23..25: note = Core
  misc_feature 26..50: note = RF
aacgcgagaatgccatattcccctttttttcctaaatccttctcaatgcc

SEQ ID NO: 25246 - DNA, 50 bp, unidentified
  source 1..50: mol_type = unassigned DNA; note = target_7c3a391
  misc_feature 1..23: note = LF
  misc_feature 24..25: note = Core
  misc_feature 26..50: note = RF
acctcactccaactcattccagcctactcagactcactcaggcctactgc

SEQ ID NO: 25247 - DNA, 50 bp, unidentified
  source 1..50: mol_type = unassigned DNA; note = target_7c3af9b
  misc_feature 1..24: note = LF
  misc_feature 25: note = Core
  misc_feature 26..50: note = RF
aatggggttccgccgatgccaaagtgtaccgctgattcgatggactttgg

SEQ ID NO: 25248 - DNA, 50 bp, unidentified
  source 1..50: mol_type = unassigned DNA; note = target_7c3c288
  misc_feature 1..24: note = LF
  misc_feature 25: note = Core
  misc_feature 26..50: note = RF
cttctaatttcacttcgcctttatcgtctatgaagggtttacaccacact

SEQ ID NO: 25249 - DNA, 50 bp, unidentified
  source 1..50: mol_type = unassigned DNA; note = target_7c40524
  misc_feature 1..22: note = LF
  misc_feature 23..25: note = Core
  misc_feature 26..50: note = RF
gttgggcttccccggtcgcattccccccgtttactaaacgagcagcatcc

SEQ ID NO: 25250 - DNA, 50 bp, unidentified
  source 1..50: mol_type = unassigned DNA; note = target_7c493b0
  misc_feature 1..23: note = LF
  misc_feature 24..25: note = Core
  misc_feature 26..50: note = RF
cactactcagcatctgcattcccctctaccgtgaagccggatttaatgac

SEQ ID NO: 25251 - DNA, 50 bp, unidentified
  source 1..50: mol_type = unassigned DNA; note = target_7c50240
  misc_feature 1..22: note = LF
  misc_feature 23..25: note = Core
  misc_feature 26..50: note = RF
atcggcttcgttttatctcttttcttgcttattaaatgcgttccgtccta

SEQ ID NO: 25252 - DNA, 50 bp, unidentified
  source 1..50: mol_type = unassigned DNA; note = target_7c51990
  misc_feature 1..22: note = LF
  misc_feature 23..25: note = Core
  misc_feature 26..50: note = RF
cgtgccggtggaggagccgtccacagcatcaacaggagacatcgcgactg

SEQ ID NO: 25253 - DNA, 50 bp, unidentified
  source 1..50: mol_type = unassigned DNA; note = target_7c592c5
  misc_feature 1..23: note = LF
  misc_feature 24..25: note = Core
  misc_feature 26..50: note = RF
tagtttgggaaaaccttatcctgcttgtaaaatgtactcgttttccaatt

SEQ ID NO: 25254 - DNA, 50 bp, unidentified
  source 1..50: mol_type = unassigned DNA; note = target_7c5dfd3
  misc_feature 1..23: note = LF
  misc_feature 24..25: note = Core
  misc_feature 26..50: note = RF
atgaaaattcgcctgcaagcaggctcctacaggaaatctcgaggcaggcc

SEQ ID NO: 25255 - DNA, 50 bp, unidentified
  source 1..50: mol_type = unassigned DNA; note = target_7c752ae
  misc_feature 1..24: note = LF
  misc_feature 25: note = Core
  misc_feature 26..50: note = RF
ccgcttcgcggcgggcgtcagcatttttttgcggcaacatccttcaggat

SEQ ID NO: 25256 - DNA, 50 bp, unidentified
  source 1..50: mol_type = unassigned DNA; note = target_7c7ba67
  misc_feature 1..23: note = LF
  misc_feature 24..25: note = Core
  misc_feature 26..50: note = RF
cggggctggtgtgaaccgctggactcaactcagcctgacacgcaggggac

SEQ ID NO: 25257 - DNA, 50 bp, unidentified
  source 1..50: mol_type = unassigned DNA; note = target_7c87083
  misc_feature 1..24: note = LF
  misc_feature 25: note = Core
  misc_feature 26..50: note = RF
aggggtaggcaaaagttgggccctcactctcacatccctagcccttccca

SEQ ID NO: 25258 - DNA, 50 bp, unidentified
  source 1..50: mol_type = unassigned DNA; note = target_7c8ac24
  misc_feature 1..23: note = LF
  misc_feature 24..25: note = Core
  misc_feature 26..50: note = RF
tctgcagatggtgttccaggatcctttcgcgtcgctcgacccgaaatggc

SEQ ID NO: 25259 - DNA, 50 bp, unidentified
  source 1..50: mol_type = unassigned DNA; note = target_7c8b644
  misc_feature 1..23: note = LF
  misc_feature 24..25: note = Core
  misc_feature 26..50: note = RF
taagccgtccttacttccgtatttggcactaccctgccatagcccattga

SEQ ID NO: 25260 - DNA, 50 bp, unidentified
  source 1..50: mol_type = unassigned DNA; note = target_7c8e96c
  misc_feature 1..23: note = LF
  misc_feature 24..25: note = Core
  misc_feature 26..50: note = RF
tatgggagatactgtcgcaatgtctccaaacaaatctagatagcgcttca

SEQ ID NO: 25261 - DNA, 50 bp, unidentified
  source 1..50: mol_type = unassigned DNA; note = target_7c93a25
  misc_feature 1..24: note = LF
  misc_feature 25: note = Core
  misc_feature 26..50: note = RF
acgatcgaacgcgagtcatcgcggcaaatgtgtgcgtttgcaaaagcttg

SEQ ID NO: 25262 - DNA, 50 bp, unidentified
  source 1..50: mol_type = unassigned DNA; note = target_7c96d9c
  misc_feature 1..23: note = LF
  misc_feature 24..25: note = Core
  misc_feature 26..50: note = RF
gtttacacagccggggtctccaactagatggcgaagaacagccggcggaa

SEQ ID NO: 25263 - DNA, 50 bp, unidentified
  source 1..50: mol_type = unassigned DNA; note = target_7c9a84a
  misc_feature 1..23: note = LF
  misc_feature 24..25: note = Core
  misc_feature 26..50: note = RF
gtttcctgcaattctggcttctcctttctttaagatctatctaatattat

SEQ ID NO: 25264 - DNA, 50 bp, unidentified
  source 1..50: mol_type = unassigned DNA; note = target_7cae1b7
  misc_feature 1..23: note = LF
  misc_feature 24..25: note = Core
  misc_feature 26..50: note = RF
ctgagacacggggaagcttggggtcaggtcttgtttcttgcgtggtctaa

SEQ ID NO: 25265 - DNA, 50 bp, unidentified
  source 1..50: mol_type = unassigned DNA; note = target_7cc7ede
  misc_feature 1..23: note = LF
  misc_feature 24..25: note = Core
  misc_feature 26..50: note = RF
catacgcggccgatgtccgcttctggctattctcggaagttcttaacgtc

SEQ ID NO: 25266 - DNA, 50 bp, unidentified
  source 1..50: mol_type = unassigned DNA; note = target_7cdc829
  misc_feature 1..23: note = LF
  misc_feature 24..25: note = Core
  misc_feature 26..50: note = RF
gaatagatgggaatagcgaaacaagccggaatgacaaaaatgggacatta

SEQ ID NO: 25267 - DNA, 50 bp, unidentified
  source 1..50: mol_type = unassigned DNA; note = target_7cef3d1
  misc_feature 1..24: note = LF
  misc_feature 25: note = Core
  misc_feature 26..50: note = RF
ctcggcggacgcttaccacgcggaccgtggcatccggctcgtaggtctcc

SEQ ID NO: 25268 - DNA, 50 bp, unidentified
  source 1..50: mol_type = unassigned DNA; note = target_7cf6a2a
  misc_feature 1..21: note = LF
  misc_feature 22..25: note = Core
  misc_feature 26..50: note = RF
ggctgccaagtcagccgcgcgctcatgccagcgtcacctccagcagggtg

SEQ ID NO: 25269 - DNA, 50 bp, unidentified
  source 1..50: mol_type = unassigned DNA; note = target_7cf833a
  misc_feature 1..21: note = LF
  misc_feature 22..25: note = Core
  misc_feature 26..50: note = RF
ctttaagattcatgaacattcctcctgtccgctcccttgggcggcctttt

SEQ ID NO: 25270 - DNA, 50 bp, unidentified
  source 1..50: mol_type = unassigned DNA; note = target_7cfecdd
  misc_feature 1..23: note = LF
  misc_feature 24..25: note = Core
  misc_feature 26..50: note = RF
cggttacgaggcccaaccaggtctgggctatggacctgacatatgttccg

SEQ ID NO: 25271 - DNA, 50 bp, unidentified
  source 1..50: mol_type = unassigned DNA; note = target_7cffa40
  misc_feature 1..23: note = LF
  misc_feature 24..25: note = Core
  misc_feature 26..50: note = RF
catcttgacgaaaagacctgacgctaccagttcactcgatgaaacataaa

SEQ ID NO: 25272 - DNA, 50 bp, unidentified
  source 1..50: mol_type = unassigned DNA; note = target_7d07b9e
  misc_feature 1..23: note = LF
  misc_feature 24..25: note = Core
  misc_feature 26..50: note = RF
ctactgaccgaacgccggaaacaccgttcgcgctacaggcccgaccggga

SEQ ID NO: 25273 - DNA, 50 bp, unidentified
  source 1..50: mol_type = unassigned DNA; note = target_7d14c73
  misc_feature 1..23: note = LF
  misc_feature 24..25: note = Core
  misc_feature 26..50: note = RF
gctgagggcgcggctttacagggatgttacctcgcgcccgacccgaaagc

SEQ ID NO: 25274 - DNA, 50 bp, unidentified
  source 1..50: mol_type = unassigned DNA; note = target_7d1e16c
  misc_feature 1..23: note = LF
  misc_feature 24..25: note = Core
  misc_feature 26..50: note = RF
gcaaccggcttagcgtgctttatttccgttttctgaggcgacccccacat

SEQ ID NO: 25275 - DNA, 50 bp, unidentified
  source 1..50: mol_type = unassigned DNA; note = target_7d2323c
  misc_feature 1..24: note = LF
  misc_feature 25: note = Core
  misc_feature 26..50: note = RF
ggggctccttcgtcgcccctcctccaaatcccccagtgcttcattcgaga

SEQ ID NO: 25276 - DNA, 50 bp, unidentified
  source 1..50: mol_type = unassigned DNA; note = target_7d2ab91
  misc_feature 1..23: note = LF
  misc_feature 24..25: note = Core
  misc_feature 26..50: note = RF
gcaccgaagtaatactggttgccttcgtctggtgcatctcaggatcacgc

SEQ ID NO: 25277 - DNA, 50 bp, unidentified
  source 1..50: mol_type = unassigned DNA; note = target_7d30224
  misc_feature 1..23: note = LF
  misc_feature 24..25: note = Core
  misc_feature 26..50: note = RF
ccgaatgggtggcggagcgactcagggacatgatcatcaagggcgatctg

SEQ ID NO: 25278 - DNA, 50 bp, unidentified
  source 1..50: mol_type = unassigned DNA; note = target_7d3902c
  misc_feature 1..23: note = LF
  misc_feature 24..25: note = Core
  misc_feature 26..50: note = RF
aacaacggcacttccaggcgacgctcccacaaaagtactgatggttccca

SEQ ID NO: 25279 - DNA, 50 bp, unidentified
  source 1..50: mol_type = unassigned DNA; note = target_7d39af0
  misc_feature 1..24: note = LF
  misc_feature 25: note = Core
  misc_feature 26..50: note = RF
tagcgcctactttattcggagtatcttgcaaatggacaatgaacgggttt

SEQ ID NO: 25280 - DNA, 50 bp, unidentified
  source 1..50: mol_type = unassigned DNA; note = target_7d455d0
  misc_feature 1..22: note = LF
  misc_feature 23..25: note = Core
  misc_feature 26..50: note = RF
tcgaactaggattgacggagtcagagtccgcaaagaccgtcgtcaggatt

SEQ ID NO: 25281 - DNA, 50 bp, unidentified
  source 1..50: mol_type = unassigned DNA; note = target_7d47356
  misc_feature 1..20: note = LF
  misc_feature 21..25: note = Core
  misc_feature 26..50: note = RF
caggctctttttcatgggatctcctttcgaaacgcctttgctgcgagtag

SEQ ID NO: 25282 - DNA, 50 bp, unidentified
  source 1..50: mol_type = unassigned DNA; note = target_7d49f5e
  misc_feature 1..23: note = LF
  misc_feature 24..25: note = Core
  misc_feature 26..50: note = RF
gcaggaagtcgctcatatgtattcggcctgtttatcggcgcgcgggccgt

SEQ ID NO: 25283 - DNA, 50 bp, unidentified
  source 1..50: mol_type = unassigned DNA; note = target_7d4cd7b
  misc_feature 1..24: note = LF
  misc_feature 25: note = Core
  misc_feature 26..50: note = RF
ccgagcctaacgtacgccagggaaaaacatcatgaccgttgccctcgagg

SEQ ID NO: 25284 - DNA, 50 bp, unidentified
  source 1..50: mol_type = unassigned DNA; note = target_7d55079
  misc_feature 1..22: note = LF
  misc_feature 23..25: note = Core
  misc_feature 26..50: note = RF
agtgttgattgccgctgagaagtgacccggtgggggtgcggataaaaact

SEQ ID NO: 25285 - DNA, 50 bp, unidentified
  source 1..50: mol_type = unassigned DNA; note = target_7d65c68
  misc_feature 1..23: note = LF
  misc_feature 24..25: note = Core
  misc_feature 26..50: note = RF
tcaaataagcggataaattccgctttatttcaccaaaaaagagctttatt

SEQ ID NO: 25286 - DNA, 50 bp, unidentified
  source 1..50: mol_type = unassigned DNA; note = target_7d67056
  misc_feature 1..23: note = LF
  misc_feature 24..25: note = Core
  misc_feature 26..50: note = RF
ctaaggggttggcgtgagtggccctcgaggcagaggcctattgcccacgg

SEQ ID NO: 25287 - DNA, 50 bp, unidentified
  source 1..50: mol_type = unassigned DNA; note = target_7d69558
  misc_feature 1..23: note = LF
  misc_feature 24..25: note = Core
  misc_feature 26..50: note = RF
atagtctttcatagggccttctcctttcctctattctacatcggaggaac

SEQ ID NO: 25288 - DNA, 50 bp, unidentified
  source 1..50: mol_type = unassigned DNA; note = target_7d78ae3
  misc_feature 1..23: note = LF
  misc_feature 24..25: note = Core
  misc_feature 26..50: note = RF
gtcgctgcgctcctttgcccgccctacgattaaagtcccgctcgcgcttt

SEQ ID NO: 25289 - DNA, 50 bp, unidentified
  source 1..50: mol_type = unassigned DNA; note = target_7d7f033
  misc_feature 1..24: note = LF
  misc_feature 25: note = Core
  misc_feature 26..50: note = RF
gctttcggttccctgatgggtaagcgttcatcctgacacgttattttctc

SEQ ID NO: 25290 - DNA, 50 bp, unidentified
  source 1..50: mol_type = unassigned DNA; note = target_7d846d9
  misc_feature 1..23: note = LF
  misc_feature 24..25: note = Core
  misc_feature 26..50: note = RF
tgctcatcaatcgtatgatactcctttataaatcgattgataacatcctt

SEQ ID NO: 25291 - DNA, 50 bp, unidentified
  source 1..50: mol_type = unassigned DNA; note = target_7d8a59c
  misc_feature 1..23: note = LF
  misc_feature 24..25: note = Core
  misc_feature 26..50: note = RF
ctgccgcccggcaaccgccgggcttctttgggccggcgctacactgcctg

SEQ ID NO: 25292 - DNA, 50 bp, unidentified
  source 1..50: mol_type = unassigned DNA; note = target_7d8f69d
  misc_feature 1..22: note = LF
  misc_feature 23..25: note = Core
  misc_feature 26..50: note = RF
caaggttttagaaaaagtcaagtcttgttctttcacttatttcatggtat

SEQ ID NO: 25293 - DNA, 50 bp, unidentified
  source 1..50: mol_type = unassigned DNA; note = target_7d8f85a
  misc_feature 1..23: note = LF
  misc_feature 24..25: note = Core
  misc_feature 26..50: note = RF
tcagcgttatgcccacgccaagcagttcaaaccaaggcgctgcgcaggct

SEQ ID NO: 25294 - DNA, 50 bp, unidentified
  source 1..50: mol_type = unassigned DNA; note = target_7d8fbc0
  misc_feature 1..23: note = LF
  misc_feature 24..25: note = Core
  misc_feature 26..50: note = RF
tgcgctgagttctatctaagggcctgccctgagttctatcgaagggttca

SEQ ID NO: 25295 - DNA, 50 bp, unidentified
  source 1..50: mol_type = unassigned DNA; note = target_7db1e68
  misc_feature 1..23: note = LF
  misc_feature 24..25: note = Core
  misc_feature 26..50: note = RF
aattgaagttcataatgattctccttttattttattacggtaaataccgc

SEQ ID NO: 25296 - DNA, 50 bp, unidentified
  source 1..50: mol_type = unassigned DNA; note = target_7dbb137
  misc_feature 1..24: note = LF
  misc_feature 25: note = Core
  misc_feature 26..50: note = RF
aaaaacttcttgcaaggacgggggcatccacatatgacttaatctgacgg

SEQ ID NO: 25297 - DNA, 50 bp, unidentified
  source 1..50: mol_type = unassigned DNA; note = target_7dbce82
  misc_feature 1..23: note = LF
  misc_feature 24..25: note = Core
  misc_feature 26..50: note = RF
cagcaagaaacagctctgatacttcagcatgataattagtttctcctata

SEQ ID NO: 25298 - DNA, 50 bp, unidentified
  source 1..50: mol_type = unassigned DNA; note = target_7dc5747
  misc_feature 1..23: note = LF
  misc_feature 24..25: note = Core
  misc_feature 26..50: note = RF
tagcccagtcctcgcgactgggctttgttttccggattctgtgtaggcac

SEQ ID NO: 25299 - DNA, 50 bp, unidentified
  source 1..50: mol_type = unassigned DNA; note = target_7dce3aa
  misc_feature 1..23: note = LF
  misc_feature 24..25: note = Core
  misc_feature 26..50: note = RF
tatttttttattcattttacctccttaaaaattattttcataatttaata

SEQ ID NO: 25300 - DNA, 50 bp, unidentified
  source 1..50: mol_type = unassigned DNA; note = target_7dd77c2
  misc_feature 1..23: note = LF
  misc_feature 24..25: note = Core
  misc_feature 26..50: note = RF
gcttaacaaataattaatatctactgaataaaccgcaaaacggcataaat

SEQ ID NO: 25301 - DNA, 50 bp, unidentified
  source 1..50: mol_type = unassigned DNA; note = target_7dd8802
  misc_feature 1..22: note = LF
  misc_feature 23..25: note = Core
  misc_feature 26..50: note = RF
tcgaatatcccctgatcacgtcctaggcgacctcgttgatatccagtcat

SEQ ID NO: 25302 - DNA, 50 bp, unidentified
  source 1..50: mol_type = unassigned DNA; note = target_7ddb49a
  misc_feature 1..23: note = LF
  misc_feature 24..25: note = Core
  misc_feature 26..50: note = RF
agcgatgccgtgagggggcgtccacccatcaatctcggctcccacaagtc

SEQ ID NO: 25303 - DNA, 50 bp, unidentified
  source 1..50: mol_type = unassigned DNA; note = target_7dea2b2
  misc_feature 1..23: note = LF
  misc_feature 24..25: note = Core
  misc_feature 26..50: note = RF
agcgcttcgcgctgggcccctccctctcccgtggggagaggggctaagaa

SEQ ID NO: 25304 - DNA, 50 bp, unidentified
  source 1..50: mol_type = unassigned DNA; note = target_7dea59b
  misc_feature 1..22: note = LF
  misc_feature 23..25: note = Core
  misc_feature 26..50: note = RF
gccagctgcggcgaactgactcagacccgacaacctgtttcgcgcggggc

SEQ ID NO: 25305 - DNA, 50 bp, unidentified
  source 1..50: mol_type = unassigned DNA; note = target_7deb680
  misc_feature 1..22: note = LF
  misc_feature 23..25: note = Core
  misc_feature 26..50: note = RF
atgatcactcgcgccaaagcagctccgtcgaacccatcgcggatgatgag

SEQ ID NO: 25306 - DNA, 50 bp, unidentified
  source 1..50: mol_type = unassigned DNA; note = target_7deddeb
  misc_feature 1..23: note = LF
  misc_feature 24..25: note = Core
  misc_feature 26..50: note = RF
gattacagtcagggtccctacctagtactgcagccgtagatcgggatggc

SEQ ID NO: 25307 - DNA, 50 bp, unidentified
  source 1..50: mol_type = unassigned DNA; note = target_7df6f66
  misc_feature 1..23: note = LF
  misc_feature 24..25: note = Core
  misc_feature 26..50: note = RF
ctggaactcggccttctttatgttgcgcgaaatgtgcaaagtgcggactt

SEQ ID NO: 25308 - DNA, 50 bp, unidentified
  source 1..50: mol_type = unassigned DNA; note = target_7df7028
  misc_feature 1..24: note = LF
  misc_feature 25: note = Core
  misc_feature 26..50: note = RF
gcggcggtcagcagagggtcaaactgagacaccaccaaccggtcggaagt

SEQ ID NO: 25309 - DNA, 50 bp, unidentified
  source 1..50: mol_type = unassigned DNA; note = target_7e0ad12
  misc_feature 1..22: note = LF
  misc_feature 23..25: note = Core
  misc_feature 26..50: note = RF
attttcagtgaagcacttattcagaccatccttagcggaacaccagaacc

SEQ ID NO: 25310 - DNA, 50 bp, unidentified
  source 1..50: mol_type = unassigned DNA; note = target_7e0e3fa
  misc_feature 1..24: note = LF
  misc_feature 25: note = Core
  misc_feature 26..50: note = RF
cggtcaggactttcggaccgaaagtgttaaccatgtgtccggtataaagt

SEQ ID NO: 25311 - DNA, 50 bp, unidentified
  source 1..50: mol_type = unassigned DNA; note = target_7e218d2
  misc_feature 1..22: note = LF
  misc_feature 23..25: note = Core
  misc_feature 26..50: note = RF
aaatcctggcctgcgtcaaagcggacattatccccaatattgatagcaac

SEQ ID NO: 25312 - DNA, 50 bp, unidentified
  source 1..50: mol_type = unassigned DNA; note = target_7e21908
  misc_feature 1..23: note = LF
  misc_feature 24..25: note = Core
  misc_feature 26..50: note = RF
cgttttgctatcgcgaaaacgccctacagctttattcccaaaaggtactg

SEQ ID NO: 25313 - DNA, 50 bp, unidentified
  source 1..50: mol_type = unassigned DNA; note = target_7e32b92
  misc_feature 1..23: note = LF
  misc_feature 24..25: note = Core
  misc_feature 26..50: note = RF
cagcgggcccagccagccccggtctagaacgccgctgaggtaccgcctgg

SEQ ID NO: 25314 - DNA, 50 bp, unidentified
  source 1..50: mol_type = unassigned DNA; note = target_7e35cd3
  misc_feature 1..22: note = LF
  misc_feature 23..25: note = Core
  misc_feature 26..50: note = RF
gtggagactggtcgcagaggactgacagcaccgccaccgggatatcttcc

SEQ ID NO: 25315 - DNA, 50 bp, unidentified
  source 1..50: mol_type = unassigned DNA; note = target_7e3829a
  misc_feature 1..23: note = LF
  misc_feature 24..25: note = Core
  misc_feature 26..50: note = RF
gccgcccacccccgagcgatcggtggcacctcgacgagatggtggttcgt

SEQ ID NO: 25316 - DNA, 50 bp, unidentified
  source 1..50: mol_type = unassigned DNA; note = target_7e3cb0c
  misc_feature 1..23: note = LF
  misc_feature 24..25: note = Core
  misc_feature 26..50: note = RF
gttttaacggcttacttcgcgctctccccggagatcgggctttcttgtct

SEQ ID NO: 25317 - DNA, 50 bp, unidentified
  source 1..50: mol_type = unassigned DNA; note = target_7e3f88c
  misc_feature 1..23: note = LF
  misc_feature 24..25: note = Core
  misc_feature 26..50: note = RF
aagcaccttgattctcgccatctcttctctccctagggcctgttgatgat

SEQ ID NO: 25318 - DNA, 50 bp, unidentified
  source 1..50: mol_type = unassigned DNA; note = target_7e48106
  misc_feature 1..23: note = LF
  misc_feature 24..25: note = Core
  misc_feature 26..50: note = RF
acgacatcgacgagtcgcttgagctagatccgatcgaacttggcgcgcag

SEQ ID NO: 25319 - DNA, 50 bp, unidentified
  source 1..50: mol_type = unassigned DNA; note = target_7e4e5c8
  misc_feature 1..23: note = LF
  misc_feature 24..25: note = Core
  misc_feature 26..50: note = RF
tgggcttcgtacctcagcccaacctactcactgaacctgttgggttatga

SEQ ID NO: 25320 - DNA, 50 bp, unidentified
  source 1..50: mol_type = unassigned DNA; note = target_7e4fc72
  misc_feature 1..23: note = LF
  misc_feature 24..25: note = Core
  misc_feature 26..50: note = RF
gtctcagaaaacggatcgcaaagtacgctaagccggttgcagcggccgta

SEQ ID NO: 25321 - DNA, 50 bp, unidentified
  source 1..50: mol_type = unassigned DNA; note = target_7e52d6f
  misc_feature 1..23: note = LF
  misc_feature 24..25: note = Core
  misc_feature 26..50: note = RF
cctttcgcgacacaaggccgctcctacaggtgtatgcgttcccctgtagg

SEQ ID NO: 25322 - DNA, 50 bp, unidentified
  source 1..50: mol_type = unassigned DNA; note = target_7e5c512
  misc_feature 1..22: note = LF
  misc_feature 23..25: note = Core
  misc_feature 26..50: note = RF
ccggtcgactagtacgagggccaaggacagatagatagagcgcctttcgt

SEQ ID NO: 25323 - DNA, 50 bp, unidentified
  source 1..50: mol_type = unassigned DNA; note = target_7e5e63d
  misc_feature 1..23: note = LF
  misc_feature 24..25: note = Core
  misc_feature 26..50: note = RF
taaaagcactagttttactgcgccttattggagagttctccggggagaat

SEQ ID NO: 25324 - DNA, 50 bp, unidentified
  source 1..50: mol_type = unassigned DNA; note = target_7e6218d
  misc_feature 1..24: note = LF
  misc_feature 25: note = Core
  misc_feature 26..50: note = RF
cggccaatatggcctactgggcattatccgaacgatccgctgttaccaac

SEQ ID NO: 25325 - DNA, 50 bp, unidentified
  source 1..50: mol_type = unassigned DNA; note = target_7e65223
  misc_feature 1..23: note = LF
  misc_feature 24..25: note = Core
  misc_feature 26..50: note = RF
ttcataaatctttttaattatatcataaaaaagatagattttaaatctac

SEQ ID NO: 25326 - DNA, 50 bp, unidentified
  source 1..50: mol_type = unassigned DNA; note = target_7e662ec
  misc_feature 1..23: note = LF
  misc_feature 24..25: note = Core
  misc_feature 26..50: note = RF
gatctgcccctcgggcgtcaggtagtgccccagcgcctcggccagcacgc

SEQ ID NO: 25327 - DNA, 50 bp, unidentified
  source 1..50: mol_type = unassigned DNA; note = target_7e66cb3
  misc_feature 1..23: note = LF
  misc_feature 24..25: note = Core
  misc_feature 26..50: note = RF
tgcacgcgaacgctttgcccaccctacgaccttgaaatggtgggcacgct

SEQ ID NO: 25328 - DNA, 50 bp, unidentified
  source 1..50: mol_type = unassigned DNA; note = target_7e7afd8
  misc_feature 1..21: note = LF
  misc_feature 22..25: note = Core
  misc_feature 26..50: note = RF
gtggtggggatcgccggggtggtcatgcgggttcccgtccaaggagtagg

SEQ ID NO: 25329 - DNA, 50 bp, unidentified
  source 1..50: mol_type = unassigned DNA; note = target_7e7cd32
  misc_feature 1..23: note = LF
  misc_feature 24..25: note = Core
  misc_feature 26..50: note = RF
gtattaaatatcatagtaacttcctttctacttattttagaatattatat

SEQ ID NO: 25330 - DNA, 50 bp, unidentified
  source 1..50: mol_type = unassigned DNA; note = target_7e7d064
  misc_feature 1..23: note = LF
  misc_feature 24..25: note = Core
  misc_feature 26..50: note = RF
aattcattccttatttcttattcctcattttccattccttttcttgacat

SEQ ID NO: 25331 - DNA, 50 bp, unidentified
  source 1..50: mol_type = unassigned DNA; note = target_7e8184c
  misc_feature 1..23: note = LF
  misc_feature 24..25: note = Core
  misc_feature 26..50: note = RF
tgaacgtcgggggagcgccgccgctccccccgattagattggaactaaat

SEQ ID NO: 25332 - DNA, 50 bp, unidentified
  source 1..50: mol_type = unassigned DNA; note = target_7e8d86c
  misc_feature 1..23: note = LF
  misc_feature 24..25: note = Core
  misc_feature 26..50: note = RF
ctccagcacaggatgaaagaggctcactgagcttcttcagcggttgcccc

SEQ ID NO: 25333 - DNA, 50 bp, unidentified
  source 1..50: mol_type = unassigned DNA; note = target_7e9c0db
  misc_feature 1..23: note = LF
  misc_feature 24..25: note = Core
  misc_feature 26..50: note = RF
gcagtgagttcttccttcccaccctagccgcaaaatcaaccacgcggcgg

SEQ ID NO: 25334 - DNA, 50 bp, unidentified
  source 1..50: mol_type = unassigned DNA; note = target_7e9c819
  misc_feature 1..24: note = LF
  misc_feature 25: note = Core
  misc_feature 26..50: note = RF
tcctgtaattgtcttttcattgttctcccccttaataaacattttccgta

SEQ ID NO: 25335 - DNA, 50 bp, unidentified
  source 1..50: mol_type = unassigned DNA; note = target_7e9eb2b
  misc_feature 1..23: note = LF
  misc_feature 24..25: note = Core
  misc_feature 26..50: note = RF
cagctcaaagcgccttatccggcctacaaaagcgcgttacctgtaggccg

SEQ ID NO: 25336 - DNA, 50 bp, unidentified
  source 1..50: mol_type = unassigned DNA; note = target_7ea1780
  misc_feature 1..24: note = LF
  misc_feature 25: note = Core
  misc_feature 26..50: note = RF
tttctaacattacctatgttcgccccccctagcgaaactattcggcgtgg

SEQ ID NO: 25337 - DNA, 50 bp, unidentified
  source 1..50: mol_type = unassigned DNA; note = target_7ea42e7
  misc_feature 1..23: note = LF
  misc_feature 24..25: note = Core
  misc_feature 26..50: note = RF
ctgtcggctcacgcccatttgcagacattcgtcgtgcaagacctgccggt

SEQ ID NO: 25338 - DNA, 50 bp, unidentified
  source 1..50: mol_type = unassigned DNA; note = target_7ea8d9c
  misc_feature 1..24: note = LF
  misc_feature 25: note = Core
  misc_feature 26..50: note = RF
tgtttgtttgtactgtcttgtatatgaaaagtagcggattttaatgcgct

SEQ ID NO: 25339 - DNA, 50 bp, unidentified
  source 1..50: mol_type = unassigned DNA; note = target_7eba8a0
  misc_feature 1..23: note = LF
  misc_feature 24..25: note = Core
  misc_feature 26..50: note = RF
cccagcgacggcggcgcagtcgtctaacgacctggcgcttcagcggcggc

SEQ ID NO: 25340 - DNA, 50 bp, unidentified
  source 1..50: mol_type = unassigned DNA; note = target_7eba924
  misc_feature 1..23: note = LF
  misc_feature 24..25: note = Core
  misc_feature 26..50: note = RF
gactaggcagaacagtagtacgcctcgccccttcgcccgctgcggccttg

SEQ ID NO: 25341 - DNA, 50 bp, unidentified
  source 1..50: mol_type = unassigned DNA; note = target_7ebaeef
  misc_feature 1..22: note = LF
  misc_feature 23..25: note = Core
  misc_feature 26..50: note = RF
atcgttgctgagcaaaactgcaatttatcatgtcagtatcatttgaacat

SEQ ID NO: 25342 - DNA, 50 bp, unidentified
  source 1..50: mol_type = unassigned DNA; note = target_7ec2151
  misc_feature 1..23: note = LF
  misc_feature 24..25: note = Core
  misc_feature 26..50: note = RF
tgaccgtccagccgatgcccccgctcatccgcggaccaccaggcggacga

SEQ ID NO: 25343 - DNA, 50 bp, unidentified
  source 1..50: mol_type = unassigned DNA; note = target_7ec263c
  misc_feature 1..23: note = LF
  misc_feature 24..25: note = Core
  misc_feature 26..50: note = RF
gatacgtcagcatgccgcccgcgctcagtccgtacagcacgatcggccgg

SEQ ID NO: 25344 - DNA, 50 bp, unidentified
  source 1..50: mol_type = unassigned DNA; note = target_7ec6a50
  misc_feature 1..24: note = LF
  misc_feature 25: note = Core
  misc_feature 26..50: note = RF
aagagtaaagcgtccgcgccagggacgcggctcgagccgtcagggacgct

SEQ ID NO: 25345 - DNA, 50 bp, unidentified
  source 1..50: mol_type = unassigned DNA; note = target_7eced79
  misc_feature 1..23: note = LF
  misc_feature 24..25: note = Core
  misc_feature 26..50: note = RF
cattgcgttttcatacgcttctcctttcgttttctatacagaagtactct

SEQ ID NO: 25346 - DNA, 50 bp, unidentified
  source 1..50: mol_type = unassigned DNA; note = target_7ed910d
  misc_feature 1..22: note = LF
  misc_feature 23..25: note = Core
  misc_feature 26..50: note = RF
aactcgtcgcgcagccggccgttgaagctctcgacgaaggcgttctgctg

SEQ ID NO: 25347 - DNA, 50 bp, unidentified
  source 1..50: mol_type = unassigned DNA; note = target_7ed970e
  misc_feature 1..22: note = LF
  misc_feature 23..25: note = Core
  misc_feature 26..50: note = RF
tccttattcgctaaactgctccgtttagcacaacagaaagtgcgctgacc

SEQ ID NO: 25348 - DNA, 50 bp, unidentified
  source 1..50: mol_type = unassigned DNA; note = target_7edc94d
  misc_feature 1..24: note = LF
  misc_feature 25: note = Core
  misc_feature 26..50: note = RF
taaacgtccgctttcaccacaaagcggacattagccagaagtgaaaatca

SEQ ID NO: 25349 - DNA, 50 bp, unidentified
  source 1..50: mol_type = unassigned DNA; note = target_7ee04d0
  misc_feature 1..23: note = LF
  misc_feature 24..25: note = Core
  misc_feature 26..50: note = RF
tggatcttgaagtaacacaccagttagttgaagaagaactattagatttc

SEQ ID NO: 25350 - DNA, 50 bp, unidentified
  source 1..50: mol_type = unassigned DNA; note = target_7ee443a
  misc_feature 1..23: note = LF
  misc_feature 24..25: note = Core
  misc_feature 26..50: note = RF
tcgtgcaggcgtgcgtgatccacctgatccgggccaccctgcggtacgcc

SEQ ID NO: 25351 - DNA, 50 bp, unidentified
  source 1..50: mol_type = unassigned DNA; note = target_7ee820b
  misc_feature 1..24: note = LF
  misc_feature 25: note = Core
  misc_feature 26..50: note = RF
gctttaattgttctgttcatgttttcctcctactatttgctttacacaat

SEQ ID NO: 25352 - DNA, 50 bp, unidentified
  source 1..50: mol_type = unassigned DNA; note = target_7eea941
  misc_feature 1..23: note = LF
  misc_feature 24..25: note = Core
  misc_feature 26..50: note = RF
gggcacgcttcgctttgcccaccctacgtgctgcatgaatttcatcggaa

SEQ ID NO: 25353 - DNA, 50 bp, unidentified
  source 1..50: mol_type = unassigned DNA; note = target_7eec9c3
  misc_feature 1..22: note = LF
  misc_feature 23..25: note = Core
  misc_feature 26..50: note = RF
gccttcgagatcagctcggggccgttatcgcagcggatgtgctccgggat

SEQ ID NO: 25354 - DNA, 50 bp, unidentified
  source 1..50: mol_type = unassigned DNA; note = target_7eed0a2
  misc_feature 1..23: note = LF
  misc_feature 24..25: note = Core
  misc_feature 26..50: note = RF
ctggcccaggatcgaaagtggagtgcaccccgtctgaccggacaggcggc

SEQ ID NO: 25355 - DNA, 50 bp, unidentified
  source 1..50: mol_type = unassigned DNA; note = target_7ef0f8c
  misc_feature 1..24: note = LF
  misc_feature 25: note = Core
  misc_feature 26..50: note = RF
cgagcttggaatggaagagtctccttgggtcaggcagagacaaatttaag

SEQ ID NO: 25356 - DNA, 50 bp, unidentified
  source 1..50: mol_type = unassigned DNA; note = target_7ef45fe
  misc_feature 1..22: note = LF
  misc_feature 23..25: note = Core
  misc_feature 26..50: note = RF
ggttagaacccacacgcaaagtagaactgtctcatctgagcgaagtagaa

SEQ ID NO: 25357 - DNA, 50 bp, unidentified
  source 1..50: mol_type = unassigned DNA; note = target_7ef603f
  misc_feature 1..24: note = LF
  misc_feature 25: note = Core
  misc_feature 26..50: note = RF
cccccagccggacccggtcggcggcagatgagcggacccgatctcgctct

SEQ ID NO: 25358 - DNA, 50 bp, unidentified
  source 1..50: mol_type = unassigned DNA; note = target_7ef73af
  misc_feature 1..22: note = LF
  misc_feature 23..25: note = Core
  misc_feature 26..50: note = RF
gaggtagagagccatgtcctccctttccttttatctctatttttaaaagg

SEQ ID NO: 25359 - DNA, 50 bp, unidentified
  source 1..50: mol_type = unassigned DNA; note = target_7f01215
  misc_feature 1..24: note = LF
  misc_feature 25: note = Core
  misc_feature 26..50: note = RF
atttgcagttttcattggcgttgttgatcaaatcagcttgaagatcaacg

SEQ ID NO: 25360 - DNA, 50 bp, unidentified
  source 1..50: mol_type = unassigned DNA; note = target_7f15471
  misc_feature 1..23: note = LF
  misc_feature 24..25: note = Core
  misc_feature 26..50: note = RF
ttgaacgttgcctcgccaaagcggactgtccggacacgacaacatcagcg

SEQ ID NO: 25361 - DNA, 50 bp, unidentified
  source 1..50: mol_type = unassigned DNA; note = target_7f15561
  misc_feature 1..23: note = LF
  misc_feature 24..25: note = Core
  misc_feature 26..50: note = RF
gtccgacgaggcatccgctgagctggtccccgtttcccggacagtcggat

SEQ ID NO: 25362 - DNA, 50 bp, unidentified
  source 1..50: mol_type = unassigned DNA; note = target_7f28e67
  misc_feature 1..23: note = LF
  misc_feature 24..25: note = Core
  misc_feature 26..50: note = RF
tggcaatcgaatcttggaaatccctagtcccaggacattctcccttggac

SEQ ID NO: 25363 - DNA, 50 bp, unidentified
  source 1..50: mol_type = unassigned DNA; note = target_7f2fef0
  misc_feature 1..22: note = LF
  misc_feature 23..25: note = Core
  misc_feature 26..50: note = RF
ttttccatgttttactctcctttcttattaaaataaattttccgcgaaat

SEQ ID NO: 25364 - DNA, 50 bp, unidentified
  source 1..50: mol_type = unassigned DNA; note = target_7f360a8
  misc_feature 1..24: note = LF
  misc_feature 25: note = Core
  misc_feature 26..50: note = RF
tttggcgtaatgtttcaggattatttggcgtatttatgtcacgataaact

SEQ ID NO: 25365 - DNA, 50 bp, unidentified
  source 1..50: mol_type = unassigned DNA; note = target_7f380a3
  misc_feature 1..21: note = LF
  misc_feature 22..25: note = Core
  misc_feature 26..50: note = RF
atgatggccgctgtcggccccaagcggtcattgtcgcttagaaaaaggct

SEQ ID NO: 25366 - DNA, 50 bp, unidentified
  source 1..50: mol_type = unassigned DNA; note = target_7f40ceb
  misc_feature 1..24: note = LF
  misc_feature 25: note = Core
  misc_feature 26..50: note = RF
gaccccatccgcatgcatatgtgccgttatgcgtggacgactatatgagc

SEQ ID NO: 25367 - DNA, 50 bp, unidentified
  source 1..50: mol_type = unassigned DNA; note = target_7f44241
  misc_feature 1..24: note = LF
  misc_feature 25: note = Core
  misc_feature 26..50: note = RF
ctaaggcaccccgacttgctcttgaagggatgtgaacccacgaccacgac

SEQ ID NO: 25368 - DNA, 50 bp, unidentified
  source 1..50: mol_type = unassigned DNA; note = target_7f47e8f
  misc_feature 1..23: note = LF
  misc_feature 24..25: note = Core
  misc_feature 26..50: note = RF
ccgcagcgcggcccgccgaagcagacgttcgctgcagtcgcgaattcgag

SEQ ID NO: 25369 - DNA, 50 bp, unidentified
  source 1..50: mol_type = unassigned DNA; note = target_7f4c66e
  misc_feature 1..24: note = LF
  misc_feature 25: note = Core
  misc_feature 26..50: note = RF
catttcgcgcaccgcctttcctctcttattataacaaaaagaccgccgtt

SEQ ID NO: 25370 - DNA, 50 bp, unidentified
  source 1..50: mol_type = unassigned DNA; note = target_7f4e286
  misc_feature 1..23: note = LF
  misc_feature 24..25: note = Core
  misc_feature 26..50: note = RF
tgcctcttccggctgtcgtttggaaccgttaggattggtggggtccaaaa

SEQ ID NO: 25371 - DNA, 50 bp, unidentified
  source 1..50: mol_type = unassigned DNA; note = target_7f5b075
  misc_feature 1..23: note = LF
  misc_feature 24..25: note = Core
  misc_feature 26..50: note = RF
gtgcaacaattaacggtcgtggttgggtcccgggtcaagcccgggacgac

SEQ ID NO: 25372 - DNA, 50 bp, unidentified
  source 1..50: mol_type = unassigned DNA; note = target_7f5c867
  misc_feature 1..23: note = LF
  misc_feature 24..25: note = Core
  misc_feature 26..50: note = RF
ttgttcatgacgattcacacttcctttgtgaattttttgtttttcgccgt

SEQ ID NO: 25373 - DNA, 50 bp, unidentified
  source 1..50: mol_type = unassigned DNA; note = target_7f5dd58
  misc_feature 1..24: note = LF
  misc_feature 25: note = Core
  misc_feature 26..50: note = RF
gtattccatcgcagttacaaactgcgacgatcggattattgctttaatat

SEQ ID NO: 25374 - DNA, 50 bp, unidentified
  source 1..50: mol_type = unassigned DNA; note = target_7f5e7f5
  misc_feature 1..23: note = LF
  misc_feature 24..25: note = Core
  misc_feature 26..50: note = RF
gcccacgttaaggggctaaaaatagttggttaaaattagcgacgaaggag

SEQ ID NO: 25375 - DNA, 50 bp, unidentified
  source 1..50: mol_type = unassigned DNA; note = target_7f6c78a
  misc_feature 1..24: note = LF
  misc_feature 25: note = Core
  misc_feature 26..50: note = RF
ctgttttggactacttcaatttgacaaaacacatacatgccgatcgacga

SEQ ID NO: 25376 - DNA, 50 bp, unidentified
  source 1..50: mol_type = unassigned DNA; note = target_7f735f0
  misc_feature 1..24: note = LF
  misc_feature 25: note = Core
  misc_feature 26..50: note = RF
tccttatttcagaaaagcgcccgattgttgaatatattgacggggctttt

SEQ ID NO: 25377 - DNA, 50 bp, unidentified
  source 1..50: mol_type = unassigned DNA; note = target_7f8452f
  misc_feature 1..23: note = LF
  misc_feature 24..25: note = Core
  misc_feature 26..50: note = RF
ccctttcgcgaacaagttcgctcctacagaagcacctctggcattccagt

SEQ ID NO: 25378 - DNA, 50 bp, unidentified
  source 1..50: mol_type = unassigned DNA; note = target_7f84cac
  misc_feature 1..23: note = LF
  misc_feature 24..25: note = Core
  misc_feature 26..50: note = RF
gcattcgatgtcacgctggagggtcaggccttgcgatgcaataggcgaac

SEQ ID NO: 25379 - DNA, 50 bp, unidentified
  source 1..50: mol_type = unassigned DNA; note = target_7f864aa
  misc_feature 1..23: note = LF
  misc_feature 24..25: note = Core
  misc_feature 26..50: note = RF
ccggctatcgcaggatagccggttttttgtattcattccaatgaaataac

SEQ ID NO: 25380 - DNA, 50 bp, unidentified
  source 1..50: mol_type = unassigned DNA; note = target_7f8719c
  misc_feature 1..24: note = LF
  misc_feature 25: note = Core
  misc_feature 26..50: note = RF
tgacgtttctcattgctgcctaacgcggagttcagcggcagccttggcgg

SEQ ID NO: 25381 - DNA, 50 bp, unidentified
  source 1..50: mol_type = unassigned DNA; note = target_7f8a1d6
  misc_feature 1..24: note = LF
  misc_feature 25: note = Core
  misc_feature 26..50: note = RF
ctcgccagggcgcacggtcatcggcatgagagtgcgttcacgtgagcgca

SEQ ID NO: 25382 - DNA, 50 bp, unidentified
  source 1..50: mol_type = unassigned DNA; note = target_7f8a692
  misc_feature 1..24: note = LF
  misc_feature 25: note = Core
  misc_feature 26..50: note = RF
gaaatcagcggacaacttgtttgacaaacaccggcggtgggatgcgatac

SEQ ID NO: 25383 - DNA, 50 bp, unidentified
  source 1..50: mol_type = unassigned DNA; note = target_7f93d63
  misc_feature 1..24: note = LF
  misc_feature 25: note = Core
  misc_feature 26..50: note = RF
ctactgcgtccatctcccccgtttgggggatggacaagtcgcagcagcac

SEQ ID NO: 25384 - DNA, 50 bp, unidentified
  source 1..50: mol_type = unassigned DNA; note = target_7f9808d
  misc_feature 1..24: note = LF
  misc_feature 25: note = Core
  misc_feature 26..50: note = RF
cggaattacttccgacatgccgacttatcgatactaatccggccttcgcc

SEQ ID NO: 25385 - DNA, 50 bp, unidentified
  source 1..50: mol_type = unassigned DNA; note = target_7fa25e5
  misc_feature 1..23: note = LF
  misc_feature 24..25: note = Core
  misc_feature 26..50: note = RF
ttaaaaatgaacaatgccgatttttttttgggcggcactgttcaccgtag

SEQ ID NO: 25386 - DNA, 50 bp, unidentified
  source 1..50: mol_type = unassigned DNA; note = target_7fb0567
  misc_feature 1..24: note = LF
  misc_feature 25: note = Core
  misc_feature 26..50: note = RF
atcgcctgtttctgctcgcccctttttccgcctgaggccgagcgatgcgc

SEQ ID NO: 25387 - DNA, 50 bp, unidentified
  source 1..50: mol_type = unassigned DNA; note = target_7fb2274
  misc_feature 1..23: note = LF
  misc_feature 24..25: note = Core
  misc_feature 26..50: note = RF
gcaatgttcgggcacccatactaatgtgggagcgagcctgctcgcgatgg

SEQ ID NO: 25388 - DNA, 50 bp, unidentified
  source 1..50: mol_type = unassigned DNA; note = target_7fb4b8c
  misc_feature 1..23: note = LF
  misc_feature 24..25: note = Core
  misc_feature 26..50: note = RF
gaagcccggatgatagtcacaacctataatcagcatattcggctcctttc

SEQ ID NO: 25389 - DNA, 50 bp, unidentified
  source 1..50: mol_type = unassigned DNA; note = target_7fc6108
  misc_feature 1..23: note = LF
  misc_feature 24..25: note = Core
  misc_feature 26..50: note = RF
cattcttcatttttttattctacctttcctaaacatatttttttacctat

SEQ ID NO: 25390 - DNA, 50 bp, unidentified
  source 1..50: mol_type = unassigned DNA; note = target_7fd4688
  misc_feature 1..24: note = LF
  misc_feature 25: note = Core
  misc_feature 26..50: note = RF
cgactattggtgcaatctcgtaagcgtccggctaaaccatattgagtcgg

SEQ ID NO: 25391 - DNA, 50 bp, unidentified
  source 1..50: mol_type = unassigned DNA; note = target_7fd4b3c
  misc_feature 1..23: note = LF
  misc_feature 24..25: note = Core
  misc_feature 26..50: note = RF
taacgtgttacgatactctgtagtggtataagaacccttgacactttata

SEQ ID NO: 25392 - DNA, 50 bp, unidentified
  source 1..50: mol_type = unassigned DNA; note = target_7ff4f53
  misc_feature 1..22: note = LF
  misc_feature 23..25: note = Core
  misc_feature 26..50: note = RF
ggcgagcgctctcaggctctcttgactattttgtatcgctcgacggaccg

SEQ ID NO: 25393 - DNA, 50 bp, unidentified
  source 1..50: mol_type = unassigned DNA; note = target_7ff8bdc
  misc_feature 1..23: note = LF
  misc_feature 24..25: note = Core
  misc_feature 26..50: note = RF
ctgccttccaacagcagcaaatgtgagtcatcgtgtaatcgcggctgctt

SEQ ID NO: 25394 - DNA, 50 bp, unidentified
  source 1..50: mol_type = unassigned DNA; note = target_800041b
  misc_feature 1..24: note = LF
  misc_feature 25: note = Core
  misc_feature 26..50: note = RF
gagcgcctcggcatggtactggaaaaggctatgtcaggcatgggccagac

SEQ ID NO: 25395 - DNA, 50 bp, unidentified
  source 1..50: mol_type = unassigned DNA; note = target_800a9b1
  misc_feature 1..23: note = LF
  misc_feature 24..25: note = Core
  misc_feature 26..50: note = RF
attgtggagcgattaacattctaaatacttggcagtaacagcagtgattt

SEQ ID NO: 25396 - DNA, 50 bp, unidentified
  source 1..50: mol_type = unassigned DNA; note = target_800ca88
  misc_feature 1..24: note = LF
  misc_feature 25: note = Core
  misc_feature 26..50: note = RF
gcccatctgcgcgccgacagccggcggagtgggccacctcgctttgctcg

SEQ ID NO: 25397 - DNA, 50 bp, unidentified
  source 1..50: mol_type = unassigned DNA; note = target_8010607
  misc_feature 1..24: note = LF
  misc_feature 25: note = Core
  misc_feature 26..50: note = RF
acgttaccggcgaccagcaccgcccaccccccaccgactttgccgagacc

SEQ ID NO: 25398 - DNA, 50 bp, unidentified
  source 1..50: mol_type = unassigned DNA; note = target_80121d8
  misc_feature 1..23: note = LF
  misc_feature 24..25: note = Core
  misc_feature 26..50: note = RF
tcttttatatttatagttagtgcctttcactaaattctcttaatttcgtg

SEQ ID NO: 25399 - DNA, 50 bp, unidentified
  source 1..50: mol_type = unassigned DNA; note = target_801d981
  misc_feature 1..24: note = LF
  misc_feature 25: note = Core
  misc_feature 26..50: note = RF
tgcaacccgacgaccactcgcccccaccccccaggacgatgtcagccgaa

SEQ ID NO: 25400 - DNA, 50 bp, unidentified
  source 1..50: mol_type = unassigned DNA; note = target_802074c
  misc_feature 1..24: note = LF
  misc_feature 25: note = Core
  misc_feature 26..50: note = RF
aagaagcccggccatgtgccgggctttttgttgcgcggggaacgactgtt

SEQ ID NO: 25401 - DNA, 50 bp, unidentified
  source 1..50: mol_type = unassigned DNA; note = target_803bbdf
  misc_feature 1..23: note = LF
  misc_feature 24..25: note = Core
  misc_feature 26..50: note = RF
tgaactccggttcaccggaaatgctctagctttttgtttttaccgcatga

SEQ ID NO: 25402 - DNA, 50 bp, unidentified
  source 1..50: mol_type = unassigned DNA; note = target_8047c8f
  misc_feature 1..22: note = LF
  misc_feature 23..25: note = Core
  misc_feature 26..50: note = RF
tgatgacgcccccaaccatttgcccccccaatcggggggggacaaccacg

SEQ ID NO: 25403 - DNA, 50 bp, unidentified
  source 1..50: mol_type = unassigned DNA; note = target_804ba56
  misc_feature 1..23: note = LF
  misc_feature 24..25: note = Core
  misc_feature 26..50: note = RF
ggttacgctaccgctaacccaccctacggcactagtgcggttgcttaacc

SEQ ID NO: 25404 - DNA, 50 bp, unidentified
  source 1..50: mol_type = unassigned DNA; note = target_8053fef
  misc_feature 1..23: note = LF
  misc_feature 24..25: note = Core
  misc_feature 26..50: note = RF
cttagaaaaggcttcgactccgctcagcctgacacgaaatggtaatttga

SEQ ID NO: 25405 - DNA, 50 bp, unidentified
  source 1..50: mol_type = unassigned DNA; note = target_805d93b
  misc_feature 1..23: note = LF
  misc_feature 24..25: note = Core
  misc_feature 26..50: note = RF
agggatatttcgcttgtttcttcctccccaactgggcatcttggtaatac

SEQ ID NO: 25406 - DNA, 50 bp, unidentified
  source 1..50: mol_type = unassigned DNA; note = target_805ed55
  misc_feature 1..23: note = LF
  misc_feature 24..25: note = Core
  misc_feature 26..50: note = RF
aggtacttcctgacccctgtggttgggtccccgcttttcgcggggacgac

SEQ ID NO: 25407 - DNA, 50 bp, unidentified
  source 1..50: mol_type = unassigned DNA; note = target_806accb
  misc_feature 1..22: note = LF
  misc_feature 23..25: note = Core
  misc_feature 26..50: note = RF
ttcttattcgactaaagcacccgtttagtttaagtacaaaccttcacaaa

SEQ ID NO: 25408 - DNA, 50 bp, unidentified
  source 1..50: mol_type = unassigned DNA; note = target_8070a48
  misc_feature 1..24: note = LF
  misc_feature 25: note = Core
  misc_feature 26..50: note = RF
gagcggcctcgtgcaccacagcgaccgcggcgttcaatacgtctcgatcc

SEQ ID NO: 25409 - DNA, 50 bp, unidentified
  source 1..50: mol_type = unassigned DNA; note = target_8073b9b
  misc_feature 1..20: note = LF
  misc_feature 21..25: note = Core
  misc_feature 26..50: note = RF
gtatttgcttgacgccacacgccctttcagggcgtgtcccaacgtacccc

SEQ ID NO: 25410 - DNA, 50 bp, unidentified
  source 1..50: mol_type = unassigned DNA; note = target_80799b2
  misc_feature 1..23: note = LF
  misc_feature 24..25: note = Core
  misc_feature 26..50: note = RF
gaacacggccggaccatcccattagcagacataggccagccaggatcgag

SEQ ID NO: 25411 - DNA, 50 bp, unidentified
  source 1..50: mol_type = unassigned DNA; note = target_8087a9a
  misc_feature 1..21: note = LF
  misc_feature 22..25: note = Core
  misc_feature 26..50: note = RF
agtgaggaatctcaaacagattcttcgtcgctttgctcctcgcaattaca

SEQ ID NO: 25412 - DNA, 50 bp, unidentified
  source 1..50: mol_type = unassigned DNA; note = target_808a8b9
  misc_feature 1..23: note = LF
  misc_feature 24..25: note = Core
  misc_feature 26..50: note = RF
ttgactcatgcggaccaaaggctgtcccgttcagccccattagtcgactt

SEQ ID NO: 25413 - DNA, 50 bp, unidentified
  source 1..50: mol_type = unassigned DNA; note = target_808c730
  misc_feature 1..23: note = LF
  misc_feature 24..25: note = Core
  misc_feature 26..50: note = RF
ctaatcgctcacattgcttcgactggactgttgcgcccttccaagcaatg

SEQ ID NO: 25414 - DNA, 50 bp, unidentified
  source 1..50: mol_type = unassigned DNA; note = target_80917ea
  misc_feature 1..23: note = LF
  misc_feature 24..25: note = Core
  misc_feature 26..50: note = RF
gccatggatggcagcacacgagcctacagggacgtacttgcggcaggtcc

SEQ ID NO: 25415 - DNA, 50 bp, unidentified
  source 1..50: mol_type = unassigned DNA; note = target_8097ffd
  misc_feature 1..24: note = LF
  misc_feature 25: note = Core
  misc_feature 26..50: note = RF
caccctgcctatatccccgtagggcgtcaataagcgatgccggtgcggcg

SEQ ID NO: 25416 - DNA, 50 bp, unidentified
  source 1..50: mol_type = unassigned DNA; note = target_8098d6a
  misc_feature 1..20: note = LF
  misc_feature 21..25: note = Core
  misc_feature 26..50: note = RF
tcctcgtggaggtggcggtgctcatttcagctcccacgccaggaccaggt

SEQ ID NO: 25417 - DNA, 50 bp, unidentified
  source 1..50: mol_type = unassigned DNA; note = target_809c72d
  misc_feature 1..24: note = LF
  misc_feature 25: note = Core
  misc_feature 26..50: note = RF
ctcattgaagcgtgtgatggcgattttccgccaatggacaaaccggaggc

SEQ ID NO: 25418 - DNA, 50 bp, unidentified
  source 1..50: mol_type = unassigned DNA; note = target_80a0650
  misc_feature 1..23: note = LF
  misc_feature 24..25: note = Core
  misc_feature 26..50: note = RF
ccacggggaccccggtggtggtgctcatggaacttcccccttgaggatgg

SEQ ID NO: 25419 - DNA, 50 bp, unidentified
  source 1..50: mol_type = unassigned DNA; note = target_80a093a
  misc_feature 1..23: note = LF
  misc_feature 24..25: note = Core
  misc_feature 26..50: note = RF
aggtcagttcgccccgctccggtgacacaatacataactggcggcggctt

SEQ ID NO: 25420 - DNA, 50 bp, unidentified
  source 1..50: mol_type = unassigned DNA; note = target_80a1d7d
  misc_feature 1..24: note = LF
  misc_feature 25: note = Core
  misc_feature 26..50: note = RF
tcgcttggcaacgggcgtcaccatttttttgcagtgacatccttcaggat

SEQ ID NO: 25421 - DNA, 50 bp, unidentified
  source 1..50: mol_type = unassigned DNA; note = target_80a315a
  misc_feature 1..24: note = LF
  misc_feature 25: note = Core
  misc_feature 26..50: note = RF
aatgtgttccattgaaatcgctccttctgcctgtcacatttattagtttt

SEQ ID NO: 25422 - DNA, 50 bp, unidentified
  source 1..50: mol_type = unassigned DNA; note = target_80af510
  misc_feature 1..23: note = LF
  misc_feature 24..25: note = Core
  misc_feature 26..50: note = RF
tttgactttctcataaaatcctccttattttctgcgaattaaaaaatttt

SEQ ID NO: 25423 - DNA, 50 bp, unidentified
  source 1..50: mol_type = unassigned DNA; note = target_80b17d6
  misc_feature 1..23: note = LF
  misc_feature 24..25: note = Core
  misc_feature 26..50: note = RF
cccccgctcagcaattcttgttcctttcttagaatgtatcatattgcggg

SEQ ID NO: 25424 - DNA, 50 bp, unidentified
  source 1..50: mol_type = unassigned DNA; note = target_80b6211
  misc_feature 1..22: note = LF
  misc_feature 23..25: note = Core
  misc_feature 26..50: note = RF
tgacgatgtgggcggccggccctgacgggtggattcgcagcacctgcggc

SEQ ID NO: 25425 - DNA, 50 bp, unidentified
  source 1..50: mol_type = unassigned DNA; note = target_80c21fa
  misc_feature 1..23: note = LF
  misc_feature 24..25: note = Core
  misc_feature 26..50: note = RF
cttagccatccttatttacacggatgtaacttagtagagcaacgcaggag

SEQ ID NO: 25426 - DNA, 50 bp, unidentified
  source 1..50: mol_type = unassigned DNA; note = target_80cd103
  misc_feature 1..22: note = LF
  misc_feature 23..25: note = Core
  misc_feature 26..50: note = RF
tcgttccccgctatcgatctccgtttagcgaaataactacttgttattta

SEQ ID NO: 25427 - DNA, 50 bp, unidentified
  source 1..50: mol_type = unassigned DNA; note = target_80d1deb
  misc_feature 1..23: note = LF
  misc_feature 24..25: note = Core
  misc_feature 26..50: note = RF
agcgttcgcagatgcgtcacgcttcactgctccctgccgccacacccccg

SEQ ID NO: 25428 - DNA, 50 bp, unidentified
  source 1..50: mol_type = unassigned DNA; note = target_80e43b1
  misc_feature 1..23: note = LF
  misc_feature 24..25: note = Core
  misc_feature 26..50: note = RF
atcgttgcgaactggcctgatatttccgttgtgccgcgacgatgaccgct

SEQ ID NO: 25429 - DNA, 50 bp, unidentified
  source 1..50: mol_type = unassigned DNA; note = target_80ffafc
  misc_feature 1..22: note = LF
  misc_feature 23..25: note = Core
  misc_feature 26..50: note = RF
cgcatccataggggcccacatgtgcaatctctattcgatcaccacgaacc

SEQ ID NO: 25430 - DNA, 50 bp, unidentified
  source 1..50: mol_type = unassigned DNA; note = target_8102585
  misc_feature 1..23: note = LF
  misc_feature 24..25: note = Core
  misc_feature 26..50: note = RF
gtctggatcgttcagccgccgggcttgacccccaccccccaacccgctcc

SEQ ID NO: 25431 - DNA, 50 bp, unidentified
  source 1..50: mol_type = unassigned DNA; note = target_8106c5f
  misc_feature 1..23: note = LF
  misc_feature 24..25: note = Core
  misc_feature 26..50: note = RF
gcctgggaaacgtcgtcatagcagacggtattgcgcagttcgtcatgcag

SEQ ID NO: 25432 - DNA, 50 bp, unidentified
  source 1..50: mol_type = unassigned DNA; note = target_810c61f
  misc_feature 1..23: note = LF
  misc_feature 24..25: note = Core
  misc_feature 26..50: note = RF
cgctccgattgacggcccacatctgcaatctgatcgccggcacctgtgat

SEQ ID NO: 25433 - DNA, 50 bp, unidentified
  source 1..50: mol_type = unassigned DNA; note = target_810e55f
  misc_feature 1..24: note = LF
  misc_feature 25: note = Core
  misc_feature 26..50: note = RF
ttcgactgaaatcgcaacccaaagcggtcattaaataactgtgcaagtat

SEQ ID NO: 25434 - DNA, 50 bp, unidentified
  source 1..50: mol_type = unassigned DNA; note = target_81190bd
  misc_feature 1..22: note = LF
  misc_feature 23..25: note = Core
  misc_feature 26..50: note = RF
ggccagcgctctcaggctctcttgactatgctgtatcgctcgacggaccg

SEQ ID NO: 25435 - DNA, 50 bp, unidentified
  source 1..50: mol_type = unassigned DNA; note = target_81197b4
  misc_feature 1..24: note = LF
  misc_feature 25: note = Core
  misc_feature 26..50: note = RF
ttaaggtctgcaaacggccgtaagcggacattcacggggtaaagaaaacc

SEQ ID NO: 25436 - DNA, 50 bp, unidentified
  source 1..50: mol_type = unassigned DNA; note = target_811e820
  misc_feature 1..23: note = LF
  misc_feature 24..25: note = Core
  misc_feature 26..50: note = RF
taacgctcatgctgccccctcccctgcattgcctgcttaataccttcagc

SEQ ID NO: 25437 - DNA, 50 bp, unidentified
  source 1..50: mol_type = unassigned DNA; note = target_812f805
  misc_feature 1..24: note = LF
  misc_feature 25: note = Core
  misc_feature 26..50: note = RF
aggctagaatgactgctattgacccaaagcggacagtggtggaggtgcgg

SEQ ID NO: 25438 - DNA, 50 bp, unidentified
  source 1..50: mol_type = unassigned DNA; note = target_813acee
  misc_feature 1..24: note = LF
  misc_feature 25: note = Core
  misc_feature 26..50: note = RF
cgctctgcgcgccgctgcataagaaaacgggtgcgagtctgtgcgactcg

SEQ ID NO: 25439 - DNA, 50 bp, unidentified
  source 1..50: mol_type = unassigned DNA; note = target_81455bd
  misc_feature 1..23: note = LF
  misc_feature 24..25: note = Core
  misc_feature 26..50: note = RF
cgattggtgggctgaagcccaccctacaggcagcacgcctcgccgccggt

SEQ ID NO: 25440 - DNA, 50 bp, unidentified
  source 1..50: mol_type = unassigned DNA; note = target_814896a
  misc_feature 1..24: note = LF
  misc_feature 25: note = Core
  misc_feature 26..50: note = RF
tttacgacaacagctagcccagactgtgtgaaaacgttttgatcactttt

SEQ ID NO: 25441 - DNA, 50 bp, unidentified
  source 1..50: mol_type = unassigned DNA; note = target_8156bb2
  misc_feature 1..24: note = LF
  misc_feature 25: note = Core
  misc_feature 26..50: note = RF
tctgcaacaatcggttggcctacttttactccgccccagtggcctggttt

SEQ ID NO: 25442 - DNA, 50 bp, unidentified
  source 1..50: mol_type = unassigned DNA; note = target_815c20d
  misc_feature 1..22: note = LF
  misc_feature 23..25: note = Core
  misc_feature 26..50: note = RF
ctgtgatgaggtaagaaatctcctttgttgtggtgaatttcagatgtgtc

SEQ ID NO: 25443 - DNA, 50 bp, unidentified
  source 1..50: mol_type = unassigned DNA; note = target_815dd5f
  misc_feature 1..23: note = LF
  misc_feature 24..25: note = Core
  misc_feature 26..50: note = RF
ttattatatttcatatactccttgtctcctttcttagaagctgtactttc

SEQ ID NO: 25444 - DNA, 50 bp, unidentified
  source 1..50: mol_type = unassigned DNA; note = target_816086d
  misc_feature 1..23: note = LF
  misc_feature 24..25: note = Core
  misc_feature 26..50: note = RF
tgtccgaaactcatcccatcctcctttgataacgagggctccccaaaaag

SEQ ID NO: 25445 - DNA, 50 bp, unidentified
  source 1..50: mol_type = unassigned DNA; note = target_8161295
  misc_feature 1..23: note = LF
  misc_feature 24..25: note = Core
  misc_feature 26..50: note = RF
atcgggggaagatcacaaattacagttggctcggttccgcttcgcttcac

SEQ ID NO: 25446 - DNA, 50 bp, unidentified
  source 1..50: mol_type = unassigned DNA; note = target_8162e68
  misc_feature 1..24: note = LF
  misc_feature 25: note = Core
  misc_feature 26..50: note = RF
caccagcttggggtagaggtacactttcaactttggcgtcgggtcgcatc

SEQ ID NO: 25447 - DNA, 50 bp, unidentified
  source 1..50: mol_type = unassigned DNA; note = target_8163acf
  misc_feature 1..24: note = LF
  misc_feature 25: note = Core
  misc_feature 26..50: note = RF
acacaaccacttgaaggaacggaggccccaaatgaatgctacgacatacg

SEQ ID NO: 25448 - DNA, 50 bp, unidentified
  source 1..50: mol_type = unassigned DNA; note = target_816a058
  misc_feature 1..23: note = LF
  misc_feature 24..25: note = Core
  misc_feature 26..50: note = RF
gtggcggcttcgccttacccagcctacaaaacccgatatatcaacgagtt

SEQ ID NO: 25449 - DNA, 50 bp, unidentified
  source 1..50: mol_type = unassigned DNA; note = target_8172a43
  misc_feature 1..24: note = LF
  misc_feature 25: note = Core
  misc_feature 26..50: note = RF
tcagatgttcgcttttcccgatagcggtcgttcaaaatccctggattaac

SEQ ID NO: 25450 - DNA, 50 bp, unidentified
  source 1..50: mol_type = unassigned DNA; note = target_817772e
  misc_feature 1..23: note = LF
  misc_feature 24..25: note = Core
  misc_feature 26..50: note = RF
ggtctaattgatacgactaccccagttaaaacataatagacttaactgga

SEQ ID NO: 25451 - DNA, 50 bp, unidentified
  source 1..50: mol_type = unassigned DNA; note = target_8178a31
  misc_feature 1..23: note = LF
  misc_feature 24..25: note = Core
  misc_feature 26..50: note = RF
agggtagccgcttcccagagtgttgttcggcgcccaaccttgaccccgct

SEQ ID NO: 25452 - DNA, 50 bp, unidentified
  source 1..50: mol_type = unassigned DNA; note = target_8183422
  misc_feature 1..23: note = LF
  misc_feature 24..25: note = Core
  misc_feature 26..50: note = RF
atctcggcagatttcggccgtccctacagggcgggagaatcagccaagcc

SEQ ID NO: 25453 - DNA, 50 bp, unidentified
  source 1..50: mol_type = unassigned DNA; note = target_8187c60
  misc_feature 1..23: note = LF
  misc_feature 24..25: note = Core
  misc_feature 26..50: note = RF
agcattgaattgacgatcgcttttggggataaagcggacaacatttgctc

SEQ ID NO: 25454 - DNA, 50 bp, unidentified
  source 1..50: mol_type = unassigned DNA; note = target_8188be1
  misc_feature 1..23: note = LF
  misc_feature 24..25: note = Core
  misc_feature 26..50: note = RF
tttttcctgaaaatccttcatactacactactgcctctttccctcaatta

SEQ ID NO: 25455 - DNA, 50 bp, unidentified
  source 1..50: mol_type = unassigned DNA; note = target_818cf33
  misc_feature 1..23: note = LF
  misc_feature 24..25: note = Core
  misc_feature 26..50: note = RF
tctcatcactcataagttttcccctttatttttgatttttacatatttat

SEQ ID NO: 25456 - DNA, 50 bp, unidentified
  source 1..50: mol_type = unassigned DNA; note = target_8194f1e
  misc_feature 1..24: note = LF
  misc_feature 25: note = Core
  misc_feature 26..50: note = RF
catattcagtagggtgaagtcggcttgtagtaagcaatcgattgtttcgg

SEQ ID NO: 25457 - DNA, 50 bp, unidentified
  source 1..50: mol_type = unassigned DNA; note = target_819d616
  misc_feature 1..23: note = LF
  misc_feature 24..25: note = Core
  misc_feature 26..50: note = RF
ccggcaggcaacagacgatgattagaattgcaaagcttgataacaaaaaa

SEQ ID NO: 25458 - DNA, 50 bp, unidentified
  source 1..50: mol_type = unassigned DNA; note = target_819fc40
  misc_feature 1..23: note = LF
  misc_feature 24..25: note = Core
  misc_feature 26..50: note = RF
tgtagcatcttagacaatgcaggagcatattgtcctgaacaaccattctc

SEQ ID NO: 25459 - DNA, 50 bp, unidentified
  source 1..50: mol_type = unassigned DNA; note = target_81a0510
  misc_feature 1..24: note = LF
  misc_feature 25: note = Core
  misc_feature 26..50: note = RF
cttccaaggtggccgggaggttttttttaaaagcctcgagcgcctcaggg

SEQ ID NO: 25460 - DNA, 50 bp, unidentified
  source 1..50: mol_type = unassigned DNA; note = target_81a7a22
  misc_feature 1..23: note = LF
  misc_feature 24..25: note = Core
  misc_feature 26..50: note = RF
ccgctgacgcggctttgcccaccctacgattgctcatgaaggaggtactt

SEQ ID NO: 25461 - DNA, 50 bp, unidentified
  source 1..50: mol_type = unassigned DNA; note = target_81a81d1
  misc_feature 1..23: note = LF
  misc_feature 24..25: note = Core
  misc_feature 26..50: note = RF
gccaaacaagcactttgtttggcttttattactaaaacgagttatctaac

SEQ ID NO: 25462 - DNA, 50 bp, unidentified
  source 1..50: mol_type = unassigned DNA; note = target_81b36d0
  misc_feature 1..23: note = LF
  misc_feature 24..25: note = Core
  misc_feature 26..50: note = RF
gcccgaaggttaatgaccgcttctggctaaaatcagacctccgggcgcgt

SEQ ID NO: 25463 - DNA, 50 bp, unidentified
  source 1..50: mol_type = unassigned DNA; note = target_81b742b
  misc_feature 1..22: note = LF
  misc_feature 23..25: note = Core
  misc_feature 26..50: note = RF
cggatctccatcatggtgttcttcctccgtgcggaaagcgggtcaggcgg

SEQ ID NO: 25464 - DNA, 50 bp, unidentified
  source 1..50: mol_type = unassigned DNA; note = target_81b8085
  misc_feature 1..22: note = LF
  misc_feature 23..25: note = Core
  misc_feature 26..50: note = RF
ggtggtctctgacttcggtttttgaccctaaggcgacctttgccactttc

SEQ ID NO: 25465 - DNA, 50 bp, unidentified
  source 1..50: mol_type = unassigned DNA; note = target_81bb5ea
  misc_feature 1..23: note = LF
  misc_feature 24..25: note = Core
  misc_feature 26..50: note = RF
gatatagattatcataatttctcctttaccagcatcgctgctcccacgag

SEQ ID NO: 25466 - DNA, 50 bp, unidentified
  source 1..50: mol_type = unassigned DNA; note = target_81bbc95
  misc_feature 1..24: note = LF
  misc_feature 25: note = Core
  misc_feature 26..50: note = RF
gttgaacgccatgatgatgcaaagcgggttctttgatctgcaggaccggt

SEQ ID NO: 25467 - DNA, 50 bp, unidentified
  source 1..50: mol_type = unassigned DNA; note = target_81be08d
  misc_feature 1..24: note = LF
  misc_feature 25: note = Core
  misc_feature 26..50: note = RF
atacgccatcaccccggccggtactgacaggttagggcgctgattcgata

SEQ ID NO: 25468 - DNA, 50 bp, unidentified
  source 1..50: mol_type = unassigned DNA; note = target_81bf5ca
  misc_feature 1..22: note = LF
  misc_feature 23..25: note = Core
  misc_feature 26..50: note = RF
attcaccgccatcgcgagcaggctcccacagtggttttgtgtcgttgcgg

SEQ ID NO: 25469 - DNA, 50 bp, unidentified
  source 1..50: mol_type = unassigned DNA; note = target_81c06c3
  misc_feature 1..24: note = LF
  misc_feature 25: note = Core
  misc_feature 26..50: note = RF
aatccagtttgcggcggatcacctcttccttacttccggttttgctatcc

SEQ ID NO: 25470 - DNA, 50 bp, unidentified
  source 1..50: mol_type = unassigned DNA; note = target_81c3bc0
  misc_feature 1..23: note = LF
  misc_feature 24..25: note = Core
  misc_feature 26..50: note = RF
gatggctgctaaagacatgggcatctcctcaaaggcacgggcttaccgaa

SEQ ID NO: 25471 - DNA, 50 bp, unidentified
  source 1..50: mol_type = unassigned DNA; note = target_81c5b30
  misc_feature 1..23: note = LF
  misc_feature 24..25: note = Core
  misc_feature 26..50: note = RF
cctcggctaggttccgcaatgggtggaaagcggacatgccccttttcagc

SEQ ID NO: 25472 - DNA, 50 bp, unidentified
  source 1..50: mol_type = unassigned DNA; note = target_81c7574
  misc_feature 1..20: note = LF
  misc_feature 21..25: note = Core
  misc_feature 26..50: note = RF
gcacggtcgggggctgcgccactcatgctgcgggctcctcggtgatgacg

SEQ ID NO: 25473 - DNA, 50 bp, unidentified
  source 1..50: mol_type = unassigned DNA; note = target_81c7f83
  misc_feature 1..23: note = LF
  misc_feature 24..25: note = Core
  misc_feature 26..50: note = RF
cgctttttcatcataattcctcccttattcctgtgcaaaaagcaacttgc

SEQ ID NO: 25474 - DNA, 50 bp, unidentified
  source 1..50: mol_type = unassigned DNA; note = target_81cc70a
  misc_feature 1..22: note = LF
  misc_feature 23..25: note = Core
  misc_feature 26..50: note = RF
cgtccttacgtgaaggcgcagaagaacgcactcgatcaccgggcacatca

SEQ ID NO: 25475 - DNA, 50 bp, unidentified
  source 1..50: mol_type = unassigned DNA; note = target_81cda8b
  misc_feature 1..22: note = LF
  misc_feature 23..25: note = Core
  misc_feature 26..50: note = RF
tctcaaaaatcattaaaatctcctttcaagaaatccatcactagctgatt

SEQ ID NO: 25476 - DNA, 50 bp, unidentified
  source 1..50: mol_type = unassigned DNA; note = target_81d6dea
  misc_feature 1..21: note = LF
  misc_feature 22..25: note = Core
  misc_feature 26..50: note = RF
ttcctccactattgtaattatatcattaattttacaaattttagtatttg

SEQ ID NO: 25477 - DNA, 50 bp, unidentified
  source 1..50: mol_type = unassigned DNA; note = target_81e2d73
  misc_feature 1..21: note = LF
  misc_feature 22..25: note = Core
  misc_feature 26..50: note = RF
gcaccgggttcgggtcgcgcgctcatgcgttcactctatgcaccggatcg

SEQ ID NO: 25478 - DNA, 50 bp, unidentified
  source 1..50: mol_type = unassigned DNA; note = target_81e30c8
  misc_feature 1..20: note = LF
  misc_feature 21..25: note = Core
  misc_feature 26..50: note = RF
agtctctcaataacgaggggcttttttattgtctttaaagagcaattgac

SEQ ID NO: 25479 - DNA, 50 bp, unidentified
  source 1..50: mol_type = unassigned DNA; note = target_81e8402
  misc_feature 1..24: note = LF
  misc_feature 25: note = Core
  misc_feature 26..50: note = RF
gccgagcatttgatctaagtgacttggggcagaaccttcttagaaccatc

SEQ ID NO: 25480 - DNA, 50 bp, unidentified
  source 1..50: mol_type = unassigned DNA; note = target_81fc683
  misc_feature 1..21: note = LF
  misc_feature 22..25: note = Core
  misc_feature 26..50: note = RF
aggtccctcgctgcgctcgggatgacagcgagtcactcagcaaggacacc

SEQ ID NO: 25481 - DNA, 50 bp, unidentified
  source 1..50: mol_type = unassigned DNA; note = target_8201f7c
  misc_feature 1..23: note = LF
  misc_feature 24..25: note = Core
  misc_feature 26..50: note = RF
cgatccagcatgagagggaaacgctctagctgcaaaatctctctcatcac

SEQ ID NO: 25482 - DNA, 50 bp, unidentified
  source 1..50: mol_type = unassigned DNA; note = target_820e43e
  misc_feature 1..23: note = LF
  misc_feature 24..25: note = Core
  misc_feature 26..50: note = RF
ggcctcgcggtgctcgtgcgctcctacaggtttaaaaagcattccaaatc

SEQ ID NO: 25483 - DNA, 50 bp, unidentified
  source 1..50: mol_type = unassigned DNA; note = target_820eb00
  misc_feature 1..23: note = LF
  misc_feature 24..25: note = Core
  misc_feature 26..50: note = RF
gcggttcgccggatgtcggcaattggcactttagaggcctagcagtcgac

SEQ ID NO: 25484 - DNA, 50 bp, unidentified
  source 1..50: mol_type = unassigned DNA; note = target_821a299
  misc_feature 1..24: note = LF
  misc_feature 25: note = Core
  misc_feature 26..50: note = RF
cctgctccaatgaatgtgcggactttttttaaacgtccacccgcggcgtc

SEQ ID NO: 25485 - DNA, 50 bp, unidentified
  source 1..50: mol_type = unassigned DNA; note = target_8222954
  misc_feature 1..23: note = LF
  misc_feature 24..25: note = Core
  misc_feature 26..50: note = RF
tatcgccttcgcgagcaagcccgctcccacattttggattgcagcaggtt

SEQ ID NO: 25486 - DNA, 50 bp, unidentified
  source 1..50: mol_type = unassigned DNA; note = target_82277fb
  misc_feature 1..24: note = LF
  misc_feature 25: note = Core
  misc_feature 26..50: note = RF
actgcttttcagacgtcgatagattcagagcccgtctcaaaacctttcaa

SEQ ID NO: 25487 - DNA, 50 bp, unidentified
  source 1..50: mol_type = unassigned DNA; note = target_823299d
  misc_feature 1..23: note = LF
  misc_feature 24..25: note = Core
  misc_feature 26..50: note = RF
tgtccgcgatctggtccgggtatagcgcgacaatctggatgagacggaat

SEQ ID NO: 25488 - DNA, 50 bp, unidentified
  source 1..50: mol_type = unassigned DNA; note = target_82330d2
  misc_feature 1..24: note = LF
  misc_feature 25: note = Core
  misc_feature 26..50: note = RF
gaaccgacggcttcgggtccagactgtgtaaaaagaggggctttgagtaa

SEQ ID NO: 25489 - DNA, 50 bp, unidentified
  source 1..50: mol_type = unassigned DNA; note = target_8233e4b
  misc_feature 1..24: note = LF
  misc_feature 25: note = Core
  misc_feature 26..50: note = RF
acatgccttcggcgaaagaaaacaccgattctgctgtggatttggggctg

SEQ ID NO: 25490 - DNA, 50 bp, unidentified
  source 1..50: mol_type = unassigned DNA; note = target_8235cea
  misc_feature 1..23: note = LF
  misc_feature 24..25: note = Core
  misc_feature 26..50: note = RF
cgtcgccgaccaatgtccgaagttgggggtagaacggactcaacgcggac

SEQ ID NO: 25491 - DNA, 50 bp, unidentified
  source 1..50: mol_type = unassigned DNA; note = target_8239ade
  misc_feature 1..24: note = LF
  misc_feature 25: note = Core
  misc_feature 26..50: note = RF
tcacgcggcgcactgtggcctatttttgctccggcgcgcatacaaaccgg

SEQ ID NO: 25492 - DNA, 50 bp, unidentified
  source 1..50: mol_type = unassigned DNA; note = target_8246a65
  misc_feature 1..23: note = LF
  misc_feature 24..25: note = Core
  misc_feature 26..50: note = RF
ctctcacaacaaaactcggtggttgggtcctggctttcgccaggacgacg

SEQ ID NO: 25493 - DNA, 50 bp, unidentified
  source 1..50: mol_type = unassigned DNA; note = target_824a0a4
  misc_feature 1..23: note = LF
  misc_feature 24..25: note = Core
  misc_feature 26..50: note = RF
ctcctcacagccacccccgccgcctgaccaccttctgctccaggggctca

SEQ ID NO: 25494 - DNA, 50 bp, unidentified
  source 1..50: mol_type = unassigned DNA; note = target_82598c7
  misc_feature 1..22: note = LF
  misc_feature 23..25: note = Core
  misc_feature 26..50: note = RF
taatgtccgtttttagccgcatagaaatgtccgcttttgatgccgtcgta

SEQ ID NO: 25495 - DNA, 50 bp, unidentified
  source 1..50: mol_type = unassigned DNA; note = target_8266ff3
  misc_feature 1..24: note = LF
  misc_feature 25: note = Core
  misc_feature 26..50: note = RF
gaagattgctgacgagacgccgacttctcgttaccaatccggctcggtat

SEQ ID NO: 25496 - DNA, 50 bp, unidentified
  source 1..50: mol_type = unassigned DNA; note = target_826e18f
  misc_feature 1..23: note = LF
  misc_feature 24..25: note = Core
  misc_feature 26..50: note = RF
gaactgatcctttggcggcaaccactccatctgtagtagtaggaggcgga

SEQ ID NO: 25497 - DNA, 50 bp, unidentified
  source 1..50: mol_type = unassigned DNA; note = target_8270bb8
  misc_feature 1..22: note = LF
  misc_feature 23..25: note = Core
  misc_feature 26..50: note = RF
tacaactgccatatgatctctccttatatgattataccagtaaatgtact

SEQ ID NO: 25498 - DNA, 50 bp, unidentified
  source 1..50: mol_type = unassigned DNA; note = target_82756d3
  misc_feature 1..23: note = LF
  misc_feature 24..25: note = Core
  misc_feature 26..50: note = RF
gcgaaccttgcgatgaccaaacagattcttgatgacgtggaacggatgct

SEQ ID NO: 25499 - DNA, 50 bp, unidentified
  source 1..50: mol_type = unassigned DNA; note = target_82788a1
  misc_feature 1..23: note = LF
  misc_feature 24..25: note = Core
  misc_feature 26..50: note = RF
gcgacgcgcgcagaccatagaatccatgccgtggattctagggtcttcgc

SEQ ID NO: 25500 - DNA, 50 bp, unidentified
  source 1..50: mol_type = unassigned DNA; note = target_8288960
  misc_feature 1..23: note = LF
  misc_feature 24..25: note = Core
  misc_feature 26..50: note = RF
tccaggattacagcgctacgcccctgctaattctgaagagccgcgttggg

SEQ ID NO: 25501 - DNA, 50 bp, unidentified
  source 1..50: mol_type = unassigned DNA; note = target_82a29a4
  misc_feature 1..23: note = LF
  misc_feature 24..25: note = Core
  misc_feature 26..50: note = RF
tacagcgactcggcggtcttcgcctaggccatgccgtccgggcagacgcc

SEQ ID NO: 25502 - DNA, 50 bp, unidentified
  source 1..50: mol_type = unassigned DNA; note = target_82a8f5a
  misc_feature 1..24: note = LF
  misc_feature 25: note = Core
  misc_feature 26..50: note = RF
gcttttcaagctgttcatgagcgacgcaggaaagtactaaatgtactttt

SEQ ID NO: 25503 - DNA, 50 bp, unidentified
  source 1..50: mol_type = unassigned DNA; note = target_82bba68
  misc_feature 1..23: note = LF
  misc_feature 24..25: note = Core
  misc_feature 26..50: note = RF
cgtggctacccgttatgccccctctcggcgatgctacccatcgcctgctg

SEQ ID NO: 25504 - DNA, 50 bp, unidentified
  source 1..50: mol_type = unassigned DNA; note = target_82be1de
  misc_feature 1..23: note = LF
  misc_feature 24..25: note = Core
  misc_feature 26..50: note = RF
ggtagccgcaggagggttagcaaagcgccgctcgcagcgagcggaacccg

SEQ ID NO: 25505 - DNA, 50 bp, unidentified
  source 1..50: mol_type = unassigned DNA; note = target_82c1bb2
  misc_feature 1..23: note = LF
  misc_feature 24..25: note = Core
  misc_feature 26..50: note = RF
aaaagcgcgaggtaaactcccgcctactttcgcagccattaatttggatg

SEQ ID NO: 25506 - DNA, 50 bp, unidentified
  source 1..50: mol_type = unassigned DNA; note = target_82c8940
  misc_feature 1..24: note = LF
  misc_feature 25: note = Core
  misc_feature 26..50: note = RF
gcgagacacccctgccgaccgccccacccccccgcagcccggcgccacac

SEQ ID NO: 25507 - DNA, 50 bp, unidentified
  source 1..50: mol_type = unassigned DNA; note = target_82c8a32
  misc_feature 1..24: note = LF
  misc_feature 25: note = Core
  misc_feature 26..50: note = RF
ctcgcccgactgtgcctcaacaagtttttcccagcatctccttgagcgtg

SEQ ID NO: 25508 - DNA, 50 bp, unidentified
  source 1..50: mol_type = unassigned DNA; note = target_82cb75a
  misc_feature 1..24: note = LF
  misc_feature 25: note = Core
  misc_feature 26..50: note = RF
ggattcctgtgacgagcacaggaatgagggaggtagagaacacggcggct

SEQ ID NO: 25509 - DNA, 50 bp, unidentified
  source 1..50: mol_type = unassigned DNA; note = target_82cde11
  misc_feature 1..23: note = LF
  misc_feature 24..25: note = Core
  misc_feature 26..50: note = RF
gagcggagcgtacttaaagtacgtgagcaccggaagcgcaggaccccgcc

SEQ ID NO: 25510 - DNA, 50 bp, unidentified
  source 1..50: mol_type = unassigned DNA; note = target_82d3f0f
  misc_feature 1..24: note = LF
  misc_feature 25: note = Core
  misc_feature 26..50: note = RF
catctaaatcagcttgccataaagcagtcagtggtatgcatgaaaactag

SEQ ID NO: 25511 - DNA, 50 bp, unidentified
  source 1..50: mol_type = unassigned DNA; note = target_82d6f00
  misc_feature 1..23: note = LF
  misc_feature 24..25: note = Core
  misc_feature 26..50: note = RF
cttgctcgtcatagctccatcctctcaggagttggggcctccgacaaacc

SEQ ID NO: 25512 - DNA, 50 bp, unidentified
  source 1..50: mol_type = unassigned DNA; note = target_82dca37
  misc_feature 1..23: note = LF
  misc_feature 24..25: note = Core
  misc_feature 26..50: note = RF
cctttcggcgccgggtgcagtgccccccctgcgttctccggggtcgattg

SEQ ID NO: 25513 - DNA, 50 bp, unidentified
  source 1..50: mol_type = unassigned DNA; note = target_82dcd1d
  misc_feature 1..23: note = LF
  misc_feature 24..25: note = Core
  misc_feature 26..50: note = RF
ctgtcgtcccgctgttgtcagctagagcgcttttggctgccgaggcgcca

SEQ ID NO: 25514 - DNA, 50 bp, unidentified
  source 1..50: mol_type = unassigned DNA; note = target_82ddfa6
  misc_feature 1..23: note = LF
  misc_feature 24..25: note = Core
  misc_feature 26..50: note = RF
gcctgcgggtcggcaaggcgaactggtggctgtgggtattccatcacggc

SEQ ID NO: 25515 - DNA, 50 bp, unidentified
  source 1..50: mol_type = unassigned DNA; note = target_82de26b
  misc_feature 1..22: note = LF
  misc_feature 23..25: note = Core
  misc_feature 26..50: note = RF
gcaaactcgccgcctccttttgcccggtagttagcgaacgttaaccgacg

SEQ ID NO: 25516 - DNA, 50 bp, unidentified
  source 1..50: mol_type = unassigned DNA; note = target_82ec748
  misc_feature 1..23: note = LF
  misc_feature 24..25: note = Core
  misc_feature 26..50: note = RF
ctgctccaacagatgacggtggttgggtccctgcgttcgcagggacgaca

SEQ ID NO: 25517 - DNA, 50 bp, unidentified
  source 1..50: mol_type = unassigned DNA; note = target_82f389c
  misc_feature 1..24: note = LF
  misc_feature 25: note = Core
  misc_feature 26..50: note = RF
attatcgcgcgggcctccccgtcccgactgcgctcgggacgaacgggggc

SEQ ID NO: 25518 - DNA, 50 bp, unidentified
  source 1..50: mol_type = unassigned DNA; note = target_82f4aa1
  misc_feature 1..22: note = LF
  misc_feature 23..25: note = Core
  misc_feature 26..50: note = RF
catttaattgaatcacctctctactattcttccgtatccggcatttcaaa

SEQ ID NO: 25519 - DNA, 50 bp, unidentified
  source 1..50: mol_type = unassigned DNA; note = target_82f5cff
  misc_feature 1..22: note = LF
  misc_feature 23..25: note = Core
  misc_feature 26..50: note = RF
cggtcgaccgcggcagttaacgtgacactgccgacatcaatccttccccc

SEQ ID NO: 25520 - DNA, 50 bp, unidentified
  source 1..50: mol_type = unassigned DNA; note = target_82fea0c
  misc_feature 1..24: note = LF
  misc_feature 25: note = Core
  misc_feature 26..50: note = RF
attgctgcataaatgtcccacggtaattttatgctctatattggagtgta

SEQ ID NO: 25521 - DNA, 50 bp, unidentified
  source 1..50: mol_type = unassigned DNA; note = target_82ff2a9
  misc_feature 1..23: note = LF
  misc_feature 24..25: note = Core
  misc_feature 26..50: note = RF
tgtagtccattttccttgtcctccttttcatacgcttcccggtattcctc

SEQ ID NO: 25522 - DNA, 50 bp, unidentified
  source 1..50: mol_type = unassigned DNA; note = target_8310ca2
  misc_feature 1..23: note = LF
  misc_feature 24..25: note = Core
  misc_feature 26..50: note = RF
aaatgggctcgtgctctcccacccttgcgatagaaagaatcgcaaggatg

SEQ ID NO: 25523 - DNA, 50 bp, unidentified
  source 1..50: mol_type = unassigned DNA; note = target_8316c85
  misc_feature 1..24: note = LF
  misc_feature 25: note = Core
  misc_feature 26..50: note = RF
cgggtcgaagcccgaggacaggaatgagggagcgtggggagcggcctcgc

SEQ ID NO: 25524 - DNA, 50 bp, unidentified
  source 1..50: mol_type = unassigned DNA; note = target_8318439
  misc_feature 1..23: note = LF
  misc_feature 24..25: note = Core
  misc_feature 26..50: note = RF
cgccgaacccgcactcccgatagctatcgggataaatttaatcaatttgc

SEQ ID NO: 25525 - DNA, 50 bp, unidentified
  source 1..50: mol_type = unassigned DNA; note = target_8327e8c
  misc_feature 1..23: note = LF
  misc_feature 24..25: note = Core
  misc_feature 26..50: note = RF
tgtgctgcctttaggcatttcgcctccccctttgtaaaagggggaatgag

SEQ ID NO: 25526 - DNA, 50 bp, unidentified
  source 1..50: mol_type = unassigned DNA; note = target_8332f80
  misc_feature 1..23: note = LF
  misc_feature 24..25: note = Core
  misc_feature 26..50: note = RF
caccgctttcgcgagcaggctcgctcccacattaggtgttcgccggttta

SEQ ID NO: 25527 - DNA, 50 bp, unidentified
  source 1..50: mol_type = unassigned DNA; note = target_833787e
  misc_feature 1..24: note = LF
  misc_feature 25: note = Core
  misc_feature 26..50: note = RF
gggtcacatattccctgatttgtgcggcgtgtcggcgaaccccctccgcc

SEQ ID NO: 25528 - DNA, 50 bp, unidentified
  source 1..50: mol_type = unassigned DNA; note = target_8345b23
  misc_feature 1..23: note = LF
  misc_feature 24..25: note = Core
  misc_feature 26..50: note = RF
aaaattattcatgatatccttgcctttctaaattatgatttcttttgtcg

SEQ ID NO: 25529 - DNA, 50 bp, unidentified
  source 1..50: mol_type = unassigned DNA; note = target_834a7c0
  misc_feature 1..24: note = LF
  misc_feature 25: note = Core
  misc_feature 26..50: note = RF
tctgatgcaacttattttttttcatgtttctatacaaaaaaggtcgctga

SEQ ID NO: 25530 - DNA, 50 bp, unidentified
  source 1..50: mol_type = unassigned DNA; note = target_8357c1d
  misc_feature 1..22: note = LF
  misc_feature 23..25: note = Core
  misc_feature 26..50: note = RF
aaatgtcatataaattctcccatcttctaatttatcttaaaactagataa

SEQ ID NO: 25531 - DNA, 50 bp, unidentified
  source 1..50: mol_type = unassigned DNA; note = target_8361239
  misc_feature 1..23: note = LF
  misc_feature 24..25: note = Core
  misc_feature 26..50: note = RF
cgcaagacccttgccgctttatgaggcgaccgtttgagcaagcttaattt

SEQ ID NO: 25532 - DNA, 50 bp, unidentified
  source 1..50: mol_type = unassigned DNA; note = target_8369b3f
  misc_feature 1..23: note = LF
  misc_feature 24..25: note = Core
  misc_feature 26..50: note = RF
tcattacctctttcattacaatcctccattcttccacttatcagcaataa

SEQ ID NO: 25533 - DNA, 50 bp, unidentified
  source 1..50: mol_type = unassigned DNA; note = target_8374a1c
  misc_feature 1..24: note = LF
  misc_feature 25: note = Core
  misc_feature 26..50: note = RF
cgttctcatcgagcgcagaatgcccggtatggcgcttgattgcaagtggc

SEQ ID NO: 25534 - DNA, 50 bp, unidentified
  source 1..50: mol_type = unassigned DNA; note = target_8377831
  misc_feature 1..23: note = LF
  misc_feature 24..25: note = Core
  misc_feature 26..50: note = RF
gcgcaacgcgttggtgcgcgcaaagcggacgttgttaggtcaattcagtc

SEQ ID NO: 25535 - DNA, 50 bp, unidentified
  source 1..50: mol_type = unassigned DNA; note = target_837aa4c
  misc_feature 1..23: note = LF
  misc_feature 24..25: note = Core
  misc_feature 26..50: note = RF
ttttatgaattacaggaatgctcctttaaatatcctaaagaacattttaa

SEQ ID NO: 25536 - DNA, 50 bp, unidentified
  source 1..50: mol_type = unassigned DNA; note = target_8381b73
  misc_feature 1..23: note = LF
  misc_feature 24..25: note = Core
  misc_feature 26..50: note = RF
agggaccgtgaccaccgggatgtctaacgaatctccgtcccccaagttcg

SEQ ID NO: 25537 - DNA, 50 bp, unidentified
  source 1..50: mol_type = unassigned DNA; note = target_83849d4
  misc_feature 1..23: note = LF
  misc_feature 24..25: note = Core
  misc_feature 26..50: note = RF
tgctgcggtgcgtcggtcgcgattggcacttagcggacattcgcggcacc

SEQ ID NO: 25538 - DNA, 50 bp, unidentified
  source 1..50: mol_type = unassigned DNA; note = target_838b432
  misc_feature 1..22: note = LF
  misc_feature 23..25: note = Core
  misc_feature 26..50: note = RF
gaaaactgcggagtccgcgatgtgcaatctctacaacctgaccaccaacc

SEQ ID NO: 25539 - DNA, 50 bp, unidentified
  source 1..50: mol_type = unassigned DNA; note = target_8392726
  misc_feature 1..24: note = LF
  misc_feature 25: note = Core
  misc_feature 26..50: note = RF
gagcggggtggtccaccactcggaccgtggctcccagtactgtgcacacg

SEQ ID NO: 25540 - DNA, 50 bp, unidentified
  source 1..50: mol_type = unassigned DNA; note = target_83b279d
  misc_feature 1..23: note = LF
  misc_feature 24..25: note = Core
  misc_feature 26..50: note = RF
catttggcatattcattcctcctctgtctgttctctttgtccgttgatag

SEQ ID NO: 25541 - DNA, 50 bp, unidentified
  source 1..50: mol_type = unassigned DNA; note = target_83b676b
  misc_feature 1..24: note = LF
  misc_feature 25: note = Core
  misc_feature 26..50: note = RF
ttcctggccagcgctgccgtagggcgaataacgccaaaggcgttatccgc

SEQ ID NO: 25542 - DNA, 50 bp, unidentified
  source 1..50: mol_type = unassigned DNA; note = target_83bf050
  misc_feature 1..24: note = LF
  misc_feature 25: note = Core
  misc_feature 26..50: note = RF
ggcgtggccgctggggaaaaggagagttcaccatgtcgaatgttgtcccg

SEQ ID NO: 25543 - DNA, 50 bp, unidentified
  source 1..50: mol_type = unassigned DNA; note = target_83c1840
  misc_feature 1..23: note = LF
  misc_feature 24..25: note = Core
  misc_feature 26..50: note = RF
tgactccgtcaggtcggaacgcgctctggcgttacgggtcagtccgcatc

SEQ ID NO: 25544 - DNA, 50 bp, unidentified
  source 1..50: mol_type = unassigned DNA; note = target_83c8f8c
  misc_feature 1..23: note = LF
  misc_feature 24..25: note = Core
  misc_feature 26..50: note = RF
caccggggcatcatcggttcgagtggctctacgtcaccgccttcgtcgcc

SEQ ID NO: 25545 - DNA, 50 bp, unidentified
  source 1..50: mol_type = unassigned DNA; note = target_83cf144
  misc_feature 1..22: note = LF
  misc_feature 23..25: note = Core
  misc_feature 26..50: note = RF
acatagtttcgttaaactgcccgtttagcggaacaggcttgccgtcgcat

SEQ ID NO: 25546 - DNA, 50 bp, unidentified
  source 1..50: mol_type = unassigned DNA; note = target_83da6e6
  misc_feature 1..21: note = LF
  misc_feature 22..25: note = Core
  misc_feature 26..50: note = RF
gcaagccacacgccgcaacgaccccccggaccagcggaacgccgtccaga

SEQ ID NO: 25547 - DNA, 50 bp, unidentified
  source 1..50: mol_type = unassigned DNA; note = target_83dd2b5
  misc_feature 1..23: note = LF
  misc_feature 24..25: note = Core
  misc_feature 26..50: note = RF
tgttgaaatagaatatataagaaaggagtaatacattgctacgtatacaa

SEQ ID NO: 25548 - DNA, 50 bp, unidentified
  source 1..50: mol_type = unassigned DNA; note = target_83e7f72
  misc_feature 1..23: note = LF
  misc_feature 24..25: note = Core
  misc_feature 26..50: note = RF
ttaacgctttgacccatatcatcttcggcaaaggcggcaaaatttccagc

SEQ ID NO: 25549 - DNA, 50 bp, unidentified
  source 1..50: mol_type = unassigned DNA; note = target_83ef993
  misc_feature 1..23: note = LF
  misc_feature 24..25: note = Core
  misc_feature 26..50: note = RF
ttgctccgccggaactttagtcgctcgctcctggcgttccagctcatctt

SEQ ID NO: 25550 - DNA, 50 bp, unidentified
  source 1..50: mol_type = unassigned DNA; note = target_83f429a
  misc_feature 1..23: note = LF
  misc_feature 24..25: note = Core
  misc_feature 26..50: note = RF
agacgccgcgctgcgcacggctcctcaccatgaggccagtgttgaactac

SEQ ID NO: 25551 - DNA, 50 bp, unidentified
  source 1..50: mol_type = unassigned DNA; note = target_83f61f1
  misc_feature 1..24: note = LF
  misc_feature 25: note = Core
  misc_feature 26..50: note = RF
cgagcaaaccttaccctacagatcagggaaggtttgccgaccatccgtca

SEQ ID NO: 25552 - DNA, 50 bp, unidentified
  source 1..50: mol_type = unassigned DNA; note = target_83f7abf
  misc_feature 1..23: note = LF
  misc_feature 24..25: note = Core
  misc_feature 26..50: note = RF
ggggctcttcggctctcccattatgggatcaggaagatgaggtggcccaa

SEQ ID NO: 25553 - DNA, 50 bp, unidentified
  source 1..50: mol_type = unassigned DNA; note = target_83fb31e
  misc_feature 1..24: note = LF
  misc_feature 25: note = Core
  misc_feature 26..50: note = RF
gttagtacaaaaaataactttaacgggcaatattttccgtttcccaaatg

SEQ ID NO: 25554 - DNA, 50 bp, unidentified
  source 1..50: mol_type = unassigned DNA; note = target_83fe252
  misc_feature 1..23: note = LF
  misc_feature 24..25: note = Core
  misc_feature 26..50: note = RF
attgagaaaaccacatattccccctatatttacattgttgagccattcca

SEQ ID NO: 25555 - DNA, 50 bp, unidentified
  source 1..50: mol_type = unassigned DNA; note = target_83fe43b
  misc_feature 1..23: note = LF
  misc_feature 24..25: note = Core
  misc_feature 26..50: note = RF
tctttttaaatattaatcaccccctttcaaaggaattaacgctcttttca

SEQ ID NO: 25556 - DNA, 50 bp, unidentified
  source 1..50: mol_type = unassigned DNA; note = target_8401394
  misc_feature 1..23: note = LF
  misc_feature 24..25: note = Core
  misc_feature 26..50: note = RF
gatgtcgcgcacagcgtgcgctcctacaaaaacacctgcctgcgaggaca

SEQ ID NO: 25557 - DNA, 50 bp, unidentified
  source 1..50: mol_type = unassigned DNA; note = target_8408271
  misc_feature 1..23: note = LF
  misc_feature 24..25: note = Core
  misc_feature 26..50: note = RF
tgcgcttttcatcaattttcgacctccataaatttagattgtcagggcgg

SEQ ID NO: 25558 - DNA, 50 bp, unidentified
  source 1..50: mol_type = unassigned DNA; note = target_840ccdf
  misc_feature 1..22: note = LF
  misc_feature 23..25: note = Core
  misc_feature 26..50: note = RF
aatagacaatagtgttgaaatctgacggttggtttccaattcgcattcgg

SEQ ID NO: 25559 - DNA, 50 bp, unidentified
  source 1..50: mol_type = unassigned DNA; note = target_84120da
  misc_feature 1..23: note = LF
  misc_feature 24..25: note = Core
  misc_feature 26..50: note = RF
gtgcacccggtcttccctgcgccctcacttcaaagagagggcgaaacgaa

SEQ ID NO: 25560 - DNA, 50 bp, unidentified
  source 1..50: mol_type = unassigned DNA; note = target_8421bd0
  misc_feature 1..23: note = LF
  misc_feature 24..25: note = Core
  misc_feature 26..50: note = RF
aagaaatagcacactcatatgatctcctaaaagctcaaaaagcatcgctc

SEQ ID NO: 25561 - DNA, 50 bp, unidentified
  source 1..50: mol_type = unassigned DNA; note = target_8423a0d
  misc_feature 1..23: note = LF
  misc_feature 24..25: note = Core
  misc_feature 26..50: note = RF
gggactatccacatctaacactcctattagtttattatctttaactattg

SEQ ID NO: 25562 - DNA, 50 bp, unidentified
  source 1..50: mol_type = unassigned DNA; note = target_8434b11
  misc_feature 1..23: note = LF
  misc_feature 24..25: note = Core
  misc_feature 26..50: note = RF
aattgggttttcaatccgtcatcctgaggggcgagctgcgcggtgcgtag

SEQ ID NO: 25563 - DNA, 50 bp, unidentified
  source 1..50: mol_type = unassigned DNA; note = target_8436857
  misc_feature 1..23: note = LF
  misc_feature 24..25: note = Core
  misc_feature 26..50: note = RF
cacgctctaggcagagtccttcgctaggcggagtcgctcggccagcgtcc

SEQ ID NO: 25564 - DNA, 50 bp, unidentified
  source 1..50: mol_type = unassigned DNA; note = target_843e796
  misc_feature 1..23: note = LF
  misc_feature 24..25: note = Core
  misc_feature 26..50: note = RF
taatattctaataccaatttttttctccatactgtaaataatacttaata

SEQ ID NO: 25565 - DNA, 50 bp, unidentified
  source 1..50: mol_type = unassigned DNA; note = target_8443127
  misc_feature 1..22: note = LF
  misc_feature 23..25: note = Core
  misc_feature 26..50: note = RF
cacatttttacagtaaattcgtcattgcgagccgcgacagcggcgtggca

SEQ ID NO: 25566 - DNA, 50 bp, unidentified
  source 1..50: mol_type = unassigned DNA; note = target_844a76e
  misc_feature 1..23: note = LF
  misc_feature 24..25: note = Core
  misc_feature 26..50: note = RF
agctgagaatatttcgattagtctgtcagcaccctgaaacctaacagccc

SEQ ID NO: 25567 - DNA, 50 bp, unidentified
  source 1..50: mol_type = unassigned DNA; note = target_8450974
  misc_feature 1..24: note = LF
  misc_feature 25: note = Core
  misc_feature 26..50: note = RF
gacgcggaagctcacccctcgcggcatgaccggacctcagccggcagcgt

SEQ ID NO: 25568 - DNA, 50 bp, unidentified
  source 1..50: mol_type = unassigned DNA; note = target_8454c23
  misc_feature 1..23: note = LF
  misc_feature 24..25: note = Core
  misc_feature 26..50: note = RF
gttgtcgagactgctccaggctcctatcaggtcacgcccgatccggcggc

SEQ ID NO: 25569 - DNA, 50 bp, unidentified
  source 1..50: mol_type = unassigned DNA; note = target_84669b5
  misc_feature 1..24: note = LF
  misc_feature 25: note = Core
  misc_feature 26..50: note = RF
tgttttattaagctaacgaacccgttagcgcaatgaactatgctccctct

SEQ ID NO: 25570 - DNA, 50 bp, unidentified
  source 1..50: mol_type = unassigned DNA; note = target_846de39
  misc_feature 1..23: note = LF
  misc_feature 24..25: note = Core
  misc_feature 26..50: note = RF
agatctttcttcataactatctcctttctacttaatccaaaacaagttcc

SEQ ID NO: 25571 - DNA, 50 bp, unidentified
  source 1..50: mol_type = unassigned DNA; note = target_846e88e
  misc_feature 1..23: note = LF
  misc_feature 24..25: note = Core
  misc_feature 26..50: note = RF
gctgcggtgcatgagtccgttgttggcacttagcggacatgcaaattccg

SEQ ID NO: 25572 - DNA, 50 bp, unidentified
  source 1..50: mol_type = unassigned DNA; note = target_84703c5
  misc_feature 1..23: note = LF
  misc_feature 24..25: note = Core
  misc_feature 26..50: note = RF
gcgggtgagagtcccgccaacagaggagtccagtcactgttgtagttata

SEQ ID NO: 25573 - DNA, 50 bp, unidentified
  source 1..50: mol_type = unassigned DNA; note = target_8477b93
  misc_feature 1..23: note = LF
  misc_feature 24..25: note = Core
  misc_feature 26..50: note = RF
actcagcggtttggtctcaaggaatgaccgaaccggtggattttcataat

SEQ ID NO: 25574 - DNA, 50 bp, unidentified
  source 1..50: mol_type = unassigned DNA; note = target_8480030
  misc_feature 1..24: note = LF
  misc_feature 25: note = Core
  misc_feature 26..50: note = RF
caattgccctattatttttatacgttgttgtgcaacgttaatagtactca

SEQ ID NO: 25575 - DNA, 50 bp, unidentified
  source 1..50: mol_type = unassigned DNA; note = target_8483f6a
  misc_feature 1..24: note = LF
  misc_feature 25: note = Core
  misc_feature 26..50: note = RF
tggcatcaagatgctgggcgaaggcgaatggaaaaccaagaagcacggtg

SEQ ID NO: 25576 - DNA, 50 bp, unidentified
  source 1..50: mol_type = unassigned DNA; note = target_8485d45
  misc_feature 1..22: note = LF
  misc_feature 23..25: note = Core
  misc_feature 26..50: note = RF
caaataccaaccttcattttatcacttcctttatttaaatgacattactt

SEQ ID NO: 25577 - DNA, 50 bp, unidentified
  source 1..50: mol_type = unassigned DNA; note = target_8488c71
  misc_feature 1..22: note = LF
  misc_feature 23..25: note = Core
  misc_feature 26..50: note = RF
tgcgcttccggacttccgtttttgacccacagcggccatctgggcacttt

SEQ ID NO: 25578 - DNA, 50 bp, unidentified
  source 1..50: mol_type = unassigned DNA; note = target_8495232
  misc_feature 1..23: note = LF
  misc_feature 24..25: note = Core
  misc_feature 26..50: note = RF
gctactttgagctgcacaaacccctcttgagccactccccgggcggtagc

SEQ ID NO: 25579 - DNA, 50 bp, unidentified
  source 1..50: mol_type = unassigned DNA; note = target_8497aca
  misc_feature 1..23: note = LF
  misc_feature 24..25: note = Core
  misc_feature 26..50: note = RF
gtggaccggccacaggccggtggctacaagtttgtgaacgcgttctagta

SEQ ID NO: 25580 - DNA, 50 bp, unidentified
  source 1..50: mol_type = unassigned DNA; note = target_849c361
  misc_feature 1..22: note = LF
  misc_feature 23..25: note = Core
  misc_feature 26..50: note = RF
actcatttcgctatcgtatcccgtttagccattcatgcagcacaagcgcc

SEQ ID NO: 25581 - DNA, 50 bp, unidentified
  source 1..50: mol_type = unassigned DNA; note = target_849e917
  misc_feature 1..22: note = LF
  misc_feature 23..25: note = Core
  misc_feature 26..50: note = RF
ttttctttttttttctttgcgactctgcggctttgcgagattatgacaat

SEQ ID NO: 25582 - DNA, 50 bp, unidentified
  source 1..50: mol_type = unassigned DNA; note = target_84a83e0
  misc_feature 1..24: note = LF
  misc_feature 25: note = Core
  misc_feature 26..50: note = RF
cccgcggtacgtcacgatcagcggcaggtccgtgcgacggtcgtacccga

SEQ ID NO: 25583 - DNA, 50 bp, unidentified
  source 1..50: mol_type = unassigned DNA; note = target_84aa953
  misc_feature 1..23: note = LF
  misc_feature 24..25: note = Core
  misc_feature 26..50: note = RF
gccagcatcgccgcgggtcgcgcctcccacgaattagtttctttgtgttg

SEQ ID NO: 25584 - DNA, 50 bp, unidentified
  source 1..50: mol_type = unassigned DNA; note = target_84ac9ef
  misc_feature 1..23: note = LF
  misc_feature 24..25: note = Core
  misc_feature 26..50: note = RF
gtacgacaggcggctaacccaccctacgcgagggcctcaccgccagtcga

SEQ ID NO: 25585 - DNA, 50 bp, unidentified
  source 1..50: mol_type = unassigned DNA; note = target_84b2b92
  misc_feature 1..24: note = LF
  misc_feature 25: note = Core
  misc_feature 26..50: note = RF
gtcgtcggctgaccatccttcgcccccccccccccgcggtagtgtggtac

SEQ ID NO: 25586 - DNA, 50 bp, unidentified
  source 1..50: mol_type = unassigned DNA; note = target_84b8ef3
  misc_feature 1..23: note = LF
  misc_feature 24..25: note = Core
  misc_feature 26..50: note = RF
cacgcgtccggctcaattcgttaaggtttattcgatgcctgccgtcggcc

SEQ ID NO: 25587 - DNA, 50 bp, unidentified
  source 1..50: mol_type = unassigned DNA; note = target_84bd0c3
  misc_feature 1..21: note = LF
  misc_feature 22..25: note = Core
  misc_feature 26..50: note = RF
gcctgggcggccacgtcgaagctcatcggcgctcctccaccgcacccgga

SEQ ID NO: 25588 - DNA, 50 bp, unidentified
  source 1..50: mol_type = unassigned DNA; note = target_84c6006
  misc_feature 1..24: note = LF
  misc_feature 25: note = Core
  misc_feature 26..50: note = RF
cagtcgatctattttccgatgacgtgacgtccctcgacgccacgccagcg

SEQ ID NO: 25589 - DNA, 50 bp, unidentified
  source 1..50: mol_type = unassigned DNA; note = target_84c7c04
  misc_feature 1..24: note = LF
  misc_feature 25: note = Core
  misc_feature 26..50: note = RF
caagggccaccgtcccagaacccccacccccgagcacagcgatctcgctc

SEQ ID NO: 25590 - DNA, 50 bp, unidentified
  source 1..50: mol_type = unassigned DNA; note = target_84de0f5
  misc_feature 1..23: note = LF
  misc_feature 24..25: note = Core
  misc_feature 26..50: note = RF
cccgaccaggacacgtagaggctgtcccgtgccctcgtgcaggccacgaa

SEQ ID NO: 25591 - DNA, 50 bp, unidentified
  source 1..50: mol_type = unassigned DNA; note = target_84e6641
  misc_feature 1..23: note = LF
  misc_feature 24..25: note = Core
  misc_feature 26..50: note = RF
caaagaagaaatctgtgcatctcctgtggctaaattttatctttaggacg

SEQ ID NO: 25592 - DNA, 50 bp, unidentified
  source 1..50: mol_type = unassigned DNA; note = target_84e8f7a
  misc_feature 1..23: note = LF
  misc_feature 24..25: note = Core
  misc_feature 26..50: note = RF
caagagcccggcctcggccgggcttttttctttcagaccctcgctgcacc

SEQ ID NO: 25593 - DNA, 50 bp, unidentified
  source 1..50: mol_type = unassigned DNA; note = target_84e969f
  misc_feature 1..23: note = LF
  misc_feature 24..25: note = Core
  misc_feature 26..50: note = RF
tgatcgcacttgaagcgatcatgctctagcgtaaaaaagccagcgctttc

SEQ ID NO: 25594 - DNA, 50 bp, unidentified
  source 1..50: mol_type = unassigned DNA; note = target_84eae3d
  misc_feature 1..23: note = LF
  misc_feature 24..25: note = Core
  misc_feature 26..50: note = RF
gctcagcttcaggccaggcttcctgggacgcggtctgaacgggcgttacc

SEQ ID NO: 25595 - DNA, 50 bp, unidentified
  source 1..50: mol_type = unassigned DNA; note = target_84ec4e5
  misc_feature 1..21: note = LF
  misc_feature 22..25: note = Core
  misc_feature 26..50: note = RF
gacttcgatccgctgtcatcgctcacaccaccacccccagttctgttcgc

SEQ ID NO: 25596 - DNA, 50 bp, unidentified
  source 1..50: mol_type = unassigned DNA; note = target_84f759a
  misc_feature 1..23: note = LF
  misc_feature 24..25: note = Core
  misc_feature 26..50: note = RF
ggcttggttttgaaaacattccacaggacgaaggaacccccgccgcacgt

SEQ ID NO: 25597 - DNA, 50 bp, unidentified
  source 1..50: mol_type = unassigned DNA; note = target_84f8775
  misc_feature 1..23: note = LF
  misc_feature 24..25: note = Core
  misc_feature 26..50: note = RF
ggagatcttgaggcatgcggcgttggtgcatgaagccggggcggtagccc

SEQ ID NO: 25598 - DNA, 50 bp, unidentified
  source 1..50: mol_type = unassigned DNA; note = target_8506cc8
  misc_feature 1..24: note = LF
  misc_feature 25: note = Core
  misc_feature 26..50: note = RF
gacgattttcaaacaccgccacatcgccaagccgtagccgtcaaactgtc

SEQ ID NO: 25599 - DNA, 50 bp, unidentified
  source 1..50: mol_type = unassigned DNA; note = target_8508df6
  misc_feature 1..23: note = LF
  misc_feature 24..25: note = Core
  misc_feature 26..50: note = RF
cggcatggatgccgcgtaagagcctccatggacggattcacggcgtgtcc

SEQ ID NO: 25600 - DNA, 50 bp, unidentified
  source 1..50: mol_type = unassigned DNA; note = target_8515010
  misc_feature 1..23: note = LF
  misc_feature 24..25: note = Core
  misc_feature 26..50: note = RF
gccgatgtctgctttgggccaaaagcggacattaacgccctttgttttac

SEQ ID NO: 25601 - DNA, 50 bp, unidentified
  source 1..50: mol_type = unassigned DNA; note = target_851b8b6
  misc_feature 1..23: note = LF
  misc_feature 24..25: note = Core
  misc_feature 26..50: note = RF
ccacggcggaaatacagtaagacctcatatgtacaactttatgagatata

SEQ ID NO: 25602 - DNA, 50 bp, unidentified
  source 1..50: mol_type = unassigned DNA; note = target_851f081
  misc_feature 1..23: note = LF
  misc_feature 24..25: note = Core
  misc_feature 26..50: note = RF
cggcgtccgcaaacctccaagggaggaaaccgcgggaggtgtggcgaggt

SEQ ID NO: 25603 - DNA, 50 bp, unidentified
  source 1..50: mol_type = unassigned DNA; note = target_8532c47
  misc_feature 1..21: note = LF
  misc_feature 22..25: note = Core
  misc_feature 26..50: note = RF
gcgcccttgtcccacatccggctcatgcgccgccttgctcggcgagcgtg

SEQ ID NO: 25604 - DNA, 50 bp, unidentified
  source 1..50: mol_type = unassigned DNA; note = target_8533aee
  misc_feature 1..23: note = LF
  misc_feature 24..25: note = Core
  misc_feature 26..50: note = RF
aggatcggatgcagtatccgctcctgccgctgtgaacgcgtagcgtccga

SEQ ID NO: 25605 - DNA, 50 bp, unidentified
  source 1..50: mol_type = unassigned DNA; note = target_853dcd4
  misc_feature 1..23: note = LF
  misc_feature 24..25: note = Core
  misc_feature 26..50: note = RF
ggttacgctatcgctaacccgacctacacgacttattatttaattcttcg

SEQ ID NO: 25606 - DNA, 50 bp, unidentified
  source 1..50: mol_type = unassigned DNA; note = target_854387c
  misc_feature 1..24: note = LF
  misc_feature 25: note = Core
  misc_feature 26..50: note = RF
tggatgaccgcatccgacccaaagcggatattgggcgtgccgccggctac

SEQ ID NO: 25607 - DNA, 50 bp, unidentified
  source 1..50: mol_type = unassigned DNA; note = target_8543f06
  misc_feature 1..24: note = LF
  misc_feature 25: note = Core
  misc_feature 26..50: note = RF
catacggacttttcaacggcaaacttccggatagccgacaatccagccgc

SEQ ID NO: 25608 - DNA, 50 bp, unidentified
  source 1..50: mol_type = unassigned DNA; note = target_8544b89
  misc_feature 1..23: note = LF
  misc_feature 24..25: note = Core
  misc_feature 26..50: note = RF
gggtggcgctgcgcttacccggcctacgttacgggcgtttatccaatcaa

SEQ ID NO: 25609 - DNA, 50 bp, unidentified
  source 1..50: mol_type = unassigned DNA; note = target_8555d16
  misc_feature 1..22: note = LF
  misc_feature 23..25: note = Core
  misc_feature 26..50: note = RF
gcgtaaggcgaatggattcccgctttcgcgggattgacgaaagttttgtg

SEQ ID NO: 25610 - DNA, 50 bp, unidentified
  source 1..50: mol_type = unassigned DNA; note = target_85585a4
  misc_feature 1..23: note = LF
  misc_feature 24..25: note = Core
  misc_feature 26..50: note = RF
gtgccgtacgccggggcgaagcctttgcttacttttcggcgtttggaaaa

SEQ ID NO: 25611 - DNA, 50 bp, unidentified
  source 1..50: mol_type = unassigned DNA; note = target_855b90e
  misc_feature 1..23: note = LF
  misc_feature 24..25: note = Core
  misc_feature 26..50: note = RF
ggatgttcgggtcaagtagtaatagcatcacggacacattggcaggttcc

SEQ ID NO: 25612 - DNA, 50 bp, unidentified
  source 1..50: mol_type = unassigned DNA; note = target_855db92
  misc_feature 1..21: note = LF
  misc_feature 22..25: note = Core
  misc_feature 26..50: note = RF
aggaagtcctccatagctggtctcctttgtcgctgaacgacccagcggat

SEQ ID NO: 25613 - DNA, 50 bp, unidentified
  source 1..50: mol_type = unassigned DNA; note = target_8560622
  misc_feature 1..24: note = LF
  misc_feature 25: note = Core
  misc_feature 26..50: note = RF
gggtcggcaatgccggtgggcaactcattcgatcacctcgttggcgagtg

SEQ ID NO: 25614 - DNA, 50 bp, unidentified
  source 1..50: mol_type = unassigned DNA; note = target_85615d4
  misc_feature 1..22: note = LF
  misc_feature 23..25: note = Core
  misc_feature 26..50: note = RF
gcatgggccagaccagatacacagagttcatgacactctcgtctttcctg

SEQ ID NO: 25615 - DNA, 50 bp, unidentified
  source 1..50: mol_type = unassigned DNA; note = target_8566a05
  misc_feature 1..23: note = LF
  misc_feature 24..25: note = Core
  misc_feature 26..50: note = RF
tactgcagagagatgctcatgcagcccacgttaggcagcggtggtgccgg

SEQ ID NO: 25616 - DNA, 50 bp, unidentified
  source 1..50: mol_type = unassigned DNA; note = target_8568464
  misc_feature 1..23: note = LF
  misc_feature 24..25: note = Core
  misc_feature 26..50: note = RF
cgaatccgtaaatcctcgtaggatgggctgagcgccgcgaagcccatcta

SEQ ID NO: 25617 - DNA, 50 bp, unidentified
  source 1..50: mol_type = unassigned DNA; note = target_8578dcd
  misc_feature 1..21: note = LF
  misc_feature 22..25: note = Core
  misc_feature 26..50: note = RF
ttcgtcgcttcgctcctcgcgatgacggcgggcggccgattacacctccg

SEQ ID NO: 25618 - DNA, 50 bp, unidentified
  source 1..50: mol_type = unassigned DNA; note = target_857a28c
  misc_feature 1..23: note = LF
  misc_feature 24..25: note = Core
  misc_feature 26..50: note = RF
cgcactcgccctcgctgccggaggacgaccagtgaaactgggttgtgaag

SEQ ID NO: 25619 - DNA, 50 bp, unidentified
  source 1..50: mol_type = unassigned DNA; note = target_857cf2d
  misc_feature 1..23: note = LF
  misc_feature 24..25: note = Core
  misc_feature 26..50: note = RF
tgcgccggtggcgcacatccctcctacacctgagctccgattccactctg

SEQ ID NO: 25620 - DNA, 50 bp, unidentified
  source 1..50: mol_type = unassigned DNA; note = target_8580d38
  misc_feature 1..24: note = LF
  misc_feature 25: note = Core
  misc_feature 26..50: note = RF
gccacctggaacccccggccttagcggctgaggggatgcgggtggctttt

SEQ ID NO: 25621 - DNA, 50 bp, unidentified
  source 1..50: mol_type = unassigned DNA; note = target_85822ad
  misc_feature 1..24: note = LF
  misc_feature 25: note = Core
  misc_feature 26..50: note = RF
tttcactaagtcccggacagtgatttcaagatgctggctggatggaggcc

SEQ ID NO: 25622 - DNA, 50 bp, unidentified
  source 1..50: mol_type = unassigned DNA; note = target_858567f
  misc_feature 1..23: note = LF
  misc_feature 24..25: note = Core
  misc_feature 26..50: note = RF
gctgaatcgcggcgggggcgccgctcccacggcatctgccacgcgcgctg

SEQ ID NO: 25623 - DNA, 50 bp, unidentified
  source 1..50: mol_type = unassigned DNA; note = target_858664b
  misc_feature 1..22: note = LF
  misc_feature 23..25: note = Core
  misc_feature 26..50: note = RF
cgccctatccagggcgatggcaaaggctggccggaaccagcgcatgcacg

SEQ ID NO: 25624 - DNA, 50 bp, unidentified
  source 1..50: mol_type = unassigned DNA; note = target_85891dd
  misc_feature 1..22: note = LF
  misc_feature 23..25: note = Core
  misc_feature 26..50: note = RF
cacggacggcgtgtcaaacctccttatttcaatagtgttttgagtttttc

SEQ ID NO: 25625 - DNA, 50 bp, unidentified
  source 1..50: mol_type = unassigned DNA; note = target_858a54c
  misc_feature 1..23: note = LF
  misc_feature 24..25: note = Core
  misc_feature 26..50: note = RF
gggtctaccagttccggtctcgcctgtggtgagcccagtcgaaccaccgc

SEQ ID NO: 25626 - DNA, 50 bp, unidentified
  source 1..50: mol_type = unassigned DNA; note = target_858c18b
  misc_feature 1..24: note = LF
  misc_feature 25: note = Core
  misc_feature 26..50: note = RF
ggcggccagccttgccgaacggaaagtcatactgacttgctgatgcctag

SEQ ID NO: 25627 - DNA, 50 bp, unidentified
  source 1..50: mol_type = unassigned DNA; note = target_858f280
  misc_feature 1..24: note = LF
  misc_feature 25: note = Core
  misc_feature 26..50: note = RF
ttgccgggtttgcagcgccatagccgtagctatgggcaaaaagccggtga

SEQ ID NO: 25628 - DNA, 50 bp, unidentified
  source 1..50: mol_type = unassigned DNA; note = target_8591366
  misc_feature 1..23: note = LF
  misc_feature 24..25: note = Core
  misc_feature 26..50: note = RF
gttgtagggactggaaatcctgtagcccgcatgaaatgcgggtccgggat

SEQ ID NO: 25629 - DNA, 50 bp, unidentified
  source 1..50: mol_type = unassigned DNA; note = target_8596d48
  misc_feature 1..23: note = LF
  misc_feature 24..25: note = Core
  misc_feature 26..50: note = RF
cggggcggaaagggtttcgcctcctttccggggcagggcagcccttattc

SEQ ID NO: 25630 - DNA, 50 bp, unidentified
  source 1..50: mol_type = unassigned DNA; note = target_8597a62
  misc_feature 1..23: note = LF
  misc_feature 24..25: note = Core
  misc_feature 26..50: note = RF
tctcacttgttttttcatttttccacctctaatcacccatgcacatctat

SEQ ID NO: 25631 - DNA, 50 bp, unidentified
  source 1..50: mol_type = unassigned DNA; note = target_859dbdc
  misc_feature 1..20: note = LF
  misc_feature 21..25: note = Core
  misc_feature 26..50: note = RF
ggtgtccgccgagtgcgcccccccccttgacccggctaccccgttgtcct

SEQ ID NO: 25632 - DNA, 50 bp, unidentified
  source 1..50: mol_type = unassigned DNA; note = target_859e295
  misc_feature 1..23: note = LF
  misc_feature 24..25: note = Core
  misc_feature 26..50: note = RF
aggagtccgcttccaaaacggcactcctgtcgcgtgcgttacagcaactt

SEQ ID NO: 25633 - DNA, 50 bp, unidentified
  source 1..50: mol_type = unassigned DNA; note = target_85a2065
  misc_feature 1..23: note = LF
  misc_feature 24..25: note = Core
  misc_feature 26..50: note = RF
gtcgcccccatccgcgatcatgctttttttgagcagacggttctccagcg

SEQ ID NO: 25634 - DNA, 50 bp, unidentified
  source 1..50: mol_type = unassigned DNA; note = target_85a8e57
  misc_feature 1..24: note = LF
  misc_feature 25: note = Core
  misc_feature 26..50: note = RF
tctttgctgaactatcctgcccgttagttgaatgaaaacggcagccgcgc

SEQ ID NO: 25635 - DNA, 50 bp, unidentified
  source 1..50: mol_type = unassigned DNA; note = target_85b3cf0
  misc_feature 1..23: note = LF
  misc_feature 24..25: note = Core
  misc_feature 26..50: note = RF
gtcgccccagtattcaatgtaggtgtcttggtacatggaaagattcctct

SEQ ID NO: 25636 - DNA, 50 bp, unidentified
  source 1..50: mol_type = unassigned DNA; note = target_85c30ef
  misc_feature 1..23: note = LF
  misc_feature 24..25: note = Core
  misc_feature 26..50: note = RF
gttgcaatcaattttttcattgtaatctcctcctacttttcaacgaaaaa

SEQ ID NO: 25637 - DNA, 50 bp, unidentified
  source 1..50: mol_type = unassigned DNA; note = target_85d5ea1
  misc_feature 1..22: note = LF
  misc_feature 23..25: note = Core
  misc_feature 26..50: note = RF
ctgtaatgcggaaaacttacgaagtttttaaaacttcgtaagtttggttg

SEQ ID NO: 25638 - DNA, 50 bp, unidentified
  source 1..50: mol_type = unassigned DNA; note = target_85d8916
  misc_feature 1..23: note = LF
  misc_feature 24..25: note = Core
  misc_feature 26..50: note = RF
cttcgtcgatactgcgtgtctcctcgcaatggcatataaatgtactacgg

SEQ ID NO: 25639 - DNA, 50 bp, unidentified
  source 1..50: mol_type = unassigned DNA; note = target_85dfa92
  misc_feature 1..24: note = LF
  misc_feature 25: note = Core
  misc_feature 26..50: note = RF
actgcatcgccgtgtcgtggagactgacttttgcggtgagcgtgaatggt

SEQ ID NO: 25640 - DNA, 50 bp, unidentified
  source 1..50: mol_type = unassigned DNA; note = target_85e1258
  misc_feature 1..22: note = LF
  misc_feature 23..25: note = Core
  misc_feature 26..50: note = RF
gcctcccccggttggcgatgtttgaatcaccatatctgctatcgtgattg

SEQ ID NO: 25641 - DNA, 50 bp, unidentified
  source 1..50: mol_type = unassigned DNA; note = target_85e3d48
  misc_feature 1..23: note = LF
  misc_feature 24..25: note = Core
  misc_feature 26..50: note = RF
ggggatgtccgctaagtgccaaaagcggacatagcgctgaaatgagagag

SEQ ID NO: 25642 - DNA, 50 bp, unidentified
  source 1..50: mol_type = unassigned DNA; note = target_85e5cff
  misc_feature 1..23: note = LF
  misc_feature 24..25: note = Core
  misc_feature 26..50: note = RF
ggcaaccgtcgatgatggcggaggaggcgtaatgaactacgacgcatcga

SEQ ID NO: 25643 - DNA, 50 bp, unidentified
  source 1..50: mol_type = unassigned DNA; note = target_85ec5c9
  misc_feature 1..23: note = LF
  misc_feature 24..25: note = Core
  misc_feature 26..50: note = RF
tactcagcaggagcaccttttagagtccccgataggggatccgtaaacca

SEQ ID NO: 25644 - DNA, 50 bp, unidentified
  source 1..50: mol_type = unassigned DNA; note = target_85ec888
  misc_feature 1..23: note = LF
  misc_feature 24..25: note = Core
  misc_feature 26..50: note = RF
ttggaatgtttcattgcaagggcttttttatgtctcttgagtgagctatt

SEQ ID NO: 25645 - DNA, 50 bp, unidentified
  source 1..50: mol_type = unassigned DNA; note = target_85ef341
  misc_feature 1..24: note = LF
  misc_feature 25: note = Core
  misc_feature 26..50: note = RF
cacaggtacaatccatcactcggacgtcaagggctcccaatacgtgtcac

SEQ ID NO: 25646 - DNA, 50 bp, unidentified
  source 1..50: mol_type = unassigned DNA; note = target_85f839a
  misc_feature 1..23: note = LF
  misc_feature 24..25: note = Core
  misc_feature 26..50: note = RF
atcggttcgcgggcatggcccgctctacgaggttgacgggtttctgtagg

SEQ ID NO: 25647 - DNA, 50 bp, unidentified
  source 1..50: mol_type = unassigned DNA; note = target_8605b96
  misc_feature 1..23: note = LF
  misc_feature 24..25: note = Core
  misc_feature 26..50: note = RF
gcttgttatccattttcatttacctcctaaatatatttacattatacatc

SEQ ID NO: 25648 - DNA, 50 bp, unidentified
  source 1..50: mol_type = unassigned DNA; note = target_8606be2
  misc_feature 1..24: note = LF
  misc_feature 25: note = Core
  misc_feature 26..50: note = RF
caaaggtcaaaaaacaaccttaacgtacaataattttcgatatccaaact

SEQ ID NO: 25649 - DNA, 50 bp, unidentified
  source 1..50: mol_type = unassigned DNA; note = target_860e9b5
  misc_feature 1..24: note = LF
  misc_feature 25: note = Core
  misc_feature 26..50: note = RF
cctgcgatgcggtgccctcacccccaccccccccgaaagcgaagcgccta

SEQ ID NO: 25650 - DNA, 50 bp, unidentified
  source 1..50: mol_type = unassigned DNA; note = target_8611e6e
  misc_feature 1..24: note = LF
  misc_feature 25: note = Core
  misc_feature 26..50: note = RF
caggcataggtacgttgcaacaaatgtgggagcgggcgttgcccgcgatg

SEQ ID NO: 25651 - DNA, 50 bp, unidentified
  source 1..50: mol_type = unassigned DNA; note = target_861570c
  misc_feature 1..24: note = LF
  misc_feature 25: note = Core
  misc_feature 26..50: note = RF
aaagcgccgggctgtgacgtccgctacgggtcacgtgtggacggcgccct

SEQ ID NO: 25652 - DNA, 50 bp, unidentified
  source 1..50: mol_type = unassigned DNA; note = target_8622965
  misc_feature 1..22: note = LF
  misc_feature 23..25: note = Core
  misc_feature 26..50: note = RF
tggtagatcatagtacttcatattaatctcctttccaacctatcatacac

SEQ ID NO: 25653 - DNA, 50 bp, unidentified
  source 1..50: mol_type = unassigned DNA; note = target_862f3e4
  misc_feature 1..23: note = LF
  misc_feature 24..25: note = Core
  misc_feature 26..50: note = RF
gcaagagagccgtcaccgggaggtggcacatggacgaggcgtacgtcaaa

SEQ ID NO: 25654 - DNA, 50 bp, unidentified
  source 1..50: mol_type = unassigned DNA; note = target_8630582
  misc_feature 1..23: note = LF
  misc_feature 24..25: note = Core
  misc_feature 26..50: note = RF
gccgcattcactgaacttttcacctcccaaagaagaagcgggtatcccgc

SEQ ID NO: 25655 - DNA, 50 bp, unidentified
  source 1..50: mol_type = unassigned DNA; note = target_86372f5
  misc_feature 1..22: note = LF
  misc_feature 23..25: note = Core
  misc_feature 26..50: note = RF
ggcaactgtagcccagttaacgtgacaacacccttcgggctgttcgcctt

SEQ ID NO: 25656 - DNA, 50 bp, unidentified
  source 1..50: mol_type = unassigned DNA; note = target_863b683
  misc_feature 1..24: note = LF
  misc_feature 25: note = Core
  misc_feature 26..50: note = RF
ggcattactttttccacaggcggtcgaactccgccttcgcaaaatatgcc

SEQ ID NO: 25657 - DNA, 50 bp, unidentified
  source 1..50: mol_type = unassigned DNA; note = target_86407fb
  misc_feature 1..24: note = LF
  misc_feature 25: note = Core
  misc_feature 26..50: note = RF
taccgccaaactttgctttccagttgtaatagctggcttcagagataccg

SEQ ID NO: 25658 - DNA, 50 bp, unidentified
  source 1..50: mol_type = unassigned DNA; note = target_8643357
  misc_feature 1..23: note = LF
  misc_feature 24..25: note = Core
  misc_feature 26..50: note = RF
cagtccgaatgaacagatacaacctattggagcttcacagctagatgtgg

SEQ ID NO: 25659 - DNA, 50 bp, unidentified
  source 1..50: mol_type = unassigned DNA; note = target_8646a2f
  misc_feature 1..24: note = LF
  misc_feature 25: note = Core
  misc_feature 26..50: note = RF
ggtgcgctattatgcaataatgaaagctatttagaatatgatgtcaaagc

SEQ ID NO: 25660 - DNA, 50 bp, unidentified
  source 1..50: mol_type = unassigned DNA; note = target_8648c50
  misc_feature 1..23: note = LF
  misc_feature 24..25: note = Core
  misc_feature 26..50: note = RF
tcctctaaccggacttagcactaagcaccggccgccgctgcgcggcggtt

SEQ ID NO: 25661 - DNA, 50 bp, unidentified
  source 1..50: mol_type = unassigned DNA; note = target_864bf70
  misc_feature 1..23: note = LF
  misc_feature 24..25: note = Core
  misc_feature 26..50: note = RF
ggggcccgggagacgggccgagcctaggaagcgggccgccccccggtgcg

SEQ ID NO: 25662 - DNA, 50 bp, unidentified
  source 1..50: mol_type = unassigned DNA; note = target_864f235
  misc_feature 1..23: note = LF
  misc_feature 24..25: note = Core
  misc_feature 26..50: note = RF
aagcatcgcccgcaagcgggctcctgcggcacctgccgagtcatgcacat

SEQ ID NO: 25663 - DNA, 50 bp, unidentified
  source 1..50: mol_type = unassigned DNA; note = target_865082e
  misc_feature 1..23: note = LF
  misc_feature 24..25: note = Core
  misc_feature 26..50: note = RF
tagcgcattaattgacccattaaaggggattaaacatgcgcctgaggtaa

SEQ ID NO: 25664 - DNA, 50 bp, unidentified
  source 1..50: mol_type = unassigned DNA; note = target_8658120
  misc_feature 1..24: note = LF
  misc_feature 25: note = Core
  misc_feature 26..50: note = RF
agcatgttcaaaaacaggcttaccgtacaataattctctatatccaaact

SEQ ID NO: 25665 - DNA, 50 bp, unidentified
  source 1..50: mol_type = unassigned DNA; note = target_8661dbd
  misc_feature 1..23: note = LF
  misc_feature 24..25: note = Core
  misc_feature 26..50: note = RF
gagggatcaatcggcaggggttctgtcgcaaactttgctgattgacgcct

SEQ ID NO: 25666 - DNA, 50 bp, unidentified
  source 1..50: mol_type = unassigned DNA; note = target_866cedc
  misc_feature 1..24: note = LF
  misc_feature 25: note = Core
  misc_feature 26..50: note = RF
ggattcctgtgacgagcacaggaatgagggaggagagggcttgagcggtc

SEQ ID NO: 25667 - DNA, 50 bp, unidentified
  source 1..50: mol_type = unassigned DNA; note = target_867e834
  misc_feature 1..23: note = LF
  misc_feature 24..25: note = Core
  misc_feature 26..50: note = RF
aaagagctcagacatgcctttcaatccgggctatgactgcagttcgttat

SEQ ID NO: 25668 - DNA, 50 bp, unidentified
  source 1..50: mol_type = unassigned DNA; note = target_8683b04
  misc_feature 1..23: note = LF
  misc_feature 24..25: note = Core
  misc_feature 26..50: note = RF
tttctagtgtgatccttcgttcctcaggatgacaaaaaatgctgaaaata

SEQ ID NO: 25669 - DNA, 50 bp, unidentified
  source 1..50: mol_type = unassigned DNA; note = target_868635d
  misc_feature 1..23: note = LF
  misc_feature 24..25: note = Core
  misc_feature 26..50: note = RF
tatattggctatgagtcctgaccctagtcagtggcattgattaaaagaat

SEQ ID NO: 25670 - DNA, 50 bp, unidentified
  source 1..50: mol_type = unassigned DNA; note = target_8686520
  misc_feature 1..22: note = LF
  misc_feature 23..25: note = Core
  misc_feature 26..50: note = RF
tacctgccaattttcttacctcctttttttgctccttatttctcgattac

SEQ ID NO: 25671 - DNA, 50 bp, unidentified
  source 1..50: mol_type = unassigned DNA; note = target_868acbf
  misc_feature 1..23: note = LF
  misc_feature 24..25: note = Core
  misc_feature 26..50: note = RF
aaagttgatgcgaggcttccttcctgaagtcgataaatcttcaattgaat

SEQ ID NO: 25672 - DNA, 50 bp, unidentified
  source 1..50: mol_type = unassigned DNA; note = target_868b049
  misc_feature 1..23: note = LF
  misc_feature 24..25: note = Core
  misc_feature 26..50: note = RF
tcggcgaccgcctcggcgaggttttttaaacgccgcctgctcctcggggg

SEQ ID NO: 25673 - DNA, 50 bp, unidentified
  source 1..50: mol_type = unassigned DNA; note = target_868d750
  misc_feature 1..24: note = LF
  misc_feature 25: note = Core
  misc_feature 26..50: note = RF
tgcggggaagatcgccccaagttttttttgagaacacaagcaaggcggcc

SEQ ID NO: 25674 - DNA, 50 bp, unidentified
  source 1..50: mol_type = unassigned DNA; note = target_868eeff
  misc_feature 1..24: note = LF
  misc_feature 25: note = Core
  misc_feature 26..50: note = RF
gttgactcgtcaagatcgtaaactctttcttgatgttcccacggccccat

SEQ ID NO: 25675 - DNA, 50 bp, unidentified
  source 1..50: mol_type = unassigned DNA; note = target_8693524
  misc_feature 1..22: note = LF
  misc_feature 23..25: note = Core
  misc_feature 26..50: note = RF
ccatggaaagcctgccgtccacagacccttgctggctggccgaacttatc

SEQ ID NO: 25676 - DNA, 50 bp, unidentified
  source 1..50: mol_type = unassigned DNA; note = target_869e6d0
  misc_feature 1..22: note = LF
  misc_feature 23..25: note = Core
  misc_feature 26..50: note = RF
gtgtccacatcttatatttcctcatatcttttccgtttttattcttgttg

SEQ ID NO: 25677 - DNA, 50 bp, unidentified
  source 1..50: mol_type = unassigned DNA; note = target_86a14ee
  misc_feature 1..24: note = LF
  misc_feature 25: note = Core
  misc_feature 26..50: note = RF
tcgacccatccggtggcacagccccacctttttccgggctccagcagcgt

SEQ ID NO: 25678 - DNA, 50 bp, unidentified
  source 1..50: mol_type = unassigned DNA; note = target_86b79e0
  misc_feature 1..23: note = LF
  misc_feature 24..25: note = Core
  misc_feature 26..50: note = RF
ttatcttgatttccatagcttacctctttgatataattataccaaggaat

SEQ ID NO: 25679 - DNA, 50 bp, unidentified
  source 1..50: mol_type = unassigned DNA; note = target_86c0eeb
  misc_feature 1..23: note = LF
  misc_feature 24..25: note = Core
  misc_feature 26..50: note = RF
attcattcatcggaaataagttcgtttttatctgcatggcaaatggtgat

SEQ ID NO: 25680 - DNA, 50 bp, unidentified
  source 1..50: mol_type = unassigned DNA; note = target_86c3c09
  misc_feature 1..23: note = LF
  misc_feature 24..25: note = Core
  misc_feature 26..50: note = RF
gccctcccgcgcaacagggagcttttcttatgctgattcgcctgactccg

SEQ ID NO: 25681 - DNA, 50 bp, unidentified
  source 1..50: mol_type = unassigned DNA; note = target_86d6f60
  misc_feature 1..24: note = LF
  misc_feature 25: note = Core
  misc_feature 26..50: note = RF
atgtcgcttctggtgcaatctaacgttccagatgaggggcgcgagccagc

SEQ ID NO: 25682 - DNA, 50 bp, unidentified
  source 1..50: mol_type = unassigned DNA; note = target_86de056
  misc_feature 1..20: note = LF
  misc_feature 21..25: note = Core
  misc_feature 26..50: note = RF
cacttgaatggtcacgacgacacccccccccttcctgggacagtcggcgt

SEQ ID NO: 25683 - DNA, 50 bp, unidentified; identical to SEQ ID NO: 20483
  source 1..50: mol_type = unassigned DNA; note = target_86e4f09
  misc_feature 1..19: note = LF
  misc_feature 20..25: note = Core
  misc_feature 26..50: note = RF

SEQ ID NO: 25684 - DNA, 50 bp, unidentified
  source 1..50: mol_type = unassigned DNA; note = target_86eb8c6
  misc_feature 1..22: note = LF
  misc_feature 23..25: note = Core
  misc_feature 26..50: note = RF
attattaaggaaaaagaggctgtctaaaaaggtctcttaaaagagaaccc

SEQ ID NO: 25685 - DNA, 50 bp, unidentified
  source 1..50: mol_type = unassigned DNA; note = target_86f3d65
  misc_feature 1..23: note = LF
  misc_feature 24..25: note = Core
  misc_feature 26..50: note = RF
ctggccggtttttactccgccgttgacatgtggctctctcctttcagtgc

SEQ ID NO: 25686 - DNA, 50 bp, unidentified
  source 1..50: mol_type = unassigned DNA; note = target_86f44b9
  misc_feature 1..23: note = LF
  misc_feature 24..25: note = Core
  misc_feature 26..50: note = RF
aaaattttatcgcagataaaatccttgcaccttaaaacagcatgatatta

SEQ ID NO: 25687 - DNA, 50 bp, unidentified
  source 1..50: mol_type = unassigned DNA; note = target_86f89fe
  misc_feature 1..23: note = LF
  misc_feature 24..25: note = Core
  misc_feature 26..50: note = RF
ggcgctgcgcgcctttgcccaccctacgatttcttaacgccttccgccgc

SEQ ID NO: 25688 - DNA, 50 bp, unidentified
  source 1..50: mol_type = unassigned DNA; note = target_86fbe0a
  misc_feature 1..23: note = LF
  misc_feature 24..25: note = Core
  misc_feature 26..50: note = RF
cgaagagcgcgcctttgcccgccctacgacaccgtgcgctacgccgcgtt

SEQ ID NO: 25689 - DNA, 50 bp, unidentified
  source 1..50: mol_type = unassigned DNA; note = target_870158a
  misc_feature 1..22: note = LF
  misc_feature 23..25: note = Core
  misc_feature 26..50: note = RF
tcgttaacctgatgaccgcttttgacccagagttgacatgaggttaatgc

SEQ ID NO: 25690 - DNA, 50 bp, unidentified
  source 1..50: mol_type = unassigned DNA; note = target_870afa8
  misc_feature 1..22: note = LF
  misc_feature 23..25: note = Core
  misc_feature 26..50: note = RF
aatgggccgcgaccgccgcttttgaccctaagcggccctcacagactttg

SEQ ID NO: 25691 - DNA, 50 bp, unidentified
  source 1..50: mol_type = unassigned DNA; note = target_8711229
  misc_feature 1..23: note = LF
  misc_feature 24..25: note = Core
  misc_feature 26..50: note = RF
gtagaacttcccagcgagttatgagtcagactctcaggacgagacatgac

SEQ ID NO: 25692 - DNA, 50 bp, unidentified
  source 1..50: mol_type = unassigned DNA; note = target_8717048
  misc_feature 1..23: note = LF
  misc_feature 24..25: note = Core
  misc_feature 26..50: note = RF
cagggcaccgcccggctcatgccgccaccgtctgcaccgcggccgcaatc

SEQ ID NO: 25693 - DNA, 50 bp, unidentified
  source 1..50: mol_type = unassigned DNA; note = target_8724cf0
  misc_feature 1..22: note = LF
  misc_feature 23..25: note = Core
  misc_feature 26..50: note = RF
cgtctgttttcgggagtggaactgacgcttggctatcgacgcccctaaag

SEQ ID NO: 25694 - DNA, 50 bp, unidentified
  source 1..50: mol_type = unassigned DNA; note = target_8731e47
  misc_feature 1..24: note = LF
  misc_feature 25: note = Core
  misc_feature 26..50: note = RF
gtgcccgattccacgggccgaaagcggacgttcgcgcagctcgtttgcag

SEQ ID NO: 25695 - DNA, 50 bp, unidentified
  source 1..50: mol_type = unassigned DNA; note = target_8739fca
  misc_feature 1..23: note = LF
  misc_feature 24..25: note = Core
  misc_feature 26..50: note = RF
agttggtcttgcgcttggcagcgtgttgcacggatgggcgggatggcgta

SEQ ID NO: 25696 - DNA, 50 bp, unidentified
  source 1..50: mol_type = unassigned DNA; note = target_873c8e0
  misc_feature 1..23: note = LF
  misc_feature 24..25: note = Core
  misc_feature 26..50: note = RF
tatgagccgctaatgtctgcttctggctgagactgttgaagaactccgat

SEQ ID NO: 25697 - DNA, 50 bp, unidentified
  source 1..50: mol_type = unassigned DNA; note = target_874034a
  misc_feature 1..23: note = LF
  misc_feature 24..25: note = Core
  misc_feature 26..50: note = RF
acagataaattctttcattcatccttcttttcacctcttttcatgcaagc

SEQ ID NO: 25698 - DNA, 50 bp, unidentified
  source 1..50: mol_type = unassigned DNA; note = target_87464c2
  misc_feature 1..24: note = LF
  misc_feature 25: note = Core
  misc_feature 26..50: note = RF
ccaaaaccgctttttttttatacgttgttgcccactggccatttactttt

SEQ ID NO: 25699 - DNA, 50 bp, unidentified
  source 1..50: mol_type = unassigned DNA; note = target_874af79
  misc_feature 1..23: note = LF
  misc_feature 24..25: note = Core
  misc_feature 26..50: note = RF
ggacggatacgtcgtcgagacagcttccctggaagcgcgggtcgagcaga

SEQ ID NO: 25700 - DNA, 50 bp, unidentified
  source 1..50: mol_type = unassigned DNA; note = target_87598ee
  misc_feature 1..23: note = LF
  misc_feature 24..25: note = Core
  misc_feature 26..50: note = RF
cgcgagttcgcgggcgactgggactagctcgggctggcggcgggcatcgc

SEQ ID NO: 25701 - DNA, 50 bp, unidentified
  source 1..50: mol_type = unassigned DNA; note = target_8767d0d
  misc_feature 1..23: note = LF
  misc_feature 24..25: note = Core
  misc_feature 26..50: note = RF
ccggccgttcatgatcgtttcgactcttcacgcactacgaccatgatcac

SEQ ID NO: 25702 - DNA, 50 bp, unidentified
  source 1..50: mol_type = unassigned DNA; note = target_8770a77
  misc_feature 1..23: note = LF
  misc_feature 24..25: note = Core
  misc_feature 26..50: note = RF
ggttccgccaagctggagcacccctcatccgtctcgtcgctgcacgccga

SEQ ID NO: 25703 - DNA, 50 bp, unidentified
  source 1..50: mol_type = unassigned DNA; note = target_87732b6
  misc_feature 1..24: note = LF
  misc_feature 25: note = Core
  misc_feature 26..50: note = RF
gcaccgggggcgaccgatatgcggcattaccgcgcactcgccccgactga

SEQ ID NO: 25704 - DNA, 50 bp, unidentified
  source 1..50: mol_type = unassigned DNA; note = target_877dc15
  misc_feature 1..23: note = LF
  misc_feature 24..25: note = Core
  misc_feature 26..50: note = RF
ttatttaaaaatgactttttggacagcccctttttattttaccattcaac

SEQ ID NO: 25705 - DNA, 50 bp, unidentified
  source 1..50: mol_type = unassigned DNA; note = target_877e626
  misc_feature 1..23: note = LF
  misc_feature 24..25: note = Core
  misc_feature 26..50: note = RF
aaattagcaaagccacttacacgttatgtccaataacgtgtttcagttgt

SEQ ID NO: 25706 - DNA, 50 bp, unidentified
  source 1..50: mol_type = unassigned DNA; note = target_878d369
  misc_feature 1..23: note = LF
  misc_feature 24..25: note = Core
  misc_feature 26..50: note = RF
tgtaggattcaacatatcatgtaagcgctgggagcttaccaccataacag

SEQ ID NO: 25707 - DNA, 50 bp, unidentified
  source 1..50: mol_type = unassigned DNA; note = target_87a1524
  misc_feature 1..23: note = LF
  misc_feature 24..25: note = Core
  misc_feature 26..50: note = RF
atgaccggactgcgggacagagctgccattcgctgcggctgctccaaagg

SEQ ID NO: 25708 - DNA, 50 bp, unidentified
  source 1..50: mol_type = unassigned DNA; note = target_87b07e9
  misc_feature 1..24: note = LF
  misc_feature 25: note = Core
  misc_feature 26..50: note = RF
gcagcgcggcagcaacgaaaacaccaacggcctgctacgccagcatttcc

SEQ ID NO: 25709 - DNA, 50 bp, unidentified
  source 1..50: mol_type = unassigned DNA; note = target_87b2f4c
  misc_feature 1..24: note = LF
  misc_feature 25: note = Core
  misc_feature 26..50: note = RF
ggattcctgtgacaggcacaggaatgaggtggtgaatgggcggcagccca

SEQ ID NO: 25710 - DNA, 50 bp, unidentified
  source 1..50: mol_type = unassigned DNA; note = target_87ddeaf
  misc_feature 1..23: note = LF
  misc_feature 24..25: note = Core
  misc_feature 26..50: note = RF
tgttctggttatgaatcctgaccctagtcacaaccccgtaagtagtcttg

SEQ ID NO: 25711 - DNA, 50 bp, unidentified
  source 1..50: mol_type = unassigned DNA; note = target_87e0d8d
  misc_feature 1..20: note = LF
  misc_feature 21..25: note = Core
  misc_feature 26..50: note = RF
actgacccagaagccattgtttgctggtacaataacctcgtaaacggcgg

SEQ ID NO: 25712 - DNA, 50 bp, unidentified
  source 1..50: mol_type = unassigned DNA; note = target_87e498d
  misc_feature 1..23: note = LF
  misc_feature 24..25: note = Core
  misc_feature 26..50: note = RF
tgtcctattcgcgggtaaacccgctcccacagggatcccgcaggcctggg

SEQ ID NO: 25713 - DNA, 50 bp, unidentified
  source 1..50: mol_type = unassigned DNA; note = target_87f33bf
  misc_feature 1..24: note = LF
  misc_feature 25: note = Core
  misc_feature 26..50: note = RF
atccgccgtaattgcggttatacattgttagccacaggttttttattcag

SEQ ID NO: 25714 - DNA, 50 bp, unidentified
  source 1..50: mol_type = unassigned DNA; note = target_87f457f
  misc_feature 1..23: note = LF
  misc_feature 24..25: note = Core
  misc_feature 26..50: note = RF
ggcgcggagcatgagcgccgtccctacgggactccggatgaattgtgggt

SEQ ID NO: 25715 - DNA, 50 bp, unidentified
  source 1..50: mol_type = unassigned DNA; note = target_87f48ab
  misc_feature 1..23: note = LF
  misc_feature 24..25: note = Core
  misc_feature 26..50: note = RF
tttccgggggctgtggcgtttctaggccgtgtacccataaacccggcggc

SEQ ID NO: 25716 - DNA, 50 bp, unidentified
  source 1..50: mol_type = unassigned DNA; note = target_87f59c1
  misc_feature 1..23: note = LF
  misc_feature 24..25: note = Core
  misc_feature 26..50: note = RF
aacggtctcccctctccctagccctctcccggagggagaggggacgtggg

SEQ ID NO: 25717 - DNA, 50 bp, unidentified
  source 1..50: mol_type = unassigned DNA; note = target_8806643
  misc_feature 1..23: note = LF
  misc_feature 24..25: note = Core
  misc_feature 26..50: note = RF
cattcggcaccgttccaaaaaccctcgtttttggaacggctagaaccatt

SEQ ID NO: 25718 - DNA, 50 bp, unidentified
  source 1..50: mol_type = unassigned DNA; note = target_8807aa1
  misc_feature 1..23: note = LF
  misc_feature 24..25: note = Core
  misc_feature 26..50: note = RF
ggagtgtcacaggttaggcgggttgcacatactaacccttgaacccagcg

SEQ ID NO: 25719 - DNA, 50 bp, unidentified
  source 1..50: mol_type = unassigned DNA; note = target_8811c09
  misc_feature 1..23: note = LF
  misc_feature 24..25: note = Core
  misc_feature 26..50: note = RF
tttgcctgtaacttacgttgttcctttcacaattccgccagatcatggcg

SEQ ID NO: 25720 - DNA, 50 bp, unidentified
  source 1..50: mol_type = unassigned DNA; note = target_8811f41
  misc_feature 1..23: note = LF
  misc_feature 24..25: note = Core
  misc_feature 26..50: note = RF
agggccccatcgggagcaagcccctcccacatttaactgtgagcacagta

SEQ ID NO: 25721 - DNA, 50 bp, unidentified
  source 1..50: mol_type = unassigned DNA; note = target_881275c
  misc_feature 1..23: note = LF
  misc_feature 24..25: note = Core
  misc_feature 26..50: note = RF
gttcgtgttggggtagctctcgtagcccgggtgagcgaagcgatacccgg

SEQ ID NO: 25722 - DNA, 50 bp, unidentified
  source 1..50: mol_type = unassigned DNA; note = target_88143ee
  misc_feature 1..22: note = LF
  misc_feature 23..25: note = Core
  misc_feature 26..50: note = RF
gcctccattccagccagcaccttgaatcacaatcgcgctctagctttttg

SEQ ID NO: 25723 - DNA, 50 bp, unidentified
  source 1..50: mol_type = unassigned DNA; note = target_88284b4
  misc_feature 1..23: note = LF
  misc_feature 24..25: note = Core
  misc_feature 26..50: note = RF
tttgcccttgtggctgccgagattgtccatgacgacgatgtcgccgggcc

SEQ ID NO: 25724 - DNA, 50 bp, unidentified
  source 1..50: mol_type = unassigned DNA; note = target_882a4bf
  misc_feature 1..23: note = LF
  misc_feature 24..25: note = Core
  misc_feature 26..50: note = RF
tacaacttttatttttataaacaaagaggctgtgacaaaagtcttgtcac

SEQ ID NO: 25725 - DNA, 50 bp, unidentified
  source 1..50: mol_type = unassigned DNA; note = target_882d0d9
  misc_feature 1..23: note = LF
  misc_feature 24..25: note = Core
  misc_feature 26..50: note = RF
atttcatataacattataaagtcctttattttcctatgccatcgttgctt

SEQ ID NO: 25726 - DNA, 50 bp, unidentified
  source 1..50: mol_type = unassigned DNA; note = target_882ee0d
  misc_feature 1..23: note = LF
  misc_feature 24..25: note = Core
  misc_feature 26..50: note = RF
caagccacggtatcttccgtggctttttgtgctccacaccttttactgct

SEQ ID NO: 25727 - DNA, 50 bp, unidentified
  source 1..50: mol_type = unassigned DNA; note = target_8832b84
  misc_feature 1..24: note = LF
  misc_feature 25: note = Core
  misc_feature 26..50: note = RF
gattgtgtgacacgcaaaatattgcgtctctacataatatgctatcctaa

SEQ ID NO: 25728 - DNA, 50 bp, unidentified
  source 1..50: mol_type = unassigned DNA; note = target_884d758
  misc_feature 1..23: note = LF
  misc_feature 24..25: note = Core
  misc_feature 26..50: note = RF
tcgcgcttcgccgagcgaagcagctacaatgattgcttcggcgtcgatac

SEQ ID NO: 25729 - DNA, 50 bp, unidentified
  source 1..50: mol_type = unassigned DNA; note = target_88565c6
  misc_feature 1..24: note = LF
  misc_feature 25: note = Core
  misc_feature 26..50: note = RF
gccgacttcggcgtcaacgtctgacccgccggcccctcgtcgacgaaccc

SEQ ID NO: 25730 - DNA, 50 bp, unidentified
  source 1..50: mol_type = unassigned DNA; note = target_8859a78
  misc_feature 1..23: note = LF
  misc_feature 24..25: note = Core
  misc_feature 26..50: note = RF
cgccgacttgtggctgccgagattgtccatgatgacgatatcgccgggct

SEQ ID NO: 25731 - DNA, 50 bp, unidentified
  source 1..50: mol_type = unassigned DNA; note = target_8867ad8
  misc_feature 1..24: note = LF
  misc_feature 25: note = Core
  misc_feature 26..50: note = RF
caacattttctccaaaaacataacgcccaattaaggtgtgaagcacgcga

SEQ ID NO: 25732 - DNA, 50 bp, unidentified
  source 1..50: mol_type = unassigned DNA; note = target_8868c66
  misc_feature 1..22: note = LF
  misc_feature 23..25: note = Core
  misc_feature 26..50: note = RF
cattcgtcccggaagcggccgttgaagctctcgatgaagccgttctgcat

SEQ ID NO: 25733 - DNA, 50 bp, unidentified
  source 1..50: mol_type = unassigned DNA; note = target_886baef
  misc_feature 1..23: note = LF
  misc_feature 24..25: note = Core
  misc_feature 26..50: note = RF
gaccgccttcctgtttcccattctgcacgccgatccacacccatcggccg

SEQ ID NO: 25734 - DNA, 50 bp, unidentified
  source 1..50: mol_type = unassigned DNA; note = target_8872eb8
  misc_feature 1..23: note = LF
  misc_feature 24..25: note = Core
  misc_feature 26..50: note = RF
acgtccgcctcccacccaaagcagacggaagccgccgggttgagacaagc

SEQ ID NO: 25735 - DNA, 50 bp, unidentified
  source 1..50: mol_type = unassigned DNA; note = target_887fda6
  misc_feature 1..24: note = LF
  misc_feature 25: note = Core
  misc_feature 26..50: note = RF
cgtaaacactaacttgagcatgacttcccgtcatccgaccggaacggaca

SEQ ID NO: 25736 - DNA, 50 bp, unidentified
  source 1..50: mol_type = unassigned DNA; note = target_8882050
  misc_feature 1..23: note = LF
  misc_feature 24..25: note = Core
  misc_feature 26..50: note = RF
tgaaccagtgtgaacggatacgactctagaggtaaacaacaggcggaatt

SEQ ID NO: 25737 - DNA, 50 bp, unidentified
  source 1..50: mol_type = unassigned DNA; note = target_8898485
  misc_feature 1..23: note = LF
  misc_feature 24..25: note = Core
  misc_feature 26..50: note = RF
gagcgggtcggccccggcatcggctgacctcaccgccgttccccggtcat

SEQ ID NO: 25738 - DNA, 50 bp, unidentified
  source 1..50: mol_type = unassigned DNA; note = target_889db2e
  misc_feature 1..22: note = LF
  misc_feature 23..25: note = Core
  misc_feature 26..50: note = RF
tgaaacactcctcgtcttctgatcttctgttgtctttcgtacaatcagaa

SEQ ID NO: 25739 - DNA, 50 bp, unidentified
  source 1..50: mol_type = unassigned DNA; note = target_88aa52f
  misc_feature 1..23: note = LF
  misc_feature 24..25: note = Core
  misc_feature 26..50: note = RF
atttccgccagatgcttacctgcctcaggtgttcccttgtaaacgtccag

SEQ ID NO: 25740 - DNA, 50 bp, unidentified
  source 1..50: mol_type = unassigned DNA; note = target_88afb05
  misc_feature 1..23: note = LF
  misc_feature 24..25: note = Core
  misc_feature 26..50: note = RF
tcggcgtccaaaattttgcacgccgaaacacacaccaacggcagagaatc

SEQ ID NO: 25741 - DNA, 50 bp, unidentified
  source 1..50: mol_type = unassigned DNA; note = target_88b1625
  misc_feature 1..23: note = LF
  misc_feature 24..25: note = Core
  misc_feature 26..50: note = RF
acgatagcctgctccatattcttctcctttgggtaacatccggaccacat

SEQ ID NO: 25742 - DNA, 50 bp, unidentified
  source 1..50: mol_type = unassigned DNA; note = target_88b613a
  misc_feature 1..22: note = LF
  misc_feature 23..25: note = Core
  misc_feature 26..50: note = RF
cgcgcaagccttttcatggtgccttccaactctcgcgccgtttacaaacc

SEQ ID NO: 25743 - DNA, 50 bp, unidentified
  source 1..50: mol_type = unassigned DNA; note = target_88bd5fe
  misc_feature 1..23: note = LF
  misc_feature 24..25: note = Core
  misc_feature 26..50: note = RF
tccacgccgttccagggttcatctggggaatcccggataagatttggccg

SEQ ID NO: 25744 - DNA, 50 bp, unidentified
  source 1..50: mol_type = unassigned DNA; note = target_88cb8b8
  misc_feature 1..23: note = LF
  misc_feature 24..25: note = Core
  misc_feature 26..50: note = RF
ttttaacggttaaaaccagagagaagggatcatgataaacctgtcagcag

SEQ ID NO: 25745 - DNA, 50 bp, unidentified
  source 1..50: mol_type = unassigned DNA; note = target_88d7078
  misc_feature 1..23: note = LF
  misc_feature 24..25: note = Core
  misc_feature 26..50: note = RF
ggccaacgatagtcgaaagaggtagtgtctcagtttgaaatttgcggaat

SEQ ID NO: 25746 - DNA, 50 bp, unidentified
  source 1..50: mol_type = unassigned DNA; note = target_88d717b
  misc_feature 1..21: note = LF
  misc_feature 22..25: note = Core
  misc_feature 26..50: note = RF
gaaagtaagcttcattttatttctccttattagataataatacattaact

SEQ ID NO: 25747 - DNA, 50 bp, unidentified
  source 1..50: mol_type = unassigned DNA; note = target_88d7cb6
  misc_feature 1..24: note = LF
  misc_feature 25: note = Core
  misc_feature 26..50: note = RF
ttcttattgaagaatcgcgcccgatgttgaataactttttttcacccatc

SEQ ID NO: 25748 - DNA, 50 bp, unidentified
  source 1..50: mol_type = unassigned DNA; note = target_88d88a1
  misc_feature 1..22: note = LF
  misc_feature 23..25: note = Core
  misc_feature 26..50: note = RF
aagaagaagacagcttagggtcagaccccgttaaaaaacgtggcacatgg

SEQ ID NO: 25749 - DNA, 50 bp, unidentified
  source 1..50: mol_type = unassigned DNA; note = target_88e51a1
  misc_feature 1..23: note = LF
  misc_feature 24..25: note = Core
  misc_feature 26..50: note = RF
gctacttcgagccgagcaaacccctcttgagcctctccccgccccttgag

SEQ ID NO: 25750 - DNA, 50 bp, unidentified
  source 1..50: mol_type = unassigned DNA; note = target_88e5e40
  misc_feature 1..23: note = LF
  misc_feature 24..25: note = Core
  misc_feature 26..50: note = RF
gtaatgtccggctgaagccggacctacgcgagctcgtattcgtcgagctt

SEQ ID NO: 25751 - DNA, 50 bp, unidentified
  source 1..50: mol_type = unassigned DNA; note = target_88ebe55
  misc_feature 1..23: note = LF
  misc_feature 24..25: note = Core
  misc_feature 26..50: note = RF
tgatcacgcgatcaccggaaatgctctagtcattccctcgtttgcagggc

SEQ ID NO: 25752 - DNA, 50 bp, unidentified
  source 1..50: mol_type = unassigned DNA; note = target_88f2d22
  misc_feature 1..23: note = LF
  misc_feature 24..25: note = Core
  misc_feature 26..50: note = RF
attgtgaccgcttccgtgaggttccggagctgggagcaacgcgacgacga

SEQ ID NO: 25753 - DNA, 50 bp, unidentified
  source 1..50: mol_type = unassigned DNA; note = target_8910bf4
  misc_feature 1..23: note = LF
  misc_feature 24..25: note = Core
  misc_feature 26..50: note = RF
cgggaatggcgggagaggcgcattggaacgaggaggcaaaagcgctgatt

SEQ ID NO: 25754 - DNA, 50 bp, unidentified
  source 1..50: mol_type = unassigned DNA; note = target_89117b8
  misc_feature 1..24: note = LF
  misc_feature 25: note = Core
  misc_feature 26..50: note = RF
atggttcgggtggattgatcatgaacaaacattgtttggtaaccggcggc

SEQ ID NO: 25755 - DNA, 50 bp, unidentified
  source 1..50: mol_type = unassigned DNA; note = target_89177c0
  misc_feature 1..23: note = LF
  misc_feature 24..25: note = Core
  misc_feature 26..50: note = RF
cacgactgtgaaatgaataactgtaggagctggcttgccagcgaaggcgt

SEQ ID NO: 25756 - DNA, 50 bp, unidentified
  source 1..50: mol_type = unassigned DNA; note = target_891bbc4
  misc_feature 1..23: note = LF
  misc_feature 24..25: note = Core
  misc_feature 26..50: note = RF
gttcttcgtccagggaggattactaccggtttgcccgtgatacgcccaga

SEQ ID NO: 25757 - DNA, 50 bp, unidentified
  source 1..50: mol_type = unassigned DNA; note = target_8923514
  misc_feature 1..23: note = LF
  misc_feature 24..25: note = Core
  misc_feature 26..50: note = RF
gccggaaaagccctgatgccagctataataggtggtgaagagcatcagcc

SEQ ID NO: 25758 - DNA, 50 bp, unidentified
  source 1..50: mol_type = unassigned DNA; note = target_892f9ca
  misc_feature 1..23: note = LF
  misc_feature 24..25: note = Core
  misc_feature 26..50: note = RF
gttgttaataattccatttctttacctccgtaattgtccactaagcgcca

SEQ ID NO: 25759 - DNA, 50 bp, unidentified
  source 1..50: mol_type = unassigned DNA; note = target_893e29f
  misc_feature 1..24: note = LF
  misc_feature 25: note = Core
  misc_feature 26..50: note = RF
agccccatggactgtacttgaccccttcacgaactttgggaaaggtggca

SEQ ID NO: 25760 - DNA, 50 bp, unidentified
  source 1..50: mol_type = unassigned DNA; note = target_894450c
  misc_feature 1..24: note = LF
  misc_feature 25: note = Core
  misc_feature 26..50: note = RF
ttgtgctcaaaaaatgagcttaacgtacaataattttcgatatccaaact

SEQ ID NO: 25761 - DNA, 50 bp, unidentified
  source 1..50: mol_type = unassigned DNA; note = target_8945871
  misc_feature 1..22: note = LF
  misc_feature 23..25: note = Core
  misc_feature 26..50: note = RF
accataaatccatctatttctcctttcatttctgtgtttcatagatttca

SEQ ID NO: 25762 - DNA, 50 bp, unidentified
  source 1..50: mol_type = unassigned DNA; note = target_89540db
  misc_feature 1..23: note = LF
  misc_feature 24..25: note = Core
  misc_feature 26..50: note = RF
cgctatcgcggctgaagccgctcctacacggcgccacggaagcctcttgt

SEQ ID NO: 25763 - DNA, 50 bp, unidentified
  source 1..50: mol_type = unassigned DNA; note = target_8955377
  misc_feature 1..22: note = LF
  misc_feature 23..25: note = Core
  misc_feature 26..50: note = RF
tcagtttcatcggctcttcctccttacgtctggcggtgcgtccaggctgg

SEQ ID NO: 25764 - DNA, 50 bp, unidentified
  source 1..50: mol_type = unassigned DNA; note = target_8956365
  misc_feature 1..23: note = LF
  misc_feature 24..25: note = Core
  misc_feature 26..50: note = RF
tgtcagcccgcacacaggctccgtaggaccggctaaagccgggagggcgc

SEQ ID NO: 25765 - DNA, 50 bp, unidentified
  source 1..50: mol_type = unassigned DNA; note = target_8958388
  misc_feature 1..23: note = LF
  misc_feature 24..25: note = Core
  misc_feature 26..50: note = RF
gatagctacgggcgcatcctgaactcgcggggtggttcgtcccccggacg

SEQ ID NO: 25766 - DNA, 50 bp, unidentified
  source 1..50: mol_type = unassigned DNA; note = target_895c711
  misc_feature 1..22: note = LF
  misc_feature 23..25: note = Core
  misc_feature 26..50: note = RF
tcgccgggcgaaggagccatccacaccgtcaatcgaacagctcttcgcca

SEQ ID NO: 25767 - DNA, 50 bp, unidentified
  source 1..50: mol_type = unassigned DNA; note = target_895d037
  misc_feature 1..23: note = LF
  misc_feature 24..25: note = Core
  misc_feature 26..50: note = RF
gaatccgctctttttagggcggattttttatggcactaaattagcgacaa

SEQ ID NO: 25768 - DNA, 50 bp, unidentified
  source 1..50: mol_type = unassigned DNA; note = target_8960463
  misc_feature 1..24: note = LF
  misc_feature 25: note = Core
  misc_feature 26..50: note = RF
ggaggacatcggctaaatcggcactgttaaatccggaggagtgacgggtt

SEQ ID NO: 25769 - DNA, 50 bp, unidentified
  source 1..50: mol_type = unassigned DNA; note = target_8967f9e
  misc_feature 1..21: note = LF
  misc_feature 22..25: note = Core
  misc_feature 26..50: note = RF
tgttctgagccggtatttaacctgcaagtattttccgcatctgtcaaagc

SEQ ID NO: 25770 - DNA, 50 bp, unidentified
  source 1..50: mol_type = unassigned DNA; note = target_896caf6
  misc_feature 1..22: note = LF
  misc_feature 23..25: note = Core
  misc_feature 26..50: note = RF
aagcatcatcgaatattgcgtcagagcccttattccatgcccaaagccag

SEQ ID NO: 25771 - DNA, 50 bp, unidentified
  source 1..50: mol_type = unassigned DNA; note = target_896fa49
  misc_feature 1..24: note = LF
  misc_feature 25: note = Core
  misc_feature 26..50: note = RF
aactggaaacaggaaatcatcaattccttcatcatagtagactatgaata

SEQ ID NO: 25772 - DNA, 50 bp, unidentified
  source 1..50: mol_type = unassigned DNA; note = target_896fac5
  misc_feature 1..23: note = LF
  misc_feature 24..25: note = Core
  misc_feature 26..50: note = RF
cattggccactctccttcagacctgcaaaatgaacagcgtcgatccgctc

SEQ ID NO: 25773 - DNA, 50 bp, unidentified
  source 1..50: mol_type = unassigned DNA; note = target_8974a53
  misc_feature 1..24: note = LF
  misc_feature 25: note = Core
  misc_feature 26..50: note = RF
gccgcgagggacgtgccacattacttctggtttgcccgtgatccgcccgc

SEQ ID NO: 25774 - DNA, 50 bp, unidentified
  source 1..50: mol_type = unassigned DNA; note = target_8974eb6
  misc_feature 1..24: note = LF
  misc_feature 25: note = Core
  misc_feature 26..50: note = RF
accgcatgatgcatgatcgactcacccggtctacgcttcgctggaccacc

SEQ ID NO: 25775 - DNA, 50 bp, unidentified
  source 1..50: mol_type = unassigned DNA; note = target_897efd6
  misc_feature 1..24: note = LF
  misc_feature 25: note = Core
  misc_feature 26..50: note = RF
gagccaagatgaactcgcggcgcttcactcgatcacctcgtcggcgcggg

SEQ ID NO: 25776 - DNA, 50 bp, unidentified
  source 1..50: mol_type = unassigned DNA; note = target_8983420
  misc_feature 1..24: note = LF
  misc_feature 25: note = Core
  misc_feature 26..50: note = RF
ggggtcggcccggtcagcgatccccaccttttggcgcgaacggaggccac

SEQ ID NO: 25777 - DNA, 50 bp, unidentified
  source 1..50: mol_type = unassigned DNA; note = target_898a1df
  misc_feature 1..21: note = LF
  misc_feature 22..25: note = Core
  misc_feature 26..50: note = RF
gctcgcaatcaggccagcgcgctcacaccagcaacacgccctcgtgctgc

SEQ ID NO: 25778 - DNA, 50 bp, unidentified
  source 1..50: mol_type = unassigned DNA; note = target_898fee0
  misc_feature 1..23: note = LF
  misc_feature 24..25: note = Core
  misc_feature 26..50: note = RF
ctgtgtggcagttagagtgtaagcgtccggtgtcactgctctgccgcgcg

SEQ ID NO: 25779 - DNA, 50 bp, unidentified
  source 1..50: mol_type = unassigned DNA; note = target_899288e
  misc_feature 1..23: note = LF
  misc_feature 24..25: note = Core
  misc_feature 26..50: note = RF
aattttgcgcttctaactcatcactaaagtaacgagaatgcggtgtgccg

SEQ ID NO: 25780 - DNA, 50 bp, unidentified
  source 1..50: mol_type = unassigned DNA; note = target_89947d4
  misc_feature 1..22: note = LF
  misc_feature 23..25: note = Core
  misc_feature 26..50: note = RF
cgttttcctccatcttctcctcctttccggtagctttggcacaggttaat

SEQ ID NO: 25781 - DNA, 50 bp, unidentified
  source 1..50: mol_type = unassigned DNA; note = target_8998724
  misc_feature 1..24: note = LF
  misc_feature 25: note = Core
  misc_feature 26..50: note = RF
gtaatcgtacataaatatcattctcttatccctctatatgattgcggtat

SEQ ID NO: 25782 - DNA, 50 bp, unidentified
  source 1..50: mol_type = unassigned DNA; note = target_89abcb9
  misc_feature 1..23: note = LF
  misc_feature 24..25: note = Core
  misc_feature 26..50: note = RF
ccccaacaaagctgcccccccccccccccgctcaggctgagcttgtcgaa

SEQ ID NO: 25783 - DNA, 50 bp, unidentified
  source 1..50: mol_type = unassigned DNA; note = target_89ad8b8
  misc_feature 1..21: note = LF
  misc_feature 22..25: note = Core
  misc_feature 26..50: note = RF
gcctgagagagaagcgcgtcgctcatcacccggcacccagggccgtgagg

SEQ ID NO: 25784 - DNA, 50 bp, unidentified
  source 1..50: mol_type = unassigned DNA; note = target_89b05db
  misc_feature 1..24: note = LF
  misc_feature 25: note = Core
  misc_feature 26..50: note = RF
accaagatccgacggtggactacttttactccggcgctcatactgatctc

SEQ ID NO: 25785 - DNA, 50 bp, unidentified
  source 1..50: mol_type = unassigned DNA; note = target_89b4f9c
  misc_feature 1..22: note = LF
  misc_feature 23..25: note = Core
  misc_feature 26..50: note = RF
gatcgttttctcatacgtcctcctttcggttcttttattctaagtttttc

SEQ ID NO: 25786 - DNA, 50 bp, unidentified
  source 1..50: mol_type = unassigned DNA; note = target_89b7e91
  misc_feature 1..23: note = LF
  misc_feature 24..25: note = Core
  misc_feature 26..50: note = RF
tgttgcaggggctggaggggctctgttgcacaaatcagctgaaggccgag

SEQ ID NO: 25787 - DNA, 50 bp, unidentified
  source 1..50: mol_type = unassigned DNA; note = target_89bade0
  misc_feature 1..23: note = LF
  misc_feature 24..25: note = Core
  misc_feature 26..50: note = RF
cctggtcgcggctgaagccgctcctacgccatctcgggcgtccagccggt

SEQ ID NO: 25788 - DNA, 50 bp, unidentified
  source 1..50: mol_type = unassigned DNA; note = target_89bc8ae
  misc_feature 1..23: note = LF
  misc_feature 24..25: note = Core
  misc_feature 26..50: note = RF
tgtttaataaactcccgtatcccctatgctcttcagcccactgcgccaac

SEQ ID NO: 25789 - DNA, 50 bp, unidentified
  source 1..50: mol_type = unassigned DNA; note = target_89c0452
  misc_feature 1..23: note = LF
  misc_feature 24..25: note = Core
  misc_feature 26..50: note = RF
cccttgcccatgggtttcacctcctttccagggcgggcgcgcccttattc

SEQ ID NO: 25790 - DNA, 50 bp, unidentified
  source 1..50: mol_type = unassigned DNA; note = target_89c1bb8
  misc_feature 1..21: note = LF
  misc_feature 22..25: note = Core
  misc_feature 26..50: note = RF
aagccggagatcatccgctgcctcaagcgttacgtcgcccgcgagatatt

SEQ ID NO: 25791 - DNA, 50 bp, unidentified
  source 1..50: mol_type = unassigned DNA; note = target_89cef98
  misc_feature 1..23: note = LF
  misc_feature 24..25: note = Core
  misc_feature 26..50: note = RF
tcattattcattttaaattcctccttatgcttaatgatgatgtaaatgac

SEQ ID NO: 25792 - DNA, 50 bp, unidentified
  source 1..50: mol_type = unassigned DNA; note = target_89cf70e
  misc_feature 1..23: note = LF
  misc_feature 24..25: note = Core
  misc_feature 26..50: note = RF
aattttttcattgatttttcttcctttcctgattcatctgcataagaaca

SEQ ID NO: 25793 - DNA, 50 bp, unidentified
  source 1..50: mol_type = unassigned DNA; note = target_89cfb51
  misc_feature 1..24: note = LF
  misc_feature 25: note = Core
  misc_feature 26..50: note = RF
atggtggaaattctggaccgtaagcggtaactgagcggcgtatcttgacc

SEQ ID NO: 25794 - DNA, 50 bp, unidentified
  source 1..50: mol_type = unassigned DNA; note = target_89d0041
  misc_feature 1..24: note = LF
  misc_feature 25: note = Core
  misc_feature 26..50: note = RF
atccccgaattttcagataccgcccaccccccaacaacggcacatcactc

SEQ ID NO: 25795 - DNA, 50 bp, unidentified
  source 1..50: mol_type = unassigned DNA; note = target_89d2c30
  misc_feature 1..23: note = LF
  misc_feature 24..25: note = Core
  misc_feature 26..50: note = RF
ggcgtcgctgcgctccttagctcaggatgacagagcattttggtgacaga

SEQ ID NO: 25796 - DNA, 50 bp, unidentified
  source 1..50: mol_type = unassigned DNA; note = target_89d36ec
  misc_feature 1..23: note = LF
  misc_feature 24..25: note = Core
  misc_feature 26..50: note = RF
ccgcgtcaacgcgcattgaaatgagcgcttaccattgacgattggtataa

SEQ ID NO: 25797 - DNA, 50 bp, unidentified
  source 1..50: mol_type = unassigned DNA; note = target_89d3e35
  misc_feature 1..23: note = LF
  misc_feature 24..25: note = Core
  misc_feature 26..50: note = RF
ggttggcctccagagagttttctagcgacctcactctgccaccgtgcagg

SEQ ID NO: 25798 - DNA, 50 bp, unidentified
  source 1..50: mol_type = unassigned DNA; note = target_89d58cd
  misc_feature 1..23: note = LF
  misc_feature 24..25: note = Core
  misc_feature 26..50: note = RF
atcagcgaatatcgcaacgccgcctgaccacttgcgcggaagatcctgtc

SEQ ID NO: 25799 - DNA, 50 bp, unidentified
  source 1..50: mol_type = unassigned DNA; note = target_89d6732
  misc_feature 1..24: note = LF
  misc_feature 25: note = Core
  misc_feature 26..50: note = RF
tccctgctggcgcacgaatcctttcgtgtaagctgaaacatgaaatcctt

SEQ ID NO: 25800 - DNA, 50 bp, unidentified
  source 1..50: mol_type = unassigned DNA; note = target_89da18e
  misc_feature 1..24: note = LF
  misc_feature 25: note = Core
  misc_feature 26..50: note = RF
cgagtcacgtcggctcgagctcccccccccgaagctctgcgccgtcgacc

SEQ ID NO: 25801 - DNA, 50 bp, unidentified
  source 1..50: mol_type = unassigned DNA; note = target_89dbda5
  misc_feature 1..24: note = LF
  misc_feature 25: note = Core
  misc_feature 26..50: note = RF
tcccgcgagcccctcgccgcctgactcaccgtcagcccacgcgtagcacc

SEQ ID NO: 25802 - DNA, 50 bp, unidentified
  source 1..50: mol_type = unassigned DNA; note = target_89e7897
  misc_feature 1..23: note = LF
  misc_feature 24..25: note = Core
  misc_feature 26..50: note = RF
ggaggtgatggcatagttttttcctttttattaagccttatcatccggat

SEQ ID NO: 25803 - DNA, 50 bp, unidentified
  source 1..50: mol_type = unassigned DNA; note = target_89e850a
  misc_feature 1..23: note = LF
  misc_feature 24..25: note = Core
  misc_feature 26..50: note = RF
tgacggcggcgatgaacggaacggacagttatgaaaaatcctctcagaac

SEQ ID NO: 25804 - DNA, 50 bp, unidentified
  source 1..50: mol_type = unassigned DNA; note = target_89e9e06
  misc_feature 1..23: note = LF
  misc_feature 24..25: note = Core
  misc_feature 26..50: note = RF
cgaaaggaaaccctgacggtttcctttcacacttttcttccctccgaaac

SEQ ID NO: 25805 - DNA, 50 bp, unidentified
  source 1..50: mol_type = unassigned DNA; note = target_89eb3b5
  misc_feature 1..23: note = LF
  misc_feature 24..25: note = Core
  misc_feature 26..50: note = RF
gtcatgtccgctattaccccaaaagcggacattgggcgctgtctcgcgga

SEQ ID NO: 25806 - DNA, 50 bp, unidentified
  source 1..50: mol_type = unassigned DNA; note = target_89ee379
  misc_feature 1..23: note = LF
  misc_feature 24..25: note = Core
  misc_feature 26..50: note = RF
gatttctggacaggtgcgctgagtggagtttctgcctgacggcgggaagc

SEQ ID NO: 25807 - DNA, 50 bp, unidentified
  source 1..50: mol_type = unassigned DNA; note = target_89ee729
  misc_feature 1..23: note = LF
  misc_feature 24..25: note = Core
  misc_feature 26..50: note = RF
cattgtataccaaatttatttccctccaaatttcatttttttattatttc

SEQ ID NO: 25808 - DNA, 50 bp, unidentified
  source 1..50: mol_type = unassigned DNA; note = target_89f69e8
  misc_feature 1..23: note = LF
  misc_feature 24..25: note = Core
  misc_feature 26..50: note = RF
gcacgcctttcggcgtgctcctcagcatgaggccgattgaggcccgtctc

SEQ ID NO: 25809 - DNA, 50 bp, unidentified
  source 1..50: mol_type = unassigned DNA; note = target_89fb1f5
  misc_feature 1..23: note = LF
  misc_feature 24..25: note = Core
  misc_feature 26..50: note = RF
agagaagttgcgttgagaacaatagtacgtttgtcgagatcttaactatg

SEQ ID NO: 25810 - DNA, 50 bp, unidentified
  source 1..50: mol_type = unassigned DNA; note = target_89fe079
  misc_feature 1..24: note = LF
  misc_feature 25: note = Core
  misc_feature 26..50: note = RF
agatcagtcactgtgggtcctaacgttcgacatgagcggcggccggaagc

SEQ ID NO: 25811 - DNA, 50 bp, unidentified
  source 1..50: mol_type = unassigned DNA; note = target_8a01091
  misc_feature 1..23: note = LF
  misc_feature 24..25: note = Core
  misc_feature 26..50: note = RF
tcgactgtaacgccgacctccgacagataacgctcgatccacgccaccgg

SEQ ID NO: 25812 - DNA, 50 bp, unidentified
  source 1..50: mol_type = unassigned DNA; note = target_8a03bc9
  misc_feature 1..23: note = LF
  misc_feature 24..25: note = Core
  misc_feature 26..50: note = RF
actagtccatgtcatcaaatcacctcaaatatagttaatatttattagaa

SEQ ID NO: 25813 - DNA, 50 bp, unidentified
  source 1..50: mol_type = unassigned DNA; note = target_8a04bec
  misc_feature 1..24: note = LF
  misc_feature 25: note = Core
  misc_feature 26..50: note = RF
aatcccggttgttgactgaattggtgttaacagcccctgaagcaggtgat

SEQ ID NO: 25814 - DNA, 50 bp, unidentified
  source 1..50: mol_type = unassigned DNA; note = target_8a0604c
  misc_feature 1..23: note = LF
  misc_feature 24..25: note = Core
  misc_feature 26..50: note = RF
aacgagctcaaacaattgcttcaatcggggctaagatttcagtcttccat

SEQ ID NO: 25815 - DNA, 50 bp, unidentified
  source 1..50: mol_type = unassigned DNA; note = target_8a0a881
  misc_feature 1..24: note = LF
  misc_feature 25: note = Core
  misc_feature 26..50: note = RF
ccatcgacggctcatggccgagcctgtgtgaaaacgccctgaaacgtcaa

SEQ ID NO: 25816 - DNA, 50 bp, unidentified
  source 1..50: mol_type = unassigned DNA; note = target_8a20bde
  misc_feature 1..23: note = LF
  misc_feature 24..25: note = Core
  misc_feature 26..50: note = RF
caatcagggtcgtggtcttccagtgcccgtgcgggatactggcgcgcagg

SEQ ID NO: 25817 - DNA, 50 bp, unidentified
  source 1..50: mol_type = unassigned DNA; note = target_8a27a69
  misc_feature 1..24: note = LF
  misc_feature 25: note = Core
  misc_feature 26..50: note = RF
gttctgaaagggggagatgtccgcttgggtcaaaagccatggctgcgcgt

SEQ ID NO: 25818 - DNA, 50 bp, unidentified
  source 1..50: mol_type = unassigned DNA; note = target_8a33276
  misc_feature 1..24: note = LF
  misc_feature 25: note = Core
  misc_feature 26..50: note = RF
ccggggtcggctaatcccgtccccccggccaatccaccggggctggcggg

SEQ ID NO: 25819 - DNA, 50 bp, unidentified
  source 1..50: mol_type = unassigned DNA; note = target_8a39129
  misc_feature 1..23: note = LF
  misc_feature 24..25: note = Core
  misc_feature 26..50: note = RF
cccgtatggaagacagcgccgaatgcatgcttgtactgatcggcgccaca

SEQ ID NO: 25820 - DNA, 50 bp, unidentified
  source 1..50: mol_type = unassigned DNA; note = target_8a396d4
  misc_feature 1..23: note = LF
  misc_feature 24..25: note = Core
  misc_feature 26..50: note = RF
ttgtagctgaaataggtgacattgtctttcttttttcttcttaaataaaa

SEQ ID NO: 25821 - DNA, 50 bp, unidentified
  source 1..50: mol_type = unassigned DNA; note = target_8a42c5f
  misc_feature 1..20: note = LF
  misc_feature 21..25: note = Core
  misc_feature 26..50: note = RF
acaccgctcttgacgcgagcccccccggccatcccgagccccttgtcctg

SEQ ID NO: 25822 - DNA, 50 bp, unidentified
  source 1..50: mol_type = unassigned DNA; note = target_8a46010
  misc_feature 1..23: note = LF
  misc_feature 24..25: note = Core
  misc_feature 26..50: note = RF
gcgctccgaggccatcagagttttttgcagagcttctgatccaggcggag

SEQ ID NO: 25823 - DNA, 50 bp, unidentified
  source 1..50: mol_type = unassigned DNA; note = target_8a4c600
  misc_feature 1..23: note = LF
  misc_feature 24..25: note = Core
  misc_feature 26..50: note = RF
ttagcagatcaacgcgtttccacacaggctgaacccaaagcggcccttcc

SEQ ID NO: 25824 - DNA, 50 bp, unidentified
  source 1..50: mol_type = unassigned DNA; note = target_8a54a62
  misc_feature 1..22: note = LF
  misc_feature 23..25: note = Core
  misc_feature 26..50: note = RF
acggggagccggtcgccgctgccccccctcgcatgagggaccgccgacga

SEQ ID NO: 25825 - DNA, 50 bp, unidentified
  source 1..50: mol_type = unassigned DNA; note = target_8a5748b
  misc_feature 1..23: note = LF
  misc_feature 24..25: note = Core
  misc_feature 26..50: note = RF
tgctcaggtgcgcgcggcgcaccctacggtagagaacgtgcgtcgagcac

SEQ ID NO: 25826 - DNA, 50 bp, unidentified
  source 1..50: mol_type = unassigned DNA; note = target_8a5a67d
  misc_feature 1..23: note = LF
  misc_feature 24..25: note = Core
  misc_feature 26..50: note = RF
cggcggtatccaacccgcgcatcagcccgcattatgcatcgccttgacga

SEQ ID NO: 25827 - DNA, 50 bp, unidentified
  source 1..50: mol_type = unassigned DNA; note = target_8a6135f
  misc_feature 1..23: note = LF
  misc_feature 24..25: note = Core
  misc_feature 26..50: note = RF
gcgtgggcacggcgtgcccaccctacggtaatggcctttgcattgccgga

SEQ ID NO: 25828 - DNA, 50 bp, unidentified
  source 1..50: mol_type = unassigned DNA; note = target_8a72e16
  misc_feature 1..23: note = LF
  misc_feature 24..25: note = Core
  misc_feature 26..50: note = RF
ggcgctttgcgcctttgcccaccctacgaacggccagcgtcccccacctt

SEQ ID NO: 25829 - DNA, 50 bp, unidentified; identical to SEQ ID NO: 20903
  source 1..50: mol_type = unassigned DNA; note = target_8a755ba
  misc_feature 1..24: note = LF
  misc_feature 25: note = Core
  misc_feature 26..50: note = RF

SEQ ID NO: 25830 - DNA, 50 bp, unidentified
  source 1..50: mol_type = unassigned DNA; note = target_8a831f7
  misc_feature 1..23: note = LF
  misc_feature 24..25: note = Core
  misc_feature 26..50: note = RF
aatatatcgccataaatgacgacctacataaaaaataaaaacgcggtgca

SEQ ID NO: 25831 - DNA, 50 bp, unidentified
  source 1..50: mol_type = unassigned DNA; note = target_8a8f5d1
  misc_feature 1..24: note = LF
  misc_feature 25: note = Core
  misc_feature 26..50: note = RF
gcctagagcgatggctgcaaagttttttttgagttaatacaacctccgtg

SEQ ID NO: 25832 - DNA, 50 bp, unidentified
  source 1..50: mol_type = unassigned DNA; note = target_8a90fa9
  misc_feature 1..23: note = LF
  misc_feature 24..25: note = Core
  misc_feature 26..50: note = RF
aaaggtgctacaccgtccgatatttccgttttgagcatcctttgcaggtg

SEQ ID NO: 25833 - DNA, 50 bp, unidentified
  source 1..50: mol_type = unassigned DNA; note = target_8a91b9e
  misc_feature 1..21: note = LF
  misc_feature 22..25: note = Core
  misc_feature 26..50: note = RF
gtcgcgtctagcagcgcgttaatgagtccacgcctagtgcgtggtgctgc

SEQ ID NO: 25834 - DNA, 50 bp, unidentified
  source 1..50: mol_type = unassigned DNA; note = target_8a94e56
  misc_feature 1..23: note = LF
  misc_feature 24..25: note = Core
  misc_feature 26..50: note = RF
cggtctcgaccgccgtcttcatgttgtcgtagatgccacgcgtgcaggtg

SEQ ID NO: 25835 - DNA, 50 bp, unidentified
  source 1..50: mol_type = unassigned DNA; note = target_8aa9896
  misc_feature 1..23: note = LF
  misc_feature 24..25: note = Core
  misc_feature 26..50: note = RF
atgccgcactttgcttcttacttctcagttttctctttccaagcagaata

SEQ ID NO: 25836 - DNA, 50 bp, unidentified
  source 1..50: mol_type = unassigned DNA; note = target_8aad39f
  misc_feature 1..23: note = LF
  misc_feature 24..25: note = Core
  misc_feature 26..50: note = RF
cttgtcgcgcccacggggcgctcctacccttgtcccgaatcaagccatca

SEQ ID NO: 25837 - DNA, 50 bp, unidentified
  source 1..50: mol_type = unassigned DNA; note = target_8ab4afc
  misc_feature 1..24: note = LF
  misc_feature 25: note = Core
  misc_feature 26..50: note = RF
gtaccaagcaattaattatacacgttgttgtaatgcgttttgtactttta

SEQ ID NO: 25838 - DNA, 50 bp, unidentified
  source 1..50: mol_type = unassigned DNA; note = target_8aba232
  misc_feature 1..23: note = LF
  misc_feature 24..25: note = Core
  misc_feature 26..50: note = RF
gcaccgagggccggccgggcccgctcaccggggcgccaccgcccgggcca

SEQ ID NO: 25839 - DNA, 50 bp, unidentified
  source 1..50: mol_type = unassigned DNA; note = target_8abf701
  misc_feature 1..23: note = LF
  misc_feature 24..25: note = Core
  misc_feature 26..50: note = RF
agcctgaaaccactcgccgaagctgccattcgttcacaagctatgccggc

SEQ ID NO: 25840 - DNA, 50 bp, unidentified
  source 1..50: mol_type = unassigned DNA; note = target_8ac1e52
  misc_feature 1..23: note = LF
  misc_feature 24..25: note = Core
  misc_feature 26..50: note = RF
catattccatacaagcacccgtcctttctggataattgtgtggccttctg

SEQ ID NO: 25841 - DNA, 50 bp, unidentified
  source 1..50: mol_type = unassigned DNA; note = target_8ac21f3
  misc_feature 1..24: note = LF
  misc_feature 25: note = Core
  misc_feature 26..50: note = RF
ccgcttagcgccgggcgtcaccatttttttgatgccagatccttcagcac

SEQ ID NO: 25842 - DNA, 50 bp, unidentified
  source 1..50: mol_type = unassigned DNA; note = target_8ac25f9
  misc_feature 1..23: note = LF
  misc_feature 24..25: note = Core
  misc_feature 26..50: note = RF
aggcacattctacttcgccatccctataatcatcatgctcggctccttcc

SEQ ID NO: 25843 - DNA, 50 bp, unidentified
  source 1..50: mol_type = unassigned DNA; note = target_8acdb4e
  misc_feature 1..24: note = LF
  misc_feature 25: note = Core
  misc_feature 26..50: note = RF
gttcctactacctatctggactgactcgtaacgagcaggtcaggagttcg

SEQ ID NO: 25844 - DNA, 50 bp, unidentified
  source 1..50: mol_type = unassigned DNA; note = target_8ad4d25
  misc_feature 1..24: note = LF
  misc_feature 25: note = Core
  misc_feature 26..50: note = RF
tttttgacgacatccttagcaggccgttgaaaaacccaccgagtcgggta

SEQ ID NO: 25845 - DNA, 50 bp, unidentified
  source 1..50: mol_type = unassigned DNA; note = target_8ad747e
  misc_feature 1..21: note = LF
  misc_feature 22..25: note = Core
  misc_feature 26..50: note = RF
cgcgagcgctcgcgccgcacgccccaccgggcgtgatctgcgccacggaa

SEQ ID NO: 25846 - DNA, 50 bp, unidentified
  source 1..50: mol_type = unassigned DNA; note = target_8addd73
  misc_feature 1..23: note = LF
  misc_feature 24..25: note = Core
  misc_feature 26..50: note = RF
tctttagtaaacatacaatctaccttccaaaaataataatctcataaatc

SEQ ID NO: 25847 - DNA, 50 bp, unidentified
  source 1..50: mol_type = unassigned DNA; note = target_8adea31
  misc_feature 1..23: note = LF
  misc_feature 24..25: note = Core
  misc_feature 26..50: note = RF
cttaaccgcccgtataacttttccttattttgactttgtaatttttcccg

SEQ ID NO: 25848 - DNA, 50 bp, unidentified
  source 1..50: mol_type = unassigned DNA; note = target_8adecac
  misc_feature 1..23: note = LF
  misc_feature 24..25: note = Core
  misc_feature 26..50: note = RF
accacctggtgttcgcatagtcttggtacgcgctgtagtacagcgcaccc

SEQ ID NO: 25849 - DNA, 50 bp, unidentified
  source 1..50: mol_type = unassigned DNA; note = target_8af870d
  misc_feature 1..23: note = LF
  misc_feature 24..25: note = Core
  misc_feature 26..50: note = RF
tgtttgtgacggctgggcaggtcagcgattacacgggggccagagccttg

SEQ ID NO: 25850 - DNA, 50 bp, unidentified
  source 1..50: mol_type = unassigned DNA; note = target_8b03402
  misc_feature 1..22: note = LF
  misc_feature 23..25: note = Core
  misc_feature 26..50: note = RF
ttgcctctttattccattcttccatatttcatttccacaccctccttatc

SEQ ID NO: 25851 - DNA, 50 bp, unidentified
  source 1..50: mol_type = unassigned DNA; note = target_8b0e4f0
  misc_feature 1..23: note = LF
  misc_feature 24..25: note = Core
  misc_feature 26..50: note = RF
tttgagatagaaagcttatttccctcctgtcagattttactgggtatccc

SEQ ID NO: 25852 - DNA, 50 bp, unidentified
  source 1..50: mol_type = unassigned DNA; note = target_8b1dbec
  misc_feature 1..24: note = LF
  misc_feature 25: note = Core
  misc_feature 26..50: note = RF
atccggggtttttagaaggtctgctggggtcaaagtgtaacgttgggcgg

SEQ ID NO: 25853 - DNA, 50 bp, unidentified
  source 1..50: mol_type = unassigned DNA; note = target_8b218e0
  misc_feature 1..23: note = LF
  misc_feature 24..25: note = Core
  misc_feature 26..50: note = RF
ttttccgccatattggcgtcctcctctccgtttttgtaacgcaagtatac

SEQ ID NO: 25854 - DNA, 50 bp, unidentified
  source 1..50: mol_type = unassigned DNA; note = target_8b2de06
  misc_feature 1..23: note = LF
  misc_feature 24..25: note = Core
  misc_feature 26..50: note = RF
atcgagcgaaatacgcggtggcttttttaggatgtcgcgctcctcggtca

SEQ ID NO: 25855 - DNA, 50 bp, unidentified
  source 1..50: mol_type = unassigned DNA; note = target_8b309a2
  misc_feature 1..23: note = LF
  misc_feature 24..25: note = Core
  misc_feature 26..50: note = RF
gttcggctattgccgagatgctgagcgactacggcgcactgcgtgaccaa

SEQ ID NO: 25856 - DNA, 50 bp, unidentified
  source 1..50: mol_type = unassigned DNA; note = target_8b347b6
  misc_feature 1..23: note = LF
  misc_feature 24..25: note = Core
  misc_feature 26..50: note = RF
caatgacgtcggacgtccggaactggcgaaaacttgccggttcgcccacg

SEQ ID NO: 25857 - DNA, 50 bp, unidentified
  source 1..50: mol_type = unassigned DNA; note = target_8b39d85
  misc_feature 1..23: note = LF
  misc_feature 24..25: note = Core
  misc_feature 26..50: note = RF
acagggatcatgtccgtttcctcctttcctgttcggcacggcgcttttgt

SEQ ID NO: 25858 - DNA, 50 bp, unidentified
  source 1..50: mol_type = unassigned DNA; note = target_8b3f498
  misc_feature 1..23: note = LF
  misc_feature 24..25: note = Core
  misc_feature 26..50: note = RF
cgacctcggtaattgggccttcgtaggcatggaggatcgcaatgctgcgt

SEQ ID NO: 25859 - DNA, 50 bp, unidentified
  source 1..50: mol_type = unassigned DNA; note = target_8b40dfc
  misc_feature 1..22: note = LF
  misc_feature 23..25: note = Core
  misc_feature 26..50: note = RF
cgctgaatcggtcggccgcgaatgacccatagcggcgttctgttgcggcg

SEQ ID NO: 25860 - DNA, 50 bp, unidentified
  source 1..50: mol_type = unassigned DNA; note = target_8b4665d
  misc_feature 1..24: note = LF
  misc_feature 25: note = Core
  misc_feature 26..50: note = RF
tggcaagtccccctccgcgactgaccctcgcccctcttccccgccctctc

SEQ ID NO: 25861 - DNA, 50 bp, unidentified
  source 1..50: mol_type = unassigned DNA; note = target_8b4e06e
  misc_feature 1..24: note = LF
  misc_feature 25: note = Core
  misc_feature 26..50: note = RF
ttcatacatacacctcctaaattgttttaattatgttcaagatgtaacgt

SEQ ID NO: 25862 - DNA, 50 bp, unidentified
  source 1..50: mol_type = unassigned DNA; note = target_8b4f6ca
  misc_feature 1..23: note = LF
  misc_feature 24..25: note = Core
  misc_feature 26..50: note = RF
cccgactcatttttcataaaatcctccttgataataatttttattttata

SEQ ID NO: 25863 - DNA, 50 bp, unidentified
  source 1..50: mol_type = unassigned DNA; note = target_8b53ebb
  misc_feature 1..24: note = LF
  misc_feature 25: note = Core
  misc_feature 26..50: note = RF
tcgtaaattccatcatttctttctctttctttacgctataataaaattat

SEQ ID NO: 25864 - DNA, 50 bp, unidentified
  source 1..50: mol_type = unassigned DNA; note = target_8b54a96
  misc_feature 1..24: note = LF
  misc_feature 25: note = Core
  misc_feature 26..50: note = RF
ggctggccgatcgatcaaatgtgccgtactgctcggctgacccagcgctc

SEQ ID NO: 25865 - DNA, 50 bp, unidentified
  source 1..50: mol_type = unassigned DNA; note = target_8b56b55
  misc_feature 1..23: note = LF
  misc_feature 24..25: note = Core
  misc_feature 26..50: note = RF
tcaaaatagaagtatcaccacggagcgcttcgcttccacgaagaacacgg

SEQ ID NO: 25866 - DNA, 50 bp, unidentified
  source 1..50: mol_type = unassigned DNA; note = target_8b59ab2
  misc_feature 1..23: note = LF
  misc_feature 24..25: note = Core
  misc_feature 26..50: note = RF
gtgatggtttccaagccttgttgagcggagcgacgctgcacctcatttgg

SEQ ID NO: 25867 - DNA, 50 bp, unidentified
  source 1..50: mol_type = unassigned DNA; note = target_8b5f155
  misc_feature 1..23: note = LF
  misc_feature 24..25: note = Core
  misc_feature 26..50: note = RF
gttttctattcaattaagaacttgtttaaattttagtaaaagattttgtt

SEQ ID NO: 25868 - DNA, 50 bp, unidentified
  source 1..50: mol_type = unassigned DNA; note = target_8b605fe
  misc_feature 1..24: note = LF
  misc_feature 25: note = Core
  misc_feature 26..50: note = RF
aatatgtggtaaggtgtatgtgtatggatagttgcgtgtttgaggcgagg

SEQ ID NO: 25869 - DNA, 50 bp, unidentified
  source 1..50: mol_type = unassigned DNA; note = target_8b62cb5
  misc_feature 1..18: note = LF
  misc_feature 19..25: note = Core
  misc_feature 26..50: note = RF
ttcttctcggtcatggtcgtttcctttcagtcctgcggaatcgcggtcgc

SEQ ID NO: 25870 - DNA, 50 bp, unidentified
  source 1..50: mol_type = unassigned DNA; note = target_8b7371d
  misc_feature 1..23: note = LF
  misc_feature 24..25: note = Core
  misc_feature 26..50: note = RF
gcagttttttgatcatatcactgcacctcctttgttaccttccattgcac

SEQ ID NO: 25871 - DNA, 50 bp, unidentified
  source 1..50: mol_type = unassigned DNA; note = target_8b7bfe5
  misc_feature 1..23: note = LF
  misc_feature 24..25: note = Core
  misc_feature 26..50: note = RF
cggcatggatgccgcgaccaagcctacagggacgtattcacggcgtcccc

SEQ ID NO: 25872 - DNA, 50 bp, unidentified
  source 1..50: mol_type = unassigned DNA; note = target_8b87cca
  misc_feature 1..23: note = LF
  misc_feature 24..25: note = Core
  misc_feature 26..50: note = RF
tctaaaaattgcacttcgacaagctcagtgcgaacggtggttcatttaaa

SEQ ID NO: 25873 - DNA, 50 bp, unidentified
  source 1..50: mol_type = unassigned DNA; note = target_8b8aadd
  misc_feature 1..21: note = LF
  misc_feature 22..25: note = Core
  misc_feature 26..50: note = RF
cgcgtcatcggggtcggggtggtcatgccgccaccatgcccggtgcccgc

SEQ ID NO: 25874 - DNA, 50 bp, unidentified
  source 1..50: mol_type = unassigned DNA; note = target_8b8bb8e
  misc_feature 1..23: note = LF
  misc_feature 24..25: note = Core
  misc_feature 26..50: note = RF
gtaatatttaacatataattttcctccttataatttgatttttattttag

SEQ ID NO: 25875 - DNA, 50 bp, unidentified
  source 1..50: mol_type = unassigned DNA; note = target_8b90bfc
  misc_feature 1..23: note = LF
  misc_feature 24..25: note = Core
  misc_feature 26..50: note = RF
ggttacgctgacgctaacccgacctacgattgatatggattacaaaatat

SEQ ID NO: 25876 - DNA, 50 bp, unidentified
  source 1..50: mol_type = unassigned DNA; note = target_8b95f93
  misc_feature 1..23: note = LF
  misc_feature 24..25: note = Core
  misc_feature 26..50: note = RF
ccgtggccaattttagttgaccactacaacctgacagagggcgaatacgt

SEQ ID NO: 25877 - DNA, 50 bp, unidentified
  source 1..50: mol_type = unassigned DNA; note = target_8b98c64
  misc_feature 1..21: note = LF
  misc_feature 22..25: note = Core
  misc_feature 26..50: note = RF
atggcagtactcctatgtgttctcctgtgcaacgaaccgcccaacagtgg

SEQ ID NO: 25878 - DNA, 50 bp, unidentified
  source 1..50: mol_type = unassigned DNA; note = target_8ba83ce
  misc_feature 1..22: note = LF
  misc_feature 23..25: note = Core
  misc_feature 26..50: note = RF
ctctcatcctaaggtccgcttctgacccttggcggaccttcatttttaat

SEQ ID NO: 25879 - DNA, 50 bp, unidentified
  source 1..50: mol_type = unassigned DNA; note = target_8babdf9
  misc_feature 1..23: note = LF
  misc_feature 24..25: note = Core
  misc_feature 26..50: note = RF
ttttatcttgattatctgttctcctgtcctcatcgtgtaatatgtctcgg

SEQ ID NO: 25880 - DNA, 50 bp, unidentified
  source 1..50: mol_type = unassigned DNA; note = target_8bad61e
  misc_feature 1..24: note = LF
  misc_feature 25: note = Core
  misc_feature 26..50: note = RF
tgtcacgggtgatacccccataaacgagaaagggctgcgtgacgcagccc

SEQ ID NO: 25881 - DNA, 50 bp, unidentified
  source 1..50: mol_type = unassigned DNA; note = target_8bb1a01
  misc_feature 1..23: note = LF
  misc_feature 24..25: note = Core
  misc_feature 26..50: note = RF
agtgtctttctaatgtctattgcctcttgcctgacgcctatcgcctccta

SEQ ID NO: 25882 - DNA, 50 bp, unidentified
  source 1..50: mol_type = unassigned DNA; note = target_8bb6c5b
  misc_feature 1..23: note = LF
  misc_feature 24..25: note = Core
  misc_feature 26..50: note = RF
tatgtttataaagagtgccatggatggcaaagagcggttatgttcagggt

SEQ ID NO: 25883 - DNA, 50 bp, unidentified
  source 1..50: mol_type = unassigned DNA; note = target_8bb7942
  misc_feature 1..22: note = LF
  misc_feature 23..25: note = Core
  misc_feature 26..50: note = RF
ggctacaggcatagtcattcgaagtcagagacttcgaacagcggcgggat

SEQ ID NO: 25884 - DNA, 50 bp, unidentified
  source 1..50: mol_type = unassigned DNA; note = target_8bbe91d
  misc_feature 1..23: note = LF
  misc_feature 24..25: note = Core
  misc_feature 26..50: note = RF
gctctttcgggaaaattctgcgatgaccccaatgatcggcgtctcgagcc

SEQ ID NO: 25885 - DNA, 50 bp, unidentified
  source 1..50: mol_type = unassigned DNA; note = target_8bc08de
  misc_feature 1..22: note = LF
  misc_feature 23..25: note = Core
  misc_feature 26..50: note = RF
ccccgcttttgccgtttgcaccagagccgtccaatataccgtcctatgac

SEQ ID NO: 25886 - DNA, 50 bp, unidentified
  source 1..50: mol_type = unassigned DNA; note = target_8bc8791
  misc_feature 1..23: note = LF
  misc_feature 24..25: note = Core
  misc_feature 26..50: note = RF
ttgatcgggcggcccttcgatacctcagggcgaacggcttccgaagaggc

SEQ ID NO: 25887 - DNA, 50 bp, unidentified
  source 1..50: mol_type = unassigned DNA; note = target_8bddddb
  misc_feature 1..24: note = LF
  misc_feature 25: note = Core
  misc_feature 26..50: note = RF
ctgctcgatcgcgtggccggtcttttttttgcgcgtaatcccgtgccggg

SEQ ID NO: 25888 - DNA, 50 bp, unidentified
  source 1..50: mol_type = unassigned DNA; note = target_8bea280
  misc_feature 1..23: note = LF
  misc_feature 24..25: note = Core
  misc_feature 26..50: note = RF
tcggcgcacccccacgtccggatctgccgagatcgggatggaacgccttt

SEQ ID NO: 25889 - DNA, 50 bp, unidentified
  source 1..50: mol_type = unassigned DNA; note = target_8beb0c8
  misc_feature 1..23: note = LF
  misc_feature 24..25: note = Core
  misc_feature 26..50: note = RF
ttttgttcatcgtcttttccctccttagaggaagtgtcgtactctgtagg

SEQ ID NO: 25890 - DNA, 50 bp, unidentified
  source 1..50: mol_type = unassigned DNA; note = target_8bf2598
  misc_feature 1..23: note = LF
  misc_feature 24..25: note = Core
  misc_feature 26..50: note = RF
cgcgccatggatggcgcgcgcggagcgaccagggatggctcgagcgtgtc

SEQ ID NO: 25891 - DNA, 50 bp, unidentified
  source 1..50: mol_type = unassigned DNA; note = target_8bf32e3
  misc_feature 1..21: note = LF
  misc_feature 22..25: note = Core
  misc_feature 26..50: note = RF
gcaacggtctcccggaggccggtcatggggcctcccggcctggactgagg

SEQ ID NO: 25892 - DNA, 50 bp, unidentified
  source 1..50: mol_type = unassigned DNA; note = target_8bf637d
  misc_feature 1..23: note = LF
  misc_feature 24..25: note = Core
  misc_feature 26..50: note = RF
tctttaccctgaacttaccactcctatttacaaaatagtaatgtacgaaa

SEQ ID NO: 25893 - DNA, 50 bp, unidentified
  source 1..50: mol_type = unassigned DNA; note = target_8c06e53
  misc_feature 1..23: note = LF
  misc_feature 24..25: note = Core
  misc_feature 26..50: note = RF
gccgccagacgctggcaagggctctgttgcaacggtgaggcgccggagat

SEQ ID NO: 25894 - DNA, 50 bp, unidentified
  source 1..50: mol_type = unassigned DNA; note = target_8c0d502
  misc_feature 1..23: note = LF
  misc_feature 24..25: note = Core
  misc_feature 26..50: note = RF
gttcatgccccgactcctgcagcctgtagtaggggtaccagaactctatg

SEQ ID NO: 25895 - DNA, 50 bp, unidentified
  source 1..50: mol_type = unassigned DNA; note = target_8c179b7
  misc_feature 1..23: note = LF
  misc_feature 24..25: note = Core
  misc_feature 26..50: note = RF
cttgctgacatccgtggctccttgtctttcaaatgctttccgccagcacc

SEQ ID NO: 25896 - DNA, 50 bp, unidentified
  source 1..50: mol_type = unassigned DNA; note = target_8c1b173
  misc_feature 1..24: note = LF
  misc_feature 25: note = Core
  misc_feature 26..50: note = RF
ccagcgcgaacgtccgacgagcggcatgatcggaccacgggagtggccgt

SEQ ID NO: 25897 - DNA, 50 bp, unidentified
  source 1..50: mol_type = unassigned DNA; note = target_8c1c231
  misc_feature 1..23: note = LF
  misc_feature 24..25: note = Core
  misc_feature 26..50: note = RF
tgcgcaccaagcggggtcattattgggcgccgaaagggggtcaaagttgc

SEQ ID NO: 25898 - DNA, 50 bp, unidentified
  source 1..50: mol_type = unassigned DNA; note = target_8c1c81f
  misc_feature 1..23: note = LF
  misc_feature 24..25: note = Core
  misc_feature 26..50: note = RF
atcacacgtcctccgtgcgccatctaacgccccagctcagccgcgtgggc

SEQ ID NO: 25899 - DNA, 50 bp, unidentified
  source 1..50: mol_type = unassigned DNA; note = target_8c1d0ee
  misc_feature 1..22: note = LF
  misc_feature 23..25: note = Core
  misc_feature 26..50: note = RF
tcgtcgcctgcggctcctcgcaatgacgccagagagcctaagagcggtcg

SEQ ID NO: 25900 - DNA, 50 bp, unidentified
  source 1..50: mol_type = unassigned DNA; note = target_8c20411
  misc_feature 1..23: note = LF
  misc_feature 24..25: note = Core
  misc_feature 26..50: note = RF
acgacctctttacggacagcctcagcgtaggattctgccccctccggcat

SEQ ID NO: 25901 - DNA, 50 bp, unidentified
  source 1..50: mol_type = unassigned DNA; note = target_8c24196
  misc_feature 1..23: note = LF
  misc_feature 24..25: note = Core
  misc_feature 26..50: note = RF
ggcttttgatttctgagagacccctcacccgaccccactccgtggggcca

SEQ ID NO: 25902 - DNA, 50 bp, unidentified
  source 1..50: mol_type = unassigned DNA; note = target_8c364f4
  misc_feature 1..24: note = LF
  misc_feature 25: note = Core
  misc_feature 26..50: note = RF
ccgacactgggggacatatcagggcggaagggctgctaggtgacgtcagt

SEQ ID NO: 25903 - DNA, 50 bp, unidentified
  source 1..50: mol_type = unassigned DNA; note = target_8c3b76d
  misc_feature 1..22: note = LF
  misc_feature 23..25: note = Core
  misc_feature 26..50: note = RF
tgcagcaaggtgggcatgggtgttctccctgtacgcgcggtgagtggtgg

SEQ ID NO: 25904 - DNA, 50 bp, unidentified
  source 1..50: mol_type = unassigned DNA; note = target_8c3f2e0
  misc_feature 1..23: note = LF
  misc_feature 24..25: note = Core
  misc_feature 26..50: note = RF
ctgcgccgggagtcggctcagggtggtgagcggtccttcgtcctgacgcg

SEQ ID NO: 25905 - DNA, 50 bp, unidentified
  source 1..50: mol_type = unassigned DNA; note = target_8c40feb
  misc_feature 1..23: note = LF
  misc_feature 24..25: note = Core
  misc_feature 26..50: note = RF
cgggcataaacagcatgcccgacctacatgactcatattttgtagatagc

SEQ ID NO: 25906 - DNA, 50 bp, unidentified
  source 1..50: mol_type = unassigned DNA; note = target_8c449ca
  misc_feature 1..24: note = LF
  misc_feature 25: note = Core
  misc_feature 26..50: note = RF
agcgatgatgagtgaaatggggatttatcgccaacgtcaaaatcgtcgga

SEQ ID NO: 25907 - DNA, 50 bp, unidentified
  source 1..50: mol_type = unassigned DNA; note = target_8c497f3
  misc_feature 1..22: note = LF
  misc_feature 23..25: note = Core
  misc_feature 26..50: note = RF
tctctctgataaataaattatatcattttattagatattttcaagggagt

SEQ ID NO: 25908 - DNA, 50 bp, unidentified
  source 1..50: mol_type = unassigned DNA; note = target_8c4e8ee
  misc_feature 1..21: note = LF
  misc_feature 22..25: note = Core
  misc_feature 26..50: note = RF
cgtcgggatcccacatgtcggtccttcctgatcaacaccatcgcccgtcg

SEQ ID NO: 25909 - DNA, 50 bp, unidentified
  source 1..50: mol_type = unassigned DNA; note = target_8c50c1e
  misc_feature 1..23: note = LF
  misc_feature 24..25: note = Core
  misc_feature 26..50: note = RF
gccgtgacgatcgcgatacgcccctctggcgggatgggatgcatgcattg

SEQ ID NO: 25910 - DNA, 50 bp, unidentified
  source 1..50: mol_type = unassigned DNA; note = target_8c57724
  misc_feature 1..23: note = LF
  misc_feature 24..25: note = Core
  misc_feature 26..50: note = RF
tatgtcgaaatcgtggatgctgcctaacgcccgagttcagctgcaaggat

SEQ ID NO: 25911 - DNA, 50 bp, unidentified
  source 1..50: mol_type = unassigned DNA; note = target_8c602b2
  misc_feature 1..24: note = LF
  misc_feature 25: note = Core
  misc_feature 26..50: note = RF
gagtcacttgtccggagagccgactccacgggcaagtggagtctccccac

SEQ ID NO: 25912 - DNA, 50 bp, unidentified
  source 1..50: mol_type = unassigned DNA; note = target_8c729aa
  misc_feature 1..23: note = LF
  misc_feature 24..25: note = Core
  misc_feature 26..50: note = RF
cacctgatcaagatggaaaaggctcactgactcggcatgaccctcacgat

SEQ ID NO: 25913 - DNA, 50 bp, unidentified
  source 1..50: mol_type = unassigned DNA; note = target_8c8d3e3
  misc_feature 1..22: note = LF
  misc_feature 23..25: note = Core
  misc_feature 26..50: note = RF
atatcataatattcctcatccatttcgtttttatagaagcacatttttct

SEQ ID NO: 25914 - DNA, 50 bp, unidentified
  source 1..50: mol_type = unassigned DNA; note = target_8c8e8ca
  misc_feature 1..24: note = LF
  misc_feature 25: note = Core
  misc_feature 26..50: note = RF
atatcgcctttaacatgattccttctcctttaaataaatagatgtatacc

SEQ ID NO: 25915 - DNA, 50 bp, unidentified
  source 1..50: mol_type = unassigned DNA; note = target_8c8fb41
  misc_feature 1..22: note = LF
  misc_feature 23..25: note = Core
  misc_feature 26..50: note = RF
gttgccttttttcatgcaaaaaaggatttataaatgaatttagtgatatg

SEQ ID NO: 25916 - DNA, 50 bp, unidentified
  source 1..50: mol_type = unassigned DNA; note = target_8c95cab
  misc_feature 1..24: note = LF
  misc_feature 25: note = Core
  misc_feature 26..50: note = RF
ttagacgataatctccctcttaccgtacgttttcgtacggttggccctca

SEQ ID NO: 25917 - DNA, 50 bp, unidentified
  source 1..50: mol_type = unassigned DNA; note = target_8ca6fe4
  misc_feature 1..24: note = LF
  misc_feature 25: note = Core
  misc_feature 26..50: note = RF
acgagaaaagacatctgatggtattgacaagttaaccctttgagctggag

SEQ ID NO: 25918 - DNA, 50 bp, unidentified
  source 1..50: mol_type = unassigned DNA; note = target_8ca87b8
  misc_feature 1..23: note = LF
  misc_feature 24..25: note = Core
  misc_feature 26..50: note = RF
tgacagttcgtcataataacctcctattgacaacagataatcattttaag

SEQ ID NO: 25919 - DNA, 50 bp, unidentified
  source 1..50: mol_type = unassigned DNA; note = target_8ca8f57
  misc_feature 1..23: note = LF
  misc_feature 24..25: note = Core
  misc_feature 26..50: note = RF
aaagataaatagttactgacttcctctccaccagcaagggtttccgtcat

SEQ ID NO: 25920 - DNA, 50 bp, unidentified
  source 1..50: mol_type = unassigned DNA; note = target_8cb5bf1
  misc_feature 1..23: note = LF
  misc_feature 24..25: note = Core
  misc_feature 26..50: note = RF
cggtcgaccagggacctgctgtcctttcttcccggtggcgcgagcggcgg

SEQ ID NO: 25921 - DNA, 50 bp, unidentified
  source 1..50: mol_type = unassigned DNA; note = target_8cc9369
  misc_feature 1..23: note = LF
  misc_feature 24..25: note = Core
  misc_feature 26..50: note = RF
caatccgatcgatggctcagcttgtgatttatccggtgcggcgtggcttg

SEQ ID NO: 25922 - DNA, 50 bp, unidentified
  source 1..50: mol_type = unassigned DNA; note = target_8ccd8d7
  misc_feature 1..23: note = LF
  misc_feature 24..25: note = Core
  misc_feature 26..50: note = RF
cgacttcccctgaccggtctccgctactcggcggcgcacaggggaatgaa

SEQ ID NO: 25923 - DNA, 50 bp, unidentified
  source 1..50: mol_type = unassigned DNA; note = target_8cd6b50
  misc_feature 1..23: note = LF
  misc_feature 24..25: note = Core
  misc_feature 26..50: note = RF
ttaaaagctaagttatgtcgaactcacgttaataatctacacgtctaaaa

SEQ ID NO: 25924 - DNA, 50 bp, unidentified
  source 1..50: mol_type = unassigned DNA; note = target_8cda852
  misc_feature 1..23: note = LF
  misc_feature 24..25: note = Core
  misc_feature 26..50: note = RF
gcgtacgccgacgccgatcaatgtaggagcgggcttgcccgcgaatgggc

SEQ ID NO: 25925 - DNA, 50 bp, unidentified
  source 1..50: mol_type = unassigned DNA; note = target_8ce534b
  misc_feature 1..24: note = LF
  misc_feature 25: note = Core
  misc_feature 26..50: note = RF
cgggaagctgggctcagccattacttcgggattgcctacaatgcggcagg

SEQ ID NO: 25926 - DNA, 50 bp, unidentified
  source 1..50: mol_type = unassigned DNA; note = target_8ce7a4c
  misc_feature 1..23: note = LF
  misc_feature 24..25: note = Core
  misc_feature 26..50: note = RF
tcgtcacgcgacaacggccccgccccccccgagatccgggccccgccggc

SEQ ID NO: 25927 - DNA, 50 bp, unidentified
  source 1..50: mol_type = unassigned DNA; note = target_8cfcdf4
  misc_feature 1..23: note = LF
  misc_feature 24..25: note = Core
  misc_feature 26..50: note = RF
gatgtggctcagaaccgctgacctgctactgaactttcatccagcggcga

SEQ ID NO: 25928 - DNA, 50 bp, unidentified
  source 1..50: mol_type = unassigned DNA; note = target_8d010c3
  misc_feature 1..23: note = LF
  misc_feature 24..25: note = Core
  misc_feature 26..50: note = RF
attgactttctctaatagttagtctttctgctatctgggtgcgagttatg

SEQ ID NO: 25929 - DNA, 50 bp, unidentified
  source 1..50: mol_type = unassigned DNA; note = target_8d039c8
  misc_feature 1..24: note = LF
  misc_feature 25: note = Core
  misc_feature 26..50: note = RF
ccaacatcctaccctcgtaggtgttgcacttagtttttgagcccgccgga

SEQ ID NO: 25930 - DNA, 50 bp, unidentified
  source 1..50: mol_type = unassigned DNA; note = target_8d08105
  misc_feature 1..23: note = LF
  misc_feature 24..25: note = Core
  misc_feature 26..50: note = RF
tactcgcctgcgagcatggctccctagccggccgccaggcgttccgccag

SEQ ID NO: 25931 - DNA, 50 bp, unidentified
  source 1..50: mol_type = unassigned DNA; note = target_8d0b451
  misc_feature 1..24: note = LF
  misc_feature 25: note = Core
  misc_feature 26..50: note = RF
accggcgacatggtcgacgcctgaccctggcgcttccctcgcgtccgtgg

SEQ ID NO: 25932 - DNA, 50 bp, unidentified
  source 1..50: mol_type = unassigned DNA; note = target_8d0c3fb
  misc_feature 1..19: note = LF
  misc_feature 20..25: note = Core
  misc_feature 26..50: note = RF
tttcctgaaaatccttcatactaattaccttctttccttcacgatttcta

SEQ ID NO: 25933 - DNA, 50 bp, unidentified
  source 1..50: mol_type = unassigned DNA; note = target_8d16b26
  misc_feature 1..24: note = LF
  misc_feature 25: note = Core
  misc_feature 26..50: note = RF
gtggctagtgccgaccccattccccccagacaccagccgctttattggca

SEQ ID NO: 25934 - DNA, 50 bp, unidentified
  source 1..50: mol_type = unassigned DNA; note = target_8d1bf09
  misc_feature 1..23: note = LF
  misc_feature 24..25: note = Core
  misc_feature 26..50: note = RF
ttgccagtcagaaaaactaatagctcagaattacaggaatattgaggtga

SEQ ID NO: 25935 - DNA, 50 bp, unidentified
  source 1..50: mol_type = unassigned DNA; note = target_8d218cb
  misc_feature 1..24: note = LF
  misc_feature 25: note = Core
  misc_feature 26..50: note = RF
tcaagggcaagatgcggccataaccggactttcaatctcgccgttcgatc

SEQ ID NO: 25936 - DNA, 50 bp, unidentified
  source 1..50: mol_type = unassigned DNA; note = target_8d22cb0
  misc_feature 1..23: note = LF
  misc_feature 24..25: note = Core
  misc_feature 26..50: note = RF
gatcccgagaactcaccgtctacctttcagcccatctgggtaaggacggc

SEQ ID NO: 25937 - DNA, 50 bp, unidentified
  source 1..50: mol_type = unassigned DNA; note = target_8d38c32
  misc_feature 1..24: note = LF
  misc_feature 25: note = Core
  misc_feature 26..50: note = RF
ggttcggcccgacgagctcgcccccaccttttcgcccgcacggacgcgga

SEQ ID NO: 25938 - DNA, 50 bp, unidentified
  source 1..50: mol_type = unassigned DNA; note = target_8d4e50c
  misc_feature 1..24: note = LF
  misc_feature 25: note = Core
  misc_feature 26..50: note = RF
ctacgcagcttcctgttggctaacgtgatgtcgaggacatgctggtattc

SEQ ID NO: 25939 - DNA, 50 bp, unidentified
  source 1..50: mol_type = unassigned DNA; note = target_8d543d6
  misc_feature 1..23: note = LF
  misc_feature 24..25: note = Core
  misc_feature 26..50: note = RF
tcttcgctgagcgcatttatagaacggatagaggcggattagccgagcag

SEQ ID NO: 25940 - DNA, 50 bp, unidentified
  source 1..50: mol_type = unassigned DNA; note = target_8d58da8
  misc_feature 1..24: note = LF
  misc_feature 25: note = Core
  misc_feature 26..50: note = RF
cacaaaacctctcagaaccaccccccccccggttttgacagagttctgag

SEQ ID NO: 25941 - DNA, 50 bp, unidentified
  source 1..50: mol_type = unassigned DNA; note = target_8d5a662
  misc_feature 1..23: note = LF
  misc_feature 24..25: note = Core
  misc_feature 26..50: note = RF
ccgatctaatcggatagtcaaaggaaccgtaatgaaaagtggtcttgaag

SEQ ID NO: 25942 - DNA, 50 bp, unidentified
  source 1..50: mol_type = unassigned DNA; note = target_8d6c494
  misc_feature 1..24: note = LF
  misc_feature 25: note = Core
  misc_feature 26..50: note = RF
aaaaaatcaataataatctttgcatcctttactcaacaactatcaatctt

SEQ ID NO: 25943 - DNA, 50 bp, unidentified
  source 1..50: mol_type = unassigned DNA; note = target_8d6e965
  misc_feature 1..23: note = LF
  misc_feature 24..25: note = Core
  misc_feature 26..50: note = RF
cggtggcgctgcgcttaccgggcctacaaatacctaactgcgtaataccg

SEQ ID NO: 25944 - DNA, 50 bp, unidentified
  source 1..50: mol_type = unassigned DNA; note = target_8d768d6
  misc_feature 1..22: note = LF
  misc_feature 23..25: note = Core
  misc_feature 26..50: note = RF
tccgcaacgctgagatcccgacatggccaccctcgttctcggcgccgctg

SEQ ID NO: 25945 - DNA, 50 bp, unidentified
  source 1..50: mol_type = unassigned DNA; note = target_8d77b2e
  misc_feature 1..23: note = LF
  misc_feature 24..25: note = Core
  misc_feature 26..50: note = RF
cgcggacttgtggctgccgagattgtccatgatgacgatgtcgcctggct

SEQ ID NO: 25946 - DNA, 50 bp, unidentified
  source 1..50: mol_type = unassigned DNA; note = target_8d8012d
  misc_feature 1..23: note = LF
  misc_feature 24..25: note = Core
  misc_feature 26..50: note = RF
ttgccataatcattttctcccttgtctttcaatcattttctccatcttac

SEQ ID NO: 25947 - DNA, 50 bp, unidentified
  source 1..50: mol_type = unassigned DNA; note = target_8d82173
  misc_feature 1..23: note = LF
  misc_feature 24..25: note = Core
  misc_feature 26..50: note = RF
cggtggccagttttacttgaccactacagttcaagccatttctactgctg

SEQ ID NO: 25948 - DNA, 50 bp, unidentified
  source 1..50: mol_type = unassigned DNA; note = target_8d82e2d
  misc_feature 1..23: note = LF
  misc_feature 24..25: note = Core
  misc_feature 26..50: note = RF
atagggaaggtcgtagaactttcctatgaaataaaaaaatgaaacgcctg

SEQ ID NO: 25949 - DNA, 50 bp, unidentified
  source 1..50: mol_type = unassigned DNA; note = target_8d86a31
  misc_feature 1..23: note = LF
  misc_feature 24..25: note = Core
  misc_feature 26..50: note = RF
cgccatggatagcgcgaccgagcctacaaggacgtatttacggcgtctcc

SEQ ID NO: 25950 - DNA, 50 bp, unidentified
  source 1..50: mol_type = unassigned DNA; note = target_8d97995
  misc_feature 1..23: note = LF
  misc_feature 24..25: note = Core
  misc_feature 26..50: note = RF
gtctctggatcggtgaagctcatctgccgctgcaacgcttgtctgtgcgg

SEQ ID NO: 25951 - DNA, 50 bp, unidentified
  source 1..50: mol_type = unassigned DNA; note = target_8d997e6
  misc_feature 1..23: note = LF
  misc_feature 24..25: note = Core
  misc_feature 26..50: note = RF
ctccaacaagctccgccgcggcgtgggtcccgggtcaagcccgggacgac

SEQ ID NO: 25952 - DNA, 50 bp, unidentified
  source 1..50: mol_type = unassigned DNA; note = target_8da08bc
  misc_feature 1..23: note = LF
  misc_feature 24..25: note = Core
  misc_feature 26..50: note = RF
gctcgcaacgtcgccgacgaaaccgagctacagcatcacgttcagggttc

SEQ ID NO: 25953 - DNA, 50 bp, unidentified
  source 1..50: mol_type = unassigned DNA; note = target_8daba93
  misc_feature 1..23: note = LF
  misc_feature 24..25: note = Core
  misc_feature 26..50: note = RF
tttcgcaaagggctcaacccatcctacgcgatgtgaaggtcatctgtcat

SEQ ID NO: 25954 - DNA, 50 bp, unidentified
  source 1..50: mol_type = unassigned DNA; note = target_8db0631
  misc_feature 1..24: note = LF
  misc_feature 25: note = Core
  misc_feature 26..50: note = RF
gcagaagttcgtcgcgatagaaagcagacgctcaacggttcggctcaccc

SEQ ID NO: 25955 - DNA, 50 bp, unidentified
  source 1..50: mol_type = unassigned DNA; note = target_8db5040
  misc_feature 1..23: note = LF
  misc_feature 24..25: note = Core
  misc_feature 26..50: note = RF
cctaacccggccccgctgccgggtttttgtgtctgtagtagtcacaagga

SEQ ID NO: 25956 - DNA, 50 bp, unidentified
  source 1..50: mol_type = unassigned DNA; note = target_8db69fe
  misc_feature 1..23: note = LF
  misc_feature 24..25: note = Core
  misc_feature 26..50: note = RF
gccggcgacggaatcgggaacccctgaccccaccaccccgagccgagcac

SEQ ID NO: 25957 - DNA, 50 bp, unidentified
  source 1..50: mol_type = unassigned DNA; note = target_8db8f0f
  misc_feature 1..23: note = LF
  misc_feature 24..25: note = Core
  misc_feature 26..50: note = RF
aggcgatttttgtttgtttcacccttttttgaaaaggccctccatcaaaa

SEQ ID NO: 25958 - DNA, 50 bp, unidentified
  source 1..50: mol_type = unassigned DNA; note = target_8dbf3de
  misc_feature 1..24: note = LF
  misc_feature 25: note = Core
  misc_feature 26..50: note = RF
ggacgaggactgcgtctttatgggcgggatgacgcgttcacgaaaggcat

SEQ ID NO: 25959 - DNA, 50 bp, unidentified
  source 1..50: mol_type = unassigned DNA; note = target_8dc1d02
  misc_feature 1..21: note = LF
  misc_feature 22..25: note = Core
  misc_feature 26..50: note = RF
gccgtctccggcctccaggctcccccctacggccctgcgcctcccggcct

SEQ ID NO: 25960 - DNA, 50 bp, unidentified
  source 1..50: mol_type = unassigned DNA; note = target_8dc32a0
  misc_feature 1..24: note = LF
  misc_feature 25: note = Core
  misc_feature 26..50: note = RF
aatgactagtcatttaagaacgtccccaatgactaggtagcaaaacgccc

SEQ ID NO: 25961 - DNA, 50 bp, unidentified
  source 1..50: mol_type = unassigned DNA; note = target_8dcb241
  misc_feature 1..22: note = LF
  misc_feature 23..25: note = Core
  misc_feature 26..50: note = RF
tgtgaggcaaggcggattctctctttctcttctactgtcacacacgtgcc

SEQ ID NO: 25962 - DNA, 50 bp, unidentified
  source 1..50: mol_type = unassigned DNA; note = target_8dcd2b8
  misc_feature 1..23: note = LF
  misc_feature 24..25: note = Core
  misc_feature 26..50: note = RF
aactcttcataataaaatacctcctaaactattgtgcttatcagcaatat

SEQ ID NO: 25963 - DNA, 50 bp, unidentified
  source 1..50: mol_type = unassigned DNA; note = target_8de0d09
  misc_feature 1..23: note = LF
  misc_feature 24..25: note = Core
  misc_feature 26..50: note = RF
aaaatcgaacatagtccacactcctacttacgcaagtgatgaaacctgct

SEQ ID NO: 25964 - DNA, 50 bp, unidentified
  source 1..50: mol_type = unassigned DNA; note = target_8de5a9e
  misc_feature 1..21: note = LF
  misc_feature 22..25: note = Core
  misc_feature 26..50: note = RF
gggagttgcgtcatggggtgcctccttcgggcggcctcgaaatccccgga

SEQ ID NO: 25965 - DNA, 50 bp, unidentified
  source 1..50: mol_type = unassigned DNA; note = target_8ded9ef
  misc_feature 1..23: note = LF
  misc_feature 24..25: note = Core
  misc_feature 26..50: note = RF
atcgatgccgccggggggcgtccaccccatcacccccaacttgccgcttt

SEQ ID NO: 25966 - DNA, 50 bp, unidentified
  source 1..50: mol_type = unassigned DNA; note = target_8df2473
  misc_feature 1..23: note = LF
  misc_feature 24..25: note = Core
  misc_feature 26..50: note = RF
tcacaggttccgtacatgtttttcttagtccttaaagcaggcatccagct

SEQ ID NO: 25967 - DNA, 50 bp, unidentified
  source 1..50: mol_type = unassigned DNA; note = target_8dfa82f
  misc_feature 1..23: note = LF
  misc_feature 24..25: note = Core
  misc_feature 26..50: note = RF
cggtacgggcggcgccaggcggcctgacaccagatccaggctcccgactg

SEQ ID NO: 25968 - DNA, 50 bp, unidentified
  source 1..50: mol_type = unassigned DNA; note = target_8dfb6d4
  misc_feature 1..23: note = LF
  misc_feature 24..25: note = Core
  misc_feature 26..50: note = RF
atcttgttcataatcttttcctccttattaatgaatgatgttgttgagcc

SEQ ID NO: 25969 - DNA, 50 bp, unidentified
  source 1..50: mol_type = unassigned DNA; note = target_8e001ad
  misc_feature 1..24: note = LF
  misc_feature 25: note = Core
  misc_feature 26..50: note = RF
agccgtcctggttctatccataaccgcgttttctgcacggatggcgttta

SEQ ID NO: 25970 - DNA, 50 bp, unidentified
  source 1..50: mol_type = unassigned DNA; note = target_8e05f7f
  misc_feature 1..23: note = LF
  misc_feature 24..25: note = Core
  misc_feature 26..50: note = RF
accggttgaatccgccccccgaaagcagacattgcatggagtgcgcccct

SEQ ID NO: 25971 - DNA, 50 bp, unidentified
  source 1..50: mol_type = unassigned DNA; note = target_8e08b5a
  misc_feature 1..24: note = LF
  misc_feature 25: note = Core
  misc_feature 26..50: note = RF
gcagcgcggaacgaacgagaacaccaacggcctcttgcggcagtactttc

SEQ ID NO: 25972 - DNA, 50 bp, unidentified
  source 1..50: mol_type = unassigned DNA; note = target_8e12f5a
  misc_feature 1..23: note = LF
  misc_feature 24..25: note = Core
  misc_feature 26..50: note = RF
gttcattttcatggaatagtctcctgtgtttgtttttgccctccctcttc

SEQ ID NO: 25973 - DNA, 50 bp, unidentified
  source 1..50: mol_type = unassigned DNA; note = target_8e174ef
  misc_feature 1..23: note = LF
  misc_feature 24..25: note = Core
  misc_feature 26..50: note = RF
cttgtagttatcatatatttcacctctcaaatgatgtagcgagcgcatac

SEQ ID NO: 25974 - DNA, 50 bp, unidentified
  source 1..50: mol_type = unassigned DNA; note = target_8e210e6
  misc_feature 1..23: note = LF
  misc_feature 24..25: note = Core
  misc_feature 26..50: note = RF
attcggctgcgcctttccacagatggacacagatcgcgcggatcagcgcc

SEQ ID NO: 25975 - DNA, 50 bp, unidentified
  source 1..50: mol_type = unassigned DNA; note = target_8e22416
  misc_feature 1..23: note = LF
  misc_feature 24..25: note = Core
  misc_feature 26..50: note = RF
tccaccgatgaaccggccggaacctgtcaacctgaatgaggcaccgttgc

SEQ ID NO: 25976 - DNA, 50 bp, unidentified
  source 1..50: mol_type = unassigned DNA; note = target_8e25d82
  misc_feature 1..24: note = LF
  misc_feature 25: note = Core
  misc_feature 26..50: note = RF
ctgtagggacctatttggccagggatggccaaatgagagcggccagggat

SEQ ID NO: 25977 - DNA, 50 bp, unidentified
  source 1..50: mol_type = unassigned DNA; note = target_8e2c949
  misc_feature 1..24: note = LF
  misc_feature 25: note = Core
  misc_feature 26..50: note = RF
tgcatgacttatttttggctttgttgcacaaatcagcagcagctcgaact

SEQ ID NO: 25978 - DNA, 50 bp, unidentified
  source 1..50: mol_type = unassigned DNA; note = target_8e2f5a6
  misc_feature 1..23: note = LF
  misc_feature 24..25: note = Core
  misc_feature 26..50: note = RF
tctttttttgtcatttcattatcctgaaatttaatgaaatggtccactca

SEQ ID NO: 25979 - DNA, 50 bp, unidentified
  source 1..50: mol_type = unassigned DNA; note = target_8e35cc5
  misc_feature 1..22: note = LF
  misc_feature 23..25: note = Core
  misc_feature 26..50: note = RF
ttttattgtactaacctgccacgtttagttgaacaaagatccagccgcca

SEQ ID NO: 25980 - DNA, 50 bp, unidentified
  source 1..50: mol_type = unassigned DNA; note = target_8e3be1d
  misc_feature 1..23: note = LF
  misc_feature 24..25: note = Core
  misc_feature 26..50: note = RF
ggcggccggggcgcgtgccgcggctcagaacagcgccatgctcagcttgc

SEQ ID NO: 25981 - DNA, 50 bp, unidentified
  source 1..50: mol_type = unassigned DNA; note = target_8e44878
  misc_feature 1..24: note = LF
  misc_feature 25: note = Core
  misc_feature 26..50: note = RF
ctccgatccttctgtgcacctaacgctcgttaaggggtgagcaacgcaat

SEQ ID NO: 25982 - DNA, 50 bp, unidentified
  source 1..50: mol_type = unassigned DNA; note = target_8e53598
  misc_feature 1..23: note = LF
  misc_feature 24..25: note = Core
  misc_feature 26..50: note = RF
tacaggaatgctaaactgccacgtttagtgatatgacgttttgaactagt

SEQ ID NO: 25983 - DNA, 50 bp, unidentified
  source 1..50: mol_type = unassigned DNA; note = target_8e53c6e
  misc_feature 1..23: note = LF
  misc_feature 24..25: note = Core
  misc_feature 26..50: note = RF
tgtagccggggcacattctaaactgggttgcgaaatttcccctatcttgc

SEQ ID NO: 25984 - DNA, 50 bp, unidentified
  source 1..50: mol_type = unassigned DNA; note = target_8e567da
  misc_feature 1..24: note = LF
  misc_feature 25: note = Core
  misc_feature 26..50: note = RF
tcgctcgacgcgcactcacctcggcaattgagtgcgtgtctggtggaccg

SEQ ID NO: 25985 - DNA, 50 bp, unidentified
  source 1..50: mol_type = unassigned DNA; note = target_8e591c0
  misc_feature 1..23: note = LF
  misc_feature 24..25: note = Core
  misc_feature 26..50: note = RF
gacagcccagggaacatccggatctgccgcataccgtaacgcggtagcag

SEQ ID NO: 25986 - DNA, 50 bp, unidentified
  source 1..50: mol_type = unassigned DNA; note = target_8e5f3e2
  misc_feature 1..23: note = LF
  misc_feature 24..25: note = Core
  misc_feature 26..50: note = RF
ggcggcccatgggtccgccccctttttgcaacgctgacgacgatcagctg

SEQ ID NO: 25987 - DNA, 50 bp, unidentified
  source 1..50: mol_type = unassigned DNA; note = target_8e8a943
  misc_feature 1..23: note = LF
  misc_feature 24..25: note = Core
  misc_feature 26..50: note = RF
agatttctctcattcaatcccgcctttctcgacaatctcaagcgttacat

SEQ ID NO: 25988 - DNA, 50 bp, unidentified
  source 1..50: mol_type = unassigned DNA; note = target_8ea02dd
  misc_feature 1..24: note = LF
  misc_feature 25: note = Core
  misc_feature 26..50: note = RF
gtctcccccatccacgatcatgcttttttttcagcagacgcagttccagc

SEQ ID NO: 25989 - DNA, 50 bp, unidentified
  source 1..50: mol_type = unassigned DNA; note = target_8ea78fc
  misc_feature 1..23: note = LF
  misc_feature 24..25: note = Core
  misc_feature 26..50: note = RF
gcggagatcaataggtcctgaccctaggcaggctgatagaaattatgcgg

SEQ ID NO: 25990 - DNA, 50 bp, unidentified
  source 1..50: mol_type = unassigned DNA; note = target_8eaa0bf
  misc_feature 1..22: note = LF
  misc_feature 23..25: note = Core
  misc_feature 26..50: note = RF
ataattctttttttcatttatttcaccctgttacaataatagcataccta

SEQ ID NO: 25991 - DNA, 50 bp, unidentified
  source 1..50: mol_type = unassigned DNA; note = target_8eb4a56
  misc_feature 1..23: note = LF
  misc_feature 24..25: note = Core
  misc_feature 26..50: note = RF
cctcatcgctggcaagccagctcctacaagggggctgtgtcgaacgcaga

SEQ ID NO: 25992 - DNA, 50 bp, unidentified
  source 1..50: mol_type = unassigned DNA; note = target_8eb65da
  misc_feature 1..21: note = LF
  misc_feature 22..25: note = Core
  misc_feature 26..50: note = RF
cgcgcgacccgttggctcgcaatgacaattggagacagccgtgtttgaac

SEQ ID NO: 25993 - DNA, 50 bp, unidentified
  source 1..50: mol_type = unassigned DNA; note = target_8ec042b
  misc_feature 1..24: note = LF
  misc_feature 25: note = Core
  misc_feature 26..50: note = RF
ccaacaagaatgcttgccactaagcagccgttcgttgcttccggtacgct

SEQ ID NO: 25994 - DNA, 50 bp, unidentified
  source 1..50: mol_type = unassigned DNA; note = target_8ec3c3e
  misc_feature 1..23: note = LF
  misc_feature 24..25: note = Core
  misc_feature 26..50: note = RF
cagaaggggcttcatcgacttccctttcataaaggtagcggcggtgggtc

SEQ ID NO: 25995 - DNA, 50 bp, unidentified
  source 1..50: mol_type = unassigned DNA; note = target_8ec45e0
  misc_feature 1..24: note = LF
  misc_feature 25: note = Core
  misc_feature 26..50: note = RF
tacagttgttcagtaaagcttggcgtactttaatttccctttcgtcaaac

SEQ ID NO: 25996 - DNA, 50 bp, unidentified
  source 1..50: mol_type = unassigned DNA; note = target_8ec46a9
  misc_feature 1..24: note = LF
  misc_feature 25: note = Core
  misc_feature 26..50: note = RF
acgatcaatgagttgtaatggggctgttcacgcgaggttgatttgtgtag

SEQ ID NO: 25997 - DNA, 50 bp, unidentified
  source 1..50: mol_type = unassigned DNA; note = target_8ec63d1
  misc_feature 1..23: note = LF
  misc_feature 24..25: note = Core
  misc_feature 26..50: note = RF
ccggctaacggcctgcgcatcagccgccgcaagcgcactgcggaaactgt

SEQ ID NO: 25998 - DNA, 50 bp, unidentified
  source 1..50: mol_type = unassigned DNA; note = target_8ece399
  misc_feature 1..24: note = LF
  misc_feature 25: note = Core
  misc_feature 26..50: note = RF
acgtcggttgtctttcgccgtaacttccggtttgccggtcaaccgcccag

SEQ ID NO: 25999 - DNA, 50 bp, unidentified
  source 1..50: mol_type = unassigned DNA; note = target_8ed49cd
  misc_feature 1..24: note = LF
  misc_feature 25: note = Core
  misc_feature 26..50: note = RF
gcctacttcgccagggacgccctccaaaatgatgctcccgctggtcgtcg

SEQ ID NO: 26000 - DNA, 50 bp, unidentified
  source 1..50: mol_type = unassigned DNA; note = target_8edad3f
  misc_feature 1..24: note = LF
  misc_feature 25: note = Core
  misc_feature 26..50: note = RF
gattgcgcgctctcgcgcgccaaccgtgtttcggcacggatgaaaagcgt

SEQ ID NO: 26001 - DNA, 50 bp, unidentified
  source 1..50: mol_type = unassigned DNA; note = target_8edbc3a
  misc_feature 1..23: note = LF
  misc_feature 24..25: note = Core
  misc_feature 26..50: note = RF
gtggcctttcgcattccaaaaggccacgttttacacgccaaaaggccgtc

SEQ ID NO: 26002 - DNA, 50 bp, unidentified
  source 1..50: mol_type = unassigned DNA; note = target_8f093da
  misc_feature 1..23: note = LF
  misc_feature 24..25: note = Core
  misc_feature 26..50: note = RF
gttgcgagtgattcggaccagcccccccctaccgatggattcagtggcgt

SEQ ID NO: 26003 - DNA, 50 bp, unidentified
  source 1..50: mol_type = unassigned DNA; note = target_8f0d857
  misc_feature 1..24: note = LF
  misc_feature 25: note = Core
  misc_feature 26..50: note = RF
gtgatcggtcgtttcggtcgaaggtgatcgctgatcaccggtttccgaaa

SEQ ID NO: 26004 - DNA, 50 bp, unidentified
  source 1..50: mol_type = unassigned DNA; note = target_8f0ee33
  misc_feature 1..23: note = LF
  misc_feature 24..25: note = Core
  misc_feature 26..50: note = RF
gattgtcaggagcctgtcagaaattgtgtgtccgaagccacggttaaatt

SEQ ID NO: 26005 - DNA, 50 bp, unidentified
  source 1..50: mol_type = unassigned DNA; note = target_8f1090b
  misc_feature 1..22: note = LF
  misc_feature 23..25: note = Core
  misc_feature 26..50: note = RF
caaataaaatttgtgcaggctattttatttgagatttgcaaagataattt

SEQ ID NO: 26006 - DNA, 50 bp, unidentified
  source 1..50: mol_type = unassigned DNA; note = target_8f10c77
  misc_feature 1..22: note = LF
  misc_feature 23..25: note = Core
  misc_feature 26..50: note = RF
tacaccagaatttccaccacattgacggacgctatcgcaacatccgcctc

SEQ ID NO: 26007 - DNA, 50 bp, unidentified
  source 1..50: mol_type = unassigned DNA; note = target_8f13b66
  misc_feature 1..22: note = LF
  misc_feature 23..25: note = Core
  misc_feature 26..50: note = RF
agaccgttagttcgtcccagtttgacccgaagcagtcctcgttcagtcat

SEQ ID NO: 26008 - DNA, 50 bp, unidentified
  source 1..50: mol_type = unassigned DNA; note = target_8f165dc
  misc_feature 1..24: note = LF
  misc_feature 25: note = Core
  misc_feature 26..50: note = RF
ggttcccctctggcaaggctttgttgaataaatcagagttagccgacagg

SEQ ID NO: 26009 - DNA, 50 bp, unidentified
  source 1..50: mol_type = unassigned DNA; note = target_8f31d1c
  misc_feature 1..22: note = LF
  misc_feature 23..25: note = Core
  misc_feature 26..50: note = RF
accataaatccatctatttctcctttcttctatcttccattatatcatac

SEQ ID NO: 26010 - DNA, 50 bp, unidentified
  source 1..50: mol_type = unassigned DNA; note = target_8f43510
  misc_feature 1..24: note = LF
  misc_feature 25: note = Core
  misc_feature 26..50: note = RF
tccgccatcaagagagctgtagccttttttagaatgtccttttcacgttc

SEQ ID NO: 26011 - DNA, 50 bp, unidentified
  source 1..50: mol_type = unassigned DNA; note = target_8f49fda
  misc_feature 1..21: note = LF
  misc_feature 22..25: note = Core
  misc_feature 26..50: note = RF
cctacaatgatgaccggctgactcatgcctccaccgtcccgcggacggag

SEQ ID NO: 26012 - DNA, 50 bp, unidentified
  source 1..50: mol_type = unassigned DNA; note = target_8f549a8
  misc_feature 1..23: note = LF
  misc_feature 24..25: note = Core
  misc_feature 26..50: note = RF
tcgtctccaccgccgtcttcatgttgtcgtagatgccgcgcgtgcaggcg

SEQ ID NO: 26013 - DNA, 50 bp, unidentified
  source 1..50: mol_type = unassigned DNA; note = target_8f651e5
  misc_feature 1..23: note = LF
  misc_feature 24..25: note = Core
  misc_feature 26..50: note = RF
gcgcagaggcgcctttgcccaccctacgagctctattccgccctacggcc

SEQ ID NO: 26014 - DNA, 50 bp, unidentified
  source 1..50: mol_type = unassigned DNA; note = target_8f68cb2
  misc_feature 1..21: note = LF
  misc_feature 22..25: note = Core
  misc_feature 26..50: note = RF
ccgagggaagtcagggtggtggtcatgcgttcccctcccccgtgttcgac

SEQ ID NO: 26015 - DNA, 50 bp, unidentified
  source 1..50: mol_type = unassigned DNA; note = target_8f6e7e9
  misc_feature 1..23: note = LF
  misc_feature 24..25: note = Core
  misc_feature 26..50: note = RF
tcgatgccgtcgggggggcgtccaccacatcagagccattgcaggtagcc

SEQ ID NO: 26016 - DNA, 50 bp, unidentified
  source 1..50: mol_type = unassigned DNA; note = target_8f70a19
  misc_feature 1..23: note = LF
  misc_feature 24..25: note = Core
  misc_feature 26..50: note = RF
ggtttgacggcttatgtcgtgctctcctcggggagcgatgcactattgcc

SEQ ID NO: 26017 - DNA, 50 bp, unidentified
  source 1..50: mol_type = unassigned DNA; note = target_8f8476b
  misc_feature 1..23: note = LF
  misc_feature 24..25: note = Core
  misc_feature 26..50: note = RF
gtctcctcggtaatgtccggtgttggcacatcgcgtcattccgctgcgat

SEQ ID NO: 26018 - DNA, 50 bp, unidentified
  source 1..50: mol_type = unassigned DNA; note = target_8f893db
  misc_feature 1..22: note = LF
  misc_feature 23..25: note = Core
  misc_feature 26..50: note = RF
caataagatacatatatttctcctttctcttaataacgttgatatgattg

SEQ ID NO: 26019 - DNA, 50 bp, unidentified
  source 1..50: mol_type = unassigned DNA; note = target_8f94aad
  misc_feature 1..23: note = LF
  misc_feature 24..25: note = Core
  misc_feature 26..50: note = RF
cacgggatcaaactgccggacaccttcgacaacctgatccagctcgccaa

SEQ ID NO: 26020 - DNA, 50 bp, unidentified
  source 1..50: mol_type = unassigned DNA; note = target_8fa025f
  misc_feature 1..23: note = LF
  misc_feature 24..25: note = Core
  misc_feature 26..50: note = RF
gggtcagttcataggtgcgggctttttgtgacgagcgcaccatatggttg

SEQ ID NO: 26021 - DNA, 50 bp, unidentified
  source 1..50: mol_type = unassigned DNA; note = target_8fcc1bc
  misc_feature 1..24: note = LF
  misc_feature 25: note = Core
  misc_feature 26..50: note = RF
gccgccccgacgccgtgaacgcccccccccgctcgcttgtggtctccggc

SEQ ID NO: 26022 - DNA, 50 bp, unidentified
  source 1..50: mol_type = unassigned DNA; note = target_8fd6476
  misc_feature 1..22: note = LF
  misc_feature 23..25: note = Core
  misc_feature 26..50: note = RF
tgccgccgcgagggaatcgtccagaacctctattatcgctggtcgaaaga

SEQ ID NO: 26023 - DNA, 50 bp, unidentified
  source 1..50: mol_type = unassigned DNA; note = target_8fdb04d
  misc_feature 1..21: note = LF
  misc_feature 22..25: note = Core
  misc_feature 26..50: note = RF
caccacgttcccgcaggcgatctcccacagggcggtgtggtgagcggcgg

SEQ ID NO: 26024 - DNA, 50 bp, unidentified
  source 1..50: mol_type = unassigned DNA; note = target_8fe6c53
  misc_feature 1..24: note = LF
  misc_feature 25: note = Core
  misc_feature 26..50: note = RF
ctcctgcgctatcgtaaggtctgttcctggcacgttccggaagtaggacg

SEQ ID NO: 26025 - DNA, 50 bp, unidentified
  source 1..50: mol_type = unassigned DNA; note = target_8fed381
  misc_feature 1..24: note = LF
  misc_feature 25: note = Core
  misc_feature 26..50: note = RF
gcgctacaatttctgctgttgacccaaagcgggcgttgagacgtccaacg

SEQ ID NO: 26026 - DNA, 50 bp, unidentified
  source 1..50: mol_type = unassigned DNA; note = target_8fefa05
  misc_feature 1..22: note = LF
  misc_feature 23..25: note = Core
  misc_feature 26..50: note = RF
tcgtcctcggatcccatgatggaagggccctggtgccgattccgaagaga

SEQ ID NO: 26027 - DNA, 50 bp, unidentified
  source 1..50: mol_type = unassigned DNA; note = target_8ff260c
  misc_feature 1..22: note = LF
  misc_feature 23..25: note = Core
  misc_feature 26..50: note = RF
tccatcattttcttttcccctttctcataatgctcttggataatcatctc

SEQ ID NO: 26028 - DNA, 50 bp, unidentified
  source 1..50: mol_type = unassigned DNA; note = target_8ff3ea8
  misc_feature 1..23: note = LF
  misc_feature 24..25: note = Core
  misc_feature 26..50: note = RF
ttcttgctcatattcaattcatcctttcactatgatattataccgtgttc

SEQ ID NO: 26029 - DNA, 50 bp, unidentified
  source 1..50: mol_type = unassigned DNA; note = target_8ffb8b7
  misc_feature 1..23: note = LF
  misc_feature 24..25: note = Core
  misc_feature 26..50: note = RF
ctctccctttcaggctacaggagtttgtttcgccacccgatgggtgatcc

SEQ ID NO: 26030 - DNA, 50 bp, unidentified
  source 1..50: mol_type = unassigned DNA; note = target_90029e6
  misc_feature 1..21: note = LF
  misc_feature 22..25: note = Core
  misc_feature 26..50: note = RF
tcaaaacacataaccatcccgatagaattcggggtggtgcgaaatgcacg

SEQ ID NO: 26031 - DNA, 50 bp, unidentified
  source 1..50: mol_type = unassigned DNA; note = target_9012747
  misc_feature 1..23: note = LF
  misc_feature 24..25: note = Core
  misc_feature 26..50: note = RF
tagcgcccaccagcaaaggccctggtcacagggccttttctcttgaccgg

SEQ ID NO: 26032 - DNA, 50 bp, unidentified
  source 1..50: mol_type = unassigned DNA; note = target_901c3a9
  misc_feature 1..21: note = LF
  misc_feature 22..25: note = Core
  misc_feature 26..50: note = RF
acgcgatcaaccaggccttctatgactgggctggagccccatgacgaaag

SEQ ID NO: 26033 - DNA, 50 bp, unidentified
  source 1..50: mol_type = unassigned DNA; note = target_902161c
  misc_feature 1..23: note = LF
  misc_feature 24..25: note = Core
  misc_feature 26..50: note = RF
caagagacgagatcgcatttgtctgacaccacccgcgtttgcaaaccatc

SEQ ID NO: 26034 - DNA, 50 bp, unidentified
  source 1..50: mol_type = unassigned DNA; note = target_902b37f
  misc_feature 1..23: note = LF
  misc_feature 24..25: note = Core
  misc_feature 26..50: note = RF
tggacacgtgcttgagtccgctcctatgagctagaagctgaacagtggcg

SEQ ID NO: 26035 - DNA, 50 bp, unidentified
  source 1..50: mol_type = unassigned DNA; note = target_902cc66
  misc_feature 1..23: note = LF
  misc_feature 24..25: note = Core
  misc_feature 26..50: note = RF
ccggcctagccggcttccggtcttgggcttttcctcaataggagaggctc

SEQ ID NO: 26036 - DNA, 50 bp, unidentified
  source 1..50: mol_type = unassigned DNA; note = target_902fcba
  misc_feature 1..23: note = LF
  misc_feature 24..25: note = Core
  misc_feature 26..50: note = RF
gcagccagccgtcgtcaccgaacctcacaccgtccccgcccggttcgggt

SEQ ID NO: 26037 - DNA, 50 bp, unidentified
  source 1..50: mol_type = unassigned DNA; note = target_903ded7
  misc_feature 1..23: note = LF
  misc_feature 24..25: note = Core
  misc_feature 26..50: note = RF
tcagcccaagacaggctttgaccctaggcctttggtcagtccgacgttgc

SEQ ID NO: 26038 - DNA, 50 bp, unidentified
  source 1..50: mol_type = unassigned DNA; note = target_903eda7
  misc_feature 1..23: note = LF
  misc_feature 24..25: note = Core
  misc_feature 26..50: note = RF
cgatgcagcggtggttatgggtcccggctcgcgcggagcctgtcgtcggg

SEQ ID NO: 26039 - DNA, 50 bp, unidentified
  source 1..50: mol_type = unassigned DNA; note = target_903fa12
  misc_feature 1..22: note = LF
  misc_feature 23..25: note = Core
  misc_feature 26..50: note = RF
gcggcggcaccgatagaatacaaagttgatataggtgatttaccgaatgg

SEQ ID NO: 26040 - DNA, 50 bp, unidentified
  source 1..50: mol_type = unassigned DNA; note = target_903fd3d
  misc_feature 1..23: note = LF
  misc_feature 24..25: note = Core
  misc_feature 26..50: note = RF
agtgggcgctgttggagccgcatctgccgcctcggactggtggccgtggt

SEQ ID NO: 26041 - DNA, 50 bp, unidentified
  source 1..50: mol_type = unassigned DNA; note = target_9042200
  misc_feature 1..24: note = LF
  misc_feature 25: note = Core
  misc_feature 26..50: note = RF
gggccgaccccatcgggcacgtaacgggcacgcgcattgatcatttgact

SEQ ID NO: 26042 - DNA, 50 bp, unidentified
  source 1..50: mol_type = unassigned DNA; note = target_905233f
  misc_feature 1..23: note = LF
  misc_feature 24..25: note = Core
  misc_feature 26..50: note = RF
agcgcagcgagcgcagttacaccaccccctgggacacgaccagatcagaa

SEQ ID NO: 26043 - DNA, 50 bp, unidentified
  source 1..50: mol_type = unassigned DNA; note = target_905d7c2
  misc_feature 1..23: note = LF
  misc_feature 24..25: note = Core
  misc_feature 26..50: note = RF
cctacgtgtttttgtccctagcgagcgcagcgagtgataatgcgtttgtt

SEQ ID NO: 26044 - DNA, 50 bp, unidentified
  source 1..50: mol_type = unassigned DNA; note = target_90701bf
  misc_feature 1..23: note = LF
  misc_feature 24..25: note = Core
  misc_feature 26..50: note = RF
tgtgtgtttgtgcggttaatcccctcaccccggccctctccccaaagggg

SEQ ID NO: 26045 - DNA, 50 bp, unidentified
  source 1..50: mol_type = unassigned DNA; note = target_907b6d4
  misc_feature 1..23: note = LF
  misc_feature 24..25: note = Core
  misc_feature 26..50: note = RF
gattagttgaccactacaggctcctccggtccacgcgaccagggcgccgg

SEQ ID NO: 26046 - DNA, 50 bp, unidentified
  source 1..50: mol_type = unassigned DNA; note = target_907c6c8
  misc_feature 1..21: note = LF
  misc_feature 22..25: note = Core
  misc_feature 26..50: note = RF
ttgtatatacagatgcattgcttgccagttttgtgctaaacgggattaat

SEQ ID NO: 26047 - DNA, 50 bp, unidentified
  source 1..50: mol_type = unassigned DNA; note = target_907ce10
  misc_feature 1..23: note = LF
  misc_feature 24..25: note = Core
  misc_feature 26..50: note = RF
tgtgtataattcttcattgtaacctccacaaatgatattttttactctaa

SEQ ID NO: 26048 - DNA, 50 bp, unidentified
  source 1..50: mol_type = unassigned DNA; note = target_908cdf9
  misc_feature 1..23: note = LF
  misc_feature 24..25: note = Core
  misc_feature 26..50: note = RF
ttctgcctctatgatttttactcctttccggcggccacctcgggacaaag

SEQ ID NO: 26049 - DNA, 50 bp, unidentified
  source 1..50: mol_type = unassigned DNA; note = target_90c1832
  misc_feature 1..23: note = LF
  misc_feature 24..25: note = Core
  misc_feature 26..50: note = RF
gtccgcaaccttctgagagacccctcacccgacccgcttcgcgggccacc

SEQ ID NO: 26050 - DNA, 50 bp, unidentified
  source 1..50: mol_type = unassigned DNA; note = target_90c26f0
  misc_feature 1..23: note = LF
  misc_feature 24..25: note = Core
  misc_feature 26..50: note = RF
caccctttcgcgggcgaggcccgctcccacaagctaccaccatgctagcc

SEQ ID NO: 26051 - DNA, 50 bp, unidentified
  source 1..50: mol_type = unassigned DNA; note = target_90c9690
  misc_feature 1..23: note = LF
  misc_feature 24..25: note = Core
  misc_feature 26..50: note = RF
gttcgtacctacctcaccccaacctacgagctggacacattgacccgacg

SEQ ID NO: 26052 - DNA, 50 bp, unidentified; identical to SEQ ID NO: 21190
  source 1..50: mol_type = unassigned DNA; note = target_90cbcfd
  misc_feature 1..22: note = LF
  misc_feature 23..25: note = Core
  misc_feature 26..50: note = RF

SEQ ID NO: 26053 - DNA, 50 bp, unidentified
  source 1..50: mol_type = unassigned DNA; note = target_90cf46a
  misc_feature 1..24: note = LF
  misc_feature 25: note = Core
  misc_feature 26..50: note = RF
ccgctgcgcggcgggcgtcaaaacttttttgccagaagatccttcaacgc

SEQ ID NO: 26054 - DNA, 50 bp, unidentified
  source 1..50: mol_type = unassigned DNA; note = target_90d1854
  misc_feature 1..23: note = LF
  misc_feature 24..25: note = Core
  misc_feature 26..50: note = RF
gactacacacgtacattattgacctcttgaatgccattcaagcgctctcc

SEQ ID NO: 26055 - DNA, 50 bp, unidentified
  source 1..50: mol_type = unassigned DNA; note = target_90dd4cf
  misc_feature 1..24: note = LF
  misc_feature 25: note = Core
  misc_feature 26..50: note = RF
ggacgcacgagccgtgcgtccctacaaatcgttactcgtcaaatggaact

SEQ ID NO: 26056 - DNA, 50 bp, unidentified
  source 1..50: mol_type = unassigned DNA; note = target_90e329f
  misc_feature 1..23: note = LF
  misc_feature 24..25: note = Core
  misc_feature 26..50: note = RF
acgaatacgcgcatctaagggctgtcccgtaagcggtgcaccttctgagc

SEQ ID NO: 26057 - DNA, 50 bp, unidentified
  source 1..50: mol_type = unassigned DNA; note = target_90edc63
  misc_feature 1..24: note = LF
  misc_feature 25: note = Core
  misc_feature 26..50: note = RF
gacttgcgctattttttatatacattgttggcggtagtttttatttgttt

SEQ ID NO: 26058 - DNA, 50 bp, unidentified
  source 1..50: mol_type = unassigned DNA; note = target_90f9538
  misc_feature 1..23: note = LF
  misc_feature 24..25: note = Core
  misc_feature 26..50: note = RF
aacaaatatctgcatagtatcacctcattatatatattaacacaaataaa

SEQ ID NO: 26059 - DNA, 50 bp, unidentified
  source 1..50: mol_type = unassigned DNA; note = target_9100bd7
  misc_feature 1..23: note = LF
  misc_feature 24..25: note = Core
  misc_feature 26..50: note = RF
gcaggcctttccgcgtgcggcgcctaacccagcggggccgtccgtaggta

SEQ ID NO: 26060 - DNA, 50 bp, unidentified
  source 1..50: mol_type = unassigned DNA; note = target_9105805
  misc_feature 1..24: note = LF
  misc_feature 25: note = Core
  misc_feature 26..50: note = RF
gtggttacggggaaagaatacacgttgttgagctgatggctcgtcacgtt

SEQ ID NO: 26061 - DNA, 50 bp, unidentified
  source 1..50: mol_type = unassigned DNA; note = target_91083ff
  misc_feature 1..24: note = LF
  misc_feature 25: note = Core
  misc_feature 26..50: note = RF
aaatccccagattacgcgacggtcaagtcaattgaccacaagcgcgtgga

SEQ ID NO: 26062 - DNA, 50 bp, unidentified
  source 1..50: mol_type = unassigned DNA; note = target_910ab7c
  misc_feature 1..23: note = LF
  misc_feature 24..25: note = Core
  misc_feature 26..50: note = RF
tgctcggcgaccacaacgaaataccccaccagtcgcaggtcgaggtccac

SEQ ID NO: 26063 - DNA, 50 bp, unidentified
  source 1..50: mol_type = unassigned DNA; note = target_9113005
  misc_feature 1..22: note = LF
  misc_feature 23..25: note = Core
  misc_feature 26..50: note = RF
gttcgctttgattgggtcgttcctttcctgtttgacatgaccctgtccct

SEQ ID NO: 26064 - DNA, 50 bp, unidentified
  source 1..50: mol_type = unassigned DNA; note = target_911636f
  misc_feature 1..24: note = LF
  misc_feature 25: note = Core
  misc_feature 26..50: note = RF
tgcgggccgccttcgactggaaaaatcagcgatgaaccagtttgctatcc

SEQ ID NO: 26065 - DNA, 50 bp, unidentified
  source 1..50: mol_type = unassigned DNA; note = target_911b69d
  misc_feature 1..24: note = LF
  misc_feature 25: note = Core
  misc_feature 26..50: note = RF
gggcatattcaactgaagccccctttacggaagactcgaattcaagatga

SEQ ID NO: 26066 - DNA, 50 bp, unidentified
  source 1..50: mol_type = unassigned DNA; note = target_9121dcb
  misc_feature 1..23: note = LF
  misc_feature 24..25: note = Core
  misc_feature 26..50: note = RF
aaagagtttttcaacggtatccttgaatttcgcaacaaaatgcggttccg

SEQ ID NO: 26067 - DNA, 50 bp, unidentified
  source 1..50: mol_type = unassigned DNA; note = target_9122e0d
  misc_feature 1..23: note = LF
  misc_feature 24..25: note = Core
  misc_feature 26..50: note = RF
tccaggtcgagcaggtccggttctggcacttagcggacgacttatccccg

SEQ ID NO: 26068 - DNA, 50 bp, unidentified
  source 1..50: mol_type = unassigned DNA; note = target_9127cfd
  misc_feature 1..23: note = LF
  misc_feature 24..25: note = Core
  misc_feature 26..50: note = RF
ttcaaccttcttcataatctcacctcacttttgtatttctctatacaatc

SEQ ID NO: 26069 - DNA, 50 bp, unidentified
  source 1..50: mol_type = unassigned DNA; note = target_912a74a
  misc_feature 1..24: note = LF
  misc_feature 25: note = Core
  misc_feature 26..50: note = RF
cgttccccgccatccggtattcggcaatacagtgtgttcggccaagcggc

SEQ ID NO: 26070 - DNA, 50 bp, unidentified
  source 1..50: mol_type = unassigned DNA; note = target_91498ae
  misc_feature 1..24: note = LF
  misc_feature 25: note = Core
  misc_feature 26..50: note = RF
gggtgcgccacgcactcatctcggcagatccgtgtacccgtcaagtctgt

SEQ ID NO: 26071 - DNA, 50 bp, unidentified
  source 1..50: mol_type = unassigned DNA; note = target_914b27e
  misc_feature 1..22: note = LF
  misc_feature 23..25: note = Core
  misc_feature 26..50: note = RF
gcttgttcagcaaacgcccccgtttaattaaaaatacacagttaacggct

SEQ ID NO: 26072 - DNA, 50 bp, unidentified
  source 1..50: mol_type = unassigned DNA; note = target_914f309
  misc_feature 1..24: note = LF
  misc_feature 25: note = Core
  misc_feature 26..50: note = RF
gaagtggcccgcgcaaaagccagtttctgagaacaccggtggtctcaagg

SEQ ID NO: 26073 - DNA, 50 bp, unidentified
  source 1..50: mol_type = unassigned DNA; note = target_9160926
  misc_feature 1..23: note = LF
  misc_feature 24..25: note = Core
  misc_feature 26..50: note = RF
cagcttcatggtttttcatcctccttatcgatttggtttgtgacataatg

SEQ ID NO: 26074 - DNA, 50 bp, unidentified
  source 1..50: mol_type = unassigned DNA; note = target_9163ff7
  misc_feature 1..23: note = LF
  misc_feature 24..25: note = Core
  misc_feature 26..50: note = RF
caaaattcgtacagcaaagatcaacagcccctaaacaccagacaaaaaaa

SEQ ID NO: 26075 - DNA, 50 bp, unidentified
  source 1..50: mol_type = unassigned DNA; note = target_916a18a
  misc_feature 1..22: note = LF
  misc_feature 23..25: note = Core
  misc_feature 26..50: note = RF
acgtccgtaatgcgaaataatcgttcgagcaaatgtgagataagaacgag

SEQ ID NO: 26076 - DNA, 50 bp, unidentified
  source 1..50: mol_type = unassigned DNA; note = target_917869b
  misc_feature 1..23: note = LF
  misc_feature 24..25: note = Core
  misc_feature 26..50: note = RF
ggcgggcacggcttgccgtgcccctacgcaaacatttgctgcagcacgga

SEQ ID NO: 26077 - DNA, 50 bp, unidentified
  source 1..50: mol_type = unassigned DNA; note = target_9179615
  misc_feature 1..23: note = LF
  misc_feature 24..25: note = Core
  misc_feature 26..50: note = RF
agggcccccaagcggtcaaggttcaaagccgatgtgatccatgaagtcgg

SEQ ID NO: 26078 - DNA, 50 bp, unidentified
  source 1..50: mol_type = unassigned DNA; note = target_917a823
  misc_feature 1..24: note = LF
  misc_feature 25: note = Core
  misc_feature 26..50: note = RF
ccgtgacaattttttagcgtagggtggaggccaggctgtttcggccggaa

SEQ ID NO: 26079 - DNA, 50 bp, unidentified
  source 1..50: mol_type = unassigned DNA; note = target_918052c
  misc_feature 1..24: note = LF
  misc_feature 25: note = Core
  misc_feature 26..50: note = RF
gcgggtcgggccgccctcatgtgccgctatgcgctctttccatcccctga

SEQ ID NO: 26080 - DNA, 50 bp, unidentified
  source 1..50: mol_type = unassigned DNA; note = target_918f45b
  misc_feature 1..23: note = LF
  misc_feature 24..25: note = Core
  misc_feature 26..50: note = RF
acccgctgacggattcagcgggttttattgggtgcggcaaaagttgaaac

SEQ ID NO: 26081 - DNA, 50 bp, unidentified
  source 1..50: mol_type = unassigned DNA; note = target_91991ed
  misc_feature 1..23: note = LF
  misc_feature 24..25: note = Core
  misc_feature 26..50: note = RF
agcggcctaaccaagcgatgcagccccgctggccgctctgatgcgaaggt

SEQ ID NO: 26082 - DNA, 50 bp, unidentified
  source 1..50: mol_type = unassigned DNA; note = target_919fee6
  misc_feature 1..24: note = LF
  misc_feature 25: note = Core
  misc_feature 26..50: note = RF
gtcggacacctatccccgatgtgccgttcaggggcgtttcacccgtgtaa

SEQ ID NO: 26083 - DNA, 50 bp, unidentified
  source 1..50: mol_type = unassigned DNA; note = target_91a1001
  misc_feature 1..23: note = LF
  misc_feature 24..25: note = Core
  misc_feature 26..50: note = RF
agttcccccccagcttcctgtgctaaatttgtgctacaccccgccgaaat

SEQ ID NO: 26084 - DNA, 50 bp, unidentified
  source 1..50: mol_type = unassigned DNA; note = target_91a38b7
  misc_feature 1..21: note = LF
  misc_feature 22..25: note = Core
  misc_feature 26..50: note = RF
tgcgcacgcttccgcccgggaatgacggataggaagggggaatgtgtgga

SEQ ID NO: 26085 - DNA, 50 bp, unidentified
  source 1..50: mol_type = unassigned DNA; note = target_91a8532
  misc_feature 1..23: note = LF
  misc_feature 24..25: note = Core
  misc_feature 26..50: note = RF
ctccgctattgtccgcaatggggtggaaagcagacgttagccttctggca

SEQ ID NO: 26086 - DNA, 50 bp, unidentified
  source 1..50: mol_type = unassigned DNA; note = target_91aaed3
  misc_feature 1..21: note = LF
  misc_feature 22..25: note = Core
  misc_feature 26..50: note = RF
tctccaagatgtggttctcgcccccccgctcgcagcaccatctctccctc

SEQ ID NO: 26087 - DNA, 50 bp, unidentified
  source 1..50: mol_type = unassigned DNA; note = target_91afd50
  misc_feature 1..24: note = LF
  misc_feature 25: note = Core
  misc_feature 26..50: note = RF
ccggccccttggggtcgagacgagagcagcgcaggagccggggcggcgcg

SEQ ID NO: 26088 - DNA, 50 bp, unidentified
  source 1..50: mol_type = unassigned DNA; note = target_91b5e6d
  misc_feature 1..22: note = LF
  misc_feature 23..25: note = Core
  misc_feature 26..50: note = RF
cggcctcttcgcgagcaagctcgctcccacaagatcttcacacgccataa

SEQ ID NO: 26089 - DNA, 50 bp, unidentified
  source 1..50: mol_type = unassigned DNA; note = target_91b8950
  misc_feature 1..23: note = LF
  misc_feature 24..25: note = Core
  misc_feature 26..50: note = RF
cgaagaagccggtggtcatgcccctaatcagcggtctgtcagtgccttcg

SEQ ID NO: 26090 - DNA, 50 bp, unidentified
  source 1..50: mol_type = unassigned DNA; note = target_91d374c
  misc_feature 1..21: note = LF
  misc_feature 22..25: note = Core
  misc_feature 26..50: note = RF
cgcagcgcagggtcgaaccggctcatgccggctccgtccgcacgtggacc

SEQ ID NO: 26091 - DNA, 50 bp, unidentified
  source 1..50: mol_type = unassigned DNA; note = target_91d3783
  misc_feature 1..23: note = LF
  misc_feature 24..25: note = Core
  misc_feature 26..50: note = RF
cactttgtttattgagggagtttagttcaataggggaagtcaaagaaagt

SEQ ID NO: 26092 - DNA, 50 bp, unidentified
  source 1..50: mol_type = unassigned DNA; note = target_91d659c
  misc_feature 1..24: note = LF
  misc_feature 25: note = Core
  misc_feature 26..50: note = RF
ctatccatggcgtgccggaatggacgttatgtcgcctggccgctgggcct

SEQ ID NO: 26093 - DNA, 50 bp, unidentified
  source 1..50: mol_type = unassigned DNA; note = target_91daad1
  misc_feature 1..24: note = LF
  misc_feature 25: note = Core
  misc_feature 26..50: note = RF
gaagtgacctgtttttggtgcaacttccgagtgggggggacaaattcaga

SEQ ID NO: 26094 - DNA, 50 bp, unidentified
  source 1..50: mol_type = unassigned DNA; note = target_91f00e5
  misc_feature 1..23: note = LF
  misc_feature 24..25: note = Core
  misc_feature 26..50: note = RF
gccaacaatttaagctaccaggcctggtagcttatttacttaatttactt

SEQ ID NO: 26095 - DNA, 50 bp, unidentified
  source 1..50: mol_type = unassigned DNA; note = target_91f107b
  misc_feature 1..23: note = LF
  misc_feature 24..25: note = Core
  misc_feature 26..50: note = RF
cgctcgcgaataacttcaaggggggtaacctcggtccttggcgatcgtag

SEQ ID NO: 26096 - DNA, 50 bp, unidentified
  source 1..50: mol_type = unassigned DNA; note = target_91f5e6c
  misc_feature 1..22: note = LF
  misc_feature 23..25: note = Core
  misc_feature 26..50: note = RF
aaccctgctgcacgtccgcttctgacccgaagccgaattttatcgggcaa

SEQ ID NO: 26097 - DNA, 50 bp, unidentified
  source 1..50: mol_type = unassigned DNA; note = target_91fba6f
  misc_feature 1..24: note = LF
  misc_feature 25: note = Core
  misc_feature 26..50: note = RF
agaaacacatctgttataaaaacacagaaggaaaaaacatagtaaagagt

SEQ ID NO: 26098 - DNA, 50 bp, unidentified
  source 1..50: mol_type = unassigned DNA; note = target_91ffd11
  misc_feature 1..24: note = LF
  misc_feature 25: note = Core
  misc_feature 26..50: note = RF
ccattcctgataggcccggcagaaaaccagctatagccgtatccgtccgg

SEQ ID NO: 26099 - DNA, 50 bp, unidentified
  source 1..50: mol_type = unassigned DNA; note = target_920f6f2
  misc_feature 1..23: note = LF
  misc_feature 24..25: note = Core
  misc_feature 26..50: note = RF
ggggcggagcgtacttgagtacgtgagcaccggaagcgcaggtatccgcc

SEQ ID NO: 26100 - DNA, 50 bp, unidentified
  source 1..50: mol_type = unassigned DNA; note = target_9212000
  misc_feature 1..23: note = LF
  misc_feature 24..25: note = Core
  misc_feature 26..50: note = RF
cctatttgtttcatatgttactcctttcattacctaaacattttttttgg

SEQ ID NO: 26101 - DNA, 50 bp, unidentified
  source 1..50: mol_type = unassigned DNA; note = target_9212304
  misc_feature 1..24: note = LF
  misc_feature 25: note = Core
  misc_feature 26..50: note = RF
tccgcgaccgcgactgaccggcccagcgaaccgggcctccggcccggtga

SEQ ID NO: 26102 - DNA, 50 bp, unidentified
  source 1..50: mol_type = unassigned DNA; note = target_92136ed
  misc_feature 1..24: note = LF
  misc_feature 25: note = Core
  misc_feature 26..50: note = RF
agaccatagcgtcgtccaaagacttgaccaaggcaattttgatgaggcca

SEQ ID NO: 26103 - DNA, 50 bp, unidentified
  source 1..50: mol_type = unassigned DNA; note = target_9215b80
  misc_feature 1..23: note = LF
  misc_feature 24..25: note = Core
  misc_feature 26..50: note = RF
gtgttcgagtgcatggcggcaacctaccaaccccacccccgaacacaagc

SEQ ID NO: 26104 - DNA, 50 bp, unidentified
  source 1..50: mol_type = unassigned DNA; note = target_921e079
  misc_feature 1..23: note = LF
  misc_feature 24..25: note = Core
  misc_feature 26..50: note = RF
tttctcatagattttctccttttctgtttttagttatcagttacttttca

SEQ ID NO: 26105 - DNA, 50 bp, unidentified
  source 1..50: mol_type = unassigned DNA; note = target_921f4ea
  misc_feature 1..24: note = LF
  misc_feature 25: note = Core
  misc_feature 26..50: note = RF
ttatctcttttccttagttttaacgccgagttcagcggcagcttttaagt

SEQ ID NO: 26106 - DNA, 50 bp, unidentified
  source 1..50: mol_type = unassigned DNA; note = target_92206d2
  misc_feature 1..22: note = LF
  misc_feature 23..25: note = Core
  misc_feature 26..50: note = RF
tcagggctcctttcagcagccttgaatcaagcttcggccttcacatcaag

SEQ ID NO: 26107 - DNA, 50 bp, unidentified
  source 1..50: mol_type = unassigned DNA; note = target_92240ab
  misc_feature 1..21: note = LF
  misc_feature 22..25: note = Core
  misc_feature 26..50: note = RF
attgtcgcgttcgccatcgtggtcatgccgcccgctccaagaccagcgcc

SEQ ID NO: 26108 - DNA, 50 bp, unidentified
  source 1..50: mol_type = unassigned DNA; note = target_922488b
  misc_feature 1..24: note = LF
  misc_feature 25: note = Core
  misc_feature 26..50: note = RF
ttttcatagtcaaaacctcttaacgtaagttttcgttccactaagcttca

SEQ ID NO: 26109 - DNA, 50 bp, unidentified
  source 1..50: mol_type = unassigned DNA; note = target_9224b3f
  misc_feature 1..23: note = LF
  misc_feature 24..25: note = Core
  misc_feature 26..50: note = RF
gaaaatagtcagctaaatcctaattttgtaaataatcttaataatttatc

SEQ ID NO: 26110 - DNA, 50 bp, unidentified
  source 1..50: mol_type = unassigned DNA; note = target_9228002
  misc_feature 1..23: note = LF
  misc_feature 24..25: note = Core
  misc_feature 26..50: note = RF
atatgttgccatagtgtttcctcctttcttttatgtaaaattaaaggggc

SEQ ID NO: 26111 - DNA, 50 bp, unidentified
  source 1..50: mol_type = unassigned DNA; note = target_9229c7a
  misc_feature 1..23: note = LF
  misc_feature 24..25: note = Core
  misc_feature 26..50: note = RF
ttcagttccattaggatgtactcctttcaatcgattagcttcaaattttt

SEQ ID NO: 26112 - DNA, 50 bp, unidentified
  source 1..50: mol_type = unassigned DNA; note = target_9237566
  misc_feature 1..24: note = LF
  misc_feature 25: note = Core
  misc_feature 26..50: note = RF
tttcacgatcaaaccgccagattttgcacgaaaaggacgattaccccgtg

SEQ ID NO: 26113 - DNA, 50 bp, unidentified
  source 1..50: mol_type = unassigned DNA; note = target_923a98b
  misc_feature 1..23: note = LF
  misc_feature 24..25: note = Core
  misc_feature 26..50: note = RF
tgctcggcggcgtgcgctgtcttttttgtacgtgaggtcgcgtgcgtcga

SEQ ID NO: 26114 - DNA, 50 bp, unidentified
  source 1..50: mol_type = unassigned DNA; note = target_924441f
  misc_feature 1..23: note = LF
  misc_feature 24..25: note = Core
  misc_feature 26..50: note = RF
gtccccccaatagccgacattcgagcggacatggatttgcgcccgcttcg

SEQ ID NO: 26115 - DNA, 50 bp, unidentified
  source 1..50: mol_type = unassigned DNA; note = target_9249e75
  misc_feature 1..24: note = LF
  misc_feature 25: note = Core
  misc_feature 26..50: note = RF
agtgtccccactgcctgattcccccaccccccgaaaacgacgaaggtcct

SEQ ID NO: 26116 - DNA, 50 bp, unidentified
  source 1..50: mol_type = unassigned DNA; note = target_925108b
  misc_feature 1..23: note = LF
  misc_feature 24..25: note = Core
  misc_feature 26..50: note = RF
gttcctacatccctttttctatcctattaaaaactctcatcgctcccacc

SEQ ID NO: 26117 - DNA, 50 bp, unidentified
  source 1..50: mol_type = unassigned DNA; note = target_9251ad1
  misc_feature 1..23: note = LF
  misc_feature 24..25: note = Core
  misc_feature 26..50: note = RF
ggatgtcatcgcgagcaagctcgctcctacagggatggcgcaggacctgt

SEQ ID NO: 26118 - DNA, 50 bp, unidentified
  source 1..50: mol_type = unassigned DNA; note = target_925a90a
  misc_feature 1..22: note = LF
  misc_feature 23..25: note = Core
  misc_feature 26..50: note = RF
aagctttgctgctacgggcctttttttgcttcctttatgtaaggaattct

SEQ ID NO: 26119 - DNA, 50 bp, unidentified
  source 1..50: mol_type = unassigned DNA; note = target_925eece
  misc_feature 1..23: note = LF
  misc_feature 24..25: note = Core
  misc_feature 26..50: note = RF
tttaaatcataaaaaggaaaaagtatgtgtataatcagcagagatatcag

SEQ ID NO: 26120 - DNA, 50 bp, unidentified
  source 1..50: mol_type = unassigned DNA; note = target_9263cc3
  misc_feature 1..23: note = LF
  misc_feature 24..25: note = Core
  misc_feature 26..50: note = RF
cggtcgtccattgaaggctccattggtccgaggacaatggtcgacggttc

SEQ ID NO: 26121 - DNA, 50 bp, unidentified
  source 1..50: mol_type = unassigned DNA; note = target_9264461
  misc_feature 1..24: note = LF
  misc_feature 25: note = Core
  misc_feature 26..50: note = RF
ccgacgacgcgcagtgctcaccagtttcccgaagcagcttccttcagcac

SEQ ID NO: 26122 - DNA, 50 bp, unidentified
  source 1..50: mol_type = unassigned DNA; note = target_9266ab1
  misc_feature 1..23: note = LF
  misc_feature 24..25: note = Core
  misc_feature 26..50: note = RF
aactctttattacaggaatactcgtctttctgcttatttaaaaagacaat

SEQ ID NO: 26123 - DNA, 50 bp, unidentified
  source 1..50: mol_type = unassigned DNA; note = target_92723c4
  misc_feature 1..23: note = LF
  misc_feature 24..25: note = Core
  misc_feature 26..50: note = RF
catcgtgacttgacaaccaaagaagaaaagtagaattctaaaccgttgga

SEQ ID NO: 26124 - DNA, 50 bp, unidentified
  source 1..50: mol_type = unassigned DNA; note = target_9274a76
  misc_feature 1..22: note = LF
  misc_feature 23..25: note = Core
  misc_feature 26..50: note = RF
cagctcctccagttgggaagcttgaatcacatctcctgctccaggggaat

SEQ ID NO: 26125 - DNA, 50 bp, unidentified
  source 1..50: mol_type = unassigned DNA; note = target_928d7ae
  misc_feature 1..22: note = LF
  misc_feature 23..25: note = Core
  misc_feature 26..50: note = RF
gtattgacaaacattttctcacctcacaaactggtcaaatggattgatat

SEQ ID NO: 26126 - DNA, 50 bp, unidentified
  source 1..50: mol_type = unassigned DNA; note = target_9296598
  misc_feature 1..23: note = LF
  misc_feature 24..25: note = Core
  misc_feature 26..50: note = RF
attgataatttccattttatcacctcttaataattgtaagataaaaagcg

SEQ ID NO: 26127 - DNA, 50 bp, unidentified
  source 1..50: mol_type = unassigned DNA; note = target_92a2785
  misc_feature 1..23: note = LF
  misc_feature 24..25: note = Core
  misc_feature 26..50: note = RF
tcatcgactgctgttcccgacatctgaccgggtgggcggtcgccgaccac

SEQ ID NO: 26128 - DNA, 50 bp, unidentified
  source 1..50: mol_type = unassigned DNA; note = target_92a92c0
  misc_feature 1..23: note = LF
  misc_feature 24..25: note = Core
  misc_feature 26..50: note = RF
ttttcggcatccaccaacacctccttcgcaagagattgataggcttctgc

SEQ ID NO: 26129 - DNA, 50 bp, unidentified
  source 1..50: mol_type = unassigned DNA; note = target_92a9cfd
  misc_feature 1..23: note = LF
  misc_feature 24..25: note = Core
  misc_feature 26..50: note = RF
cgacgcagcgcagaccataggatccattccgtgaagtcgaggcgttgcca

SEQ ID NO: 26130 - DNA, 50 bp, unidentified
  source 1..50: mol_type = unassigned DNA; note = target_92aa09a
  misc_feature 1..24: note = LF
  misc_feature 25: note = Core
  misc_feature 26..50: note = RF
caaagggcaaaaaactgcccaaagcaatcattcgttcgagccatcacagg

SEQ ID NO: 26131 - DNA, 50 bp, unidentified
  source 1..50: mol_type = unassigned DNA; note = target_92b6859
  misc_feature 1..23: note = LF
  misc_feature 24..25: note = Core
  misc_feature 26..50: note = RF
cttattggctatgagtcctgagcctagctcaatcgacaaaataacactgg

SEQ ID NO: 26132 - DNA, 50 bp, unidentified
  source 1..50: mol_type = unassigned DNA; note = target_92b7595
  misc_feature 1..24: note = LF
  misc_feature 25: note = Core
  misc_feature 26..50: note = RF
atgccgaaatagtattgattgccctcttggtctggtgcatttccgggtcg

SEQ ID NO: 26133 - DNA, 50 bp, unidentified
  source 1..50: mol_type = unassigned DNA; note = target_92c4738
  misc_feature 1..24: note = LF
  misc_feature 25: note = Core
  misc_feature 26..50: note = RF
gaagaagtagtttttctgtcgtcgttcttgttgttggtcgattgatggcg

SEQ ID NO: 26134 - DNA, 50 bp, unidentified
  source 1..50: mol_type = unassigned DNA; note = target_92c539c
  misc_feature 1..21: note = LF
  misc_feature 22..25: note = Core
  misc_feature 26..50: note = RF
tggttgccatgtagacttcacctcccttcgtcaaaaacgccgcatagttc

SEQ ID NO: 26135 - DNA, 50 bp, unidentified
  source 1..50: mol_type = unassigned DNA; note = target_92cb11f
  misc_feature 1..24: note = LF
  misc_feature 25: note = Core
  misc_feature 26..50: note = RF
cacaccggggggccgccgcggcccccccccgccggcggccgactctgccg

SEQ ID NO: 26136 - DNA, 50 bp, unidentified
  source 1..50: mol_type = unassigned DNA; note = target_92ccb3a
  misc_feature 1..23: note = LF
  misc_feature 24..25: note = Core
  misc_feature 26..50: note = RF
aaatcgatttacgcaaagtgacctgccactgaactttcatccagtggcga

SEQ ID NO: 26137 - DNA, 50 bp, unidentified
  source 1..50: mol_type = unassigned DNA; note = target_92d133c
  misc_feature 1..23: note = LF
  misc_feature 24..25: note = Core
  misc_feature 26..50: note = RF
gctcaacgtaccgaagcgtacgcctcggcccctctctcgctgcggccttg

SEQ ID NO: 26138 - DNA, 50 bp, unidentified
  source 1..50: mol_type = unassigned DNA; note = target_92d475c
  misc_feature 1..23: note = LF
  misc_feature 24..25: note = Core
  misc_feature 26..50: note = RF
ggcgcgttgcgcctttgcccaccctacaagaccttctctgcggctaccgc

SEQ ID NO: 26139 - DNA, 50 bp, unidentified
  source 1..50: mol_type = unassigned DNA; note = target_92d58d0
  misc_feature 1..24: note = LF
  misc_feature 25: note = Core
  misc_feature 26..50: note = RF
ataactagcaattaattatacacgttgttgtaagtagttgtttttatttt

SEQ ID NO: 26140 - DNA, 50 bp, unidentified
  source 1..50: mol_type = unassigned DNA; note = target_92d5a20
  misc_feature 1..23: note = LF
  misc_feature 24..25: note = Core
  misc_feature 26..50: note = RF
tcgagcaaacggctgacggacgtagcccggatgaagcgcagcgcaatccg

SEQ ID NO: 26141 - DNA, 50 bp, unidentified
  source 1..50: mol_type = unassigned DNA; note = target_92e4647
  misc_feature 1..23: note = LF
  misc_feature 24..25: note = Core
  misc_feature 26..50: note = RF
tggggttcgttcctctccccaacctacgcgctatcattattgggcattat

SEQ ID NO: 26142 - DNA, 50 bp, unidentified
  source 1..50: mol_type = unassigned DNA; note = target_92e4f9c
  misc_feature 1..24: note = LF
  misc_feature 25: note = Core
  misc_feature 26..50: note = RF
cagttttgggacaagttcttataaagtctatgtctcaaatttgcaatgtt

SEQ ID NO: 26143 - DNA, 50 bp, unidentified
  source 1..50: mol_type = unassigned DNA; note = target_92efcd1
  misc_feature 1..23: note = LF
  misc_feature 24..25: note = Core
  misc_feature 26..50: note = RF
aggtaatgtccacatgacgtagctaccgataatacgtgttaacgcgccca

SEQ ID NO: 26144 - DNA, 50 bp, unidentified
  source 1..50: mol_type = unassigned DNA; note = target_92f1a42
  misc_feature 1..23: note = LF
  misc_feature 24..25: note = Core
  misc_feature 26..50: note = RF
ttaatggcatttttagctgcaggagcatatatctatattgacggttttgg

SEQ ID NO: 26145 - DNA, 50 bp, unidentified
  source 1..50: mol_type = unassigned DNA; note = target_92f1b90
  misc_feature 1..22: note = LF
  misc_feature 23..25: note = Core
  misc_feature 26..50: note = RF
cgcagacagtttcgcattagactgatagcaccgccgtcgcctcttgaggt

SEQ ID NO: 26146 - DNA, 50 bp, unidentified
  source 1..50: mol_type = unassigned DNA; note = target_92f26ce
  misc_feature 1..24: note = LF
  misc_feature 25: note = Core
  misc_feature 26..50: note = RF
gcggctcgaaggccctgtcatcggcatgagcgcgcgtcggtcgctccgag

SEQ ID NO: 26147 - DNA, 50 bp, unidentified
  source 1..50: mol_type = unassigned DNA; note = target_92f3d81
  misc_feature 1..24: note = LF
  misc_feature 25: note = Core
  misc_feature 26..50: note = RF
gtaaaaagtgatccccaactcgttcgtccctcgcccttgaggatgacgaa

SEQ ID NO: 26148 - DNA, 50 bp, unidentified
  source 1..50: mol_type = unassigned DNA; note = target_92fde71
  misc_feature 1..23: note = LF
  misc_feature 24..25: note = Core
  misc_feature 26..50: note = RF
ctgaactcgttgagtttaccaccctcacttcgattttgcaagggagattt

SEQ ID NO: 26149 - DNA, 50 bp, unidentified
  source 1..50: mol_type = unassigned DNA; note = target_930d5b1
  misc_feature 1..24: note = LF
  misc_feature 25: note = Core
  misc_feature 26..50: note = RF
catagggcgcttgtcggccacaaccggtcatcgggggtggatcgagaatt

SEQ ID NO: 26150 - DNA, 50 bp, unidentified
  source 1..50: mol_type = unassigned DNA; note = target_93308a7
  misc_feature 1..21: note = LF
  misc_feature 22..25: note = Core
  misc_feature 26..50: note = RF
gccttgggagcggcccggcggctcatgctgcgacctccaccggcgcgctg

SEQ ID NO: 26151 - DNA, 50 bp, unidentified
  source 1..50: mol_type = unassigned DNA; note = target_93338d0
  misc_feature 1..23: note = LF
  misc_feature 24..25: note = Core
  misc_feature 26..50: note = RF
aacgtcgcggaggccgcaggccccggatcggggtccggggcaagctccga

SEQ ID NO: 26152 - DNA, 50 bp, unidentified
  source 1..50: mol_type = unassigned DNA; note = target_9337666
  misc_feature 1..23: note = LF
  misc_feature 24..25: note = Core
  misc_feature 26..50: note = RF
ggcaatcagcgaacgacggctattggcacggggctggcctaagccgaaca

SEQ ID NO: 26153 - DNA, 50 bp, unidentified
  source 1..50: mol_type = unassigned DNA; note = target_9351056
  misc_feature 1..23: note = LF
  misc_feature 24..25: note = Core
  misc_feature 26..50: note = RF
tgcgggacggcggcgctcagccggcgacggcgagtgcgagggcgaggtct

SEQ ID NO: 26154 - DNA, 50 bp, unidentified
  source 1..50: mol_type = unassigned DNA; note = target_9353d98
  misc_feature 1..22: note = LF
  misc_feature 23..25: note = Core
  misc_feature 26..50: note = RF
atcacatcacacagcatatatttctcctttattccgaatagggatcatca

SEQ ID NO: 26155 - DNA, 50 bp, unidentified
  source 1..50: mol_type = unassigned DNA; note = target_93552fd
  misc_feature 1..21: note = LF
  misc_feature 22..25: note = Core
  misc_feature 26..50: note = RF
tggacgaaagcgtcgggtgtgctcatgcggttacccgaacggtatcggcg

SEQ ID NO: 26156 - DNA, 50 bp, unidentified
  source 1..50: mol_type = unassigned DNA; note = target_935cabf
  misc_feature 1..22: note = LF
  misc_feature 23..25: note = Core
  misc_feature 26..50: note = RF
gtctatcgccagaaattgcgacagaacccgaccactttgtggccatcgaa

SEQ ID NO: 26157 - DNA, 50 bp, unidentified
  source 1..50: mol_type = unassigned DNA; note = target_93660ec
  misc_feature 1..23: note = LF
  misc_feature 24..25: note = Core
  misc_feature 26..50: note = RF
cggagggcgaccgccggtcgcccctacaacatgaaattgatcgacacgtg

SEQ ID NO: 26158 - DNA, 50 bp, unidentified
  source 1..50: mol_type = unassigned DNA; note = target_9368bb6
  misc_feature 1..23: note = LF
  misc_feature 24..25: note = Core
  misc_feature 26..50: note = RF
gggtgttgattttcactgagaactgggttcttccgcacttttcgtgatgg

SEQ ID NO: 26159 - DNA, 50 bp, unidentified
  source 1..50: mol_type = unassigned DNA; note = target_9376af6
  misc_feature 1..22: note = LF
  misc_feature 23..25: note = Core
  misc_feature 26..50: note = RF
tgataatcatgtttgacttcttcatacttctttctttttattggattgtt

SEQ ID NO: 26160 - DNA, 50 bp, unidentified
  source 1..50: mol_type = unassigned DNA; note = target_9383313
  misc_feature 1..24: note = LF
  misc_feature 25: note = Core
  misc_feature 26..50: note = RF
tctttttgcacgccgcatggcggcttcgggtcaacctgagtcgtgactgc

SEQ ID NO: 26161 - DNA, 50 bp, unidentified
  source 1..50: mol_type = unassigned DNA; note = target_9394f9f
  misc_feature 1..23: note = LF
  misc_feature 24..25: note = Core
  misc_feature 26..50: note = RF
tgggttttgtccctcaacccaacctacgcctatcagaaatcagtgcgtag

SEQ ID NO: 26162 - DNA, 50 bp, unidentified
  source 1..50: mol_type = unassigned DNA; note = target_939af4a
  misc_feature 1..22: note = LF
  misc_feature 23..25: note = Core
  misc_feature 26..50: note = RF
ttaagcattgctgcaagtaaaaagttatatgggaaattatctttaggcat

SEQ ID NO: 26163 - DNA, 50 bp, unidentified
  source 1..50: mol_type = unassigned DNA; note = target_939c947
  misc_feature 1..23: note = LF
  misc_feature 24..25: note = Core
  misc_feature 26..50: note = RF
acgccgtcttggccgctacctgacttgggccaatttagtgcacaagtcag

SEQ ID NO: 26164 - DNA, 50 bp, unidentified
  source 1..50: mol_type = unassigned DNA; note = target_93a9313
  misc_feature 1..23: note = LF
  misc_feature 24..25: note = Core
  misc_feature 26..50: note = RF
atatgaagagatttctcctatcgtcgaaatgacaaattttcgttgaattt

SEQ ID NO: 26165 - DNA, 50 bp, unidentified
  source 1..50: mol_type = unassigned DNA; note = target_93adf37
  misc_feature 1..23: note = LF
  misc_feature 24..25: note = Core
  misc_feature 26..50: note = RF
atttgccgctcgacctatggtcgcttgctactgaaaggacgcaagaattt

SEQ ID NO: 26166 - DNA, 50 bp, unidentified
  source 1..50: mol_type = unassigned DNA; note = target_93b7ab6
  misc_feature 1..23: note = LF
  misc_feature 24..25: note = Core
  misc_feature 26..50: note = RF
ttgtattttggcataattaaaacctccaaatcattctttttgttttttgc

SEQ ID NO: 26167 - DNA, 50 bp, unidentified
  source 1..50: mol_type = unassigned DNA; note = target_93bb9d8
  misc_feature 1..23: note = LF
  misc_feature 24..25: note = Core
  misc_feature 26..50: note = RF
cttgttgcggggtaaccgctgcgatcggggctataaaaacgcaaacctaa

SEQ ID NO: 26168 - DNA, 50 bp, unidentified
  source 1..50: mol_type = unassigned DNA; note = target_93bc1d7
  misc_feature 1..22: note = LF
  misc_feature 23..25: note = Core
  misc_feature 26..50: note = RF
cgtccgagcttcgctcggccaccttctcccgcaaggggagaaggagaagc

SEQ ID NO: 26169 - DNA, 50 bp, unidentified
  source 1..50: mol_type = unassigned DNA; note = target_93bfacf
  misc_feature 1..23: note = LF
  misc_feature 24..25: note = Core
  misc_feature 26..50: note = RF
gcaaaactttacgttcccataccctacatctatagatctaaccttcattt

SEQ ID NO: 26170 - DNA, 50 bp, unidentified
  source 1..50: mol_type = unassigned DNA; note = target_93c2bbd
  misc_feature 1..23: note = LF
  misc_feature 24..25: note = Core
  misc_feature 26..50: note = RF
atgtcgtgcagcgtcatgggatgtctcctcggtcgcgtggcgtccccctc

SEQ ID NO: 26171 - DNA, 50 bp, unidentified
  source 1..50: mol_type = unassigned DNA; note = target_93d1cd0
  misc_feature 1..22: note = LF
  misc_feature 23..25: note = Core
  misc_feature 26..50: note = RF
tggagctgaaacgttggtgtgcggacaaagggtgagttccctgcgcttgc

SEQ ID NO: 26172 - DNA, 50 bp, unidentified
  source 1..50: mol_type = unassigned DNA; note = target_93dbfc3
  misc_feature 1..24: note = LF
  misc_feature 25: note = Core
  misc_feature 26..50: note = RF
gatgctccaggtatttggcctaacgcccaaggtaagcggcgccggagcac

SEQ ID NO: 26173 - DNA, 50 bp, unidentified
  source 1..50: mol_type = unassigned DNA; note = target_93e637a
  misc_feature 1..23: note = LF
  misc_feature 24..25: note = Core
  misc_feature 26..50: note = RF
gcgctcccacaggacccagctgactgtcatcggtgcggagcgtcgtctgg

SEQ ID NO: 26174 - DNA, 50 bp, unidentified
  source 1..50: mol_type = unassigned DNA; note = target_93eca69
  misc_feature 1..24: note = LF
  misc_feature 25: note = Core
  misc_feature 26..50: note = RF
gcagcgtgatgaactcgcggcgcttcattcgatcacctcgtcggcgcggg

SEQ ID NO: 26175 - DNA, 50 bp, unidentified
  source 1..50: mol_type = unassigned DNA; note = target_93f3acd
  misc_feature 1..23: note = LF
  misc_feature 24..25: note = Core
  misc_feature 26..50: note = RF
aataaaggtacgcgatgcgtaccctacggtttctttgtattttaacgctt

SEQ ID NO: 26176 - DNA, 50 bp, unidentified
  source 1..50: mol_type = unassigned DNA; note = target_93f7b98
  misc_feature 1..23: note = LF
  misc_feature 24..25: note = Core
  misc_feature 26..50: note = RF
ggatcagtggggaagtcggttgttggcataatgcgctgatgctggatcgg

SEQ ID NO: 26177 - DNA, 50 bp, unidentified
  source 1..50: mol_type = unassigned DNA; note = target_93fa640
  misc_feature 1..21: note = LF
  misc_feature 22..25: note = Core
  misc_feature 26..50: note = RF
aaatcctttttcatatgttcaattatatcataagaaaaaacaggggatat

SEQ ID NO: 26178 - DNA, 50 bp, unidentified
  source 1..50: mol_type = unassigned DNA; note = target_9401b6e
  misc_feature 1..23: note = LF
  misc_feature 24..25: note = Core
  misc_feature 26..50: note = RF
tctactgcgcgcgctgaggccccccccccccggtctcccgcccagtttcg

SEQ ID NO: 26179 - DNA, 50 bp, unidentified; identical to SEQ ID NO: 26009
  source 1..50: mol_type = unassigned DNA; note = target_9403f28
  misc_feature 1..22: note = LF
  misc_feature 23..25: note = Core
  misc_feature 26..50: note = RF

SEQ ID NO: 26180 - DNA, 50 bp, unidentified
  source 1..50: mol_type = unassigned DNA; note = target_9407b00
  misc_feature 1..23: note = LF
  misc_feature 24..25: note = Core
  misc_feature 26..50: note = RF
gcatcagattgcatgctcgtctcctgcaatttcattgatcctaggagatt

SEQ ID NO: 26181 - DNA, 50 bp, unidentified
  source 1..50: mol_type = unassigned DNA; note = target_940ccaf
  misc_feature 1..23: note = LF
  misc_feature 24..25: note = Core
  misc_feature 26..50: note = RF
tcaaacagaaacctgatcctgtccggttcttaaagggcaactccagccca

SEQ ID NO: 26182 - DNA, 50 bp, unidentified
  source 1..50: mol_type = unassigned DNA; note = target_940d71b
  misc_feature 1..21: note = LF
  misc_feature 22..25: note = Core
  misc_feature 26..50: note = RF
tccgcgaccccgaagcggtggctcagaggttgccccggttgagccgcatg

SEQ ID NO: 26183 - DNA, 50 bp, unidentified
  source 1..50: mol_type = unassigned DNA; note = target_94200bd
  misc_feature 1..23: note = LF
  misc_feature 24..25: note = Core
  misc_feature 26..50: note = RF
gtcagtcggagcgggagccatccactccatctgcttccgggaggctgccg

SEQ ID NO: 26184 - DNA, 50 bp, unidentified
  source 1..50: mol_type = unassigned DNA; note = target_94362e3
  misc_feature 1..23: note = LF
  misc_feature 24..25: note = Core
  misc_feature 26..50: note = RF
gtagcttctgacttagacggtgttaggcacttttcgtcaggtttgcgaaa

SEQ ID NO: 26185 - DNA, 50 bp, unidentified
  source 1..50: mol_type = unassigned DNA; note = target_943e0ad
  misc_feature 1..23: note = LF
  misc_feature 24..25: note = Core
  misc_feature 26..50: note = RF
cggcatggatgccgccaccgagcctacagggacgtacttgcggcgtgtcc

SEQ ID NO: 26186 - DNA, 50 bp, unidentified
  source 1..50: mol_type = unassigned DNA; note = target_943e7a8
  misc_feature 1..20: note = LF
  misc_feature 21..25: note = Core
  misc_feature 26..50: note = RF
tagaaattagatgctgccgctttttatgcccttttttagggtgaaaaatc

SEQ ID NO: 26187 - DNA, 50 bp, unidentified
  source 1..50: mol_type = unassigned DNA; note = target_94448a5
  misc_feature 1..23: note = LF
  misc_feature 24..25: note = Core
  misc_feature 26..50: note = RF
aggagcgccctggcttcgacaagctcagcccgaacggatggggtgagaca

SEQ ID NO: 26188 - DNA, 50 bp, unidentified
  source 1..50: mol_type = unassigned DNA; note = target_9448d44
  misc_feature 1..21: note = LF
  misc_feature 22..25: note = Core
  misc_feature 26..50: note = RF
gccgccccgggctgggccgcggtcatgcggcgtgctccttcggggggtct

SEQ ID NO: 26189 - DNA, 50 bp, unidentified
  source 1..50: mol_type = unassigned DNA; note = target_9449d5b
  misc_feature 1..23: note = LF
  misc_feature 24..25: note = Core
  misc_feature 26..50: note = RF
accggccgcagaatgtctgctattggcacatcgcgtcatttcgctgcgcc

SEQ ID NO: 26190 - DNA, 50 bp, unidentified
  source 1..50: mol_type = unassigned DNA; note = target_9449eda
  misc_feature 1..23: note = LF
  misc_feature 24..25: note = Core
  misc_feature 26..50: note = RF
tgaactagatcaaatgcaaaacgctttagttgcggacctatctgctattc

SEQ ID NO: 26191 - DNA, 50 bp, unidentified
  source 1..50: mol_type = unassigned DNA; note = target_944dee7
  misc_feature 1..22: note = LF
  misc_feature 23..25: note = Core
  misc_feature 26..50: note = RF
gaacagcgaaggtcggcagtgcggacaaagcaccatttcgctgcatatgt

SEQ ID NO: 26192 - DNA, 50 bp, unidentified
  source 1..50: mol_type = unassigned DNA; note = target_94501ee
  misc_feature 1..24: note = LF
  misc_feature 25: note = Core
  misc_feature 26..50: note = RF
ttgtcgacgacgggcccagactgacccagccgggcagaaggggtcgggcg

SEQ ID NO: 26193 - DNA, 50 bp, unidentified
  source 1..50: mol_type = unassigned DNA; note = target_9458dd0
  misc_feature 1..23: note = LF
  misc_feature 24..25: note = Core
  misc_feature 26..50: note = RF
tgcgggtctatcctcaatggcgctggcatttggatgaggtgttcgtgaag

SEQ ID NO: 26194 - DNA, 50 bp, unidentified
  source 1..50: mol_type = unassigned DNA; note = target_9470f98
  misc_feature 1..22: note = LF
  misc_feature 23..25: note = Core
  misc_feature 26..50: note = RF
ccgcgggatcgccgatgaatcggctcctacaggttttttacaaggcttcg

SEQ ID NO: 26195 - DNA, 50 bp, unidentified
  source 1..50: mol_type = unassigned DNA; note = target_947264b
  misc_feature 1..24: note = LF
  misc_feature 25: note = Core
  misc_feature 26..50: note = RF
tacaccattttaagacttccaagatgtgtagtggttatggattgaagttg

SEQ ID NO: 26196 - DNA, 50 bp, unidentified
  source 1..50: mol_type = unassigned DNA; note = target_947a56c
  misc_feature 1..24: note = LF
  misc_feature 25: note = Core
  misc_feature 26..50: note = RF
ctatccactcttttttcattattatctccttatcataaatatcttgtaca

SEQ ID NO: 26197 - DNA, 50 bp, unidentified
  source 1..50: mol_type = unassigned DNA; note = target_9482010
  misc_feature 1..23: note = LF
  misc_feature 24..25: note = Core
  misc_feature 26..50: note = RF
cttatctttatgtgttaagtgaactatccatctcctacctaacggatgga

SEQ ID NO: 26198 - DNA, 50 bp, unidentified
  source 1..50: mol_type = unassigned DNA; note = target_94846f0
  misc_feature 1..23: note = LF
  misc_feature 24..25: note = Core
  misc_feature 26..50: note = RF
caactgaaccgccgcggatgctcctatcaggtcacatccgctccaaaccg

SEQ ID NO: 26199 - DNA, 50 bp, unidentified
  source 1..50: mol_type = unassigned DNA; note = target_948afc1
  misc_feature 1..20: note = LF
  misc_feature 21..25: note = Core
  misc_feature 26..50: note = RF
aggaggattcgttcctcctctttttgtgtccgaaaaaacagactcccgga

SEQ ID NO: 26200 - DNA, 50 bp, unidentified
  source 1..50: mol_type = unassigned DNA; note = target_94aae73
  misc_feature 1..24: note = LF
  misc_feature 25: note = Core
  misc_feature 26..50: note = RF
tattgtcatcgtccatacctcctgcgtataatacttatattatatccaat

SEQ ID NO: 26201 - DNA, 50 bp, unidentified
  source 1..50: mol_type = unassigned DNA; note = target_94ab83d
  misc_feature 1..23: note = LF
  misc_feature 24..25: note = Core
  misc_feature 26..50: note = RF
ctgaaatttctacttgacttttgttagcaggtcttatcgtgttgtctttt

SEQ ID NO: 26202 - DNA, 50 bp, unidentified
  source 1..50: mol_type = unassigned DNA; note = target_94b40a6
  misc_feature 1..24: note = LF
  misc_feature 25: note = Core
  misc_feature 26..50: note = RF
tccttgtggtttcactgccccccccaccccccgtgctcgccgaggagcgg

SEQ ID NO: 26203 - DNA, 50 bp, unidentified
  source 1..50: mol_type = unassigned DNA; note = target_94b5cde
  misc_feature 1..24: note = LF
  misc_feature 25: note = Core
  misc_feature 26..50: note = RF
agaaagaccgctgctaggcgaaagcggacattatggccctgaacaggcct

SEQ ID NO: 26204 - DNA, 50 bp, unidentified
  source 1..50: mol_type = unassigned DNA; note = target_94b89d1
  misc_feature 1..23: note = LF
  misc_feature 24..25: note = Core
  misc_feature 26..50: note = RF
caccggcgatgtcctgaacgcgcctttcacggcaaaccagcccaccccgg

SEQ ID NO: 26205 - DNA, 50 bp, unidentified
  source 1..50: mol_type = unassigned DNA; note = target_94bdec7
  misc_feature 1..22: note = LF
  misc_feature 23..25: note = Core
  misc_feature 26..50: note = RF
ctttgtaagtcttcaatattgtcatggtgagcctgtcgaaccattaaccg

SEQ ID NO: 26206 - DNA, 50 bp, unidentified
  source 1..50: mol_type = unassigned DNA; note = target_94be3e9
  misc_feature 1..23: note = LF
  misc_feature 24..25: note = Core
  misc_feature 26..50: note = RF
gcaacggcggtgaggctgccttcctgatattgcttcttccacttaaacag

SEQ ID NO: 26207 - DNA, 50 bp, unidentified
  source 1..50: mol_type = unassigned DNA; note = target_94c41f8
  misc_feature 1..22: note = LF
  misc_feature 23..25: note = Core
  misc_feature 26..50: note = RF
ttccctattcgaagtctcactttgacccaacgcggacatgggatggtccg

SEQ ID NO: 26208 - DNA, 50 bp, unidentified
  source 1..50: mol_type = unassigned DNA; note = target_94c8922
  misc_feature 1..23: note = LF
  misc_feature 24..25: note = Core
  misc_feature 26..50: note = RF
tcaactcgatgctctcaagcccccttacctccgccctccttcgtcgggcg

SEQ ID NO: 26209 - DNA, 50 bp, unidentified
  source 1..50: mol_type = unassigned DNA; note = target_94cb178
  misc_feature 1..24: note = LF
  misc_feature 25: note = Core
  misc_feature 26..50: note = RF
cgacagctgcgtgggcggcgacaaattgtcttggccgtgctgcttgacgc

SEQ ID NO: 26210 - DNA, 50 bp, unidentified
  source 1..50: mol_type = unassigned DNA; note = target_94ce6d6
  misc_feature 1..23: note = LF
  misc_feature 24..25: note = Core
  misc_feature 26..50: note = RF
gggcacgctgcgctttgcccaccctacgaacataccgagcccacgcgcgc

SEQ ID NO: 26211 - DNA, 50 bp, unidentified
  source 1..50: mol_type = unassigned DNA; note = target_94cf3c6
  misc_feature 1..23: note = LF
  misc_feature 24..25: note = Core
  misc_feature 26..50: note = RF
cacgattcgccgcggggtcgcggctcctacacggatgtggcaatgctgcg

SEQ ID NO: 26212 - DNA, 50 bp, unidentified
  source 1..50: mol_type = unassigned DNA; note = target_94cfd65
  misc_feature 1..24: note = LF
  misc_feature 25: note = Core
  misc_feature 26..50: note = RF
cgccgtcactgacgataagccgacttatcggtaccgattagccgcgtgca

SEQ ID NO: 26213 - DNA, 50 bp, unidentified
  source 1..50: mol_type = unassigned DNA; note = target_94d6184
  misc_feature 1..24: note = LF
  misc_feature 25: note = Core
  misc_feature 26..50: note = RF
tgttacttttttcattgtttttcctgtctccaaaattctctttaaatact

SEQ ID NO: 26214 - DNA, 50 bp, unidentified
  source 1..50: mol_type = unassigned DNA; note = target_94e5517
  misc_feature 1..24: note = LF
  misc_feature 25: note = Core
  misc_feature 26..50: note = RF
ttgcctttgatcagcgaggtaggttgggctgaggcacgaagcccaacact

SEQ ID NO: 26215 - DNA, 50 bp, unidentified
  source 1..50: mol_type = unassigned DNA; note = target_94f2358
  misc_feature 1..23: note = LF
  misc_feature 24..25: note = Core
  misc_feature 26..50: note = RF
aaattgttctaacataaaaaggcctcctatatacgttctaaaagaagttc

SEQ ID NO: 26216 - DNA, 50 bp, unidentified
  source 1..50: mol_type = unassigned DNA; note = target_951b32f
  misc_feature 1..23: note = LF
  misc_feature 24..25: note = Core
  misc_feature 26..50: note = RF
tcactgaatcggggaaaggctctagcactactttggcagaaatgtgattt

SEQ ID NO: 26217 - DNA, 50 bp, unidentified
  source 1..50: mol_type = unassigned DNA; note = target_951ba8e
  misc_feature 1..22: note = LF
  misc_feature 23..25: note = Core
  misc_feature 26..50: note = RF
cttcggcgctgcgcacctcgcaatgacaacaaaatagcgctgtcattgcg

SEQ ID NO: 26218 - DNA, 50 bp, unidentified
  source 1..50: mol_type = unassigned DNA; note = target_9523716
  misc_feature 1..23: note = LF
  misc_feature 24..25: note = Core
  misc_feature 26..50: note = RF
ataaaaaacccgccgaagcgggtttttattgcagttgaagcttacttcac

SEQ ID NO: 26219 - DNA, 50 bp, unidentified
  source 1..50: mol_type = unassigned DNA; note = target_95242a6
  misc_feature 1..23: note = LF
  misc_feature 24..25: note = Core
  misc_feature 26..50: note = RF
tcagacggatttcgcagaaagcagacatcgggtaacttcggcgatgccgt

SEQ ID NO: 26220 - DNA, 50 bp, unidentified
  source 1..50: mol_type = unassigned DNA; note = target_952582e
  misc_feature 1..23: note = LF
  misc_feature 24..25: note = Core
  misc_feature 26..50: note = RF
gttctttgttcaacaaatcttaatttagttaagtttatatccagtccgct

SEQ ID NO: 26221 - DNA, 50 bp, unidentified
  source 1..50: mol_type = unassigned DNA; note = target_9527fd7
  misc_feature 1..23: note = LF
  misc_feature 24..25: note = Core
  misc_feature 26..50: note = RF
ccgccccgccccgctgtggacggctagctcgtgggccggaccaggttcag

SEQ ID NO: 26222 - DNA, 50 bp, unidentified
  source 1..50: mol_type = unassigned DNA; note = target_95294b2
  misc_feature 1..23: note = LF
  misc_feature 24..25: note = Core
  misc_feature 26..50: note = RF
tcgatcgcagcctgcggcagcggctacagggcagtggctaccttgagagc

SEQ ID NO: 26223 - DNA, 50 bp, unidentified
  source 1..50: mol_type = unassigned DNA; note = target_9529ec6
  misc_feature 1..23: note = LF
  misc_feature 24..25: note = Core
  misc_feature 26..50: note = RF
ccaggaaggtcatggtcttccagtggccgtgcggcactttcgctttgatc

SEQ ID NO: 26224 - DNA, 50 bp, unidentified
  source 1..50: mol_type = unassigned DNA; note = target_9534295
  misc_feature 1..23: note = LF
  misc_feature 24..25: note = Core
  misc_feature 26..50: note = RF
gggttccgatcgtctggaaatcgctctagcggaagaccggcacgcttccc

SEQ ID NO: 26225 - DNA, 50 bp, unidentified
  source 1..50: mol_type = unassigned DNA; note = target_955c4b7
  misc_feature 1..23: note = LF
  misc_feature 24..25: note = Core
  misc_feature 26..50: note = RF
cgccatgtccgctttgccccaaaagcggacaaagcgcggacatgtcggga

SEQ ID NO: 26226 - DNA, 50 bp, unidentified
  source 1..50: mol_type = unassigned DNA; note = target_95635bd
  misc_feature 1..23: note = LF
  misc_feature 24..25: note = Core
  misc_feature 26..50: note = RF
gcaaaaatgtacaccagcggtcaacaggccctagtcgcgtggtcttgtaa

SEQ ID NO: 26227 - DNA, 50 bp, unidentified
  source 1..50: mol_type = unassigned DNA; note = target_956e3ad
  misc_feature 1..20: note = LF
  misc_feature 21..25: note = Core
  misc_feature 26..50: note = RF
ccccggcgccgcgcaacccgctcacgccctccgccggcgcgctgctgacc

SEQ ID NO: 26228 - DNA, 50 bp, unidentified
  source 1..50: mol_type = unassigned DNA; note = target_9580ec0
  misc_feature 1..22: note = LF
  misc_feature 23..25: note = Core
  misc_feature 26..50: note = RF
cgccagcgccctcaggctctcttgactatgttgtatcgctcgacggaccg

SEQ ID NO: 26229 - DNA, 50 bp, unidentified
  source 1..50: mol_type = unassigned DNA; note = target_95836a0
  misc_feature 1..21: note = LF
  misc_feature 22..25: note = Core
  misc_feature 26..50: note = RF
gtcgggggtgctcatgcggtggtcccttcgcagtcgtcggtgccgagcgc

SEQ ID NO: 26230 - DNA, 50 bp, unidentified
  source 1..50: mol_type = unassigned DNA; note = target_958aa30
  misc_feature 1..24: note = LF
  misc_feature 25: note = Core
  misc_feature 26..50: note = RF
ccggaggggcctgctgactcgcggcggtaagacgcgccttcgcgaccatc

SEQ ID NO: 26231 - DNA, 50 bp, unidentified
  source 1..50: mol_type = unassigned DNA; note = target_958fcb6
  misc_feature 1..23: note = LF
  misc_feature 24..25: note = Core
  misc_feature 26..50: note = RF
gccgaatcggccagagggctggcctcccacaaaggggaatcgagcatggc

SEQ ID NO: 26232 - DNA, 50 bp, unidentified
  source 1..50: mol_type = unassigned DNA; note = target_9592f8c
  misc_feature 1..23: note = LF
  misc_feature 24..25: note = Core
  misc_feature 26..50: note = RF
gagggactcgaacctccaaccttctgatccgtagatactggacagtggtc

SEQ ID NO: 26233 - DNA, 50 bp, unidentified
  source 1..50: mol_type = unassigned DNA; note = target_959617d
  misc_feature 1..24: note = LF
  misc_feature 25: note = Core
  misc_feature 26..50: note = RF
ggcgtccacaaaggacacagacgacagatcagtgcggttgatcatgccag

SEQ ID NO: 26234 - DNA, 50 bp, unidentified
  source 1..50: mol_type = unassigned DNA; note = target_959fa88
  misc_feature 1..24: note = LF
  misc_feature 25: note = Core
  misc_feature 26..50: note = RF
tgccaaagcaattaattatacacgttgttgtgcttagttttttatccgtt

SEQ ID NO: 26235 - DNA, 50 bp, unidentified
  source 1..50: mol_type = unassigned DNA; note = target_95a4115
  misc_feature 1..21: note = LF
  misc_feature 22..25: note = Core
  misc_feature 26..50: note = RF
gccagggcaacgtgcgctcggctcatgccgcgccatcctgccacgccgcc

SEQ ID NO: 26236 - DNA, 50 bp, unidentified
  source 1..50: mol_type = unassigned DNA; note = target_95a9cab
  misc_feature 1..23: note = LF
  misc_feature 24..25: note = Core
  misc_feature 26..50: note = RF
gtgtacccttcatcgttcacccctggcccgcaggccgttctaggggcgga

SEQ ID NO: 26237 - DNA, 50 bp, unidentified
  source 1..50: mol_type = unassigned DNA; note = target_95ab3bd
  misc_feature 1..24: note = LF
  misc_feature 25: note = Core
  misc_feature 26..50: note = RF
ttcagccgcaatgagctatacacgttgttggcggtagttattcttctgca

SEQ ID NO: 26238 - DNA, 50 bp, unidentified
  source 1..50: mol_type = unassigned DNA; note = target_95b0838
  misc_feature 1..24: note = LF
  misc_feature 25: note = Core
  misc_feature 26..50: note = RF
cggccgcgtcgatctcctcatccttacgacgactggggcctcgagccgct

SEQ ID NO: 26239 - DNA, 50 bp, unidentified
  source 1..50: mol_type = unassigned DNA; note = target_95b76c8
  misc_feature 1..22: note = LF
  misc_feature 23..25: note = Core
  misc_feature 26..50: note = RF
cagtgatcggggacatggttgctcctgtcagtcgtggggtggggcggtgg

SEQ ID NO: 26240 - DNA, 50 bp, unidentified
  source 1..50: mol_type = unassigned DNA; note = target_95bc25f
  misc_feature 1..24: note = LF
  misc_feature 25: note = Core
  misc_feature 26..50: note = RF
gtaattttcaaggcatcgagattacgtttcgtcggcactgaggttacgtt

SEQ ID NO: 26241 - DNA, 50 bp, unidentified
  source 1..50: mol_type = unassigned DNA; note = target_95c913f
  misc_feature 1..23: note = LF
  misc_feature 24..25: note = Core
  misc_feature 26..50: note = RF
atacgaacaagatccccaaaccagacgttagcacttccgtgaatacattt

SEQ ID NO: 26242 - DNA, 50 bp, unidentified
  source 1..50: mol_type = unassigned DNA; note = target_95cbc68
  misc_feature 1..22: note = LF
  misc_feature 23..25: note = Core
  misc_feature 26..50: note = RF
gagcggtccgccaggaccgccccccccccgtctcaccgccgactgcactc

SEQ ID NO: 26243 - DNA, 50 bp, unidentified
  source 1..50: mol_type = unassigned DNA; note = target_95d678a
  misc_feature 1..23: note = LF
  misc_feature 24..25: note = Core
  misc_feature 26..50: note = RF
ggtgaattaaaatttccgtgaaatccgtgaaatccgtgcctaattaattt

SEQ ID NO: 26244 - DNA, 50 bp, unidentified
  source 1..50: mol_type = unassigned DNA; note = target_95e8aa8
  misc_feature 1..24: note = LF
  misc_feature 25: note = Core
  misc_feature 26..50: note = RF
agaggtgtcttggcgaggcctaacgccttgagttcagacgccgccgtagg

SEQ ID NO: 26245 - DNA, 50 bp, unidentified
  source 1..50: mol_type = unassigned DNA; note = target_95eb699
  misc_feature 1..24: note = LF
  misc_feature 25: note = Core
  misc_feature 26..50: note = RF
gattgaagttgctcaaaaccccgtttttcgggaaccagatgacgaataga

SEQ ID NO: 26246 - DNA, 50 bp, unidentified
  source 1..50: mol_type = unassigned DNA; note = target_9608dd3
  misc_feature 1..24: note = LF
  misc_feature 25: note = Core
  misc_feature 26..50: note = RF
atgtttttctcatacgacctaacgtaaagttgaggggcgccgcgcttctg

SEQ ID NO: 26247 - DNA, 50 bp, unidentified
  source 1..50: mol_type = unassigned DNA; note = target_961a931
  misc_feature 1..22: note = LF
  misc_feature 23..25: note = Core
  misc_feature 26..50: note = RF
gggcaaaccaggccgctgcgtgagagagtatgtctctttccatcttcaac

SEQ ID NO: 26248 - DNA, 50 bp, unidentified
  source 1..50: mol_type = unassigned DNA; note = target_962d375
  misc_feature 1..22: note = LF
  misc_feature 23..25: note = Core
  misc_feature 26..50: note = RF
gtcagctcaaggccggttccactgataataccccgacgacatcagaccgc

SEQ ID NO: 26249 - DNA, 50 bp, unidentified
  source 1..50: mol_type = unassigned DNA; note = target_9631d5e
  misc_feature 1..24: note = LF
  misc_feature 25: note = Core
  misc_feature 26..50: note = RF
taatatggtggttatgacccaggctgtgtgaaaactaaaatcacatctgt

SEQ ID NO: 26250 - DNA, 50 bp, unidentified
  source 1..50: mol_type = unassigned DNA; note = target_9635e41
  misc_feature 1..24: note = LF
  misc_feature 25: note = Core
  misc_feature 26..50: note = RF
aaatgccgtaacgtatttcatataatacgcctcaatggataaaaaatcgt

SEQ ID NO: 26251 - DNA, 50 bp, unidentified
  source 1..50: mol_type = unassigned DNA; note = target_963a220
  misc_feature 1..22: note = LF
  misc_feature 23..25: note = Core
  misc_feature 26..50: note = RF
atgcgcccgatgctggttaacgtgacaacaccctgctgtgagcgtcggtc

SEQ ID NO: 26252 - DNA, 50 bp, unidentified
  source 1..50: mol_type = unassigned DNA; note = target_963d267
  misc_feature 1..23: note = LF
  misc_feature 24..25: note = Core
  misc_feature 26..50: note = RF
agcgacggatcacgacgcgtctcctgtggttgttgccactagagtgcgac

SEQ ID NO: 26253 - DNA, 50 bp, unidentified; identical to SEQ ID NO: 20876
  source 1..50: mol_type = unassigned DNA; note = target_964d624
  misc_feature 1..24: note = LF
  misc_feature 25: note = Core
  misc_feature 26..50: note = RF

SEQ ID NO: 26254 - DNA, 50 bp, unidentified
  source 1..50: mol_type = unassigned DNA; note = target_964ee9a
  misc_feature 1..20: note = LF
  misc_feature 21..25: note = Core
  misc_feature 26..50: note = RF
tacggcaccgcctctttcacctgcttgattttcgaccctgtcgaaaattc

SEQ ID NO: 26255 - DNA, 50 bp, unidentified
  source 1..50: mol_type = unassigned DNA; note = target_9653539
  misc_feature 1..23: note = LF
  misc_feature 24..25: note = Core
  misc_feature 26..50: note = RF
gcttgctagcttaggtgcggtggtgggggcctgcgtgcctctaaccatcg

SEQ ID NO: 26256 - DNA, 50 bp, unidentified
  source 1..50: mol_type = unassigned DNA; note = target_96542ea
  misc_feature 1..23: note = LF
  misc_feature 24..25: note = Core
  misc_feature 26..50: note = RF
ggacgccatcttcaactttgtgactttgtgtctccgtgtgaggcaaatcg

SEQ ID NO: 26257 - DNA, 50 bp, unidentified
  source 1..50: mol_type = unassigned DNA; note = target_96584c2
  misc_feature 1..21: note = LF
  misc_feature 22..25: note = Core
  misc_feature 26..50: note = RF
aagtgcgcgtagtcatgatggttcccctccgagttgtgggtggctggacg

SEQ ID NO: 26258 - DNA, 50 bp, unidentified
  source 1..50: mol_type = unassigned DNA; note = target_965aa3b
  misc_feature 1..23: note = LF
  misc_feature 24..25: note = Core
  misc_feature 26..50: note = RF
aattgattttgccatacttactcctttataaaagaaaatccagcatgcat

SEQ ID NO: 26259 - DNA, 50 bp, unidentified
  source 1..50: mol_type = unassigned DNA; note = target_965af99
  misc_feature 1..23: note = LF
  misc_feature 24..25: note = Core
  misc_feature 26..50: note = RF
tttattcggcataaatacacctcctatcccttgattcattctttaaagtt

SEQ ID NO: 26260 - DNA, 50 bp, unidentified
  source 1..50: mol_type = unassigned DNA; note = target_965b8cb
  misc_feature 1..24: note = LF
  misc_feature 25: note = Core
  misc_feature 26..50: note = RF
caatgatgccgcacataggaaattctttccttattgggaatgtgagcctg

SEQ ID NO: 26261 - DNA, 50 bp, unidentified
  source 1..50: mol_type = unassigned DNA; note = target_966bb4f
  misc_feature 1..22: note = LF
  misc_feature 23..25: note = Core
  misc_feature 26..50: note = RF
tcagattgtgcgggacttgttcagaccttccttagagagaccgcgaggtc

SEQ ID NO: 26262 - DNA, 50 bp, unidentified
  source 1..50: mol_type = unassigned DNA; note = target_966f3c2
  misc_feature 1..24: note = LF
  misc_feature 25: note = Core
  misc_feature 26..50: note = RF
ctatggtgagcgggcttgctgtggtgagcgggcttgccccgcgctgggct

SEQ ID NO: 26263 - DNA, 50 bp, unidentified
  source 1..50: mol_type = unassigned DNA; note = target_9677063
  misc_feature 1..23: note = LF
  misc_feature 24..25: note = Core
  misc_feature 26..50: note = RF
gataattgggccttagctgtgagcgtccgctatgcccgaccttgggtggt

SEQ ID NO: 26264 - DNA, 50 bp, unidentified
  source 1..50: mol_type = unassigned DNA; note = target_96786bc
  misc_feature 1..24: note = LF
  misc_feature 25: note = Core
  misc_feature 26..50: note = RF
caaagtgcgatcgcggatgtcggctggggtcacgagcaaccgattgacgg

SEQ ID NO: 26265 - DNA, 50 bp, unidentified
  source 1..50: mol_type = unassigned DNA; note = target_967c37d
  misc_feature 1..23: note = LF
  misc_feature 24..25: note = Core
  misc_feature 26..50: note = RF
attgccacgcaaatgtctgaaattgggtggttagcggaatgtctggtttc

SEQ ID NO: 26266 - DNA, 50 bp, unidentified
  source 1..50: mol_type = unassigned DNA; note = target_9690386
  misc_feature 1..23: note = LF
  misc_feature 24..25: note = Core
  misc_feature 26..50: note = RF
gcagaagtttgtttcttgtagcccggctaagcgcagcgcgagccggggcg

SEQ ID NO: 26267 - DNA, 50 bp, unidentified
  source 1..50: mol_type = unassigned DNA; note = target_9695167
  misc_feature 1..23: note = LF
  misc_feature 24..25: note = Core
  misc_feature 26..50: note = RF
taaatttttcattaatatatctccttatataattgttatctaaaaaattg

SEQ ID NO: 26268 - DNA, 50 bp, unidentified
  source 1..50: mol_type = unassigned DNA; note = target_96983e9
  misc_feature 1..24: note = LF
  misc_feature 25: note = Core
  misc_feature 26..50: note = RF
cggatagttgcaatgggtcggaagcggaagttcaggaataacgcctcgca

SEQ ID NO: 26269 - DNA, 50 bp, unidentified
  source 1..50: mol_type = unassigned DNA; note = target_96a96ac
  misc_feature 1..23: note = LF
  misc_feature 24..25: note = Core
  misc_feature 26..50: note = RF
cttgtcttcattatggtttcctccttattttatcgttacgtttccaaatc

SEQ ID NO: 26270 - DNA, 50 bp, unidentified
  source 1..50: mol_type = unassigned DNA; note = target_96a9d6d
  misc_feature 1..24: note = LF
  misc_feature 25: note = Core
  misc_feature 26..50: note = RF
tccatagaactcctggcttttctctttttagacatcgatgtctccattgg

SEQ ID NO: 26271 - DNA, 50 bp, unidentified
  source 1..50: mol_type = unassigned DNA; note = target_96b3fc3
  misc_feature 1..23: note = LF
  misc_feature 24..25: note = Core
  misc_feature 26..50: note = RF
gaagatatggggccggatgccgcctaacgcccgagttagcctgcgaacga

SEQ ID NO: 26272 - DNA, 50 bp, unidentified
  source 1..50: mol_type = unassigned DNA; note = target_96b5f4f
  misc_feature 1..23: note = LF
  misc_feature 24..25: note = Core
  misc_feature 26..50: note = RF
cccagctatcgctgcccctggcccttcattctgcgtaagtggtggaaaac

SEQ ID NO: 26273 - DNA, 50 bp, unidentified
  source 1..50: mol_type = unassigned DNA; note = target_96b62a0
  misc_feature 1..23: note = LF
  misc_feature 24..25: note = Core
  misc_feature 26..50: note = RF
ctacgaccgcttacgacccaagtcggatgtttcgcagattttccgctcat

SEQ ID NO: 26274 - DNA, 50 bp, unidentified
  source 1..50: mol_type = unassigned DNA; note = target_96ba20c
  misc_feature 1..23: note = LF
  misc_feature 24..25: note = Core
  misc_feature 26..50: note = RF
caggccaagccgggccacttctcagtggaaatcaacacccgtcccagata

SEQ ID NO: 26275 - DNA, 50 bp, unidentified
  source 1..50: mol_type = unassigned DNA; note = target_96c4ded
  misc_feature 1..23: note = LF
  misc_feature 24..25: note = Core
  misc_feature 26..50: note = RF
gagctttctatccatggctcctccttaatataattcttgaaacgcctgag

SEQ ID NO: 26276 - DNA, 50 bp, unidentified
  source 1..50: mol_type = unassigned DNA; note = target_96c76b3
  misc_feature 1..23: note = LF
  misc_feature 24..25: note = Core
  misc_feature 26..50: note = RF
catctggtcaggcattccggctttgttgcacaacccggctgatggccgag

SEQ ID NO: 26277 - DNA, 50 bp, unidentified
  source 1..50: mol_type = unassigned DNA; note = target_96c803d
  misc_feature 1..23: note = LF
  misc_feature 24..25: note = Core
  misc_feature 26..50: note = RF
tacatattctatgacgataaaacctccttgtctaattgtcatttaagctt

SEQ ID NO: 26278 - DNA, 50 bp, unidentified
  source 1..50: mol_type = unassigned DNA; note = target_96d0aaa
  misc_feature 1..23: note = LF
  misc_feature 24..25: note = Core
  misc_feature 26..50: note = RF
cgatgcagaatgatcgaaaaccgctctagcaccgagttttccgatgaaca

SEQ ID NO: 26279 - DNA, 50 bp, unidentified
  source 1..50: mol_type = unassigned DNA; note = target_96f8bdb
  misc_feature 1..24: note = LF
  misc_feature 25: note = Core
  misc_feature 26..50: note = RF
cgacgttaatgccggtgacggtactgacaagttaactcaccctgagcgat

SEQ ID NO: 26280 - DNA, 50 bp, unidentified; identical to SEQ ID NO: 25274
  source 1..50: mol_type = unassigned DNA; note = target_96fb744
  misc_feature 1..23: note = LF
  misc_feature 24..25: note = Core
  misc_feature 26..50: note = RF

SEQ ID NO: 26281 - DNA, 50 bp, unidentified
  source 1..50: mol_type = unassigned DNA; note = target_96fc12f
  misc_feature 1..23: note = LF
  misc_feature 24..25: note = Core
  misc_feature 26..50: note = RF
cctagagcgattgcggttacgtgtaggagctggcgaagcctgcgtccggc

SEQ ID NO: 26282 - DNA, 50 bp, unidentified
  source 1..50: mol_type = unassigned DNA; note = target_97024a7
  misc_feature 1..23: note = LF
  misc_feature 24..25: note = Core
  misc_feature 26..50: note = RF
tgcccatacggctgcaacagggcaggggagggggcatttcagagcccgga

SEQ ID NO: 26283 - DNA, 50 bp, unidentified
  source 1..50: mol_type = unassigned DNA; note = target_970c685
  misc_feature 1..23: note = LF
  misc_feature 24..25: note = Core
  misc_feature 26..50: note = RF
cgtgggcgcgggagcgcccaccctacggttcactgccgtttacgccacgc

SEQ ID NO: 26284 - DNA, 50 bp, unidentified
  source 1..50: mol_type = unassigned DNA; note = target_970c7f8
  misc_feature 1..22: note = LF
  misc_feature 23..25: note = Core
  misc_feature 26..50: note = RF
ctctttcaattggaagatgacgtgagaccccaaaactcctccaaaattgg

SEQ ID NO: 26285 - DNA, 50 bp, unidentified
  source 1..50: mol_type = unassigned DNA; note = target_970cf64
  misc_feature 1..23: note = LF
  misc_feature 24..25: note = Core
  misc_feature 26..50: note = RF
agatgttcttcaaaaccacccctctcattgagatatgaatattcacctga

SEQ ID NO: 26286 - DNA, 50 bp, unidentified
  source 1..50: mol_type = unassigned DNA; note = target_9712cb4
  misc_feature 1..24: note = LF
  misc_feature 25: note = Core
  misc_feature 26..50: note = RF
gtcgtactgcccctgaatcgggatttcgagaaagaagtgtccggtagagc

SEQ ID NO: 26287 - DNA, 50 bp, unidentified
  source 1..50: mol_type = unassigned DNA; note = target_9719f99
  misc_feature 1..24: note = LF
  misc_feature 25: note = Core
  misc_feature 26..50: note = RF
gaacgccgaattcgcgggcaagccctacaagaaattcttatcgaagccgc

SEQ ID NO: 26288 - DNA, 50 bp, unidentified
  source 1..50: mol_type = unassigned DNA; note = target_9725171
  misc_feature 1..23: note = LF
  misc_feature 24..25: note = Core
  misc_feature 26..50: note = RF
cggcgttcgccaccgccggagcctgtcctcgggccggccgaaggccggac

SEQ ID NO: 26289 - DNA, 50 bp, unidentified
  source 1..50: mol_type = unassigned DNA; note = target_972ac3c
  misc_feature 1..23: note = LF
  misc_feature 24..25: note = Core
  misc_feature 26..50: note = RF
cccccctcattcctccccttcccctcttttccaaagaggggttagagtcc

SEQ ID NO: 26290 - DNA, 50 bp, unidentified
  source 1..50: mol_type = unassigned DNA; note = target_9733fe0
  misc_feature 1..22: note = LF
  misc_feature 23..25: note = Core
  misc_feature 26..50: note = RF
aattgcgtcataaacatgtctccttaataatttttattatttcttaataa

SEQ ID NO: 26291 - DNA, 50 bp, unidentified
  source 1..50: mol_type = unassigned DNA; note = target_9735b72
  misc_feature 1..23: note = LF
  misc_feature 24..25: note = Core
  misc_feature 26..50: note = RF
ttttcttggcatttgcgatcatcctttcaagataaaatggagtctttatc

SEQ ID NO: 26292 - DNA, 50 bp, unidentified
  source 1..50: mol_type = unassigned DNA; note = target_9739288
  misc_feature 1..23: note = LF
  misc_feature 24..25: note = Core
  misc_feature 26..50: note = RF
ataattttttcattttattcctcctaaatatatttaaaaatgttactttc

SEQ ID NO: 26293 - DNA, 50 bp, unidentified
  source 1..50: mol_type = unassigned DNA; note = target_973940f
  misc_feature 1..23: note = LF
  misc_feature 24..25: note = Core
  misc_feature 26..50: note = RF
tcaatttgcgcaacttattgtaccttatctgaaagcagtcaagacccctt

SEQ ID NO: 26294 - DNA, 50 bp, unidentified
  source 1..50: mol_type = unassigned DNA; note = target_97433b1
  misc_feature 1..23: note = LF
  misc_feature 24..25: note = Core
  misc_feature 26..50: note = RF
tcgttatgggttgccctgggctctgttgcgaaattcaggcttgtggcgtg

SEQ ID NO: 26295 - DNA, 50 bp, unidentified
  source 1..50: mol_type = unassigned DNA; note = target_9743418
  misc_feature 1..22: note = LF
  misc_feature 23..25: note = Core
  misc_feature 26..50: note = RF
cggagacaagttgcgattagactgacagcactcagtcgtgatttgctgct

SEQ ID NO: 26296 - DNA, 50 bp, unidentified
  source 1..50: mol_type = unassigned DNA; note = target_9743f29
  misc_feature 1..23: note = LF
  misc_feature 24..25: note = Core
  misc_feature 26..50: note = RF
gcaaccggcttagcgtgctttatttccgttttctgaggcgacccctatct

SEQ ID NO: 26297 - DNA, 50 bp, unidentified
  source 1..50: mol_type = unassigned DNA; note = target_9767d23
  misc_feature 1..24: note = LF
  misc_feature 25: note = Core
  misc_feature 26..50: note = RF
ggtgtgcccctcgatggacgcccccactcccccgttccgcgctcgtccgc

SEQ ID NO: 26298 - DNA, 50 bp, unidentified
  source 1..50: mol_type = unassigned DNA; note = target_9774a84
  misc_feature 1..23: note = LF
  misc_feature 24..25: note = Core
  misc_feature 26..50: note = RF
atatactaggaaagagaactttcctagtatataaaaaatgcgtttcaaag

SEQ ID NO: 26299 - DNA, 50 bp, unidentified
  source 1..50: mol_type = unassigned DNA; note = target_97763e7
  misc_feature 1..22: note = LF
  misc_feature 23..25: note = Core
  misc_feature 26..50: note = RF
ttgcgtgctctatttggtaatgtgacagtgccgataaagtcgctgcctga

SEQ ID NO: 26300 - DNA, 50 bp, unidentified
  source 1..50: mol_type = unassigned DNA; note = target_97a1675
  misc_feature 1..23: note = LF
  misc_feature 24..25: note = Core
  misc_feature 26..50: note = RF
ttttacacggctgtctggcatacctacaggccgcttgcgggcgttgctga

SEQ ID NO: 26301 - DNA, 50 bp, unidentified
  source 1..50: mol_type = unassigned DNA; note = target_97a82c0
  misc_feature 1..23: note = LF
  misc_feature 24..25: note = Core
  misc_feature 26..50: note = RF
ctttcctggattccggcctgcgccgggatgacggttgtctggtcttaagt

SEQ ID NO: 26302 - DNA, 50 bp, unidentified
  source 1..50: mol_type = unassigned DNA; note = target_97a9d5b
  misc_feature 1..23: note = LF
  misc_feature 24..25: note = Core
  misc_feature 26..50: note = RF
tgtcgcccaggcttcatcgagcgtgagcacccgtcgaccgacaagttgcc

SEQ ID NO: 26303 - DNA, 50 bp, unidentified
  source 1..50: mol_type = unassigned DNA; note = target_97ab92a
  misc_feature 1..23: note = LF
  misc_feature 24..25: note = Core
  misc_feature 26..50: note = RF
catgagtcagagaaaaactgatttgggaatccctctaccctatacttggc

SEQ ID NO: 26304 - DNA, 50 bp, unidentified
  source 1..50: mol_type = unassigned DNA; note = target_97b0f9e
  misc_feature 1..24: note = LF
  misc_feature 25: note = Core
  misc_feature 26..50: note = RF
gtctggctgaaaagcacggattacttccgagtaggcgaccaaccgctcag

SEQ ID NO: 26305 - DNA, 50 bp, unidentified
  source 1..50: mol_type = unassigned DNA; note = target_97c1045
  misc_feature 1..24: note = LF
  misc_feature 25: note = Core
  misc_feature 26..50: note = RF
ttctcgtaaaccagccagtgtagatgcggcagcgtacgttgatggcatgg

SEQ ID NO: 26306 - DNA, 50 bp, unidentified
  source 1..50: mol_type = unassigned DNA; note = target_97c7e1c
  misc_feature 1..23: note = LF
  misc_feature 24..25: note = Core
  misc_feature 26..50: note = RF
actgacgtttaacgacccccacgctcactggggctccttggcgctgcgca

SEQ ID NO: 26307 - DNA, 50 bp, unidentified
  source 1..50: mol_type = unassigned DNA; note = target_97cc6b9
  misc_feature 1..24: note = LF
  misc_feature 25: note = Core
  misc_feature 26..50: note = RF
gtcttactacgaagcacacttcgacaggctctgtgtgacggggaattcga

SEQ ID NO: 26308 - DNA, 50 bp, unidentified
  source 1..50: mol_type = unassigned DNA; note = target_97d1689
  misc_feature 1..23: note = LF
  misc_feature 24..25: note = Core
  misc_feature 26..50: note = RF
tgtttatcataatccatatttacctctattgctacataaatatatattat

SEQ ID NO: 26309 - DNA, 50 bp, unidentified
  source 1..50: mol_type = unassigned DNA; note = target_97e5e3a
  misc_feature 1..23: note = LF
  misc_feature 24..25: note = Core
  misc_feature 26..50: note = RF
aagcatcgcccgcgagcgggctcctaccgtccgtgcgcctttcttgcccc

SEQ ID NO: 26310 - DNA, 50 bp, unidentified
  source 1..50: mol_type = unassigned DNA; note = target_97e9534
  misc_feature 1..24: note = LF
  misc_feature 25: note = Core
  misc_feature 26..50: note = RF
cgcgccatcggggacccggaccgccgatctgttctggaacaagcccttcg

SEQ ID NO: 26311 - DNA, 50 bp, unidentified
  source 1..50: mol_type = unassigned DNA; note = target_97f83eb
  misc_feature 1..23: note = LF
  misc_feature 24..25: note = Core
  misc_feature 26..50: note = RF
ttttcggcctcagcaggcagcggcttccagttccaggggagtaaattggc

SEQ ID NO: 26312 - DNA, 50 bp, unidentified
  source 1..50: mol_type = unassigned DNA; note = target_97f9cf9
  misc_feature 1..24: note = LF
  misc_feature 25: note = Core
  misc_feature 26..50: note = RF
cggaattatgccttgaaaggtcgctatcggggcattgcggacatggctgg

SEQ ID NO: 26313 - DNA, 50 bp, unidentified
  source 1..50: mol_type = unassigned DNA; note = target_9800c86
  misc_feature 1..23: note = LF
  misc_feature 24..25: note = Core
  misc_feature 26..50: note = RF
tttgggcgtgaggacacgcacctctacaccttcacgatacgagcgttcta

SEQ ID NO: 26314 - DNA, 50 bp, unidentified
  source 1..50: mol_type = unassigned DNA; note = target_98044b9
  misc_feature 1..21: note = LF
  misc_feature 22..25: note = Core
  misc_feature 26..50: note = RF
gggatcgaggtgaggtgctgtctcatggacccagcatcacctctacccgc

SEQ ID NO: 26315 - DNA, 50 bp, unidentified
  source 1..50: mol_type = unassigned DNA; note = target_9811975
  misc_feature 1..24: note = LF
  misc_feature 25: note = Core
  misc_feature 26..50: note = RF
tgcaattagttgcacgccgacacgcggatttccagtcccgacccgaaggc

SEQ ID NO: 26316 - DNA, 50 bp, unidentified
  source 1..50: mol_type = unassigned DNA; note = target_9813d3c
  misc_feature 1..24: note = LF
  misc_feature 25: note = Core
  misc_feature 26..50: note = RF
cgcgcgccccaacaacaactggagagacaaaaatggaagtcagcgaaaaa

SEQ ID NO: 26317 - DNA, 50 bp, unidentified
  source 1..50: mol_type = unassigned DNA; note = target_98147aa
  misc_feature 1..23: note = LF
  misc_feature 24..25: note = Core
  misc_feature 26..50: note = RF
tcacaagcgggcactttctaaactgggttgcgaccaacgctctatcctgt

SEQ ID NO: 26318 - DNA, 50 bp, unidentified
  source 1..50: mol_type = unassigned DNA; note = target_9821588
  misc_feature 1..24: note = LF
  misc_feature 25: note = Core
  misc_feature 26..50: note = RF
gtgaacgatccctacgagatcgccccccccggagtcctcaacaacaaata

SEQ ID NO: 26319 - DNA, 50 bp, unidentified
  source 1..50: mol_type = unassigned DNA; note = target_982f06a
  misc_feature 1..23: note = LF
  misc_feature 24..25: note = Core
  misc_feature 26..50: note = RF
ccagcgtgatgaactcgcggcgcctcactcgatcacctcgtcggcgcggg

SEQ ID NO: 26320 - DNA, 50 bp, unidentified
  source 1..50: mol_type = unassigned DNA; note = target_9830376
  misc_feature 1..23: note = LF
  misc_feature 24..25: note = Core
  misc_feature 26..50: note = RF
cccggcctgcggatgttgtaggccgggtaaggcgaagccgccacccggca

SEQ ID NO: 26321 - DNA, 50 bp, unidentified
  source 1..50: mol_type = unassigned DNA; note = target_9830fb7
  misc_feature 1..22: note = LF
  misc_feature 23..25: note = Core
  misc_feature 26..50: note = RF
atcgttatagcaagaaataatcgttcgaacaaagtgagataagaacccgt

SEQ ID NO: 26322 - DNA, 50 bp, unidentified
  source 1..50: mol_type = unassigned DNA; note = target_9841423
  misc_feature 1..23: note = LF
  misc_feature 24..25: note = Core
  misc_feature 26..50: note = RF
caacgcgctggagcaggaaaaggcttcaaggccagttccgagacggcgaa

SEQ ID NO: 26323 - DNA, 50 bp, unidentified
  source 1..50: mol_type = unassigned DNA; note = target_984a25d
  misc_feature 1..24: note = LF
  misc_feature 25: note = Core
  misc_feature 26..50: note = RF
gtggctgcaacgtccgctcatcggcagatccggtcgacttcagtgggggg

SEQ ID NO: 26324 - DNA, 50 bp, unidentified
  source 1..50: mol_type = unassigned DNA; note = target_98567d5
  misc_feature 1..22: note = LF
  misc_feature 23..25: note = Core
  misc_feature 26..50: note = RF
agcaaatataaattaacattgtcattccgatgaaagaggaatctcctacg

SEQ ID NO: 26325 - DNA, 50 bp, unidentified
  source 1..50: mol_type = unassigned DNA; note = target_985cb87
  misc_feature 1..22: note = LF
  misc_feature 23..25: note = Core
  misc_feature 26..50: note = RF
gaaaggttgcatgcatcttctccttgctttcatgagaggcggaggcgtga

SEQ ID NO: 26326 - DNA, 50 bp, unidentified
  source 1..50: mol_type = unassigned DNA; note = target_9861db8
  misc_feature 1..22: note = LF
  misc_feature 23..25: note = Core
  misc_feature 26..50: note = RF
cagctcgatgctggaatttcgccccccgtcgctcagggacgccagcaggg

SEQ ID NO: 26327 - DNA, 50 bp, unidentified
  source 1..50: mol_type = unassigned DNA; note = target_9865669
  misc_feature 1..21: note = LF
  misc_feature 22..25: note = Core
  misc_feature 26..50: note = RF
ccttcgggccattcccggatgctcatgcgctgtgcttctaaggataggtg

SEQ ID NO: 26328 - DNA, 50 bp, unidentified
  source 1..50: mol_type = unassigned DNA; note = target_986f31d
  misc_feature 1..23: note = LF
  misc_feature 24..25: note = Core
  misc_feature 26..50: note = RF
cagaaaatgccgctcgcgactaaagtttttaatcgcacaaaacgacttat

SEQ ID NO: 26329 - DNA, 50 bp, unidentified
  source 1..50: mol_type = unassigned DNA; note = target_9881aee
  misc_feature 1..24: note = LF
  misc_feature 25: note = Core
  misc_feature 26..50: note = RF
ttgctcgattgcatggccagtcttttttttgcgcgtcatgccccggcgca

SEQ ID NO: 26330 - DNA, 50 bp, unidentified
  source 1..50: mol_type = unassigned DNA; note = target_9888471
  misc_feature 1..23: note = LF
  misc_feature 24..25: note = Core
  misc_feature 26..50: note = RF
taaaaatgtaggcgacaactatcctgacatagggggttattcagtgatcc

SEQ ID NO: 26331 - DNA, 50 bp, unidentified
  source 1..50: mol_type = unassigned DNA; note = target_988ad2e
  misc_feature 1..24: note = LF
  misc_feature 25: note = Core
  misc_feature 26..50: note = RF
gcgggcaccgtggctggtgtctgccacccccctggcatggaaggttgaag

SEQ ID NO: 26332 - DNA, 50 bp, unidentified
  source 1..50: mol_type = unassigned DNA; note = target_9892e6c
  misc_feature 1..21: note = LF
  misc_feature 22..25: note = Core
  misc_feature 26..50: note = RF
gcgggttgcgttcatgtgttcgtccttcgctgcgcatatccgattcgcgt

SEQ ID NO: 26333 - DNA, 50 bp, unidentified
  source 1..50: mol_type = unassigned DNA; note = target_989a3d0
  misc_feature 1..23: note = LF
  misc_feature 24..25: note = Core
  misc_feature 26..50: note = RF
aaatgttgcctagttgcgtaggttgggctgaggcacgaagcccaatcttg

SEQ ID NO: 26334 - DNA, 50 bp, unidentified
  source 1..50: mol_type = unassigned DNA; note = target_989cb31
  misc_feature 1..23: note = LF
  misc_feature 24..25: note = Core
  misc_feature 26..50: note = RF
ttctgttttcttgtgatttcatcctacaggtcgagagtacgggggagtat

SEQ ID NO: 26335 - DNA, 50 bp, unidentified
  source 1..50: mol_type = unassigned DNA; note = target_98a0f2b
  misc_feature 1..24: note = LF
  misc_feature 25: note = Core
  misc_feature 26..50: note = RF
gcccttcgccggtcctttctcgtctttttgacagcacatcctgcagcatc

SEQ ID NO: 26336 - DNA, 50 bp, unidentified
  source 1..50: mol_type = unassigned DNA; note = target_98a5194
  misc_feature 1..24: note = LF
  misc_feature 25: note = Core
  misc_feature 26..50: note = RF
tgccgatggaattttctccatcctctttataaagtactgcacaatgaatg

SEQ ID NO: 26337 - DNA, 50 bp, unidentified
  source 1..50: mol_type = unassigned DNA; note = target_98a5db0
  misc_feature 1..24: note = LF
  misc_feature 25: note = Core
  misc_feature 26..50: note = RF
atcggcattccgcgcggaaagcggcatgtgcggacgatgctggcaggcat

SEQ ID NO: 26338 - DNA, 50 bp, unidentified
  source 1..50: mol_type = unassigned DNA; note = target_98a801c
  misc_feature 1..24: note = LF
  misc_feature 25: note = Core
  misc_feature 26..50: note = RF
tatccgagttgccctcagtagaagcggacgttcgaatctgctgtgatccg

SEQ ID NO: 26339 - DNA, 50 bp, unidentified
  source 1..50: mol_type = unassigned DNA; note = target_98bd658
  misc_feature 1..23: note = LF
  misc_feature 24..25: note = Core
  misc_feature 26..50: note = RF
tgtaatagttacagtctgacttcctccccgccctaaacggtagacccaaa

SEQ ID NO: 26340 - DNA, 50 bp, unidentified
  source 1..50: mol_type = unassigned DNA; note = target_98bee5a
  misc_feature 1..23: note = LF
  misc_feature 24..25: note = Core
  misc_feature 26..50: note = RF
atatcttccgcacataatatcacctcacttgcatttaatatttaatattt

SEQ ID NO: 26341 - DNA, 50 bp, unidentified
  source 1..50: mol_type = unassigned DNA; note = target_98c5316
  misc_feature 1..23: note = LF
  misc_feature 24..25: note = Core
  misc_feature 26..50: note = RF
ttcgtcaccgcctgcggcggttccttcagattccctcgggcgcatcgagg

SEQ ID NO: 26342 - DNA, 50 bp, unidentified
  source 1..50: mol_type = unassigned DNA; note = target_98c7769
  misc_feature 1..23: note = LF
  misc_feature 24..25: note = Core
  misc_feature 26..50: note = RF
cccagtgtgcctccaacctccgacacccctagaggtgcgctgcgtcctcg

SEQ ID NO: 26343 - DNA, 50 bp, unidentified
  source 1..50: mol_type = unassigned DNA; note = target_98c9783
  misc_feature 1..23: note = LF
  misc_feature 24..25: note = Core
  misc_feature 26..50: note = RF
tcatccggcgggtccgtcgggcgctcacgtccgcacaccccagcgggagc

SEQ ID NO: 26344 - DNA, 50 bp, unidentified
  source 1..50: mol_type = unassigned DNA; note = target_98ca738
  misc_feature 1..24: note = LF
  misc_feature 25: note = Core
  misc_feature 26..50: note = RF
gacaggcttggggtagagatagacttttcgactttgacgtcgggtcgcat

SEQ ID NO: 26345 - DNA, 50 bp, unidentified; identical to SEQ ID NO: 21190
  source 1..50: mol_type = unassigned DNA; note = target_98caafc
  misc_feature 1..22: note = LF
  misc_feature 23..25: note = Core
  misc_feature 26..50: note = RF

SEQ ID NO: 26346 - DNA, 50 bp, unidentified
  source 1..50: mol_type = unassigned DNA; note = target_98ccd45
  misc_feature 1..24: note = LF
  misc_feature 25: note = Core
  misc_feature 26..50: note = RF
tgtatgaccttgttatgcaacgagaggagaggtatatatgatagacccca

SEQ ID NO: 26347 - DNA, 50 bp, unidentified
  source 1..50: mol_type = unassigned DNA; note = target_98d289a
  misc_feature 1..24: note = LF
  misc_feature 25: note = Core
  misc_feature 26..50: note = RF
gctcgacggtgccgcgctcgcccccacccctgcaagccgtgacagttcgt

SEQ ID NO: 26348 - DNA, 50 bp, unidentified
  source 1..50: mol_type = unassigned DNA; note = target_98e610c
  misc_feature 1..24: note = LF
  misc_feature 25: note = Core
  misc_feature 26..50: note = RF
aagtttttaaacgcctttccagatattcctaaccatgaacttattaatac

SEQ ID NO: 26349 - DNA, 50 bp, unidentified
  source 1..50: mol_type = unassigned DNA; note = target_98e9e1e
  misc_feature 1..23: note = LF
  misc_feature 24..25: note = Core
  misc_feature 26..50: note = RF
cggtcttgcggcccattgcgcaactcactgcgcgcccttcggccgctccg

SEQ ID NO: 26350 - DNA, 50 bp, unidentified
  source 1..50: mol_type = unassigned DNA; note = target_98ea1b6
  misc_feature 1..24: note = LF
  misc_feature 25: note = Core
  misc_feature 26..50: note = RF
gtgattcgtgtgcggcttccttcccccccctcctagcgacgcggcataat

SEQ ID NO: 26351 - DNA, 50 bp, unidentified
  source 1..50: mol_type = unassigned DNA; note = target_98ed697
  misc_feature 1..23: note = LF
  misc_feature 24..25: note = Core
  misc_feature 26..50: note = RF
atgggcctgtcggctgtcagtcctcgtcggcgaggatcagatacagcttc

SEQ ID NO: 26352 - DNA, 50 bp, unidentified
  source 1..50: mol_type = unassigned DNA; note = target_98f91c5
  misc_feature 1..23: note = LF
  misc_feature 24..25: note = Core
  misc_feature 26..50: note = RF
tttgccataaagtttcctccattcttttttgtctgcttgttttcaggcaa

SEQ ID NO: 26353 - DNA, 50 bp, unidentified
  source 1..50: mol_type = unassigned DNA; note = target_98fd0da
  misc_feature 1..21: note = LF
  misc_feature 22..25: note = Core
  misc_feature 26..50: note = RF
tattgatataccatacctcctactatttataagtatttacaaattgtgga

SEQ ID NO: 26354 - DNA, 50 bp, unidentified
  source 1..50: mol_type = unassigned DNA; note = target_99006af
  misc_feature 1..24: note = LF
  misc_feature 25: note = Core
  misc_feature 26..50: note = RF
agatcaggcttgccaaacagggggcatccacacacgtcatggcaaaaaag

SEQ ID NO: 26355 - DNA, 50 bp, unidentified
  source 1..50: mol_type = unassigned DNA; note = target_9902579
  misc_feature 1..23: note = LF
  misc_feature 24..25: note = Core
  misc_feature 26..50: note = RF
tgtccgacagcccactcatgctgtcctcctggtcgatgtgttgaactccg

SEQ ID NO: 26356 - DNA, 50 bp, unidentified
  source 1..50: mol_type = unassigned DNA; note = target_990e44e
  misc_feature 1..24: note = LF
  misc_feature 25: note = Core
  misc_feature 26..50: note = RF
cgtggggagtttgtgccgcctaacgtcccggctaacgcgccgcccgcttg

SEQ ID NO: 26357 - DNA, 50 bp, unidentified
  source 1..50: mol_type = unassigned DNA; note = target_990f062
  misc_feature 1..23: note = LF
  misc_feature 24..25: note = Core
  misc_feature 26..50: note = RF
ctcgtttccatcacgcttcctttcttcgttataaaatgatttccttttcc

SEQ ID NO: 26358 - DNA, 50 bp, unidentified
  source 1..50: mol_type = unassigned DNA; note = target_991004a
  misc_feature 1..23: note = LF
  misc_feature 24..25: note = Core
  misc_feature 26..50: note = RF
ccgggaagttcggccgcagcgccctcacagcaggtggatcccgaggccgc

SEQ ID NO: 26359 - DNA, 50 bp, unidentified
  source 1..50: mol_type = unassigned DNA; note = target_9915b6f
  misc_feature 1..22: note = LF
  misc_feature 23..25: note = Core
  misc_feature 26..50: note = RF
tggtagatagcaaaaagatttgtctcacaaagaatcagcaccatatgtct

SEQ ID NO: 26360 - DNA, 50 bp, unidentified
  source 1..50: mol_type = unassigned DNA; note = target_9916947
  misc_feature 1..24: note = LF
  misc_feature 25: note = Core
  misc_feature 26..50: note = RF
acgcgccgactggcggcggtgtgacgcgccgtgactgccagctggacaaa

SEQ ID NO: 26361 - DNA, 50 bp, unidentified
  source 1..50: mol_type = unassigned DNA; note = target_9919a0a
  misc_feature 1..22: note = LF
  misc_feature 23..25: note = Core
  misc_feature 26..50: note = RF
cgagcgatacagcatagtcaagagagcctgagagctctggcggaacgcca

SEQ ID NO: 26362 - DNA, 50 bp, unidentified
  source 1..50: mol_type = unassigned DNA; note = target_993cc32
  misc_feature 1..23: note = LF
  misc_feature 24..25: note = Core
  misc_feature 26..50: note = RF
ccgcgtcgaccgcggtcgtcatgttgtcgtaaatcccgcgacgacaggcc

SEQ ID NO: 26363 - DNA, 50 bp, unidentified
  source 1..50: mol_type = unassigned DNA; note = target_993f75e
  misc_feature 1..24: note = LF
  misc_feature 25: note = Core
  misc_feature 26..50: note = RF
atcatgcataaccaaagcgcacgtcacccgcgcgtgctgtgccgcaacat

SEQ ID NO: 26364 - DNA, 50 bp, unidentified
  source 1..50: mol_type = unassigned DNA; note = target_993ffb0
  misc_feature 1..24: note = LF
  misc_feature 25: note = Core
  misc_feature 26..50: note = RF
gccgtgtcgctgatcgatcgaggcatggttcttgtagccgaagatgggaa

SEQ ID NO: 26365 - DNA, 50 bp, unidentified
  source 1..50: mol_type = unassigned DNA; note = target_9940866
  misc_feature 1..23: note = LF
  misc_feature 24..25: note = Core
  misc_feature 26..50: note = RF
tcggaatttagaaccctcttatgcttcttttatgatctaaattattttta

SEQ ID NO: 26366 - DNA, 50 bp, unidentified
  source 1..50: mol_type = unassigned DNA; note = target_9954466
  misc_feature 1..23: note = LF
  misc_feature 24..25: note = Core
  misc_feature 26..50: note = RF
atcgacacattctcatccatcccctacttaatttaatagtatatacctat

SEQ ID NO: 26367 - DNA, 50 bp, unidentified
  source 1..50: mol_type = unassigned DNA; note = target_9954a54
  misc_feature 1..24: note = LF
  misc_feature 25: note = Core
  misc_feature 26..50: note = RF
gcaaccggcccgcccgctcagcggcagatgtacggccgagcaggattcgc

SEQ ID NO: 26368 - DNA, 50 bp, unidentified
  source 1..50: mol_type = unassigned DNA; note = target_995a692
  misc_feature 1..23: note = LF
  misc_feature 24..25: note = Core
  misc_feature 26..50: note = RF
tcgttaaactgtcaatcgaattaattcctaaccatcaaggataacttttt

SEQ ID NO: 26369 - DNA, 50 bp, unidentified
  source 1..50: mol_type = unassigned DNA; note = target_9968492
  misc_feature 1..23: note = LF
  misc_feature 24..25: note = Core
  misc_feature 26..50: note = RF
tacatggacgtacgactccagggatggaggacgactgcagggatgcagga

SEQ ID NO: 26370 - DNA, 50 bp, unidentified
  source 1..50: mol_type = unassigned DNA; note = target_997ce60
  misc_feature 1..22: note = LF
  misc_feature 23..25: note = Core
  misc_feature 26..50: note = RF
aactcaatcgctacgcagtgaatgacccagaacgggcatcaagcggaatt

SEQ ID NO: 26371 - DNA, 50 bp, unidentified
  source 1..50: mol_type = unassigned DNA; note = target_9984ea5
  misc_feature 1..23: note = LF
  misc_feature 24..25: note = Core
  misc_feature 26..50: note = RF
tggacgtgcgcaggtgcgtccaatgctcggcgggaaaatccaagagcgtc

SEQ ID NO: 26372 - DNA, 50 bp, unidentified
  source 1..50: mol_type = unassigned DNA; note = target_998dd1d
  misc_feature 1..22: note = LF
  misc_feature 23..25: note = Core
  misc_feature 26..50: note = RF
gcgcaagcgtcccctgaagatgtgacaatgcccgcgacgggtctcagccg

SEQ ID NO: 26373 - DNA, 50 bp, unidentified
  source 1..50: mol_type = unassigned DNA; note = target_99a5ed3
  misc_feature 1..23: note = LF
  misc_feature 24..25: note = Core
  misc_feature 26..50: note = RF
tcagacgccgagggtaaatagggtcaggtctttcctcttgcatttgcgag

SEQ ID NO: 26374 - DNA, 50 bp, unidentified
  source 1..50: mol_type = unassigned DNA; note = target_99a818f
  misc_feature 1..23: note = LF
  misc_feature 24..25: note = Core
  misc_feature 26..50: note = RF
cggcgcctccgtcacaggtccgccccccctgcccgctgcctgcacggggc

SEQ ID NO: 26375 - DNA, 50 bp, unidentified
  source 1..50: mol_type = unassigned DNA; note = target_99aa16a
  misc_feature 1..23: note = LF
  misc_feature 24..25: note = Core
  misc_feature 26..50: note = RF
aatgacaatgcgcattaatactcctcctccatcttgtaataaaatttcaa

SEQ ID NO: 26376 - DNA, 50 bp, unidentified
  source 1..50: mol_type = unassigned DNA; note = target_99b10d3
  misc_feature 1..23: note = LF
  misc_feature 24..25: note = Core
  misc_feature 26..50: note = RF
gctaatctaaagtccattttattacctctacaaattttaatttgtcattc

SEQ ID NO: 26377 - DNA, 50 bp, unidentified
  source 1..50: mol_type = unassigned DNA; note = target_99b2931
  misc_feature 1..23: note = LF
  misc_feature 24..25: note = Core
  misc_feature 26..50: note = RF
tagattattgtgagcgaattaacatgaataaaacaatcttcaatggtctt

SEQ ID NO: 26378 - DNA, 50 bp, unidentified
  source 1..50: mol_type = unassigned DNA; note = target_99b3aea
  misc_feature 1..24: note = LF
  misc_feature 25: note = Core
  misc_feature 26..50: note = RF
aaataacccttgccaaatcggagccgtccacacatgacccaaagaggtca

SEQ ID NO: 26379 - DNA, 50 bp, unidentified
  source 1..50: mol_type = unassigned DNA; note = target_99ba0bb
  misc_feature 1..23: note = LF
  misc_feature 24..25: note = Core
  misc_feature 26..50: note = RF
ctgagaaaacccatgagatcctcctaaatttttaatttccttattaatat

SEQ ID NO: 26380 - DNA, 50 bp, unidentified
  source 1..50: mol_type = unassigned DNA; note = target_99bf5ea
  misc_feature 1..24: note = LF
  misc_feature 25: note = Core
  misc_feature 26..50: note = RF
gcgcgagagtgtgttggcgccgaccgaaaattgactccctgggggtcaaa

SEQ ID NO: 26381 - DNA, 50 bp, unidentified
  source 1..50: mol_type = unassigned DNA; note = target_99cb20d
  misc_feature 1..22: note = LF
  misc_feature 23..25: note = Core
  misc_feature 26..50: note = RF
cggcgagcggaacaacaattactgacccactaccccaggggaggttcgcc

SEQ ID NO: 26382 - DNA, 50 bp, unidentified
  source 1..50: mol_type = unassigned DNA; note = target_99d206d
  misc_feature 1..22: note = LF
  misc_feature 23..25: note = Core
  misc_feature 26..50: note = RF
acgatacttttttaactgccgtcatgctgaactcgtttcagcatctttca

SEQ ID NO: 26383 - DNA, 50 bp, unidentified
  source 1..50: mol_type = unassigned DNA; note = target_99db162
  misc_feature 1..23: note = LF
  misc_feature 24..25: note = Core
  misc_feature 26..50: note = RF
aggtcgacatccagctcgagacgtgttccccgcagacgcggggatgaacc

SEQ ID NO: 26384 - DNA, 50 bp, unidentified
  source 1..50: mol_type = unassigned DNA; note = target_99e2ba2
  misc_feature 1..24: note = LF
  misc_feature 25: note = Core
  misc_feature 26..50: note = RF
tttcggctaacaataagccaaatgcagacgttcacatttgggaaaaatct

SEQ ID NO: 26385 - DNA, 50 bp, unidentified
  source 1..50: mol_type = unassigned DNA; note = target_99e4089
  misc_feature 1..24: note = LF
  misc_feature 25: note = Core
  misc_feature 26..50: note = RF
gtcgactcgaggcgttatccgcggcggtaagacacgcgttctcaagcacg

SEQ ID NO: 26386 - DNA, 50 bp, unidentified
  source 1..50: mol_type = unassigned DNA; note = target_99e5b07
  misc_feature 1..23: note = LF
  misc_feature 24..25: note = Core
  misc_feature 26..50: note = RF
aatctttttcattctgtatcctcctcatccgcgttttcttttctgtgctt

SEQ ID NO: 26387 - DNA, 50 bp, unidentified
  source 1..50: mol_type = unassigned DNA; note = target_99ede8c
  misc_feature 1..23: note = LF
  misc_feature 24..25: note = Core
  misc_feature 26..50: note = RF
caccgccatcgggagcaagccccctcccacatttgattggtgaccaatca

SEQ ID NO: 26388 - DNA, 50 bp, unidentified
  source 1..50: mol_type = unassigned DNA; note = target_99f616d
  misc_feature 1..22: note = LF
  misc_feature 23..25: note = Core
  misc_feature 26..50: note = RF
gtttggcaagttgacacaacacagaagttcatgttgtgacaaatggtggg

SEQ ID NO: 26389 - DNA, 50 bp, unidentified
  source 1..50: mol_type = unassigned DNA; note = target_99fec8a
  misc_feature 1..23: note = LF
  misc_feature 24..25: note = Core
  misc_feature 26..50: note = RF
aatcgttcagcatagcgcacctcctttcacatgaatccgtatgtcaacta

SEQ ID NO: 26390 - DNA, 50 bp, unidentified
  source 1..50: mol_type = unassigned DNA; note = target_9a12096
  misc_feature 1..22: note = LF
  misc_feature 23..25: note = Core
  misc_feature 26..50: note = RF
tttcttcctgcactgccatcacctcccatgcagcagggtacttttagcgg

SEQ ID NO: 26391 - DNA, 50 bp, unidentified
  source 1..50: mol_type = unassigned DNA; note = target_9a12e94
  misc_feature 1..23: note = LF
  misc_feature 24..25: note = Core
  misc_feature 26..50: note = RF
atatggtaattcattttcttatcctccatttctatctataccattgcaca

SEQ ID NO: 26392 - DNA, 50 bp, unidentified
  source 1..50: mol_type = unassigned DNA; note = target_9a15a00
  misc_feature 1..24: note = LF
  misc_feature 25: note = Core
  misc_feature 26..50: note = RF
taaaattagatcacaaacgaagccttttttatatctatttcaattggttg

SEQ ID NO: 26393 - DNA, 50 bp, unidentified
  source 1..50: mol_type = unassigned DNA; note = target_9a18482
  misc_feature 1..24: note = LF
  misc_feature 25: note = Core
  misc_feature 26..50: note = RF
gaaatcgatgaagccgattcccactttcccaccgccgcgacgaccacggg

SEQ ID NO: 26394 - DNA, 50 bp, unidentified
  source 1..50: mol_type = unassigned DNA; note = target_9a1a23b
  misc_feature 1..24: note = LF
  misc_feature 25: note = Core
  misc_feature 26..50: note = RF
tacttgagagattccctacccgctcgttccccgctctagggaatgacccc

SEQ ID NO: 26395 - DNA, 50 bp, unidentified
  source 1..50: mol_type = unassigned DNA; note = target_9a1a623
  misc_feature 1..22: note = LF
  misc_feature 23..25: note = Core
  misc_feature 26..50: note = RF
tgacccggcgttgactccggcgccccccggacctcgcctgtttctgacgg

SEQ ID NO: 26396 - DNA, 50 bp, unidentified
  source 1..50: mol_type = unassigned DNA; note = target_9a1cabe
  misc_feature 1..23: note = LF
  misc_feature 24..25: note = Core
  misc_feature 26..50: note = RF
ccgtctggtcgcgacgtgccattagcaaccaaagtgcagcgcagcaattt

SEQ ID NO: 26397 - DNA, 50 bp, unidentified
  source 1..50: mol_type = unassigned DNA; note = target_9a2377f
  misc_feature 1..24: note = LF
  misc_feature 25: note = Core
  misc_feature 26..50: note = RF
tcaaaaaaaggtaacggtgatggccgctacgggaagtaaatcaataacgg

SEQ ID NO: 26398 - DNA, 50 bp, unidentified
  source 1..50: mol_type = unassigned DNA; note = target_9a24006
  misc_feature 1..23: note = LF
  misc_feature 24..25: note = Core
  misc_feature 26..50: note = RF
ggcatcgtggctgaagccacttcctacgacggcaaggctcaacgacgctc

SEQ ID NO: 26399 - DNA, 50 bp, unidentified
  source 1..50: mol_type = unassigned DNA; note = target_9a26c6b
  misc_feature 1..23: note = LF
  misc_feature 24..25: note = Core
  misc_feature 26..50: note = RF
ttggcgcaacgccgcaacccctaatgtaggagtgagcctgctcgcgatgg

SEQ ID NO: 26400 - DNA, 50 bp, unidentified
  source 1..50: mol_type = unassigned DNA; note = target_9a29c5f
  misc_feature 1..23: note = LF
  misc_feature 24..25: note = Core
  misc_feature 26..50: note = RF
cgacgtcgcggaaaccctaggatccatgccgtgacgttcaatgcaggcac

SEQ ID NO: 26401 - DNA, 50 bp, unidentified
  source 1..50: mol_type = unassigned DNA; note = target_9a2f331
  misc_feature 1..23: note = LF
  misc_feature 24..25: note = Core
  misc_feature 26..50: note = RF
taccgatttcatcctcacacgtccttatcacggatagggaacgcactggg

SEQ ID NO: 26402 - DNA, 50 bp, unidentified
  source 1..50: mol_type = unassigned DNA; note = target_9a35b01
  misc_feature 1..23: note = LF
  misc_feature 24..25: note = Core
  misc_feature 26..50: note = RF
acaaaagatagctccctagcaggctgtcggactttccctttgcctaaaat

SEQ ID NO: 26403 - DNA, 50 bp, unidentified
  source 1..50: mol_type = unassigned DNA; note = target_9a37e99
  misc_feature 1..23: note = LF
  misc_feature 24..25: note = Core
  misc_feature 26..50: note = RF
gaagcccgggtgataatcgcatcctataatagtcattgtccggctccttt

SEQ ID NO: 26404 - DNA, 50 bp, unidentified
  source 1..50: mol_type = unassigned DNA; note = target_9a3cb90
  misc_feature 1..22: note = LF
  misc_feature 23..25: note = Core
  misc_feature 26..50: note = RF
cggcttgtcgtgggaccgttaattaactggggcgtggttgtccacggacc

SEQ ID NO: 26405 - DNA, 50 bp, unidentified
  source 1..50: mol_type = unassigned DNA; note = target_9a49638
  misc_feature 1..22: note = LF
  misc_feature 23..25: note = Core
  misc_feature 26..50: note = RF
gcaccgagccattctttgcctcctttcctcgatcaacggtcgttgtcata

SEQ ID NO: 26406 - DNA, 50 bp, unidentified
  source 1..50: mol_type = unassigned DNA; note = target_9a4b259
  misc_feature 1..23: note = LF
  misc_feature 24..25: note = Core
  misc_feature 26..50: note = RF
cggccccggcctggtgacaagtggcacttggacgagatcttcatcaatat

SEQ ID NO: 26407 - DNA, 50 bp, unidentified
  source 1..50: mol_type = unassigned DNA; note = target_9a5879c
  misc_feature 1..24: note = LF
  misc_feature 25: note = Core
  misc_feature 26..50: note = RF
cactgcttgagcacttaacctaacgaacgagttaactggcgccggagccc

SEQ ID NO: 26408 - DNA, 50 bp, unidentified
  source 1..50: mol_type = unassigned DNA; note = target_9a5b5c5
  misc_feature 1..24: note = LF
  misc_feature 25: note = Core
  misc_feature 26..50: note = RF
gcctcagccatgtcgtagagtaaacgcgcggtgagcccatcttgacggcg

SEQ ID NO: 26409 - DNA, 50 bp, unidentified
  source 1..50: mol_type = unassigned DNA; note = target_9a5f3e3
  misc_feature 1..23: note = LF
  misc_feature 24..25: note = Core
  misc_feature 26..50: note = RF
ccgaggaaccggctttgccgggcctcaggtgttgcccccggtagggggta

SEQ ID NO: 26410 - DNA, 50 bp, unidentified
  source 1..50: mol_type = unassigned DNA; note = target_9a6d859
  misc_feature 1..24: note = LF
  misc_feature 25: note = Core
  misc_feature 26..50: note = RF
ccagaaactgacctgaaaccccgtttttcaggccactcacctcctagcag

SEQ ID NO: 26411 - DNA, 50 bp, unidentified
  source 1..50: mol_type = unassigned DNA; note = target_9a809d4
  misc_feature 1..22: note = LF
  misc_feature 23..25: note = Core
  misc_feature 26..50: note = RF
aagcaatccttctcggtgccccctaacgctgccgggtaggtgggacggtt

SEQ ID NO: 26412 - DNA, 50 bp, unidentified
  source 1..50: mol_type = unassigned DNA; note = target_9a824c0
  misc_feature 1..24: note = LF
  misc_feature 25: note = Core
  misc_feature 26..50: note = RF
cgcgctgatctcttccgggaaacttttttaaaatcctccaccgccaattc

SEQ ID NO: 26413 - DNA, 50 bp, unidentified
  source 1..50: mol_type = unassigned DNA; note = target_9a82df6
  misc_feature 1..22: note = LF
  misc_feature 23..25: note = Core
  misc_feature 26..50: note = RF
catttactgggttcataacttttctcctttattttagaaaaaatctttaa

SEQ ID NO: 26414 - DNA, 50 bp, unidentified
  source 1..50: mol_type = unassigned DNA; note = target_9a8baf3
  misc_feature 1..22: note = LF
  misc_feature 23..25: note = Core
  misc_feature 26..50: note = RF
ggtgacggcggtcatggtgaactcccttcgtgggcaggccgggacgtccg

SEQ ID NO: 26415 - DNA, 50 bp, unidentified
  source 1..50: mol_type = unassigned DNA; note = target_9a97b46
  misc_feature 1..23: note = LF
  misc_feature 24..25: note = Core
  misc_feature 26..50: note = RF
ttccccgctgattgcaccaaaactgcgggcgactcggatgcgggcgaccc

SEQ ID NO: 26416 - DNA, 50 bp, unidentified
  source 1..50: mol_type = unassigned DNA; note = target_9a9e9b2
  misc_feature 1..22: note = LF
  misc_feature 23..25: note = Core
  misc_feature 26..50: note = RF
agcataccatgacggcttaaattgacaatgccctgctgaggaagaaaccg

SEQ ID NO: 26417 - DNA, 50 bp, unidentified
  source 1..50: mol_type = unassigned DNA; note = target_9a9e9fc
  misc_feature 1..23: note = LF
  misc_feature 24..25: note = Core
  misc_feature 26..50: note = RF
aagtcttttcatgaatgtttttcctttctgtcgtctgttttttaattgag

SEQ ID NO: 26418 - DNA, 50 bp, unidentified
  source 1..50: mol_type = unassigned DNA; note = target_9aa53c9
  misc_feature 1..24: note = LF
  misc_feature 25: note = Core
  misc_feature 26..50: note = RF
aaacgcgcatgcgcatgaataaactgttaaattctaccaagcatcaaatt

SEQ ID NO: 26419 - DNA, 50 bp, unidentified
  source 1..50: mol_type = unassigned DNA; note = target_9aa5639
  misc_feature 1..24: note = LF
  misc_feature 25: note = Core
  misc_feature 26..50: note = RF
gatcctcaaaaaggccaccacggctttcgccaaggagggaagtcgatgaa

SEQ ID NO: 26420 - DNA, 50 bp, unidentified
  source 1..50: mol_type = unassigned DNA; note = target_9aa7c6d
  misc_feature 1..23: note = LF
  misc_feature 24..25: note = Core
  misc_feature 26..50: note = RF
gcattacgcaagcttcatgcgggctacgcaacccgtaatagcgaccgcgt

SEQ ID NO: 26421 - DNA, 50 bp, unidentified
  source 1..50: mol_type = unassigned DNA; note = target_9ab5f1b
  misc_feature 1..23: note = LF
  misc_feature 24..25: note = Core
  misc_feature 26..50: note = RF
tgacagatcagccccggcacccgagttcgacacctacggggccattttgg

SEQ ID NO: 26422 - DNA, 50 bp, unidentified
  source 1..50: mol_type = unassigned DNA; note = target_9ab8861
  misc_feature 1..23: note = LF
  misc_feature 24..25: note = Core
  misc_feature 26..50: note = RF
caggtcgatctcatcgggaatggctctagccgacgcgccgcagggaggat

SEQ ID NO: 26423 - DNA, 50 bp, unidentified
  source 1..50: mol_type = unassigned DNA; note = target_9abdce6
  misc_feature 1..24: note = LF
  misc_feature 25: note = Core
  misc_feature 26..50: note = RF
ggctctaaagagtgagatggcgatttatcaccaatcatctcgaaatgaca

SEQ ID NO: 26424 - DNA, 50 bp, unidentified
  source 1..50: mol_type = unassigned DNA; note = target_9acd098
  misc_feature 1..21: note = LF
  misc_feature 22..25: note = Core
  misc_feature 26..50: note = RF
tgcgtgatgcgcatcagctcgctcatgcctgctccttcgtcaccgtttcg

SEQ ID NO: 26425 - DNA, 50 bp, unidentified
  source 1..50: mol_type = unassigned DNA; note = target_9ae8896
  misc_feature 1..23: note = LF
  misc_feature 24..25: note = Core
  misc_feature 26..50: note = RF
tgggcacagaaaacgtgcccaccctaccaactaatcttcaaccctcgatg

SEQ ID NO: 26426 - DNA, 50 bp, unidentified
  source 1..50: mol_type = unassigned DNA; note = target_9af9f86
  misc_feature 1..22: note = LF
  misc_feature 23..25: note = Core
  misc_feature 26..50: note = RF
gacatgtcatcgagattgaatcagatccaatattcgaagccgattgacag

SEQ ID NO: 26427 - DNA, 50 bp, unidentified
  source 1..50: mol_type = unassigned DNA; note = target_9afdd14
  misc_feature 1..23: note = LF
  misc_feature 24..25: note = Core
  misc_feature 26..50: note = RF
gcgcttgccctcacccccaacccctctcccgcaggcgggagaggggagca

SEQ ID NO: 26428 - DNA, 50 bp, unidentified
  source 1..50: mol_type = unassigned DNA; note = target_9b0348f
  misc_feature 1..23: note = LF
  misc_feature 24..25: note = Core
  misc_feature 26..50: note = RF
gatcgcttcgctgtcgctcgcgatgacggagtgtgcggttgttttcatag

SEQ ID NO: 26429 - DNA, 50 bp, unidentified
  source 1..50: mol_type = unassigned DNA; note = target_9b05ab8
  misc_feature 1..24: note = LF
  misc_feature 25: note = Core
  misc_feature 26..50: note = RF
ctacataaccaatacgtcagaatctagttttcggtacacacaggagcgga

SEQ ID NO: 26430 - DNA, 50 bp, unidentified
  source 1..50: mol_type = unassigned DNA; note = target_9b24117
  misc_feature 1..22: note = LF
  misc_feature 23..25: note = Core
  misc_feature 26..50: note = RF
atgaaacggatagtagaaggtcttttttgatcttcttgcttctaaccaat

SEQ ID NO: 26431 - DNA, 50 bp, unidentified
  source 1..50: mol_type = unassigned DNA; note = target_9b2bb49
  misc_feature 1..23: note = LF
  misc_feature 24..25: note = Core
  misc_feature 26..50: note = RF
aaaggtaaactgccgtagtatttcccccaatgggggtagtaagggaaccc

SEQ ID NO: 26432 - DNA, 50 bp, unidentified
  source 1..50: mol_type = unassigned DNA; note = target_9b2def4
  misc_feature 1..24: note = LF
  misc_feature 25: note = Core
  misc_feature 26..50: note = RF
atctgggcccattgctctccgcggcggttggacgcaccttcggcgacccc

SEQ ID NO: 26433 - DNA, 50 bp, unidentified
  source 1..50: mol_type = unassigned DNA; note = target_9b2e5ac
  misc_feature 1..23: note = LF
  misc_feature 24..25: note = Core
  misc_feature 26..50: note = RF
cggaagatgcaagtttctcacaaacgaacggctggcgagacagcccggcc

SEQ ID NO: 26434 - DNA, 50 bp, unidentified
  source 1..50: mol_type = unassigned DNA; note = target_9b3e68e
  misc_feature 1..24: note = LF
  misc_feature 25: note = Core
  misc_feature 26..50: note = RF
caaccaaacaaggtcgctgcttgacaacctacgaccctggggtgtctaga

SEQ ID NO: 26435 - DNA, 50 bp, unidentified
  source 1..50: mol_type = unassigned DNA; note = target_9b4068e
  misc_feature 1..22: note = LF
  misc_feature 23..25: note = Core
  misc_feature 26..50: note = RF
tgtgcggcgcgaatgtctgcttatggcacttagcggacttcggcagactt

SEQ ID NO: 26436 - DNA, 50 bp, unidentified
  source 1..50: mol_type = unassigned DNA; note = target_9b423bc
  misc_feature 1..23: note = LF
  misc_feature 24..25: note = Core
  misc_feature 26..50: note = RF
ggcggccttgtgggcgggcaggttgtccatgacgactacgtcgccctccg

SEQ ID NO: 26437 - DNA, 50 bp, unidentified
  source 1..50: mol_type = unassigned DNA; note = target_9b4b954
  misc_feature 1..23: note = LF
  misc_feature 24..25: note = Core
  misc_feature 26..50: note = RF
ggtttcgtgtcactcaactcaacctacgtagctataaacgagctgtcacc

SEQ ID NO: 26438 - DNA, 50 bp, unidentified
  source 1..50: mol_type = unassigned DNA; note = target_9b550c9
  misc_feature 1..23: note = LF
  misc_feature 24..25: note = Core
  misc_feature 26..50: note = RF
ggattacgctgcgctaatccgccctaccaactctcacgccttctttgact

SEQ ID NO: 26439 - DNA, 50 bp, unidentified
  source 1..50: mol_type = unassigned DNA; note = target_9b5abad
  misc_feature 1..23: note = LF
  misc_feature 24..25: note = Core
  misc_feature 26..50: note = RF
aaagatctctttagccatgggtggtcctttccagtgagttgttgagttcg

SEQ ID NO: 26440 - DNA, 50 bp, unidentified
  source 1..50: mol_type = unassigned DNA; note = target_9b5cf91
  misc_feature 1..24: note = LF
  misc_feature 25: note = Core
  misc_feature 26..50: note = RF
actctttcagcaaaaaaatcatctcttagaaaaattactcggaggaaggg

SEQ ID NO: 26441 - DNA, 50 bp, unidentified
  source 1..50: mol_type = unassigned DNA; note = target_9b60091
  misc_feature 1..23: note = LF
  misc_feature 24..25: note = Core
  misc_feature 26..50: note = RF
cgttacatttactgttcctgctcctcctatatttgttccatctgtatata

SEQ ID NO: 26442 - DNA, 50 bp, unidentified
  source 1..50: mol_type = unassigned DNA; note = target_9b61760
  misc_feature 1..23: note = LF
  misc_feature 24..25: note = Core
  misc_feature 26..50: note = RF
acggtagcgccccggctgttttcctccttcagaatatcatagaaagcctg

SEQ ID NO: 26443 - DNA, 50 bp, unidentified
  source 1..50: mol_type = unassigned DNA; note = target_9b78c6b
  misc_feature 1..22: note = LF
  misc_feature 23..25: note = Core
  misc_feature 26..50: note = RF
attctttgcaaattttaagcttctttctataacagtttttatatgattta

SEQ ID NO: 26444 - DNA, 50 bp, unidentified
  source 1..50: mol_type = unassigned DNA; note = target_9b7ba16
  misc_feature 1..24: note = LF
  misc_feature 25: note = Core
  misc_feature 26..50: note = RF
aattaacccttgcataaaaggagccgtccacacatgacaataccgcattt

SEQ ID NO: 26445 - DNA, 50 bp, unidentified
  source 1..50: mol_type = unassigned DNA; note = target_9b826a5
  misc_feature 1..23: note = LF
  misc_feature 24..25: note = Core
  misc_feature 26..50: note = RF
cctggcgagttccggtattgtgcaggttttcggccgccggcaatcgcgga

SEQ ID NO: 26446 - DNA, 50 bp, unidentified
  source 1..50: mol_type = unassigned DNA; note = target_9b82d14
  misc_feature 1..23: note = LF
  misc_feature 24..25: note = Core
  misc_feature 26..50: note = RF
ttcacgcagagcccttcgacaggctcaggacaggcttgtcgaagcgccgc

SEQ ID NO: 26447 - DNA, 50 bp, unidentified
  source 1..50: mol_type = unassigned DNA; note = target_9b91672
  misc_feature 1..23: note = LF
  misc_feature 24..25: note = Core
  misc_feature 26..50: note = RF
tttggaaatcgctcatatgtatccggcctgttgatggactcgcgggtcgt

SEQ ID NO: 26448 - DNA, 50 bp, unidentified
  source 1..50: mol_type = unassigned DNA; note = target_9ba5de8
  misc_feature 1..24: note = LF
  misc_feature 25: note = Core
  misc_feature 26..50: note = RF
acgctaaatgagatatcccggaccttttttctgtcacggctggtgacgtt

SEQ ID NO: 26449 - DNA, 50 bp, unidentified
  source 1..50: mol_type = unassigned DNA; note = target_9ba7660
  misc_feature 1..23: note = LF
  misc_feature 24..25: note = Core
  misc_feature 26..50: note = RF
ctatgccacaactgtagctggacacccgcaacaacctctcgggcaatgca

SEQ ID NO: 26450 - DNA, 50 bp, unidentified
  source 1..50: mol_type = unassigned DNA; note = target_9bac376
  misc_feature 1..23: note = LF
  misc_feature 24..25: note = Core
  misc_feature 26..50: note = RF
atgcaccggtccgcggtcaacacctttaatataattaatcaggccgccgc

SEQ ID NO: 26451 - DNA, 50 bp, unidentified
  source 1..50: mol_type = unassigned DNA; note = target_9bad4d8
  misc_feature 1..23: note = LF
  misc_feature 24..25: note = Core
  misc_feature 26..50: note = RF
gcccctcacccgccttcggcaccctctccccgctctcgcaggtacacgga

SEQ ID NO: 26452 - DNA, 50 bp, unidentified
  source 1..50: mol_type = unassigned DNA; note = target_9bb44ca
  misc_feature 1..24: note = LF
  misc_feature 25: note = Core
  misc_feature 26..50: note = RF
gcgcccagtaccgacaacgttaatgagatggtcagcccggttcctcgcag

SEQ ID NO: 26453 - DNA, 50 bp, unidentified
  source 1..50: mol_type = unassigned DNA; note = target_9bb92be
  misc_feature 1..23: note = LF
  misc_feature 24..25: note = Core
  misc_feature 26..50: note = RF
cctcgtggaagtgacctttcgggtggtgagcggaagttcactcgggggcg

SEQ ID NO: 26454 - DNA, 50 bp, unidentified
  source 1..50: mol_type = unassigned DNA; note = target_9bbaf6f
  misc_feature 1..23: note = LF
  misc_feature 24..25: note = Core
  misc_feature 26..50: note = RF
gtaaaatcatggatgaaatcatcctttatatataattaattttaacaaaa

SEQ ID NO: 26455 - DNA, 50 bp, unidentified
  source 1..50: mol_type = unassigned DNA; note = target_9bbbe31
  misc_feature 1..24: note = LF
  misc_feature 25: note = Core
  misc_feature 26..50: note = RF
aaacagaaatgttttccgggacctattcgtctttctggcctttggcgaac

SEQ ID NO: 26456 - DNA, 50 bp, unidentified
  source 1..50: mol_type = unassigned DNA; note = target_9bcab93
  misc_feature 1..24: note = LF
  misc_feature 25: note = Core
  misc_feature 26..50: note = RF
cgccgaacgtctgtttctagggaaaaacactgatttatcctgacctgctc

SEQ ID NO: 26457 - DNA, 50 bp, unidentified
  source 1..50: mol_type = unassigned DNA; note = target_9bdcb75
  misc_feature 1..24: note = LF
  misc_feature 25: note = Core
  misc_feature 26..50: note = RF
caccgctctggctcggggcggggccgaactcgccatcgccaggcctgagg

SEQ ID NO: 26458 - DNA, 50 bp, unidentified
  source 1..50: mol_type = unassigned DNA; note = target_9bdcc32
  misc_feature 1..24: note = LF
  misc_feature 25: note = Core
  misc_feature 26..50: note = RF
ggttgtgtccccctctgtcgtaagcgttactttagagccacattacccgc

SEQ ID NO: 26459 - DNA, 50 bp, unidentified
  source 1..50: mol_type = unassigned DNA; note = target_9be9245
  misc_feature 1..23: note = LF
  misc_feature 24..25: note = Core
  misc_feature 26..50: note = RF
gggcacgcttcgctttgcccaccctacgaagtaacgggttcccgcgccgc

SEQ ID NO: 26460 - DNA, 50 bp, unidentified
  source 1..50: mol_type = unassigned DNA; note = target_9bec00c
  misc_feature 1..23: note = LF
  misc_feature 24..25: note = Core
  misc_feature 26..50: note = RF
tgacccggattgaacaggatctgctctagttcaccggaaagccctatctc

SEQ ID NO: 26461 - DNA, 50 bp, unidentified
  source 1..50: mol_type = unassigned DNA; note = target_9bf4076
  misc_feature 1..23: note = LF
  misc_feature 24..25: note = Core
  misc_feature 26..50: note = RF
gggccatgcccacgctgaaactgtaggagccagcctgctggcgatggact

SEQ ID NO: 26462 - DNA, 50 bp, unidentified
  source 1..50: mol_type = unassigned DNA; note = target_9bf4a67
  misc_feature 1..24: note = LF
  misc_feature 25: note = Core
  misc_feature 26..50: note = RF
tggcacagttgccacctgccacaatgactcttatgcattgtttcggaatt

SEQ ID NO: 26463 - DNA, 50 bp, unidentified
  source 1..50: mol_type = unassigned DNA; note = target_9bf5724
  misc_feature 1..24: note = LF
  misc_feature 25: note = Core
  misc_feature 26..50: note = RF
tattcgattcatgactgacttccttttttcttacacgcccggtttgacat

SEQ ID NO: 26464 - DNA, 50 bp, unidentified
  source 1..50: mol_type = unassigned DNA; note = target_9c0020d
  misc_feature 1..23: note = LF
  misc_feature 24..25: note = Core
  misc_feature 26..50: note = RF
ctaattccttattcatagatgtactcctttgttatattcctcccatgtag

SEQ ID NO: 26465 - DNA, 50 bp, unidentified
  source 1..50: mol_type = unassigned DNA; note = target_9c007da
  misc_feature 1..21: note = LF
  misc_feature 22..25: note = Core
  misc_feature 26..50: note = RF
gcgctcgatgcgccttccgggatgacgttggcgagctggagcgctcaaat

SEQ ID NO: 26466 - DNA, 50 bp, unidentified
  source 1..50: mol_type = unassigned DNA; note = target_9c00d2f
  misc_feature 1..23: note = LF
  misc_feature 24..25: note = Core
  misc_feature 26..50: note = RF
ccattcgcagcacaaggctgctcctacgggggaatacgatctcctgtagg

SEQ ID NO: 26467 - DNA, 50 bp, unidentified
  source 1..50: mol_type = unassigned DNA; note = target_9c05ca6
  misc_feature 1..23: note = LF
  misc_feature 24..25: note = Core
  misc_feature 26..50: note = RF
ttggctaaaataagcgacgaaggagcaaatagccaactgttatttgtcct

SEQ ID NO: 26468 - DNA, 50 bp, unidentified
  source 1..50: mol_type = unassigned DNA; note = target_9c0a39b
  misc_feature 1..23: note = LF
  misc_feature 24..25: note = Core
  misc_feature 26..50: note = RF
tatatgatagtcatagatcaaggaggattttgctatggataaattcattt

SEQ ID NO: 26469 - DNA, 50 bp, unidentified
  source 1..50: mol_type = unassigned DNA; note = target_9c0a8b0
  misc_feature 1..22: note = LF
  misc_feature 23..25: note = Core
  misc_feature 26..50: note = RF
ttgtcgaagggccgaagcctcgaaccacgagggcgggtggaggtactcta

SEQ ID NO: 26470 - DNA, 50 bp, unidentified
  source 1..50: mol_type = unassigned DNA; note = target_9c0d823
  misc_feature 1..23: note = LF
  misc_feature 24..25: note = Core
  misc_feature 26..50: note = RF
gcattcttggtgcgtcccaaatctgggtcccggatcggcgccgcatcgcc

SEQ ID NO: 26471 - DNA, 50 bp, unidentified
  source 1..50: mol_type = unassigned DNA; note = target_9c0ed67
  misc_feature 1..23: note = LF
  misc_feature 24..25: note = Core
  misc_feature 26..50: note = RF
gccgccatacttcgaacgccacttataaaaactggcactgctgatgccgt

SEQ ID NO: 26472 - DNA, 50 bp, unidentified
  source 1..50: mol_type = unassigned DNA; note = target_9c16011
  misc_feature 1..24: note = LF
  misc_feature 25: note = Core
  misc_feature 26..50: note = RF
cagcaagcagccacttgccgcgcataaggcggctccgtgtgcgcgctcct

SEQ ID NO: 26473 - DNA, 50 bp, unidentified
  source 1..50: mol_type = unassigned DNA; note = target_9c1bae7
  misc_feature 1..23: note = LF
  misc_feature 24..25: note = Core
  misc_feature 26..50: note = RF
acacggtatcactcccatcggggctgttagtaagcaaatggctttcttgg

SEQ ID NO: 26474 - DNA, 50 bp, unidentified
  source 1..50: mol_type = unassigned DNA; note = target_9c1f2ad
  misc_feature 1..22: note = LF
  misc_feature 23..25: note = Core
  misc_feature 26..50: note = RF
tggcgcctggacgaggtctacgtgaagatcaacggcgaaatgcgctacct

SEQ ID NO: 26475 - DNA, 50 bp, unidentified
  source 1..50: mol_type = unassigned DNA; note = target_9c24fac
  misc_feature 1..23: note = LF
  misc_feature 24..25: note = Core
  misc_feature 26..50: note = RF
gcgggagacgcgatgcatcgcgtctctacacgatcccggatataaaatcg

SEQ ID NO: 26476 - DNA, 50 bp, unidentified
  source 1..50: mol_type = unassigned DNA; note = target_9c306c3
  misc_feature 1..23: note = LF
  misc_feature 24..25: note = Core
  misc_feature 26..50: note = RF
ggattgcttcgtcgctttgctcctcgcaatgacagccaaagaatctcgcc

SEQ ID NO: 26477 - DNA, 50 bp, unidentified
  source 1..50: mol_type = unassigned DNA; note = target_9c321f4
  misc_feature 1..22: note = LF
  misc_feature 23..25: note = Core
  misc_feature 26..50: note = RF
catccgggaaattacaccagcttgacggacgtgaccccttccggccctgg

SEQ ID NO: 26478 - DNA, 50 bp, unidentified
  source 1..50: mol_type = unassigned DNA; note = target_9c3cf0c
  misc_feature 1..23: note = LF
  misc_feature 24..25: note = Core
  misc_feature 26..50: note = RF
tccgcgctcaaaccgcagaagcagacatcccttgcagctcaggtgactgg

SEQ ID NO: 26479 - DNA, 50 bp, unidentified
  source 1..50: mol_type = unassigned DNA; note = target_9c3ec10
  misc_feature 1..23: note = LF
  misc_feature 24..25: note = Core
  misc_feature 26..50: note = RF
ggtgaatcagaaccggtctgatttgggaatcctcaatcgattcaatctaa

SEQ ID NO: 26480 - DNA, 50 bp, unidentified
  source 1..50: mol_type = unassigned DNA; note = target_9c43de5
  misc_feature 1..24: note = LF
  misc_feature 25: note = Core
  misc_feature 26..50: note = RF
atctttttatcagccattttctacacctttcataataacgctgtgacgca

SEQ ID NO: 26481 - DNA, 50 bp, unidentified
  source 1..50: mol_type = unassigned DNA; note = target_9c46ec1
  misc_feature 1..23: note = LF
  misc_feature 24..25: note = Core
  misc_feature 26..50: note = RF
cggcggggaacagcaatctcgctaataagttcgagcacgacatcggtgaa

SEQ ID NO: 26482 - DNA, 50 bp, unidentified
  source 1..50: mol_type = unassigned DNA; note = target_9c4949a
  misc_feature 1..23: note = LF
  misc_feature 24..25: note = Core
  misc_feature 26..50: note = RF
ttttgacatgatttcttatccttctactacaatatatttatggtttaatg

SEQ ID NO: 26483 - DNA, 50 bp, unidentified
  source 1..50: mol_type = unassigned DNA; note = target_9c4cd35
  misc_feature 1..23: note = LF
  misc_feature 24..25: note = Core
  misc_feature 26..50: note = RF
aatgtaaattattaataattctttttttatataaattttaaaaatagaca

SEQ ID NO: 26484 - DNA, 50 bp, unidentified
  source 1..50: mol_type = unassigned DNA; note = target_9c4d79d
  misc_feature 1..24: note = LF
  misc_feature 25: note = Core
  misc_feature 26..50: note = RF
attcttcggaaacgtccgcaatgttatggcgtgtcgggaatggccgctct

SEQ ID NO: 26485 - DNA, 50 bp, unidentified
  source 1..50: mol_type = unassigned DNA; note = target_9c52f60
  misc_feature 1..23: note = LF
  misc_feature 24..25: note = Core
  misc_feature 26..50: note = RF
ttgcaatgcaatttggtcgttaatggcacaaagcgtcaattcgctatcgg

SEQ ID NO: 26486 - DNA, 50 bp, unidentified
  source 1..50: mol_type = unassigned DNA; note = target_9c54bba
  misc_feature 1..22: note = LF
  misc_feature 23..25: note = Core
  misc_feature 26..50: note = RF
atgtcggccctcgaaattgacgtgacccccgtttcttcatccactagcta

SEQ ID NO: 26487 - DNA, 50 bp, unidentified
  source 1..50: mol_type = unassigned DNA; note = target_9c58b94
  misc_feature 1..23: note = LF
  misc_feature 24..25: note = Core
  misc_feature 26..50: note = RF
ccaaagtagacataacgggcctccttttttatgtgattctacaatctgaa

SEQ ID NO: 26488 - DNA, 50 bp, unidentified
  source 1..50: mol_type = unassigned DNA; note = target_9c616c2
  misc_feature 1..24: note = LF
  misc_feature 25: note = Core
  misc_feature 26..50: note = RF
cgaccggctggtttcgacccatagcggacgttgattatcgcgttggctta

SEQ ID NO: 26489 - DNA, 50 bp, unidentified
  source 1..50: mol_type = unassigned DNA; note = target_9c65090
  misc_feature 1..24: note = LF
  misc_feature 25: note = Core
  misc_feature 26..50: note = RF
catggttgattccgacaagtcgacttcccattactaatccggcttcaatg

SEQ ID NO: 26490 - DNA, 50 bp, unidentified
  source 1..50: mol_type = unassigned DNA; note = target_9c7edf9
  misc_feature 1..23: note = LF
  misc_feature 24..25: note = Core
  misc_feature 26..50: note = RF
acctgtcatgatctttgtggaacctgtctggatgacctgcgcctctatgt

SEQ ID NO: 26491 - DNA, 50 bp, unidentified
  source 1..50: mol_type = unassigned DNA; note = target_9c8d333
  misc_feature 1..23: note = LF
  misc_feature 24..25: note = Core
  misc_feature 26..50: note = RF
ggaccgtcccctgacgcaccataagcgctgttccccttacaccttgatca

SEQ ID NO: 26492 - DNA, 50 bp, unidentified
  source 1..50: mol_type = unassigned DNA; note = target_9c9ffe6
  misc_feature 1..21: note = LF
  misc_feature 22..25: note = Core
  misc_feature 26..50: note = RF
aacggtttaaatccatggctatcacctcaggggaagtgttccccctttgg

SEQ ID NO: 26493 - DNA, 50 bp, unidentified
  source 1..50: mol_type = unassigned DNA; note = target_9caa4d5
  misc_feature 1..22: note = LF
  misc_feature 23..25: note = Core
  misc_feature 26..50: note = RF
ggtcgagccaaaggtttttaacctcttggcgttgcaagtcacccagaact

SEQ ID NO: 26494 - DNA, 50 bp, unidentified
  source 1..50: mol_type = unassigned DNA; note = target_9cbe8fa
  misc_feature 1..22: note = LF
  misc_feature 23..25: note = Core
  misc_feature 26..50: note = RF
ggcccgtacgtacggttctgtgagagggatgaggcgcaagcctcacccta

SEQ ID NO: 26495 - DNA, 50 bp, unidentified
  source 1..50: mol_type = unassigned DNA; note = target_9cc0790
  misc_feature 1..22: note = LF
  misc_feature 23..25: note = Core
  misc_feature 26..50: note = RF
gtggtgcgggtcatcttaactcctttcgtgtcaatggaagccatcccaac

SEQ ID NO: 26496 - DNA, 50 bp, unidentified
  source 1..50: mol_type = unassigned DNA; note = target_9cc164a
  misc_feature 1..22: note = LF
  misc_feature 23..25: note = Core
  misc_feature 26..50: note = RF
gcaatttactttagatttttcgcgaagtaggtggcggccttttttacaat

SEQ ID NO: 26497 - DNA, 50 bp, unidentified
  source 1..50: mol_type = unassigned DNA; note = target_9cc45dd
  misc_feature 1..22: note = LF
  misc_feature 23..25: note = Core
  misc_feature 26..50: note = RF
ggtcgcattcatttattcctactttctttttttaatactttcattttacc

SEQ ID NO: 26498 - DNA, 50 bp, unidentified
  source 1..50: mol_type = unassigned DNA; note = target_9cce376
  misc_feature 1..21: note = LF
  misc_feature 22..25: note = Core
  misc_feature 26..50: note = RF
tcactttagataactggtttgtcattccgtaggaatctctacggttataa

SEQ ID NO: 26499 - DNA, 50 bp, unidentified
  source 1..50: mol_type = unassigned DNA; note = target_9cd228c
  misc_feature 1..23: note = LF
  misc_feature 24..25: note = Core
  misc_feature 26..50: note = RF
gatcggggtcaaaaagatcggggtcaggtctagaatcgtagcatcggtcg

SEQ ID NO: 26500 - DNA, 50 bp, unidentified
  source 1..50: mol_type = unassigned DNA; note = target_9ce3ee9
  misc_feature 1..23: note = LF
  misc_feature 24..25: note = Core
  misc_feature 26..50: note = RF
ttaattttatattttatgtgtaatggtctaatcattccggacactttgtt

SEQ ID NO: 26501 - DNA, 50 bp, unidentified
  source 1..50: mol_type = unassigned DNA; note = target_9ce432c
  misc_feature 1..23: note = LF
  misc_feature 24..25: note = Core
  misc_feature 26..50: note = RF
ggccgccatcgcgagcaggctcgctcccacaggtgatctgtggcgttcac

SEQ ID NO: 26502 - DNA, 50 bp, unidentified
  source 1..50: mol_type = unassigned DNA; note = target_9ce66df
  misc_feature 1..24: note = LF
  misc_feature 25: note = Core
  misc_feature 26..50: note = RF
atccggcctacggggagtcaggccgataaggcgtttacgccgcatccggc

SEQ ID NO: 26503 - DNA, 50 bp, unidentified
  source 1..50: mol_type = unassigned DNA; note = target_9cf122c
  misc_feature 1..23: note = LF
  misc_feature 24..25: note = Core
  misc_feature 26..50: note = RF
cctggtccaggtgacgcacgtcgctcatggctggtggatgttcgtctcgc

SEQ ID NO: 26504 - DNA, 50 bp, unidentified
  source 1..50: mol_type = unassigned DNA; note = target_9cf7a27
  misc_feature 1..23: note = LF
  misc_feature 24..25: note = Core
  misc_feature 26..50: note = RF
agctgaccgactaaagtcggtggttaacctttcatatggaagaataaaaa

SEQ ID NO: 26505 - DNA, 50 bp, unidentified
  source 1..50: mol_type = unassigned DNA; note = target_9cf9a85
  misc_feature 1..23: note = LF
  misc_feature 24..25: note = Core
  misc_feature 26..50: note = RF
cgcgcgacgcggctgaatcgtgtagcccggatgagccgctcatgcgggct

SEQ ID NO: 26506 - DNA, 50 bp, unidentified
  source 1..50: mol_type = unassigned DNA; note = target_9d00fc4
  misc_feature 1..23: note = LF
  misc_feature 24..25: note = Core
  misc_feature 26..50: note = RF
ggctgcgtgcaagctgacctcctcccccgccggcaacggcctcgcacacc

SEQ ID NO: 26507 - DNA, 50 bp, unidentified
  source 1..50: mol_type = unassigned DNA; note = target_9d01ac2
  misc_feature 1..21: note = LF
  misc_feature 22..25: note = Core
  misc_feature 26..50: note = RF
gtctgacgtgcggcaagggtcctcctcggatggggccaggatgtagcggc

SEQ ID NO: 26508 - DNA, 50 bp, unidentified
  source 1..50: mol_type = unassigned DNA; note = target_9d034ca
  misc_feature 1..22: note = LF
  misc_feature 23..25: note = Core
  misc_feature 26..50: note = RF
gcgccttcacaacaggactgtgcttcggcccgttcgttccggagaactgc

SEQ ID NO: 26509 - DNA, 50 bp, unidentified
  source 1..50: mol_type = unassigned DNA; note = target_9d03810
  misc_feature 1..23: note = LF
  misc_feature 24..25: note = Core
  misc_feature 26..50: note = RF
aggtcgcgagcaaacgtcctcttctgccgccgacagtgcgatcggtcgtg

SEQ ID NO: 26510 - DNA, 50 bp, unidentified
  source 1..50: mol_type = unassigned DNA; note = target_9d04899
  misc_feature 1..22: note = LF
  misc_feature 23..25: note = Core
  misc_feature 26..50: note = RF
ggccagcgctctcaggctctcttgaccgacatgtctgtggtttgagcgaa

SEQ ID NO: 26511 - DNA, 50 bp, unidentified
  source 1..50: mol_type = unassigned DNA; note = target_9d0c679
  misc_feature 1..21: note = LF
  misc_feature 22..25: note = Core
  misc_feature 26..50: note = RF
ggggcaggggttccggccatggtcatggggcccccggaccagccgggcgt

SEQ ID NO: 26512 - DNA, 50 bp, unidentified
  source 1..50: mol_type = unassigned DNA; note = target_9d0fd01
  misc_feature 1..21: note = LF
  misc_feature 22..25: note = Core
  misc_feature 26..50: note = RF
catccttttttcattttctccctccattgttgtattatttttttatattt

SEQ ID NO: 26513 - DNA, 50 bp, unidentified
  source 1..50: mol_type = unassigned DNA; note = target_9d13bf5
  misc_feature 1..24: note = LF
  misc_feature 25: note = Core
  misc_feature 26..50: note = RF
cgactgacagctcccggccagaagcggccatcggtaactcgtcatctacc

SEQ ID NO: 26514 - DNA, 50 bp, unidentified
  source 1..50: mol_type = unassigned DNA; note = target_9d15cb0
  misc_feature 1..23: note = LF
  misc_feature 24..25: note = Core
  misc_feature 26..50: note = RF
cagctgcttcgctattttcatttttacctcctttcccttcttccgaaaaa

SEQ ID NO: 26515 - DNA, 50 bp, unidentified
  source 1..50: mol_type = unassigned DNA; note = target_9d1655e
  misc_feature 1..20: note = LF
  misc_feature 21..25: note = Core
  misc_feature 26..50: note = RF
tgtccggacactcccattgcttgcttcaatgctgcctgaatatgaattgg

SEQ ID NO: 26516 - DNA, 50 bp, unidentified
  source 1..50: mol_type = unassigned DNA; note = target_9d16a96
  misc_feature 1..24: note = LF
  misc_feature 25: note = Core
  misc_feature 26..50: note = RF
tcaccattattgattcacaaaggatgtaccactaagttctaaatgacaaa

SEQ ID NO: 26517 - DNA, 50 bp, unidentified
  source 1..50: mol_type = unassigned DNA; note = target_9d1dadc
  misc_feature 1..24: note = LF
  misc_feature 25: note = Core
  misc_feature 26..50: note = RF
tgcgcagtccggtccggcgtagggcgggttgcaacccgccgaccaaggat

SEQ ID NO: 26518 - DNA, 50 bp, unidentified
  source 1..50: mol_type = unassigned DNA; note = target_9d25e58
  misc_feature 1..23: note = LF
  misc_feature 24..25: note = Core
  misc_feature 26..50: note = RF
atgtttctttttacccatatatactcctcatttgtatcttttctcttccg

SEQ ID NO: 26519 - DNA, 50 bp, unidentified
  source 1..50: mol_type = unassigned DNA; note = target_9d31ef8
  misc_feature 1..24: note = LF
  misc_feature 25: note = Core
  misc_feature 26..50: note = RF
atcactctgacgtacggatctcggcagatccggtcgagctgatcgcggca

SEQ ID NO: 26520 - DNA, 50 bp, unidentified
  source 1..50: mol_type = unassigned DNA; note = target_9d3887d
  misc_feature 1..24: note = LF
  misc_feature 25: note = Core
  misc_feature 26..50: note = RF
gcacctgacacggctgtccgggcttaccggaccgcagatggcgatgaacc

SEQ ID NO: 26521 - DNA, 50 bp, unidentified
  source 1..50: mol_type = unassigned DNA; note = target_9d3932d
  misc_feature 1..22: note = LF
  misc_feature 23..25: note = Core
  misc_feature 26..50: note = RF
tagtttttagactagtcattggagaacagatgattgatgtcttaggaccg

SEQ ID NO: 26522 - DNA, 50 bp, unidentified
  source 1..50: mol_type = unassigned DNA; note = target_9d3cda6
  misc_feature 1..23: note = LF
  misc_feature 24..25: note = Core
  misc_feature 26..50: note = RF
cctgccttttccaacccttcgccctgctcagacgcaagatctgagttttg

SEQ ID NO: 26523 - DNA, 50 bp, unidentified
  source 1..50: mol_type = unassigned DNA; note = target_9d412a0
  misc_feature 1..23: note = LF
  misc_feature 24..25: note = Core
  misc_feature 26..50: note = RF
ggatggcgctgcgcttatccgggctacggcgagacgagcccactgatcca

SEQ ID NO: 26524 - DNA, 50 bp, unidentified
  source 1..50: mol_type = unassigned DNA; note = target_9d43e6b
  misc_feature 1..23: note = LF
  misc_feature 24..25: note = Core
  misc_feature 26..50: note = RF
ggcgtccacacacggcccgaagctgcgattttggccgactcaaaaaacgg

SEQ ID NO: 26525 - DNA, 50 bp, unidentified
  source 1..50: mol_type = unassigned DNA; note = target_9d486ee
  misc_feature 1..23: note = LF
  misc_feature 24..25: note = Core
  misc_feature 26..50: note = RF
ttcgggcttcgccctcagccaccctctcccgcagtgcgggagagggttac

SEQ ID NO: 26526 - DNA, 50 bp, unidentified
  source 1..50: mol_type = unassigned DNA; note = target_9d49414
  misc_feature 1..23: note = LF
  misc_feature 24..25: note = Core
  misc_feature 26..50: note = RF
ttcgtctttttcataattttctcctttcaaactagataacgtgttccgta

SEQ ID NO: 26527 - DNA, 50 bp, unidentified
  source 1..50: mol_type = unassigned DNA; note = target_9d4ef75
  misc_feature 1..24: note = LF
  misc_feature 25: note = Core
  misc_feature 26..50: note = RF
cctcccgcctacaagctccagccgttttttcggatcaccgccttcagcgc

SEQ ID NO: 26528 - DNA, 50 bp, unidentified
  source 1..50: mol_type = unassigned DNA; note = target_9d4fb03
  misc_feature 1..24: note = LF
  misc_feature 25: note = Core
  misc_feature 26..50: note = RF
cgcgtcgcccgtttatctgaccaccgcccacccgttacgttggtggggtg

SEQ ID NO: 26529 - DNA, 50 bp, unidentified
  source 1..50: mol_type = unassigned DNA; note = target_9d559db
  misc_feature 1..23: note = LF
  misc_feature 24..25: note = Core
  misc_feature 26..50: note = RF
tgattccacctgactagaaaatgctctagagggcaaaatcgaacgcgatg

SEQ ID NO: 26530 - DNA, 50 bp, unidentified
  source 1..50: mol_type = unassigned DNA; note = target_9d607c2
  misc_feature 1..23: note = LF
  misc_feature 24..25: note = Core
  misc_feature 26..50: note = RF
aggaccggtcgcaagcgcaaatgcggagggtccgcggctccgccgtggaa

SEQ ID NO: 26531 - DNA, 50 bp, unidentified
  source 1..50: mol_type = unassigned DNA; note = target_9d652a8
  misc_feature 1..23: note = LF
  misc_feature 24..25: note = Core
  misc_feature 26..50: note = RF
ttacttctgatttttccttcacctgcgataaaccccccttctcgcgtgtt

SEQ ID NO: 26532 - DNA, 50 bp, unidentified
  source 1..50: mol_type = unassigned DNA; note = target_9d693d0
  misc_feature 1..22: note = LF
  misc_feature 23..25: note = Core
  misc_feature 26..50: note = RF
ctgcttccatttatattatctcctttcttaaattgattattgtaacagta

SEQ ID NO: 26533 - DNA, 50 bp, unidentified
  source 1..50: mol_type = unassigned DNA; note = target_9d6af57
  misc_feature 1..23: note = LF
  misc_feature 24..25: note = Core
  misc_feature 26..50: note = RF
cacccggccggggcgcctcggcgctcacccggcgaccggctcctcgatcc

SEQ ID NO: 26534 - DNA, 50 bp, unidentified
  source 1..50: mol_type = unassigned DNA; note = target_9d6f933
  misc_feature 1..24: note = LF
  misc_feature 25: note = Core
  misc_feature 26..50: note = RF
gtttttattataaaagatcactgctgtcccgttaagaactaaataagtag

SEQ ID NO: 26535 - DNA, 50 bp, unidentified
  source 1..50: mol_type = unassigned DNA; note = target_9d7a65d
  misc_feature 1..23: note = LF
  misc_feature 24..25: note = Core
  misc_feature 26..50: note = RF
aattttttcaccatctatatcacctcacttaatgcatatattttatcgta

SEQ ID NO: 26536 - DNA, 50 bp, unidentified
  source 1..50: mol_type = unassigned DNA; note = target_9d911df
  misc_feature 1..23: note = LF
  misc_feature 24..25: note = Core
  misc_feature 26..50: note = RF
tgttcaatgcgggcagcggtggttgggtcccggccttcgccgggacgacg

SEQ ID NO: 26537 - DNA, 50 bp, unidentified
  source 1..50: mol_type = unassigned DNA; note = target_9d9656d
  misc_feature 1..21: note = LF
  misc_feature 22..25: note = Core
  misc_feature 26..50: note = RF
tggctactgcaaatgatctgtacccccctttttcgcgggcgaactgttca

SEQ ID NO: 26538 - DNA, 50 bp, unidentified
  source 1..50: mol_type = unassigned DNA; note = target_9d9b469
  misc_feature 1..24: note = LF
  misc_feature 25: note = Core
  misc_feature 26..50: note = RF
gcccgatcaactcgcggatcgcggcagatccgtacgtccgccgttgcccg

SEQ ID NO: 26539 - DNA, 50 bp, unidentified
  source 1..50: mol_type = unassigned DNA; note = target_9d9be55
  misc_feature 1..23: note = LF
  misc_feature 24..25: note = Core
  misc_feature 26..50: note = RF
cattttccagcggcctgtgtttatgggttccgagctcgcagccttcggcc

SEQ ID NO: 26540 - DNA, 50 bp, unidentified
  source 1..50: mol_type = unassigned DNA; note = target_9da88fa
  misc_feature 1..23: note = LF
  misc_feature 24..25: note = Core
  misc_feature 26..50: note = RF
ctttttcaacagaatcggccaatagcggacattttcaaacacggctggcg

SEQ ID NO: 26541 - DNA, 50 bp, unidentified
  source 1..50: mol_type = unassigned DNA; note = target_9dc7834
  misc_feature 1..21: note = LF
  misc_feature 22..25: note = Core
  misc_feature 26..50: note = RF
cgtgtgcacagtcggctacgcctaacccagacctttcagttgtggtctgg

SEQ ID NO: 26542 - DNA, 50 bp, unidentified
  source 1..50: mol_type = unassigned DNA; note = target_9dd641b
  misc_feature 1..23: note = LF
  misc_feature 24..25: note = Core
  misc_feature 26..50: note = RF
gctggcggttatcgcccgccctaatgtaggagcgaggcttgcccgcgaag

SEQ ID NO: 26543 - DNA, 50 bp, unidentified
  source 1..50: mol_type = unassigned DNA; note = target_9de003b
  misc_feature 1..24: note = LF
  misc_feature 25: note = Core
  misc_feature 26..50: note = RF
ggacagtgagggatatagttctgattgggtcaaaagcgccgtttagacgg

SEQ ID NO: 26544 - DNA, 50 bp, unidentified
  source 1..50: mol_type = unassigned DNA; note = target_9de3743
  misc_feature 1..24: note = LF
  misc_feature 25: note = Core
  misc_feature 26..50: note = RF
taacaaaaattaaaatctaatgaccgatttgggttaaacccgaatctaca

SEQ ID NO: 26545 - DNA, 50 bp, unidentified
  source 1..50: mol_type = unassigned DNA; note = target_9de754a
  misc_feature 1..24: note = LF
  misc_feature 25: note = Core
  misc_feature 26..50: note = RF
acttcgcgacgctgggacctatccgtcattttgtgggcgaggcatatcat

SEQ ID NO: 26546 - DNA, 50 bp, unidentified
  source 1..50: mol_type = unassigned DNA; note = target_9de8a92
  misc_feature 1..21: note = LF
  misc_feature 22..25: note = Core
  misc_feature 26..50: note = RF
gtaagcatgtattgcttcccgtcattgcgaacgaagtgaagcaatctgtg

SEQ ID NO: 26547 - DNA, 50 bp, unidentified
  source 1..50: mol_type = unassigned DNA; note = target_9df8636
  misc_feature 1..23: note = LF
  misc_feature 24..25: note = Core
  misc_feature 26..50: note = RF
gcgacggcaggccttcttagaaccggtcatttgccaccgtcacccgtacg

SEQ ID NO: 26548 - DNA, 50 bp, unidentified
  source 1..50: mol_type = unassigned DNA; note = target_9e0441c
  misc_feature 1..24: note = LF
  misc_feature 25: note = Core
  misc_feature 26..50: note = RF
gcactcagcgtttgggggaagtttttttgaacgctgcgatgatttcaaca

SEQ ID NO: 26549 - DNA, 50 bp, unidentified
  source 1..50: mol_type = unassigned DNA; note = target_9e04a8a
  misc_feature 1..23: note = LF
  misc_feature 24..25: note = Core
  misc_feature 26..50: note = RF
tgaaaaaaattcaaaaatactaactccataccatccatagcaaaggagtc

SEQ ID NO: 26550 - DNA, 50 bp, unidentified
  source 1..50: mol_type = unassigned DNA; note = target_9e06ba4
  misc_feature 1..24: note = LF
  misc_feature 25: note = Core
  misc_feature 26..50: note = RF
tttaattgatgcgaccgggattggcgtcccgaacatttttctggcttagg

SEQ ID NO: 26551 - DNA, 50 bp, unidentified
  source 1..50: mol_type = unassigned DNA; note = target_9e0b8e4
  misc_feature 1..23: note = LF
  misc_feature 24..25: note = Core
  misc_feature 26..50: note = RF
gatgactgtcaggaaagcccagatacacctctgtgggcctgtaccggcgt

SEQ ID NO: 26552 - DNA, 50 bp, unidentified
  source 1..50: mol_type = unassigned DNA; note = target_9e152f2
  misc_feature 1..23: note = LF
  misc_feature 24..25: note = Core
  misc_feature 26..50: note = RF
cgcgtgagagcggcgaccggatgtgaggttgtataggcccgagaaccggg

SEQ ID NO: 26553 - DNA, 50 bp, unidentified
  source 1..50: mol_type = unassigned DNA; note = target_9e15db0
  misc_feature 1..24: note = LF
  misc_feature 25: note = Core
  misc_feature 26..50: note = RF
tatcctgagggttatggctggtgctgacaagtaaatcgctagaacagatg

SEQ ID NO: 26554 - DNA, 50 bp, unidentified
  source 1..50: mol_type = unassigned DNA; note = target_9e185b8
  misc_feature 1..24: note = LF
  misc_feature 25: note = Core
  misc_feature 26..50: note = RF
ggcggcaccgcgaccgccgagcggcattagcgtgcgacaccgcgcacgcc

SEQ ID NO: 26555 - DNA, 50 bp, unidentified
  source 1..50: mol_type = unassigned DNA; note = target_9e1e3a3
  misc_feature 1..23: note = LF
  misc_feature 24..25: note = Core
  misc_feature 26..50: note = RF
atgctctcggccgtctggttgtcagtcatggtccgctcctacgatccggc

SEQ ID NO: 26556 - DNA, 50 bp, unidentified
  source 1..50: mol_type = unassigned DNA; note = target_9e27519
  misc_feature 1..22: note = LF
  misc_feature 23..25: note = Core
  misc_feature 26..50: note = RF
tcgaccaaacgaaatccttctgatttgtagggctgtgtgcgactagcact

SEQ ID NO: 26557 - DNA, 50 bp, unidentified
  source 1..50: mol_type = unassigned DNA; note = target_9e2a7b5
  misc_feature 1..24: note = LF
  misc_feature 25: note = Core
  misc_feature 26..50: note = RF
ggttccgaacatcactgctctcggcatgagcggatgtcgacgaggcgcga

SEQ ID NO: 26558 - DNA, 50 bp, unidentified
  source 1..50: mol_type = unassigned DNA; note = target_9e2f941
  misc_feature 1..23: note = LF
  misc_feature 24..25: note = Core
  misc_feature 26..50: note = RF
ggtgctgaatttatcagtgcttccttacctatcgacaacgacagcgcaga

SEQ ID NO: 26559 - DNA, 50 bp, unidentified
  source 1..50: mol_type = unassigned DNA; note = target_9e33bcf
  misc_feature 1..24: note = LF
  misc_feature 25: note = Core
  misc_feature 26..50: note = RF
ccatgccgggcgagcgcgtggaggactactgatgtggaaactcccttggc

SEQ ID NO: 26560 - DNA, 50 bp, unidentified
  source 1..50: mol_type = unassigned DNA; note = target_9e393ed
  misc_feature 1..22: note = LF
  misc_feature 23..25: note = Core
  misc_feature 26..50: note = RF
aaggttgtgggctgagcgaatgtgcaacctttattcaatgaccaaggccc

SEQ ID NO: 26561 - DNA, 50 bp, unidentified
  source 1..50: mol_type = unassigned DNA; note = target_9e39afb
  misc_feature 1..23: note = LF
  misc_feature 24..25: note = Core
  misc_feature 26..50: note = RF
gaggatctcgcgctccacccatcctacccccacccggccccagtatttcc

SEQ ID NO: 26562 - DNA, 50 bp, unidentified
  source 1..50: mol_type = unassigned DNA; note = target_9e48e02
  misc_feature 1..23: note = LF
  misc_feature 24..25: note = Core
  misc_feature 26..50: note = RF
agacggcctctggtcattacttcctgaaatcttgatttggtggagatgag

SEQ ID NO: 26563 - DNA, 50 bp, unidentified
  source 1..50: mol_type = unassigned DNA; note = target_9e4be2d
  misc_feature 1..24: note = LF
  misc_feature 25: note = Core
  misc_feature 26..50: note = RF
tgcttactggggctcgatgtctgctactctgctaagcgtcgtcctctgac

SEQ ID NO: 26564 - DNA, 50 bp, unidentified
  source 1..50: mol_type = unassigned DNA; note = target_9e4eec8
  misc_feature 1..24: note = LF
  misc_feature 25: note = Core
  misc_feature 26..50: note = RF
aggaccgaagggccgctaatgacccaaaggcgacatacatcactcgccat

SEQ ID NO: 26565 - DNA, 50 bp, unidentified
  source 1..50: mol_type = unassigned DNA; note = target_9e4f83d
  misc_feature 1..23: note = LF
  misc_feature 24..25: note = Core
  misc_feature 26..50: note = RF
gcacccaaagggcataaacggcgctcctacgagtccttgccttctctgtg

SEQ ID NO: 26566 - DNA, 50 bp, unidentified
  source 1..50: mol_type = unassigned DNA; note = target_9e5625a
  misc_feature 1..23: note = LF
  misc_feature 24..25: note = Core
  misc_feature 26..50: note = RF
tgtcatccgcctggcggtgatgctgtatgtgcgcttcccgctgtcgctga

SEQ ID NO: 26567 - DNA, 50 bp, unidentified
  source 1..50: mol_type = unassigned DNA; note = target_9e61f08
  misc_feature 1..23: note = LF
  misc_feature 24..25: note = Core
  misc_feature 26..50: note = RF
ccgatcgcggccatgggccgctcctacaggtgccagaacctaccttttgt

SEQ ID NO: 26568 - DNA, 50 bp, unidentified
  source 1..50: mol_type = unassigned DNA; note = target_9e69db3
  misc_feature 1..22: note = LF
  misc_feature 23..25: note = Core
  misc_feature 26..50: note = RF
ttctgcgggacaaccggagatccttcgtcgctccgctcctcaggatagag

SEQ ID NO: 26569 - DNA, 50 bp, unidentified
  source 1..50: mol_type = unassigned DNA; note = target_9e715b0
  misc_feature 1..23: note = LF
  misc_feature 24..25: note = Core
  misc_feature 26..50: note = RF
atctgcctgctgccggcgtgacgctcagaccgcctgccgttccgcccgcc

SEQ ID NO: 26570 - DNA, 50 bp, unidentified
  source 1..50: mol_type = unassigned DNA; note = target_9e733d7
  misc_feature 1..24: note = LF
  misc_feature 25: note = Core
  misc_feature 26..50: note = RF
cgaccctacgcaagcctagtagggcgggtgcaacccgccagccatggcga

SEQ ID NO: 26571 - DNA, 50 bp, unidentified
  source 1..50: mol_type = unassigned DNA; note = target_9e7f9dd
  misc_feature 1..23: note = LF
  misc_feature 24..25: note = Core
  misc_feature 26..50: note = RF
atgggtgctggcgtgacatatgttctccttcgtggtgatttgctagtcga

SEQ ID NO: 26572 - DNA, 50 bp, unidentified
  source 1..50: mol_type = unassigned DNA; note = target_9e8a377
  misc_feature 1..23: note = LF
  misc_feature 24..25: note = Core
  misc_feature 26..50: note = RF
ttcctggcacgggtttccgctattggcacaaagcgggcatggcatgcagt

SEQ ID NO: 26573 - DNA, 50 bp, unidentified
  source 1..50: mol_type = unassigned DNA; note = target_9e9655c
  misc_feature 1..24: note = LF
  misc_feature 25: note = Core
  misc_feature 26..50: note = RF
gtgaacgtattcatggcgccgaacggttgagttcagcggccgccgaaggc

SEQ ID NO: 26574 - DNA, 50 bp, unidentified
  source 1..50: mol_type = unassigned DNA; note = target_9e985e6
  misc_feature 1..23: note = LF
  misc_feature 24..25: note = Core
  misc_feature 26..50: note = RF
tcgccgatgcgaagcgccgggaatgacatccgagctgttcggtcggatga

SEQ ID NO: 26575 - DNA, 50 bp, unidentified
  source 1..50: mol_type = unassigned DNA; note = target_9e99275
  misc_feature 1..24: note = LF
  misc_feature 25: note = Core
  misc_feature 26..50: note = RF
tccttcgcgaagtacgcacaggccttttttaggatgtcgcgctccatctt

SEQ ID NO: 26576 - DNA, 50 bp, unidentified
  source 1..50: mol_type = unassigned DNA; note = target_9e99dc4
  misc_feature 1..23: note = LF
  misc_feature 24..25: note = Core
  misc_feature 26..50: note = RF
tctcagccatgatcaatttcctcctttctattttttaaatattttaattt

SEQ ID NO: 26577 - DNA, 50 bp, unidentified
  source 1..50: mol_type = unassigned DNA; note = target_9e9d6f5
  misc_feature 1..23: note = LF
  misc_feature 24..25: note = Core
  misc_feature 26..50: note = RF
tagggctacccccgaccgaaagctgccgttccggttccgacccttcgcag

SEQ ID NO: 26578 - DNA, 50 bp, unidentified
  source 1..50: mol_type = unassigned DNA; note = target_9e9fc57
  misc_feature 1..24: note = LF
  misc_feature 25: note = Core
  misc_feature 26..50: note = RF
gcaacgcggcaccaacgagaacaccaacggcctgctgcgtgactacttcc

SEQ ID NO: 26579 - DNA, 50 bp, unidentified
  source 1..50: mol_type = unassigned DNA; note = target_9ea2cdd
  misc_feature 1..21: note = LF
  misc_feature 22..25: note = Core
  misc_feature 26..50: note = RF
ttcgggcggccgtgcggggcgctcattcgatgttctgcacctgctcgcgc

SEQ ID NO: 26580 - DNA, 50 bp, unidentified
  source 1..50: mol_type = unassigned DNA; note = target_9ea9abf
  misc_feature 1..20: note = LF
  misc_feature 21..25: note = Core
  misc_feature 26..50: note = RF
cgtcgatccgctgtcgggtccaccccccgggtcgggctcgatatagccga

SEQ ID NO: 26581 - DNA, 50 bp, unidentified
  source 1..50: mol_type = unassigned DNA; note = target_9ea9e63
  misc_feature 1..23: note = LF
  misc_feature 24..25: note = Core
  misc_feature 26..50: note = RF
gtcattggggcggccctgcggcgctcattggacccccacgcttgcggctg

SEQ ID NO: 26582 - DNA, 50 bp, unidentified
  source 1..50: mol_type = unassigned DNA; note = target_9ead38f
  misc_feature 1..24: note = LF
  misc_feature 25: note = Core
  misc_feature 26..50: note = RF
ttgaggtccatttttgatcttaacgtacaatagcttgcgatacccaaact

SEQ ID NO: 26583 - DNA, 50 bp, unidentified
  source 1..50: mol_type = unassigned DNA; note = target_9eae5e1
  misc_feature 1..23: note = LF
  misc_feature 24..25: note = Core
  misc_feature 26..50: note = RF
aaagtggtcgtccgactgggcgttgttgcagaaacgctgcctgacgcgtg

SEQ ID NO: 26584 - DNA, 50 bp, unidentified
  source 1..50: mol_type = unassigned DNA; note = target_9eb2338
  misc_feature 1..23: note = LF
  misc_feature 24..25: note = Core
  misc_feature 26..50: note = RF
cgtctggaaggccgcgcgcgccgctaggacgagagcacgcccgcgagctg

SEQ ID NO: 26585 - DNA, 50 bp, unidentified
  source 1..50: mol_type = unassigned DNA; note = target_9ebfa6b
  misc_feature 1..23: note = LF
  misc_feature 24..25: note = Core
  misc_feature 26..50: note = RF
cgacttcgcttcgctggtcgaccctctctatcgctgtgcgacaaagaggt

SEQ ID NO: 26586 - DNA, 50 bp, unidentified
  source 1..50: mol_type = unassigned DNA; note = target_9ec6b8c
  misc_feature 1..19: note = LF
  misc_feature 20..25: note = Core
  misc_feature 26..50: note = RF
tctggatcccgcactggcacccccccgagtcgtggcagaacgcgcgggtg

SEQ ID NO: 26587 - DNA, 50 bp, unidentified
  source 1..50: mol_type = unassigned DNA; note = target_9ec9a8c
  misc_feature 1..24: note = LF
  misc_feature 25: note = Core
  misc_feature 26..50: note = RF
agcgctggtcggcacgctatgcggcattacagctcactcgagcgacccac

SEQ ID NO: 26588 - DNA, 50 bp, unidentified
  source 1..50: mol_type = unassigned DNA; note = target_9ec9c36
  misc_feature 1..23: note = LF
  misc_feature 24..25: note = Core
  misc_feature 26..50: note = RF
aaatttttaaaacccttttccagattcctaaccatgaactggtgcatgtg

SEQ ID NO: 26589 - DNA, 50 bp, unidentified
  source 1..50: mol_type = unassigned DNA; note = target_9ed16f8
  misc_feature 1..22: note = LF
  misc_feature 23..25: note = Core
  misc_feature 26..50: note = RF
cggttggtgagctggattagcttgaaccgctgcttcgacatgtagagacc

SEQ ID NO: 26590 - DNA, 50 bp, unidentified
  source 1..50: mol_type = unassigned DNA; note = target_9ede413
  misc_feature 1..24: note = LF
  misc_feature 25: note = Core
  misc_feature 26..50: note = RF
tcggccaccctgactccattgcggcgatatgacgcggttgaattcgttgc

SEQ ID NO: 26591 - DNA, 50 bp, unidentified
  source 1..50: mol_type = unassigned DNA; note = target_9ee2560
  misc_feature 1..24: note = LF
  misc_feature 25: note = Core
  misc_feature 26..50: note = RF
attataatatattacttcacgtcttgacccctttactttacaccgtcgcc

SEQ ID NO: 26592 - DNA, 50 bp, unidentified
  source 1..50: mol_type = unassigned DNA; note = target_9eeb9ec
  misc_feature 1..23: note = LF
  misc_feature 24..25: note = Core
  misc_feature 26..50: note = RF
gcactgcgttattacctacatggatgtaggtacttatgatttgtaaggaa

SEQ ID NO: 26593 - DNA, 50 bp, unidentified
  source 1..50: mol_type = unassigned DNA; note = target_9ef6445
  misc_feature 1..23: note = LF
  misc_feature 24..25: note = Core
  misc_feature 26..50: note = RF
gtttttaccacttaattgccctccttattgtaattttcgcctgttttatc

SEQ ID NO: 26594 - DNA, 50 bp, unidentified
  source 1..50: mol_type = unassigned DNA; note = target_9ef9c8e
  misc_feature 1..24: note = LF
  misc_feature 25: note = Core
  misc_feature 26..50: note = RF
tttcctaacaggcctgatgtccgatcgggtcattctcgaccaaatagggc

SEQ ID NO: 26595 - DNA, 50 bp, unidentified; identical to SEQ ID NO: 24185
  source 1..50: mol_type = unassigned DNA; note = target_9efe97b
  misc_feature 1..23: note = LF
  misc_feature 24..25: note = Core
  misc_feature 26..50: note = RF

SEQ ID NO: 26596 - DNA, 50 bp, unidentified
  source 1..50: mol_type = unassigned DNA; note = target_9f089a5
  misc_feature 1..23: note = LF
  misc_feature 24..25: note = Core
  misc_feature 26..50: note = RF
ccgctggtcggcggatgggaatgaggggttcgtattcagaccccttaggg

SEQ ID NO: 26597 - DNA, 50 bp, unidentified
  source 1..50: mol_type = unassigned DNA; note = target_9f0b611
  misc_feature 1..23: note = LF
  misc_feature 24..25: note = Core
  misc_feature 26..50: note = RF
cggcgtttctgttcgtgcaacccctcacccgaccccactccgtggggcca

SEQ ID NO: 26598 - DNA, 50 bp, unidentified
  source 1..50: mol_type = unassigned DNA; note = target_9f0cf3e
  misc_feature 1..23: note = LF
  misc_feature 24..25: note = Core
  misc_feature 26..50: note = RF
ccgcacgatagccgcgaggggtcagggatcgcggcacgcgaccgccaggg

SEQ ID NO: 26599 - DNA, 50 bp, unidentified
  source 1..50: mol_type = unassigned DNA; note = target_9f10d06
  misc_feature 1..23: note = LF
  misc_feature 24..25: note = Core
  misc_feature 26..50: note = RF
acgaatggagcactcaagcggacatttcaactttgccaaaaccggacata

SEQ ID NO: 26600 - DNA, 50 bp, unidentified
  source 1..50: mol_type = unassigned DNA; note = target_9f134d4
  misc_feature 1..23: note = LF
  misc_feature 24..25: note = Core
  misc_feature 26..50: note = RF
gtttcgctaacgctcaacccatcctaggtgaagggaaagaaaggacaaga

SEQ ID NO: 26601 - DNA, 50 bp, unidentified
  source 1..50: mol_type = unassigned DNA; note = target_9f28cc1
  misc_feature 1..22: note = LF
  misc_feature 23..25: note = Core
  misc_feature 26..50: note = RF
gattccctccgcgcgttttgtctgaatctatatggggctcccatccttga

SEQ ID NO: 26602 - DNA, 50 bp, unidentified
  source 1..50: mol_type = unassigned DNA; note = target_9f295db
  misc_feature 1..23: note = LF
  misc_feature 24..25: note = Core
  misc_feature 26..50: note = RF
caggcgcagcggacggcctgactagtacatcgtttttgaggttcgaatca

SEQ ID NO: 26603 - DNA, 50 bp, unidentified
  source 1..50: mol_type = unassigned DNA; note = target_9f2ac06
  misc_feature 1..23: note = LF
  misc_feature 24..25: note = Core
  misc_feature 26..50: note = RF
tttgcgcgtgacgtcttgatctcctgtcagcgccgcctgggcgaagtcat

SEQ ID NO: 26604 - DNA, 50 bp, unidentified
  source 1..50: mol_type = unassigned DNA; note = target_9f301da
  misc_feature 1..23: note = LF
  misc_feature 24..25: note = Core
  misc_feature 26..50: note = RF
gcgaccctgcagggccgccgcgcctttcaccggcgaacgcgagcccgact

SEQ ID NO: 26605 - DNA, 50 bp, unidentified
  source 1..50: mol_type = unassigned DNA; note = target_9f39cd1
  misc_feature 1..23: note = LF
  misc_feature 24..25: note = Core
  misc_feature 26..50: note = RF
gatttgtcaacatttttctgctcctttccgcgctttgctttcgcgcaata

SEQ ID NO: 26606 - DNA, 50 bp, unidentified
  source 1..50: mol_type = unassigned DNA; note = target_9f40186
  misc_feature 1..23: note = LF
  misc_feature 24..25: note = Core
  misc_feature 26..50: note = RF
ctgcggtgcaacgagtctgtttctggcactttgccgacatggctaacctg

SEQ ID NO: 26607 - DNA, 50 bp, unidentified
  source 1..50: mol_type = unassigned DNA; note = target_9f44f32
  misc_feature 1..22: note = LF
  misc_feature 23..25: note = Core
  misc_feature 26..50: note = RF
gtcgcgcatgcgagacttgatcagagcttccctagggtaccgtaacagca

SEQ ID NO: 26608 - DNA, 50 bp, unidentified
  source 1..50: mol_type = unassigned DNA; note = target_9f4f370
  misc_feature 1..23: note = LF
  misc_feature 24..25: note = Core
  misc_feature 26..50: note = RF
taaactgttccatagaaatactcctatttcatcagcttctgaatcgtcgc

SEQ ID NO: 26609 - DNA, 50 bp, unidentified
  source 1..50: mol_type = unassigned DNA; note = target_9f57b39
  misc_feature 1..23: note = LF
  misc_feature 24..25: note = Core
  misc_feature 26..50: note = RF
atcaataagtttgcttgtaagcaatccaatatagagcggcgttgcaagtc

SEQ ID NO: 26610 - DNA, 50 bp, unidentified
  source 1..50: mol_type = unassigned DNA; note = target_9f66169
  misc_feature 1..23: note = LF
  misc_feature 24..25: note = Core
  misc_feature 26..50: note = RF
actcgacagctcctacacagctcctacacagctcctacacagctccctcg

SEQ ID NO: 26611 - DNA, 50 bp, unidentified
  source 1..50: mol_type = unassigned DNA; note = target_9f67ac6
  misc_feature 1..23: note = LF
  misc_feature 24..25: note = Core
  misc_feature 26..50: note = RF
catctggacaaagtccatatcctcttaacgaatgacgcccgatgaggtca

SEQ ID NO: 26612 - DNA, 50 bp, unidentified
  source 1..50: mol_type = unassigned DNA; note = target_9f6a778
  misc_feature 1..23: note = LF
  misc_feature 24..25: note = Core
  misc_feature 26..50: note = RF
tctccgatgcggcgatccagttttgcctgacgatcaaagttctgttcaag

SEQ ID NO: 26613 - DNA, 50 bp, unidentified
  source 1..50: mol_type = unassigned DNA; note = target_9f6b814
  misc_feature 1..23: note = LF
  misc_feature 24..25: note = Core
  misc_feature 26..50: note = RF
tgggaagcgcgcccgcttggcgttgttgcagaagtcgcaagccggaacga

SEQ ID NO: 26614 - DNA, 50 bp, unidentified
  source 1..50: mol_type = unassigned DNA; note = target_9f6c062
  misc_feature 1..23: note = LF
  misc_feature 24..25: note = Core
  misc_feature 26..50: note = RF
cggaccatcctgcacgggacggcctcaggcctgccgccagctcaggccaa

SEQ ID NO: 26615 - DNA, 50 bp, unidentified
  source 1..50: mol_type = unassigned DNA; note = target_9f7020e
  misc_feature 1..24: note = LF
  misc_feature 25: note = Core
  misc_feature 26..50: note = RF
ttggaagcgctgcgcgctcccacttttgcgggaccaatcccaaatcggtt

SEQ ID NO: 26616 - DNA, 50 bp, unidentified
  source 1..50: mol_type = unassigned DNA; note = target_9f76184
  misc_feature 1..23: note = LF
  misc_feature 24..25: note = Core
  misc_feature 26..50: note = RF
tttccgctccatttttgttacccctttagtatagacattatcgccaattt

SEQ ID NO: 26617 - DNA, 50 bp, unidentified
  source 1..50: mol_type = unassigned DNA; note = target_9f774cb
  misc_feature 1..23: note = LF
  misc_feature 24..25: note = Core
  misc_feature 26..50: note = RF
atgaagctgtgacaccttcgctcaggatgacagatctttgaatgggatgg

SEQ ID NO: 26618 - DNA, 50 bp, unidentified
  source 1..50: mol_type = unassigned DNA; note = target_9f786b2
  misc_feature 1..20: note = LF
  misc_feature 21..25: note = Core
  misc_feature 26..50: note = RF
agctctaacgaaagttagggctttttttattttatggaatgggatccgct

SEQ ID NO: 26619 - DNA, 50 bp, unidentified
  source 1..50: mol_type = unassigned DNA; note = target_9f7b671
  misc_feature 1..23: note = LF
  misc_feature 24..25: note = Core
  misc_feature 26..50: note = RF
accctccgaatgtcggcaaggggtggaaagcggagcttgacgcgccgcga

SEQ ID NO: 26620 - DNA, 50 bp, unidentified
  source 1..50: mol_type = unassigned DNA; note = target_9f7cb41
  misc_feature 1..23: note = LF
  misc_feature 24..25: note = Core
  misc_feature 26..50: note = RF
cgcttgggtagccttattccggcctacgcagtttttaatgcgcaacatcg

SEQ ID NO: 26621 - DNA, 50 bp, unidentified
  source 1..50: mol_type = unassigned DNA; note = target_9f84aa4
  misc_feature 1..24: note = LF
  misc_feature 25: note = Core
  misc_feature 26..50: note = RF
tacccgaacgtgtcaaaagccaatttccgagaagacgggcggtctcaatg

SEQ ID NO: 26622 - DNA, 50 bp, unidentified
  source 1..50: mol_type = unassigned DNA; note = target_9f85b00
  misc_feature 1..24: note = LF
  misc_feature 25: note = Core
  misc_feature 26..50: note = RF
cgggaagggcgggtcgatggcagacggggcggcataaccgctcctaatcg

SEQ ID NO: 26623 - DNA, 50 bp, unidentified
  source 1..50: mol_type = unassigned DNA; note = target_9f87473
  misc_feature 1..24: note = LF
  misc_feature 25: note = Core
  misc_feature 26..50: note = RF
cccttggtcgaagccattctgaatcgttccgggtttcgcggatatcgcta

SEQ ID NO: 26624 - DNA, 50 bp, unidentified
  source 1..50: mol_type = unassigned DNA; note = target_9f886d5
  misc_feature 1..23: note = LF
  misc_feature 24..25: note = Core
  misc_feature 26..50: note = RF
tcacacccattttttcttacctccttattagaataataaccgcaatacac

SEQ ID NO: 26625 - DNA, 50 bp, unidentified
  source 1..50: mol_type = unassigned DNA; note = target_9f8ac1d
  misc_feature 1..23: note = LF
  misc_feature 24..25: note = Core
  misc_feature 26..50: note = RF
aggagctgtcaaggcttctcctcctttcaggtgcaatgtatttgcaccca

SEQ ID NO: 26626 - DNA, 50 bp, unidentified
  source 1..50: mol_type = unassigned DNA; note = target_9f9c82d
  misc_feature 1..23: note = LF
  misc_feature 24..25: note = Core
  misc_feature 26..50: note = RF
atggatcactcccatggctgagaagcgggtcatggggcacacctcggaac

SEQ ID NO: 26627 - DNA, 50 bp, unidentified
  source 1..50: mol_type = unassigned DNA; note = target_9f9cc9e
  misc_feature 1..23: note = LF
  misc_feature 24..25: note = Core
  misc_feature 26..50: note = RF
caccgattgagcccatgtacctcctaagatattcgctatcaattgatagc

SEQ ID NO: 26628 - DNA, 50 bp, unidentified
  source 1..50: mol_type = unassigned DNA; note = target_9f9e366
  misc_feature 1..22: note = LF
  misc_feature 23..25: note = Core
  misc_feature 26..50: note = RF
cgtggccatcgcgagcaagcccgctcccacattcgagcgcattcccatgc

SEQ ID NO: 26629 - DNA, 50 bp, unidentified
  source 1..50: mol_type = unassigned DNA; note = target_9fa0455
  misc_feature 1..24: note = LF
  misc_feature 25: note = Core
  misc_feature 26..50: note = RF
gcgtgacattgagttcgggaatgtccccccgacgctgacgcgtagctgtc

SEQ ID NO: 26630 - DNA, 50 bp, unidentified
  source 1..50: mol_type = unassigned DNA; note = target_9fa3272
  misc_feature 1..23: note = LF
  misc_feature 24..25: note = Core
  misc_feature 26..50: note = RF
tgcaatcaaaaggaaaacaaaggaggattttttatgagcaacaaaaaaac

SEQ ID NO: 26631 - DNA, 50 bp, unidentified
  source 1..50: mol_type = unassigned DNA; note = target_9fa7788
  misc_feature 1..24: note = LF
  misc_feature 25: note = Core
  misc_feature 26..50: note = RF
cagacccagaagcgaagccactttttttttggatgtcgatgacctgcctc

SEQ ID NO: 26632 - DNA, 50 bp, unidentified
  source 1..50: mol_type = unassigned DNA; note = target_9fa7ac7
  misc_feature 1..23: note = LF
  misc_feature 24..25: note = Core
  misc_feature 26..50: note = RF
tgatgatcgcaagcttgccgtccaccgtgcggtgatcgaggtagaagaag

SEQ ID NO: 26633 - DNA, 50 bp, unidentified
  source 1..50: mol_type = unassigned DNA; note = target_9fa9afb
  misc_feature 1..23: note = LF
  misc_feature 24..25: note = Core
  misc_feature 26..50: note = RF
aatatagtcttagcgtgggataattcgttttctgagacgacccctagcgg

SEQ ID NO: 26634 - DNA, 50 bp, unidentified
  source 1..50: mol_type = unassigned DNA; note = target_9fabac3
  misc_feature 1..23: note = LF
  misc_feature 24..25: note = Core
  misc_feature 26..50: note = RF
gcgccgatcacctcgtcagtagctgtcattcgttcaggttgtctcgcata

SEQ ID NO: 26635 - DNA, 50 bp, unidentified
  source 1..50: mol_type = unassigned DNA; note = target_9faecf0
  misc_feature 1..23: note = LF
  misc_feature 24..25: note = Core
  misc_feature 26..50: note = RF
aaagagctaaagcgcgcgacgcgctttagccgccaaggagatcgaggatc

SEQ ID NO: 26636 - DNA, 50 bp, unidentified
  source 1..50: mol_type = unassigned DNA; note = target_9fb467d
  misc_feature 1..22: note = LF
  misc_feature 23..25: note = Core
  misc_feature 26..50: note = RF
cgctgagccttcgacacctggaagagatgatggcggagcgcggaatctca

SEQ ID NO: 26637 - DNA, 50 bp, unidentified
  source 1..50: mol_type = unassigned DNA; note = target_9fd0f4e
  misc_feature 1..21: note = LF
  misc_feature 22..25: note = Core
  misc_feature 26..50: note = RF
gattaacatgaaaaggttttctttgactacagaggcgcagtatttgaggc

SEQ ID NO: 26638 - DNA, 50 bp, unidentified
  source 1..50: mol_type = unassigned DNA; note = target_9fd3e10
  misc_feature 1..23: note = LF
  misc_feature 24..25: note = Core
  misc_feature 26..50: note = RF
gttgtaattctaatgtccgcaattgggtcgaaaccggccattagcctcga

SEQ ID NO: 26639 - DNA, 50 bp, unidentified
  source 1..50: mol_type = unassigned DNA; note = target_9fdc819
  misc_feature 1..23: note = LF
  misc_feature 24..25: note = Core
  misc_feature 26..50: note = RF
cgcgacgaattttttcacaagctctcagccggcacgtttgcgccgccaca

SEQ ID NO: 26640 - DNA, 50 bp, unidentified
  source 1..50: mol_type = unassigned DNA; note = target_9feebd8
  misc_feature 1..23: note = LF
  misc_feature 24..25: note = Core
  misc_feature 26..50: note = RF
ccaactgaatggcgtctaactgatcgtttcagaatgaggttcgaagtcgt

SEQ ID NO: 26641 - DNA, 50 bp, unidentified
  source 1..50: mol_type = unassigned DNA; note = target_9ff7f58
  misc_feature 1..23: note = LF
  misc_feature 24..25: note = Core
  misc_feature 26..50: note = RF
ggcggctttcgtgaacccggttgctgtcagcgttgctgtcaaccggccga

SEQ ID NO: 26642 - DNA, 50 bp, unidentified
  source 1..50: mol_type = unassigned DNA; note = target_a0040df
  misc_feature 1..24: note = LF
  misc_feature 25: note = Core
  misc_feature 26..50: note = RF
atgatccccttcatccggaggggatttttttcgtctgttttcatgaaaat

SEQ ID NO: 26643 - DNA, 50 bp, unidentified
  source 1..50: mol_type = unassigned DNA; note = target_a01d8ca
  misc_feature 1..23: note = LF
  misc_feature 24..25: note = Core
  misc_feature 26..50: note = RF
gtcttgctctggtgaacaattcttgaattttgacggccaaggtcaggcat

SEQ ID NO: 26644 - DNA, 50 bp, unidentified
  source 1..50: mol_type = unassigned DNA; note = target_a01deea
  misc_feature 1..23: note = LF
  misc_feature 24..25: note = Core
  misc_feature 26..50: note = RF
ctacgtgcattttcgaccaggctctcaggatgaggcgatccaaccctgaa

SEQ ID NO: 26645 - DNA, 50 bp, unidentified
  source 1..50: mol_type = unassigned DNA; note = target_a01e8f3
  misc_feature 1..23: note = LF
  misc_feature 24..25: note = Core
  misc_feature 26..50: note = RF
cagcgccaaggccagcagatagaacggatcgagcgggtccggtaaccgga

SEQ ID NO: 26646 - DNA, 50 bp, unidentified
  source 1..50: mol_type = unassigned DNA; note = target_a022488
  misc_feature 1..24: note = LF
  misc_feature 25: note = Core
  misc_feature 26..50: note = RF
catgccggtggcgctggatgaaggcgtacttcaaatcgaccctcttgcga

SEQ ID NO: 26647 - DNA, 50 bp, unidentified
  source 1..50: mol_type = unassigned DNA; note = target_a022b17
  misc_feature 1..23: note = LF
  misc_feature 24..25: note = Core
  misc_feature 26..50: note = RF
cggcatggatgccgcataagagcctccatggacggattcacgccgtgtcc

SEQ ID NO: 26648 - DNA, 50 bp, unidentified
  source 1..50: mol_type = unassigned DNA; note = target_a02ec3d
  misc_feature 1..23: note = LF
  misc_feature 24..25: note = Core
  misc_feature 26..50: note = RF
ttgcccactcagatatcacctacctttcttatttgagtttcggaggctta

SEQ ID NO: 26649 - DNA, 50 bp, unidentified
  source 1..50: mol_type = unassigned DNA; note = target_a03654c
  misc_feature 1..23: note = LF
  misc_feature 24..25: note = Core
  misc_feature 26..50: note = RF
atttccttcaacttttatcactccttgtattttagtataacataaatatt

SEQ ID NO: 26650 - DNA, 50 bp, unidentified
  source 1..50: mol_type = unassigned DNA; note = target_a0392df
  misc_feature 1..23: note = LF
  misc_feature 24..25: note = Core
  misc_feature 26..50: note = RF
catcaggccaccgggtatgtccatgcaccaacaccccgttgctggctggg

SEQ ID NO: 26651 - DNA, 50 bp, unidentified
  source 1..50: mol_type = unassigned DNA; note = target_a0461b1
  misc_feature 1..24: note = LF
  misc_feature 25: note = Core
  misc_feature 26..50: note = RF
cgaacggtagcgtccaccggcccccaccccccgctcgctgcgctcgcggc

SEQ ID NO: 26652 - DNA, 50 bp, unidentified
  source 1..50: mol_type = unassigned DNA; note = target_a04a096
  misc_feature 1..23: note = LF
  misc_feature 24..25: note = Core
  misc_feature 26..50: note = RF
agcaagatgcagtggcgcaggattgctatgattcggcggtctggatcaca

SEQ ID NO: 26653 - DNA, 50 bp, unidentified
  source 1..50: mol_type = unassigned DNA; note = target_a05c035
  misc_feature 1..23: note = LF
  misc_feature 24..25: note = Core
  misc_feature 26..50: note = RF
attcaaccccattctaaccaaagtgttctattatacaacgcgaagctcta

SEQ ID NO: 26654 - DNA, 50 bp, unidentified
  source 1..50: mol_type = unassigned DNA; note = target_a081272
  misc_feature 1..22: note = LF
  misc_feature 23..25: note = Core
  misc_feature 26..50: note = RF
attaaggtttttctatttaaaggagtcttcctttgtcagaagcagatgag

SEQ ID NO: 26655 - DNA, 50 bp, unidentified
  source 1..50: mol_type = unassigned DNA; note = target_a0860ec
  misc_feature 1..23: note = LF
  misc_feature 24..25: note = Core
  misc_feature 26..50: note = RF
gttatgcctctggctaacgcaccctacaactttttggtattccctcaatt

SEQ ID NO: 26656 - DNA, 50 bp, unidentified
  source 1..50: mol_type = unassigned DNA; note = target_a093431
  misc_feature 1..23: note = LF
  misc_feature 24..25: note = Core
  misc_feature 26..50: note = RF
gccgtggaggagatccgcctggcctagagcccctcgaacacgtcggtgat

SEQ ID NO: 26657 - DNA, 50 bp, unidentified
  source 1..50: mol_type = unassigned DNA; note = target_a09b6f9
  misc_feature 1..22: note = LF
  misc_feature 23..25: note = Core
  misc_feature 26..50: note = RF
ctgttggacagggtttccggcttttttctgttgttcgggagtttgacgaa

SEQ ID NO: 26658 - DNA, 50 bp, unidentified
  source 1..50: mol_type = unassigned DNA; note = target_a09bcd0
  misc_feature 1..24: note = LF
  misc_feature 25: note = Core
  misc_feature 26..50: note = RF
gagccgggaatgcactcaactcggcatgtccggactccgcgaggcaaccc

SEQ ID NO: 26659 - DNA, 50 bp, unidentified
  source 1..50: mol_type = unassigned DNA; note = target_a0a3ff7
  misc_feature 1..21: note = LF
  misc_feature 22..25: note = Core
  misc_feature 26..50: note = RF
aggtcctcggcggtcagtcggctcatcggtccacctcaggcgcccgcggc

SEQ ID NO: 26660 - DNA, 50 bp, unidentified
  source 1..50: mol_type = unassigned DNA; note = target_a0af2c6
  misc_feature 1..24: note = LF
  misc_feature 25: note = Core
  misc_feature 26..50: note = RF
taaatcttgctatattgcaagacctgaccccatagtctgcaaactgagta

SEQ ID NO: 26661 - DNA, 50 bp, unidentified
  source 1..50: mol_type = unassigned DNA; note = target_a0c3f81
  misc_feature 1..24: note = LF
  misc_feature 25: note = Core
  misc_feature 26..50: note = RF
gacagcgcagagcacctcatacatgtgggtctaccgcagtgccgaagaca

SEQ ID NO: 26662 - DNA, 50 bp, unidentified
  source 1..50: mol_type = unassigned DNA; note = target_a0c96c1
  misc_feature 1..23: note = LF
  misc_feature 24..25: note = Core
  misc_feature 26..50: note = RF
caatacggacgccgatccagctctgttgcaaaattcttgaacggcaaagg

SEQ ID NO: 26663 - DNA, 50 bp, unidentified
  source 1..50: mol_type = unassigned DNA; note = target_a0d8b69
  misc_feature 1..23: note = LF
  misc_feature 24..25: note = Core
  misc_feature 26..50: note = RF
aagatcgcagccttccgcagctcctacagggattgtgtgggttagaaggc

SEQ ID NO: 26664 - DNA, 50 bp, unidentified
  source 1..50: mol_type = unassigned DNA; note = target_a0e45c6
  misc_feature 1..23: note = LF
  misc_feature 24..25: note = Core
  misc_feature 26..50: note = RF
taactgtccataatatgcgaatcctttctaaggaacctctgaataatagc

SEQ ID NO: 26665 - DNA, 50 bp, unidentified
  source 1..50: mol_type = unassigned DNA; note = target_a0e5ffd
  misc_feature 1..23: note = LF
  misc_feature 24..25: note = Core
  misc_feature 26..50: note = RF
cgttctgttttcatactcaccaccttattataattaaagctctaagggga

SEQ ID NO: 26666 - DNA, 50 bp, unidentified; identical to SEQ ID NO: 22907
  source 1..50: mol_type = unassigned DNA; note = target_a0e7f8f
  misc_feature 1..23: note = LF
  misc_feature 24..25: note = Core
  misc_feature 26..50: note = RF

SEQ ID NO: 26667 - DNA, 50 bp, unidentified
  source 1..50: mol_type = unassigned DNA; note = target_a0f6037
  misc_feature 1..21: note = LF
  misc_feature 22..25: note = Core
  misc_feature 26..50: note = RF
cccagacccgcaggcagatagccccccgggcgatgaaggcatgctcgaca

SEQ ID NO: 26668 - DNA, 50 bp, unidentified
  source 1..50: mol_type = unassigned DNA; note = target_a0f8dba
  misc_feature 1..24: note = LF
  misc_feature 25: note = Core
  misc_feature 26..50: note = RF
gaggaatgatgcccgcaaggagattgtccatgagaaatatcaaagaaata

SEQ ID NO: 26669 - DNA, 50 bp, unidentified
  source 1..50: mol_type = unassigned DNA; note = target_a100f59
  misc_feature 1..20: note = LF
  misc_feature 21..25: note = Core
  misc_feature 26..50: note = RF
cgcccggcaccttccttgatgaaactaaaacttccataacctcgattaac

SEQ ID NO: 26670 - DNA, 50 bp, unidentified
  source 1..50: mol_type = unassigned DNA; note = target_a104ba6
  misc_feature 1..23: note = LF
  misc_feature 24..25: note = Core
  misc_feature 26..50: note = RF
gctgctcgagatgaccggccgctaggagcgcgacccgagactcatgtctc

SEQ ID NO: 26671 - DNA, 50 bp, unidentified
  source 1..50: mol_type = unassigned DNA; note = target_a10b7cc
  misc_feature 1..23: note = LF
  misc_feature 24..25: note = Core
  misc_feature 26..50: note = RF
gacggggcctcttgcccaggctcctatcgggtcacattcgcccgaccggt

SEQ ID NO: 26672 - DNA, 50 bp, unidentified
  source 1..50: mol_type = unassigned DNA; note = target_a10d7f3
  misc_feature 1..23: note = LF
  misc_feature 24..25: note = Core
  misc_feature 26..50: note = RF
gtgatatcacaatacgttgcttgctaagactgtaccacttcccccatggc

SEQ ID NO: 26673 - DNA, 50 bp, unidentified
  source 1..50: mol_type = unassigned DNA; note = target_a115a78
  misc_feature 1..23: note = LF
  misc_feature 24..25: note = Core
  misc_feature 26..50: note = RF
ctgtggtaaggtcggtcatggcgtggtctccgttccggcgctccaacgcc

SEQ ID NO: 26674 - DNA, 50 bp, unidentified
  source 1..50: mol_type = unassigned DNA; note = target_a11ac69
  misc_feature 1..24: note = LF
  misc_feature 25: note = Core
  misc_feature 26..50: note = RF
attagcatatatactctaaggcgcttctgcccccttagcgccatataagc

SEQ ID NO: 26675 - DNA, 50 bp, unidentified
  source 1..50: mol_type = unassigned DNA; note = target_a12526a
  misc_feature 1..24: note = LF
  misc_feature 25: note = Core
  misc_feature 26..50: note = RF
agccggagacaacaaagccccttgcggggctttctataataaattttgtt

SEQ ID NO: 26676 - DNA, 50 bp, unidentified
  source 1..50: mol_type = unassigned DNA; note = target_a125899
  misc_feature 1..23: note = LF
  misc_feature 24..25: note = Core
  misc_feature 26..50: note = RF
gccgcgcgttcgggacgctcaacctgaatccgccgatgatctttccccag

SEQ ID NO: 26677 - DNA, 50 bp, unidentified
  source 1..50: mol_type = unassigned DNA; note = target_a12d997
  misc_feature 1..22: note = LF
  misc_feature 23..25: note = Core
  misc_feature 26..50: note = RF
gttattacaggaatgctgccccgtttagtgaaagaaccgaaaataaagtg

SEQ ID NO: 26678 - DNA, 50 bp, unidentified
  source 1..50: mol_type = unassigned DNA; note = target_a13575d
  misc_feature 1..23: note = LF
  misc_feature 24..25: note = Core
  misc_feature 26..50: note = RF
ctgttcatgcgagatgaacaggttggtataaggtcgcaacctcacccaaa

SEQ ID NO: 26679 - DNA, 50 bp, unidentified
  source 1..50: mol_type = unassigned DNA; note = target_a13bf5e
  misc_feature 1..22: note = LF
  misc_feature 23..25: note = Core
  misc_feature 26..50: note = RF
cgttgcccacgagatgctcctcctttctcgtaagctgtcaatagagctgt

SEQ ID NO: 26680 - DNA, 50 bp, unidentified
  source 1..50: mol_type = unassigned DNA; note = target_a14a052
  misc_feature 1..23: note = LF
  misc_feature 24..25: note = Core
  misc_feature 26..50: note = RF
atgagcctgtcgtgcaaaaatcttgatttatacataatcgtgaccaggag

SEQ ID NO: 26681 - DNA, 50 bp, unidentified
  source 1..50: mol_type = unassigned DNA; note = target_a14e198
  misc_feature 1..24: note = LF
  misc_feature 25: note = Core
  misc_feature 26..50: note = RF
accggccactgccgcccccgcccccacccccccctttcgaccgccaagcg

SEQ ID NO: 26682 - DNA, 50 bp, unidentified
  source 1..50: mol_type = unassigned DNA; note = target_a14e2e0
  misc_feature 1..24: note = LF
  misc_feature 25: note = Core
  misc_feature 26..50: note = RF
gcgatgacaggcagcggccagaagcggaccttcgatgcgtttaccaaact

SEQ ID NO: 26683 - DNA, 50 bp, unidentified
  source 1..50: mol_type = unassigned DNA; note = target_a14f94b
  misc_feature 1..23: note = LF
  misc_feature 24..25: note = Core
  misc_feature 26..50: note = RF
gcttccataagcatttcccctttctgttttataggtgtaccttcgcttga

SEQ ID NO: 26684 - DNA, 50 bp, unidentified
  source 1..50: mol_type = unassigned DNA; note = target_a17deb7
  misc_feature 1..23: note = LF
  misc_feature 24..25: note = Core
  misc_feature 26..50: note = RF
gcgctcgcggccggtgcgccgccctctcaaggcggtagcgcgggttcgat

SEQ ID NO: 26685 - DNA, 50 bp, unidentified
  source 1..50: mol_type = unassigned DNA; note = target_a18389c
  misc_feature 1..23: note = LF
  misc_feature 24..25: note = Core
  misc_feature 26..50: note = RF
acttaaaaatccagccaacgatttgcctaatttaaaatctagcccaacat

SEQ ID NO: 26686 - DNA, 50 bp, unidentified
  source 1..50: mol_type = unassigned DNA; note = target_a185b52
  misc_feature 1..22: note = LF
  misc_feature 23..25: note = Core
  misc_feature 26..50: note = RF
cagcactgatacgaaggggcaggtttagttgcagaatccaaagagggtgt

SEQ ID NO: 26687 - DNA, 50 bp, unidentified
  source 1..50: mol_type = unassigned DNA; note = target_a188283
  misc_feature 1..23: note = LF
  misc_feature 24..25: note = Core
  misc_feature 26..50: note = RF
atttccatcgtcattagctttgttgcacaaatcgggtgaagggcgttctt

SEQ ID NO: 26688 - DNA, 50 bp, unidentified
  source 1..50: mol_type = unassigned DNA; note = target_a18cc87
  misc_feature 1..22: note = LF
  misc_feature 23..25: note = Core
  misc_feature 26..50: note = RF
tgacgtttttcactagttcctccttctttgcattagtatttgtgttgctg

SEQ ID NO: 26689 - DNA, 50 bp, unidentified
  source 1..50: mol_type = unassigned DNA; note = target_a18ea9e
  misc_feature 1..23: note = LF
  misc_feature 24..25: note = Core
  misc_feature 26..50: note = RF
tgtataaatacccatgttatcacctctaaagttatatatttatattgtta

SEQ ID NO: 26690 - DNA, 50 bp, unidentified
  source 1..50: mol_type = unassigned DNA; note = target_a19a6bd
  misc_feature 1..22: note = LF
  misc_feature 23..25: note = Core
  misc_feature 26..50: note = RF
cagcaggtcaggcggcggaagttgatagccgacagcggcgaggacggcgt

SEQ ID NO: 26691 - DNA, 50 bp, unidentified
  source 1..50: mol_type = unassigned DNA; note = target_a19e10f
  misc_feature 1..21: note = LF
  misc_feature 22..25: note = Core
  misc_feature 26..50: note = RF
agctccaaagagagtgcatatttccaatctatcctaccgcgcaccgcatc

SEQ ID NO: 26692 - DNA, 50 bp, unidentified
  source 1..50: mol_type = unassigned DNA; note = target_a19fa01
  misc_feature 1..23: note = LF
  misc_feature 24..25: note = Core
  misc_feature 26..50: note = RF
ccccgcacccccatccccaccccctgaccgccccgcacgccccgcccccg

SEQ ID NO: 26693 - DNA, 50 bp, unidentified
  source 1..50: mol_type = unassigned DNA; note = target_a1a88e4
  misc_feature 1..23: note = LF
  misc_feature 24..25: note = Core
  misc_feature 26..50: note = RF
gggcacgctacgctttgcccaccctacgattcgcgcgccgcctacaacgg

SEQ ID NO: 26694 - DNA, 50 bp, unidentified
  source 1..50: mol_type = unassigned DNA; note = target_a1ab989
  misc_feature 1..24: note = LF
  misc_feature 25: note = Core
  misc_feature 26..50: note = RF
ctgggacaccttgctcctagggaaaaactctgattttgccccgcggtcga

SEQ ID NO: 26695 - DNA, 50 bp, unidentified
  source 1..50: mol_type = unassigned DNA; note = target_a1b100f
  misc_feature 1..23: note = LF
  misc_feature 24..25: note = Core
  misc_feature 26..50: note = RF
agttggggttagggggtcaggcggcctgggccaggagttcctcgtccgcc

SEQ ID NO: 26696 - DNA, 50 bp, unidentified
  source 1..50: mol_type = unassigned DNA; note = target_a1bb22d
  misc_feature 1..23: note = LF
  misc_feature 24..25: note = Core
  misc_feature 26..50: note = RF
ggtatcgctgcgctccacccatcctacaagcgctttaccgtacgttggcg

SEQ ID NO: 26697 - DNA, 50 bp, unidentified
  source 1..50: mol_type = unassigned DNA; note = target_a1bba7c
  misc_feature 1..23: note = LF
  misc_feature 24..25: note = Core
  misc_feature 26..50: note = RF
catggttccaccttctcaggagttggagcctccgatcaacccggggcggc

SEQ ID NO: 26698 - DNA, 50 bp, unidentified
  source 1..50: mol_type = unassigned DNA; note = target_a1c01cb
  misc_feature 1..24: note = LF
  misc_feature 25: note = Core
  misc_feature 26..50: note = RF
taattattcaattaactggcccgtttgttgcactatcccaatccatctta

SEQ ID NO: 26699 - DNA, 50 bp, unidentified
  source 1..50: mol_type = unassigned DNA; note = target_a1c56c7
  misc_feature 1..23: note = LF
  misc_feature 24..25: note = Core
  misc_feature 26..50: note = RF
gttgaggtttgtggtctcccaccctttcacgataagactgtgaaaggatg

SEQ ID NO: 26700 - DNA, 50 bp, unidentified
  source 1..50: mol_type = unassigned DNA; note = target_a1c93cf
  misc_feature 1..23: note = LF
  misc_feature 24..25: note = Core
  misc_feature 26..50: note = RF
cggccgttatgcccatgcccggcagttcaaacggatgcgcaaggcgctgc

SEQ ID NO: 26701 - DNA, 50 bp, unidentified
  source 1..50: mol_type = unassigned DNA; note = target_a1ce1fc
  misc_feature 1..23: note = LF
  misc_feature 24..25: note = Core
  misc_feature 26..50: note = RF
taatggtttcatactttttcctccttaaaaataaaatatttgtatttgct

SEQ ID NO: 26702 - DNA, 50 bp, unidentified
  source 1..50: mol_type = unassigned DNA; note = target_a1d52d2
  misc_feature 1..22: note = LF
  misc_feature 23..25: note = Core
  misc_feature 26..50: note = RF
gttgcagtgcacgaggcggttcatggcccgtaacggcattcagtgcccac

SEQ ID NO: 26703 - DNA, 50 bp, unidentified
  source 1..50: mol_type = unassigned DNA; note = target_a1dbf50
  misc_feature 1..24: note = LF
  misc_feature 25: note = Core
  misc_feature 26..50: note = RF
agaagggcttcgcgcctgaaggcgcctacaggccaggtttccgtcggtca

SEQ ID NO: 26704 - DNA, 50 bp, unidentified
  source 1..50: mol_type = unassigned DNA; note = target_a1dc6e5
  misc_feature 1..24: note = LF
  misc_feature 25: note = Core
  misc_feature 26..50: note = RF
gtttcactcattgcaattttttctctttctcggcgtaatccacgcctttc

SEQ ID NO: 26705 - DNA, 50 bp, unidentified
  source 1..50: mol_type = unassigned DNA; note = target_a1e7554
  misc_feature 1..23: note = LF
  misc_feature 24..25: note = Core
  misc_feature 26..50: note = RF
accttcgcgcccagacggaggtacccccgcagcaacgggggcagcgaagg

SEQ ID NO: 26706 - DNA, 50 bp, unidentified
  source 1..50: mol_type = unassigned DNA; note = target_a1e7d6b
  misc_feature 1..19: note = LF
  misc_feature 20..25: note = Core
  misc_feature 26..50: note = RF
ttcgtgcgtcatgcgctgattcctttcaggagcaacgtggtggtccgatg

SEQ ID NO: 26707 - DNA, 50 bp, unidentified
  source 1..50: mol_type = unassigned DNA; note = target_a1f1dd0
  misc_feature 1..22: note = LF
  misc_feature 23..25: note = Core
  misc_feature 26..50: note = RF
cactcttgaactaaactgccccgtttagttcaataagaggttagatgaaa

SEQ ID NO: 26708 - DNA, 50 bp, unidentified
  source 1..50: mol_type = unassigned DNA; note = target_a1f741c
  misc_feature 1..24: note = LF
  misc_feature 25: note = Core
  misc_feature 26..50: note = RF
tgccgacttcccgaaacccgccatttcattcacgtcggccttttcgcagc

SEQ ID NO: 26709 - DNA, 50 bp, unidentified
  source 1..50: mol_type = unassigned DNA; note = target_a1fa572
  misc_feature 1..23: note = LF
  misc_feature 24..25: note = Core
  misc_feature 26..50: note = RF
caggagacagcaatgtttacaaggaactatcatgaaaaccactctcgccg

SEQ ID NO: 26710 - DNA, 50 bp, unidentified
  source 1..50: mol_type = unassigned DNA; note = target_a1ff7ce
  misc_feature 1..24: note = LF
  misc_feature 25: note = Core
  misc_feature 26..50: note = RF
gcttatggctgggcgctagaattttttttgacgcaatttccttgagcatg

SEQ ID NO: 26711 - DNA, 50 bp, unidentified
  source 1..50: mol_type = unassigned DNA; note = target_a1ff9c5
  misc_feature 1..23: note = LF
  misc_feature 24..25: note = Core
  misc_feature 26..50: note = RF
ctctctgtatggtccacataaggaatacagcatgacgcgttatcaatatc

SEQ ID NO: 26712 - DNA, 50 bp, unidentified
  source 1..50: mol_type = unassigned DNA; note = target_a207568
  misc_feature 1..23: note = LF
  misc_feature 24..25: note = Core
  misc_feature 26..50: note = RF
ccaggcctccccctcaccctgccctctccccctcggcgggggagagggat

SEQ ID NO: 26713 - DNA, 50 bp, unidentified
  source 1..50: mol_type = unassigned DNA; note = target_a211d83
  misc_feature 1..24: note = LF
  misc_feature 25: note = Core
  misc_feature 26..50: note = RF
tttgagcgtctgttttctccaaagcagacactcagattttacaactcagc

SEQ ID NO: 26714 - DNA, 50 bp, unidentified
  source 1..50: mol_type = unassigned DNA; note = target_a2170ae
  misc_feature 1..24: note = LF
  misc_feature 25: note = Core
  misc_feature 26..50: note = RF
atacgtcactgtatggattgaattattcctaaccatgaacaatcatgtcg

SEQ ID NO: 26715 - DNA, 50 bp, unidentified
  source 1..50: mol_type = unassigned DNA; note = target_a21c135
  misc_feature 1..23: note = LF
  misc_feature 24..25: note = Core
  misc_feature 26..50: note = RF
gaggggagcgccccctacatgacgcacatgggctacgtccggcagcgccg

SEQ ID NO: 26716 - DNA, 50 bp, unidentified
  source 1..50: mol_type = unassigned DNA; note = target_a21d7f2
  misc_feature 1..23: note = LF
  misc_feature 24..25: note = Core
  misc_feature 26..50: note = RF
ccacatccccatggcacggaacgctagtcggcgtcgggagcggccgcctt

SEQ ID NO: 26717 - DNA, 50 bp, unidentified
  source 1..50: mol_type = unassigned DNA; note = target_a21f31e
  misc_feature 1..23: note = LF
  misc_feature 24..25: note = Core
  misc_feature 26..50: note = RF
cagacgtcgcggcatagccgctcctacattactgtcctggttcccgcgct

SEQ ID NO: 26718 - DNA, 50 bp, unidentified
  source 1..50: mol_type = unassigned DNA; note = target_a230c8a
  misc_feature 1..24: note = LF
  misc_feature 25: note = Core
  misc_feature 26..50: note = RF
agagcgttcgcacaagcccccctttttccgcccgctgccgagacgtggcc

SEQ ID NO: 26719 - DNA, 50 bp, unidentified
  source 1..50: mol_type = unassigned DNA; note = target_a232e52
  misc_feature 1..24: note = LF
  misc_feature 25: note = Core
  misc_feature 26..50: note = RF
caggggtgcgttatgttgcctaacgttcgacatgagcggcgaccaagagg

SEQ ID NO: 26720 - DNA, 50 bp, unidentified
  source 1..50: mol_type = unassigned DNA; note = target_a23417b
  misc_feature 1..23: note = LF
  misc_feature 24..25: note = Core
  misc_feature 26..50: note = RF
ctcgctgtggggtaaccgctgtgatccgggctagtaacgatgcggcaaga

SEQ ID NO: 26721 - DNA, 50 bp, unidentified
  source 1..50: mol_type = unassigned DNA; note = target_a235e54
  misc_feature 1..23: note = LF
  misc_feature 24..25: note = Core
  misc_feature 26..50: note = RF
tccattctctcaagagttggagcctcctcaaaatccggggcggttcaatt

SEQ ID NO: 26722 - DNA, 50 bp, unidentified
  source 1..50: mol_type = unassigned DNA; note = target_a239556
  misc_feature 1..23: note = LF
  misc_feature 24..25: note = Core
  misc_feature 26..50: note = RF
gagcgccgcagcgcgcgggggtctgttcctggccctgggcttcgtagagc

SEQ ID NO: 26723 - DNA, 50 bp, unidentified
  source 1..50: mol_type = unassigned DNA; note = target_a23c9ad
  misc_feature 1..23: note = LF
  misc_feature 24..25: note = Core
  misc_feature 26..50: note = RF
ccgtggccaaatttagttgaccactacaaggatttattttgagagacaga

SEQ ID NO: 26724 - DNA, 50 bp, unidentified
  source 1..50: mol_type = unassigned DNA; note = target_a241a99
  misc_feature 1..24: note = LF
  misc_feature 25: note = Core
  misc_feature 26..50: note = RF
tcgtcatcgccggacaagcgctgctgcaggcaatgggcattccgctcagc

SEQ ID NO: 26725 - DNA, 50 bp, unidentified
  source 1..50: mol_type = unassigned DNA; note = target_a24241c
  misc_feature 1..23: note = LF
  misc_feature 24..25: note = Core
  misc_feature 26..50: note = RF
cattatatttaggcatattcatactccttgaaatcagttctgcacttttt

SEQ ID NO: 26726 - DNA, 50 bp, unidentified
  source 1..50: mol_type = unassigned DNA; note = target_a2430f6
  misc_feature 1..23: note = LF
  misc_feature 24..25: note = Core
  misc_feature 26..50: note = RF
cgacggcggggtacgcagtgccgctcatcgggccaggaagctctcgtgac

SEQ ID NO: 26727 - DNA, 50 bp, unidentified
  source 1..50: mol_type = unassigned DNA; note = target_a243355
  misc_feature 1..23: note = LF
  misc_feature 24..25: note = Core
  misc_feature 26..50: note = RF
ttttccgtttgtcattttttctcctttgcgttttctttgaacgccgtcat

SEQ ID NO: 26728 - DNA, 50 bp, unidentified
  source 1..50: mol_type = unassigned DNA; note = target_a24e990
  misc_feature 1..23: note = LF
  misc_feature 24..25: note = Core
  misc_feature 26..50: note = RF
tttactttataagacgaactttcctataaagtaaaaaagataccttcatt

SEQ ID NO: 26729 - DNA, 50 bp, unidentified
  source 1..50: mol_type = unassigned DNA; note = target_a26cc71
  misc_feature 1..23: note = LF
  misc_feature 24..25: note = Core
  misc_feature 26..50: note = RF
gtgtcggatcgcataaccaggctctgttgcattgggtgatggctacgtgt

SEQ ID NO: 26730 - DNA, 50 bp, unidentified
  source 1..50: mol_type = unassigned DNA; note = target_a275a22
  misc_feature 1..23: note = LF
  misc_feature 24..25: note = Core
  misc_feature 26..50: note = RF
tttctcgctcaccgttcatgctcctttctaacatcttatatacaagtgcg

SEQ ID NO: 26731 - DNA, 50 bp, unidentified
  source 1..50: mol_type = unassigned DNA; note = target_a277cf9
  misc_feature 1..23: note = LF
  misc_feature 24..25: note = Core
  misc_feature 26..50: note = RF
ggtatcaacattcgatattcctccttctccgttacaactaatatctacga

SEQ ID NO: 26732 - DNA, 50 bp, unidentified
  source 1..50: mol_type = unassigned DNA; note = target_a27e43e
  misc_feature 1..24: note = LF
  misc_feature 25: note = Core
  misc_feature 26..50: note = RF
ggctgcaatattagatttttataccgacccacggactttcgggataccga

SEQ ID NO: 26733 - DNA, 50 bp, unidentified
  source 1..50: mol_type = unassigned DNA; note = target_a280c91
  misc_feature 1..23: note = LF
  misc_feature 24..25: note = Core
  misc_feature 26..50: note = RF
catggctccaccttttcaggagttggagcctccgatcaacccggggcggt

SEQ ID NO: 26734 - DNA, 50 bp, unidentified
  source 1..50: mol_type = unassigned DNA; note = target_a28bcbd
  misc_feature 1..23: note = LF
  misc_feature 24..25: note = Core
  misc_feature 26..50: note = RF
cagcgggtggcgcgctgaggcgcccccccgcggcgccggcccgtcgcatg

SEQ ID NO: 26735 - DNA, 50 bp, unidentified
  source 1..50: mol_type = unassigned DNA; note = target_a29df3c
  misc_feature 1..24: note = LF
  misc_feature 25: note = Core
  misc_feature 26..50: note = RF
cgcttcatctccgactccccgaagcggacgtccgccgaaccacacagtta

SEQ ID NO: 26736 - DNA, 50 bp, unidentified
  source 1..50: mol_type = unassigned DNA; note = target_a2a09f9
  misc_feature 1..21: note = LF
  misc_feature 22..25: note = Core
  misc_feature 26..50: note = RF
cgacctggtggcgggctcccgcccccgttacctttttcgtggctcctgag

SEQ ID NO: 26737 - DNA, 50 bp, unidentified
  source 1..50: mol_type = unassigned DNA; note = target_a2a19f4
  misc_feature 1..23: note = LF
  misc_feature 24..25: note = Core
  misc_feature 26..50: note = RF
ctggtattcccattgtgcttctcctttcttaaggaccgcaggctctgccc

SEQ ID NO: 26738 - DNA, 50 bp, unidentified
  source 1..50: mol_type = unassigned DNA; note = target_a2a2a6a
  misc_feature 1..24: note = LF
  misc_feature 25: note = Core
  misc_feature 26..50: note = RF
accaaccacttccgacaagccgacttatgaggactaccgcggggtaatca

SEQ ID NO: 26739 - DNA, 50 bp, unidentified
  source 1..50: mol_type = unassigned DNA; note = target_a2a3602
  misc_feature 1..23: note = LF
  misc_feature 24..25: note = Core
  misc_feature 26..50: note = RF
gaaccaggtcttcatgggtgctcctttcagcggtcgagccagcgtcaacc

SEQ ID NO: 26740 - DNA, 50 bp, unidentified
  source 1..50: mol_type = unassigned DNA; note = target_a2a69a7
  misc_feature 1..22: note = LF
  misc_feature 23..25: note = Core
  misc_feature 26..50: note = RF
tagtgatactatcgagtaataaggaggtggatcaatggcatccattttaa

SEQ ID NO: 26741 - DNA, 50 bp, unidentified
  source 1..50: mol_type = unassigned DNA; note = target_a2a7393
  misc_feature 1..19: note = LF
  misc_feature 20..25: note = Core
  misc_feature 26..50: note = RF
cctgattctaagtatcttcgtattagtctgtctagtactgtaggtattcc

SEQ ID NO: 26742 - DNA, 50 bp, unidentified
  source 1..50: mol_type = unassigned DNA; note = target_a2ab710
  misc_feature 1..23: note = LF
  misc_feature 24..25: note = Core
  misc_feature 26..50: note = RF
atacgattcactgcgttgcgtactcgaacagacgacaacggaaatctatc

SEQ ID NO: 26743 - DNA, 50 bp, unidentified
  source 1..50: mol_type = unassigned DNA; note = target_a2abd3c
  misc_feature 1..23: note = LF
  misc_feature 24..25: note = Core
  misc_feature 26..50: note = RF
catcctcgtccgccttcggctccctacggattcccttgggcgcatctaca

SEQ ID NO: 26744 - DNA, 50 bp, unidentified
  source 1..50: mol_type = unassigned DNA; note = target_a2b9f76
  misc_feature 1..21: note = LF
  misc_feature 22..25: note = Core
  misc_feature 26..50: note = RF
ccgggaccaaagagcccggccatgacgcttcaggggtgtggacgttgatg

SEQ ID NO: 26745 - DNA, 50 bp, unidentified
  source 1..50: mol_type = unassigned DNA; note = target_a2ba378
  misc_feature 1..24: note = LF
  misc_feature 25: note = Core
  misc_feature 26..50: note = RF
tctttattccagaaaagcgcccgattactgaagaacgttccattacattt

SEQ ID NO: 26746 - DNA, 50 bp, unidentified
  source 1..50: mol_type = unassigned DNA; note = target_a2bbfc5
  misc_feature 1..24: note = LF
  misc_feature 25: note = Core
  misc_feature 26..50: note = RF
cggggtgaacgaccgctgctgacccaaagcaggcattgggtgaccggact

SEQ ID NO: 26747 - DNA, 50 bp, unidentified
  source 1..50: mol_type = unassigned DNA; note = target_a2bd322
  misc_feature 1..23: note = LF
  misc_feature 24..25: note = Core
  misc_feature 26..50: note = RF
gcatgagtccgcttctggcccttagcggacatgctctcgcgcttctgcga

SEQ ID NO: 26748 - DNA, 50 bp, unidentified
  source 1..50: mol_type = unassigned DNA; note = target_a2c58a2
  misc_feature 1..23: note = LF
  misc_feature 24..25: note = Core
  misc_feature 26..50: note = RF
gccgtcaggggagagcggcatccaccccatctccacctcgcaagcctttg

SEQ ID NO: 26749 - DNA, 50 bp, unidentified
  source 1..50: mol_type = unassigned DNA; note = target_a2d679e
  misc_feature 24..25: note = Core
  misc_feature 26..50: note = RF
ctgcattcgctgcgagggcgcagctcccacggaagcggtgcggtgtggct

SEQ ID NO: 26750 - DNA, 50 bp, unidentified
  source 1..50: mol_type = unassigned DNA; note = target_a2d772a
  misc_feature 1..23: note = LF
  misc_feature 24..25: note = Core
  misc_feature 26..50: note = RF
ttggtaccaggtcgccctgcttgctataattgtgttgactttagggaatc

SEQ ID NO: 26751 - DNA, 50 bp, unidentified
  source 1..50: mol_type = unassigned DNA; note = target_a2dd961
  misc_feature 1..24: note = LF
  misc_feature 25: note = Core
  misc_feature 26..50: note = RF
gatggaccctctgttgataagggctttgttatcgttgtgccagtgaggga

SEQ ID NO: 26752 - DNA, 50 bp, unidentified
  source 1..50: mol_type = unassigned DNA; note = target_a2e584e
  misc_feature 1..22: note = LF
  misc_feature 23..25: note = Core
  misc_feature 26..50: note = RF
ccatcaccaccaaaattgcgtcagagccccggttcgaagccgatttacac

SEQ ID NO: 26753 - DNA, 50 bp, unidentified
  source 1..50: mol_type = unassigned DNA; note = target_a2ebacc
  misc_feature 1..24: note = LF
  misc_feature 25: note = Core
  misc_feature 26..50: note = RF
ttctatattgcgtgttattgggattttcgtcaattgaccagggtgctcca

SEQ ID NO: 26754 - DNA, 50 bp, unidentified
  source 1..50: mol_type = unassigned DNA; note = target_a2edc06
  misc_feature 1..23: note = LF
  misc_feature 24..25: note = Core
  misc_feature 26..50: note = RF
ccggacccacccgcgtcggcgcgctcaccgcagccccctgcccgtcaggt

SEQ ID NO: 26755 - DNA, 50 bp, unidentified
  source 1..50: mol_type = unassigned DNA; note = target_a2f7ac4
  misc_feature 1..23: note = LF
  misc_feature 24..25: note = Core
  misc_feature 26..50: note = RF
gactctgggttagtcccgtaggtcggaataggcccgcaacgcgtgccgta

SEQ ID NO: 26756 - DNA, 50 bp, unidentified
  source 1..50: mol_type = unassigned DNA; note = target_a2fad1e
  misc_feature 1..23: note = LF
  misc_feature 24..25: note = Core
  misc_feature 26..50: note = RF
ccccaatagctgtcctgacaacagacatcgagaaccgacgctcggtgcca

SEQ ID NO: 26757 - DNA, 50 bp, unidentified
  source 1..50: mol_type = unassigned DNA; note = target_a31af5a
  misc_feature 1..24: note = LF
  misc_feature 25: note = Core
  misc_feature 26..50: note = RF
gtggagatataatggcctctaacgtggagctaaggggcgccgagcttctg

SEQ ID NO: 26758 - DNA, 50 bp, unidentified
  source 1..50: mol_type = unassigned DNA; note = target_a31eeef
  misc_feature 1..23: note = LF
  misc_feature 24..25: note = Core
  misc_feature 26..50: note = RF
tctaggtgtgagggggaaaccccctttcaatttgaaggggatgtgaattt

SEQ ID NO: 26759 - DNA, 50 bp, unidentified
  source 1..50: mol_type = unassigned DNA; note = target_a3210b5
  misc_feature 1..24: note = LF
  misc_feature 25: note = Core
  misc_feature 26..50: note = RF
aaccaaagcaatgaattatacacgttgttggcaatagttattttaattct

SEQ ID NO: 26760 - DNA, 50 bp, unidentified
  source 1..50: mol_type = unassigned DNA; note = target_a322813
  misc_feature 1..23: note = LF
  misc_feature 24..25: note = Core
  misc_feature 26..50: note = RF
ataatgaaaagttacctgagtacctatttaatgatatcaagaaaaaagca

SEQ ID NO: 26761 - DNA, 50 bp, unidentified
  source 1..50: mol_type = unassigned DNA; note = target_a32cda1
  misc_feature 1..22: note = LF
  misc_feature 23..25: note = Core
  misc_feature 26..50: note = RF
actctcttcaaactacctgctcgtttagtagttaaataagaaaatttcat

SEQ ID NO: 26762 - DNA, 50 bp, unidentified
  source 1..50: mol_type = unassigned DNA; note = target_a32fb7a
  misc_feature 1..23: note = LF
  misc_feature 24..25: note = Core
  misc_feature 26..50: note = RF
taggtccagggctcagccatcccctcatttttcagacgatcgcgaaggtt

SEQ ID NO: 26763 - DNA, 50 bp, unidentified
  source 1..50: mol_type = unassigned DNA; note = target_a33ebf2
  misc_feature 1..23: note = LF
  misc_feature 24..25: note = Core
  misc_feature 26..50: note = RF
aggcaatagttgagaattgtagttactcaaaacaccgtttttcatgcact

SEQ ID NO: 26764 - DNA, 50 bp, unidentified
  source 1..50: mol_type = unassigned DNA; note = target_a343620
  misc_feature 1..23: note = LF
  misc_feature 24..25: note = Core
  misc_feature 26..50: note = RF
tcaattctcttggcgtgggaaaattccgtttcccaaacggagccctgagt

SEQ ID NO: 26765 - DNA, 50 bp, unidentified
  source 1..50: mol_type = unassigned DNA; note = target_a345986
  misc_feature 1..23: note = LF
  misc_feature 24..25: note = Core
  misc_feature 26..50: note = RF
gtggcggcttcgccttacccggcctacatctatataaatatcaataactt

SEQ ID NO: 26766 - DNA, 50 bp, unidentified
  source 1..50: mol_type = unassigned DNA; note = target_a349804
  misc_feature 1..24: note = LF
  misc_feature 25: note = Core
  misc_feature 26..50: note = RF
accctcaatgagtgatatggagatttatcaccctgttaccccgtaatgtt

SEQ ID NO: 26767 - DNA, 50 bp, unidentified
  source 1..50: mol_type = unassigned DNA; note = target_a34bc12
  misc_feature 1..24: note = LF
  misc_feature 25: note = Core
  misc_feature 26..50: note = RF
ctttgcagtgtctcaaatcgtatgcgtccggcaatgtcacattgaattcg

SEQ ID NO: 26768 - DNA, 50 bp, unidentified
  source 1..50: mol_type = unassigned DNA; note = target_a3506ff
  misc_feature 1..23: note = LF
  misc_feature 24..25: note = Core
  misc_feature 26..50: note = RF
ccgagtggagctatccgtgggccccggctctgcggccggggaagatcgag

SEQ ID NO: 26769 - DNA, 50 bp, unidentified
  source 1..50: mol_type = unassigned DNA; note = target_a353085
  misc_feature 1..22: note = LF
  misc_feature 23..25: note = Core
  misc_feature 26..50: note = RF
tcaatcataaaaagttgactcctttctaaaataaaccttgtcgaagcaca

SEQ ID NO: 26770 - DNA, 50 bp, unidentified
  source 1..50: mol_type = unassigned DNA; note = target_a355da7
  misc_feature 1..22: note = LF
  misc_feature 23..25: note = Core
  misc_feature 26..50: note = RF
gtccgctcgctctcttccttcttgaatcggaacggcaggacgaattcgcc

SEQ ID NO: 26771 - DNA, 50 bp, unidentified
  source 1..50: mol_type = unassigned DNA; note = target_a35e535
  misc_feature 1..23: note = LF
  misc_feature 24..25: note = Core
  misc_feature 26..50: note = RF
atcggctccactctctcagaagttggagcctccggcaaacccggcgcggt

SEQ ID NO: 26772 - DNA, 50 bp, unidentified
  source 1..50: mol_type = unassigned DNA; note = target_a37e5fc
  misc_feature 1..22: note = LF
  misc_feature 23..25: note = Core
  misc_feature 26..50: note = RF
aatctatgatgataaatatctttttttgtttattattaatatgtgtttaa

SEQ ID NO: 26773 - DNA, 50 bp, unidentified
  source 1..50: mol_type = unassigned DNA; note = target_a3857c6
  misc_feature 1..24: note = LF
  misc_feature 25: note = Core
  misc_feature 26..50: note = RF
gcacgccggttgaaccaaggcaagttccactggccaagcattcgccatgc

SEQ ID NO: 26774 - DNA, 50 bp, unidentified
  source 1..50: mol_type = unassigned DNA; note = target_a38669d
  misc_feature 1..23: note = LF
  misc_feature 24..25: note = Core
  misc_feature 26..50: note = RF
acgacatagacaatgtttccttcctttctgtcttcgttatatgccgttct

SEQ ID NO: 26775 - DNA, 50 bp, unidentified
  source 1..50: mol_type = unassigned DNA; note = target_a38dc17
  misc_feature 1..23: note = LF
  misc_feature 24..25: note = Core
  misc_feature 26..50: note = RF
cgctcgctcatccttcgacttcgctcaggatgagcgcggatatgtgggga

SEQ ID NO: 26776 - DNA, 50 bp, unidentified
  source 1..50: mol_type = unassigned DNA; note = target_a39ce54
  misc_feature 1..22: note = LF
  misc_feature 23..25: note = Core
  misc_feature 26..50: note = RF
ggagtatgaccgtgtgtatgactgacactcccgagaaggtagctgtctgg

SEQ ID NO: 26777 - DNA, 50 bp, unidentified
  source 1..50: mol_type = unassigned DNA; note = target_a3a5c14
  misc_feature 1..22: note = LF
  misc_feature 23..25: note = Core
  misc_feature 26..50: note = RF
aatgcggcccgttccacgcgttttcttcacctctccgcggtctcaaccta

SEQ ID NO: 26778 - DNA, 50 bp, unidentified
  source 1..50: mol_type = unassigned DNA; note = target_a3c1768
  misc_feature 1..23: note = LF
  misc_feature 24..25: note = Core
  misc_feature 26..50: note = RF
ggtcaagtaaattcagacaccccagttaagttcgttaagctacctttttc

SEQ ID NO: 26779 - DNA, 50 bp, unidentified
  source 1..50: mol_type = unassigned DNA; note = target_a3cd16d
  misc_feature 1..24: note = LF
  misc_feature 25: note = Core
  misc_feature 26..50: note = RF
aatgagccgtgagttgcgccctgtaagggcaaaacaacccgatatggaat

SEQ ID NO: 26780 - DNA, 50 bp, unidentified
  source 1..50: mol_type = unassigned DNA; note = target_a3cf414
  misc_feature 1..23: note = LF
  misc_feature 24..25: note = Core
  misc_feature 26..50: note = RF
gccacaataaacggctaagtaatagttggctaaatgtgttgcgaagcgga

SEQ ID NO: 26781 - DNA, 50 bp, unidentified
  source 1..50: mol_type = unassigned DNA; note = target_a3e37fa
  misc_feature 1..23: note = LF
  misc_feature 24..25: note = Core
  misc_feature 26..50: note = RF
cattctcgctcccaccagaactcctttcgtcgacccgtccgtggtgagcc

SEQ ID NO: 26782 - DNA, 50 bp, unidentified
  source 1..50: mol_type = unassigned DNA; note = target_a3ee30f
  misc_feature 1..24: note = LF
  misc_feature 25: note = Core
  misc_feature 26..50: note = RF
tcgcgttgcctcgtgagacctaacgtcggagttgaccggcgaccggcgga

SEQ ID NO: 26783 - DNA, 50 bp, unidentified
  source 1..50: mol_type = unassigned DNA; note = target_a3f02d6
  misc_feature 1..24: note = LF
  misc_feature 25: note = Core
  misc_feature 26..50: note = RF
cgaaggtccggtcttggccgaggctgtgtgaaaactattttgcatcgcca

SEQ ID NO: 26784 - DNA, 50 bp, unidentified
  source 1..50: mol_type = unassigned DNA; note = target_a3f966d
  misc_feature 1..23: note = LF
  misc_feature 24..25: note = Core
  misc_feature 26..50: note = RF
agtgaagagagtttgttactcctctctatattttgtgtttacttatctct

SEQ ID NO: 26785 - DNA, 50 bp, unidentified
  source 1..50: mol_type = unassigned DNA; note = target_a3fac09
  misc_feature 1..21: note = LF
  misc_feature 22..25: note = Core
  misc_feature 26..50: note = RF
tcaggctatggctgcgctttaatgagtccgcgtcctaagcaacccgttgc

SEQ ID NO: 26786 - DNA, 50 bp, unidentified
  source 1..50: mol_type = unassigned DNA; note = target_a401d9e
  misc_feature 1..24: note = LF
  misc_feature 25: note = Core
  misc_feature 26..50: note = RF
ctatgccagcaacagcgggtaggacgcagtcgttcactgcgccgtatggg

SEQ ID NO: 26787 - DNA, 50 bp, unidentified
  source 1..50: mol_type = unassigned DNA; note = target_a409432
  misc_feature 1..23: note = LF
  misc_feature 24..25: note = Core
  misc_feature 26..50: note = RF
gtcatgtcaccgaccatcaaatgaggcttttcatgacgctcaaacagacc

SEQ ID NO: 26788 - DNA, 50 bp, unidentified
  source 1..50: mol_type = unassigned DNA; note = target_a4197b2
  misc_feature 1..23: note = LF
  misc_feature 24..25: note = Core
  misc_feature 26..50: note = RF
tctgcccgcgagggccatggtccctgacatgcctcaaacctagacccggc

SEQ ID NO: 26789 - DNA, 50 bp, unidentified
  source 1..50: mol_type = unassigned DNA; note = target_a4199d0
  misc_feature 1..23: note = LF
  misc_feature 24..25: note = Core
  misc_feature 26..50: note = RF
cgaccgctcttgggtcctaaccagacatttcgagctttgatgtccggtct

SEQ ID NO: 26790 - DNA, 50 bp, unidentified
  source 1..50: mol_type = unassigned DNA; note = target_a42049c
  misc_feature 1..23: note = LF
  misc_feature 24..25: note = Core
  misc_feature 26..50: note = RF
catttcttttaacatattatatcctccccgtggcagctttgcattctgta

SEQ ID NO: 26791 - DNA, 50 bp, unidentified
  source 1..50: mol_type = unassigned DNA; note = target_a426858
  misc_feature 1..24: note = LF
  misc_feature 25: note = Core
  misc_feature 26..50: note = RF
agattcttcttgccaacccggagccgtccacacatggcccaaagcggaca

SEQ ID NO: 26792 - DNA, 50 bp, unidentified
  source 1..50: mol_type = unassigned DNA; note = target_a42e42d
  misc_feature 1..23: note = LF
  misc_feature 24..25: note = Core
  misc_feature 26..50: note = RF
gcccatcggaactcctcttgtccctaaccaatacgattgggatgtccagt

SEQ ID NO: 26793 - DNA, 50 bp, unidentified
  source 1..50: mol_type = unassigned DNA; note = target_a44a8f9
  misc_feature 1..24: note = LF
  misc_feature 25: note = Core
  misc_feature 26..50: note = RF
agggcgggctcgtcgagcgctaccccccccgcaggtaagcggcggggggg

SEQ ID NO: 26794 - DNA, 50 bp, unidentified
  source 1..50: mol_type = unassigned DNA; note = target_a44b306
  misc_feature 1..23: note = LF
  misc_feature 24..25: note = Core
  misc_feature 26..50: note = RF
gcatccagccgccttcgccgaggctacggcgtgccagggaatcggaggac

SEQ ID NO: 26795 - DNA, 50 bp, unidentified
  source 1..50: mol_type = unassigned DNA; note = target_a457d27
  misc_feature 1..23: note = LF
  misc_feature 24..25: note = Core
  misc_feature 26..50: note = RF
gcagccgaagcaaatgtcgtagttgtctcatggtcagccttctctttgcc

SEQ ID NO: 26796 - DNA, 50 bp, unidentified
  source 1..50: mol_type = unassigned DNA; note = target_a465681
  misc_feature 1..24: note = LF
  misc_feature 25: note = Core
  misc_feature 26..50: note = RF
caatgttttcatatcctattccttcttattacatatcattagatacgggc

SEQ ID NO: 26797 - DNA, 50 bp, unidentified
  source 1..50: mol_type = unassigned DNA; note = target_a46cd97
  misc_feature 1..23: note = LF
  misc_feature 24..25: note = Core
  misc_feature 26..50: note = RF
gtgaaccgccccggattttgtagaggctccattgtttgagagaatggagt

SEQ ID NO: 26798 - DNA, 50 bp, unidentified
  source 1..50: mol_type = unassigned DNA; note = target_a47145f
  misc_feature 1..23: note = LF
  misc_feature 24..25: note = Core
  misc_feature 26..50: note = RF
gatcagctttatgggtcctgaccctagtaagcacggttgtaggctcggga

SEQ ID NO: 26799 - DNA, 50 bp, unidentified
  source 1..50: mol_type = unassigned DNA; note = target_a475fe9
  misc_feature 1..24: note = LF
  misc_feature 25: note = Core
  misc_feature 26..50: note = RF
tgcccggagtcgcgtcatagtgggcgaaaggtccgcctggcgacgcgccg

SEQ ID NO: 26800 - DNA, 50 bp, unidentified
  source 1..50: mol_type = unassigned DNA; note = target_a477f1d
  misc_feature 1..24: note = LF
  misc_feature 25: note = Core
  misc_feature 26..50: note = RF
ttcatactcaatatcaaacgtaagcgtccggtaatgtcatcttgcgggta

SEQ ID NO: 26801 - DNA, 50 bp, unidentified
  source 1..50: mol_type = unassigned DNA; note = target_a483766
  misc_feature 1..23: note = LF
  misc_feature 24..25: note = Core
  misc_feature 26..50: note = RF
aatagtcatacatataatttctcctcttaaattagtgtctgctgattaag

SEQ ID NO: 26802 - DNA, 50 bp, unidentified
  source 1..50: mol_type = unassigned DNA; note = target_a48705d
  misc_feature 1..24: note = LF
  misc_feature 25: note = Core
  misc_feature 26..50: note = RF
gcgttgccggtgaactcgctgccattgtcgctgacgatcatcttcggctt

SEQ ID NO: 26803 - DNA, 50 bp, unidentified
  source 1..50: mol_type = unassigned DNA; note = target_a49b8b8
  misc_feature 1..24: note = LF
  misc_feature 25: note = Core
  misc_feature 26..50: note = RF
ctctaagtgtaaatttatccaaagcagacatttaatcacattgtcagttt

SEQ ID NO: 26804 - DNA, 50 bp, unidentified
  source 1..50: mol_type = unassigned DNA; note = target_a49e92c
  misc_feature 1..24: note = LF
  misc_feature 25: note = Core
  misc_feature 26..50: note = RF
cgaggtgaattcattgtccgctcctggcgtttgcatggcgatgctaggcg

SEQ ID NO: 26805 - DNA, 50 bp, unidentified
  source 1..50: mol_type = unassigned DNA; note = target_a4a1644
  misc_feature 1..23: note = LF
  misc_feature 24..25: note = Core
  misc_feature 26..50: note = RF
tatgtggccttcgtcatcgtaagcgtccacacacgtccggcgtcgctaca

SEQ ID NO: 26806 - DNA, 50 bp, unidentified
  source 1..50: mol_type = unassigned DNA; note = target_a4a4f31
  misc_feature 1..20: note = LF
  misc_feature 21..25: note = Core
  misc_feature 26..50: note = RF
ttctttcttctcaccttcaccttagtcgttaatcctcttcgtttcagatt

SEQ ID NO: 26807 - DNA, 50 bp, unidentified
  source 1..50: mol_type = unassigned DNA; note = target_a4b842e
  misc_feature 1..23: note = LF
  misc_feature 24..25: note = Core
  misc_feature 26..50: note = RF
acaattttcctctccaattgctcctttctattgtagcatgatttcaaaga

SEQ ID NO: 26808 - DNA, 50 bp, unidentified
  source 1..50: mol_type = unassigned DNA; note = target_a4b981c
  misc_feature 1..22: note = LF
  misc_feature 23..25: note = Core
  misc_feature 26..50: note = RF
cagatcgacgtgaacggcccgaagccgacgtttaacaattggtttgatac

SEQ ID NO: 26809 - DNA, 50 bp, unidentified
  source 1..50: mol_type = unassigned DNA; note = target_a4bb2b2
  misc_feature 1..23: note = LF
  misc_feature 24..25: note = Core
  misc_feature 26..50: note = RF
tgcgcacaaaaccgggagagctttgaaaaactactcttattcgtcatgcc

SEQ ID NO: 26810 - DNA, 50 bp, unidentified
  source 1..50: mol_type = unassigned DNA; note = target_a4c0ea4
  misc_feature 1..23: note = LF
  misc_feature 24..25: note = Core
  misc_feature 26..50: note = RF
tcatcctcggccgatccgagatgctcataggtcaccgcttgatgtctcac

SEQ ID NO: 26811 - DNA, 50 bp, unidentified
  source 1..50: mol_type = unassigned DNA; note = target_a4c4b4f
  misc_feature 1..23: note = LF
  misc_feature 24..25: note = Core
  misc_feature 26..50: note = RF
gcaagcgtgccgtcactggcaagtggcaccttgatgaggttgtgatcccg

SEQ ID NO: 26812 - DNA, 50 bp, unidentified
  source 1..50: mol_type = unassigned DNA; note = target_a4dac63
  misc_feature 1..24: note = LF
  misc_feature 25: note = Core
  misc_feature 26..50: note = RF
agccgtgacggagggattgacaccctccgtcacggctgcgccgtgccacc

SEQ ID NO: 26813 - DNA, 50 bp, unidentified
  source 1..50: mol_type = unassigned DNA; note = target_a4db85f
  misc_feature 1..24: note = LF
  misc_feature 25: note = Core
  misc_feature 26..50: note = RF
gttttgaggtccgatagacacaactttgcttgaactcgttgcaagcaatt

SEQ ID NO: 26814 - DNA, 50 bp, unidentified
  source 1..50: mol_type = unassigned DNA; note = target_a4db93b
  misc_feature 1..23: note = LF
  misc_feature 24..25: note = Core
  misc_feature 26..50: note = RF
gtcctcatgttgcattcacctcgctctatttgatctactatattatagca

SEQ ID NO: 26815 - DNA, 50 bp, unidentified
  source 1..50: mol_type = unassigned DNA; note = target_a4dfa05
  misc_feature 1..23: note = LF
  misc_feature 24..25: note = Core
  misc_feature 26..50: note = RF
catataacatgaatgtcgtaggtcgggttaggcgcgtttgtagcgccgta

SEQ ID NO: 26816 - DNA, 50 bp, unidentified
  source 1..50: mol_type = unassigned DNA; note = target_a4e6523
  misc_feature 1..23: note = LF
  misc_feature 24..25: note = Core
  misc_feature 26..50: note = RF
cggccaccagcagcaaggcagcgctgcaaagcgcaataccatcaggcaga

SEQ ID NO: 26817 - DNA, 50 bp, unidentified
  source 1..50: mol_type = unassigned DNA; note = target_a4e8fb1
  misc_feature 1..24: note = LF
  misc_feature 25: note = Core
  misc_feature 26..50: note = RF
ggagatgaaacgccctcaattcggcagatgccgacgttcgtgaccgcgca

SEQ ID NO: 26818 - DNA, 50 bp, unidentified
  source 1..50: mol_type = unassigned DNA; note = target_a4ef575
  misc_feature 1..21: note = LF
  misc_feature 22..25: note = Core
  misc_feature 26..50: note = RF
gggccgcgacccgacccgttaccccaggtccacctcctgggcaactccct

SEQ ID NO: 26819 - DNA, 50 bp, unidentified
  source 1..50: mol_type = unassigned DNA; note = target_a4efd20
  misc_feature 1..24: note = LF
  misc_feature 25: note = Core
  misc_feature 26..50: note = RF
atgttgtttaacaatcgcgcccgattattgaagatcataagtacatgtcc

SEQ ID NO: 26820 - DNA, 50 bp, unidentified
  source 1..50: mol_type = unassigned DNA; note = target_a4fcf31
  misc_feature 1..23: note = LF
  misc_feature 24..25: note = Core
  misc_feature 26..50: note = RF
ttattgaactaacgcagcagtttagttgaagaagggatgttataattagt

SEQ ID NO: 26821 - DNA, 50 bp, unidentified
  source 1..50: mol_type = unassigned DNA; note = target_a5075bd
  misc_feature 1..24: note = LF
  misc_feature 25: note = Core
  misc_feature 26..50: note = RF
agcgaactagaccgtgctccagacctgacgttcaatttgagtgactgttt

SEQ ID NO: 26822 - DNA, 50 bp, unidentified
  source 1..50: mol_type = unassigned DNA; note = target_a515834
  misc_feature 1..23: note = LF
  misc_feature 24..25: note = Core
  misc_feature 26..50: note = RF
tagatgtccgctttacccccgaaagcggacaatcaaacttgctcagagca

SEQ ID NO: 26823 - DNA, 50 bp, unidentified
  source 1..50: mol_type = unassigned DNA; note = target_a521d38
  misc_feature 1..23: note = LF
  misc_feature 24..25: note = Core
  misc_feature 26..50: note = RF
atgtcggctttccacccatagcggacattccccgctagcgtttaccgaac

SEQ ID NO: 26824 - DNA, 50 bp, unidentified
  source 1..50: mol_type = unassigned DNA; note = target_a537739
  misc_feature 1..24: note = LF
  misc_feature 25: note = Core
  misc_feature 26..50: note = RF
ttatttgatcgaactgtcattagtagcgaagcgaagtaatcttactgcga

SEQ ID NO: 26825 - DNA, 50 bp, unidentified
  source 1..50: mol_type = unassigned DNA; note = target_a53b19b
  misc_feature 1..24: note = LF
  misc_feature 25: note = Core
  misc_feature 26..50: note = RF
tggcacgtcattcccagccacgaccgggaatccatcccaagcgccttttg

SEQ ID NO: 26826 - DNA, 50 bp, unidentified
  source 1..50: mol_type = unassigned DNA; note = target_a53b56b
  misc_feature 1..21: note = LF
  misc_feature 22..25: note = Core
  misc_feature 26..50: note = RF
gggacgacggcacggaccacaccccctggtcgggtggcgatctttcctga

SEQ ID NO: 26827 - DNA, 50 bp, unidentified
  source 1..50: mol_type = unassigned DNA; note = target_a540ecf
  misc_feature 1..24: note = LF
  misc_feature 25: note = Core
  misc_feature 26..50: note = RF
gaggtactcgccaccgtcgactgacgccggaggtaggcctgcagggattc

SEQ ID NO: 26828 - DNA, 50 bp, unidentified
  source 1..50: mol_type = unassigned DNA; note = target_a546a01
  misc_feature 1..23: note = LF
  misc_feature 24..25: note = Core
  misc_feature 26..50: note = RF
gtatccgtcggctccgccgccaccttctcctcccggagcaaggttaaagg

SEQ ID NO: 26829 - DNA, 50 bp, unidentified
  source 1..50: mol_type = unassigned DNA; note = target_a551142
  misc_feature 1..23: note = LF
  misc_feature 24..25: note = Core
  misc_feature 26..50: note = RF
cctgggagagattccgggctttttttgattggaggtcaaatatgcagatt

SEQ ID NO: 26830 - DNA, 50 bp, unidentified
  source 1..50: mol_type = unassigned DNA; note = target_a553e4e
  misc_feature 1..22: note = LF
  misc_feature 23..25: note = Core
  misc_feature 26..50: note = RF
atggaccaaagcgcagttacacagaagatcggacactctctcgaaggacg

SEQ ID NO: 26831 - DNA, 50 bp, unidentified
  source 1..50: mol_type = unassigned DNA; note = target_a56776c
  misc_feature 1..23: note = LF
  misc_feature 24..25: note = Core
  misc_feature 26..50: note = RF
tctagctctttgcttttggcccctgggtccccgctttcgcggggacgagc

SEQ ID NO: 26832 - DNA, 50 bp, unidentified
  source 1..50: mol_type = unassigned DNA; note = target_a569133
  misc_feature 1..24: note = LF
  misc_feature 25: note = Core
  misc_feature 26..50: note = RF
aacctgcccatttagttccataagagctgccttaagaaaactccgatctt

SEQ ID NO: 26833 - DNA, 50 bp, unidentified
  source 1..50: mol_type = unassigned DNA; note = target_a57c4f2
  misc_feature 1..22: note = LF
  misc_feature 23..25: note = Core
  misc_feature 26..50: note = RF
tttttttcattttataatcctcctttttatattttaatctttataaaacc

SEQ ID NO: 26834 - DNA, 50 bp, unidentified
  source 1..50: mol_type = unassigned DNA; note = target_a5859f6
  misc_feature 1..23: note = LF
  misc_feature 24..25: note = Core
  misc_feature 26..50: note = RF
tgttttccgcccttcccacaaaccttggaaatcgatgaagccgattccca

SEQ ID NO: 26835 - DNA, 50 bp, unidentified
  source 1..50: mol_type = unassigned DNA; note = target_a585c4d
  misc_feature 1..23: note = LF
  misc_feature 24..25: note = Core
  misc_feature 26..50: note = RF
tgcccggtcacccaagcagacccctcctcagaaccggacgtgcggaacta

SEQ ID NO: 26836 - DNA, 50 bp, unidentified
  source 1..50: mol_type = unassigned DNA; note = target_a58ae40
  misc_feature 1..23: note = LF
  misc_feature 24..25: note = Core
  misc_feature 26..50: note = RF
aagacatcttggtgtggcgatgaacgaacgtctgaagttgggaagcgcgg

SEQ ID NO: 26837 - DNA, 50 bp, unidentified
  source 1..50: mol_type = unassigned DNA; note = target_a58cdeb
  misc_feature 1..23: note = LF
  misc_feature 24..25: note = Core
  misc_feature 26..50: note = RF
gctcatatcgcgggcaagcaccgctcccacaggagatcgcactccaggtc

SEQ ID NO: 26838 - DNA, 50 bp, unidentified
  source 1..50: mol_type = unassigned DNA; note = target_a59c541
  misc_feature 1..23: note = LF
  misc_feature 24..25: note = Core
  misc_feature 26..50: note = RF
gcgtcatcgcctttatcttattttgacccatctctgccattcgacgatca

SEQ ID NO: 26839 - DNA, 50 bp, unidentified
  source 1..50: mol_type = unassigned DNA; note = target_a5a5932
  misc_feature 1..23: note = LF
  misc_feature 24..25: note = Core
  misc_feature 26..50: note = RF
ggtcgtagcggcatgtccgctattggcccttagcggacattcgaactcac

SEQ ID NO: 26840 - DNA, 50 bp, unidentified
  source 1..50: mol_type = unassigned DNA; note = target_a5acb34
  misc_feature 1..23: note = LF
  misc_feature 24..25: note = Core
  misc_feature 26..50: note = RF
ctatgggaagcgcgttcggacggctctaggcggcgtgcaacgcgtacccc

SEQ ID NO: 26841 - DNA, 50 bp, unidentified
  source 1..50: mol_type = unassigned DNA; note = target_a5acdb9
  misc_feature 1..23: note = LF
  misc_feature 24..25: note = Core
  misc_feature 26..50: note = RF
aatatagtcttagcgtgggataattccgttttccaagcggaccccagcat

SEQ ID NO: 26842 - DNA, 50 bp, unidentified
  source 1..50: mol_type = unassigned DNA; note = target_a5b9464
  misc_feature 1..24: note = LF
  misc_feature 25: note = Core
  misc_feature 26..50: note = RF
gacaacagaaccacacaccaccgacaaagacgaagagcgccgaactggaa

SEQ ID NO: 26843 - DNA, 50 bp, unidentified
  source 1..50: mol_type = unassigned DNA; note = target_a5bf150
  misc_feature 1..24: note = LF
  misc_feature 25: note = Core
  misc_feature 26..50: note = RF
catgctcgctggcccgcagagttttttttaaaagactcgacgatgcgctc

SEQ ID NO: 26844 - DNA, 50 bp, unidentified
  source 1..50: mol_type = unassigned DNA; note = target_a5bf426
  misc_feature 1..23: note = LF
  misc_feature 24..25: note = Core
  misc_feature 26..50: note = RF
caaaacgcttaacgtaggatattttccgttttccaagcggacccctcata

SEQ ID NO: 26845 - DNA, 50 bp, unidentified
  source 1..50: mol_type = unassigned DNA; note = target_a5c1b7e
  misc_feature 1..23: note = LF
  misc_feature 24..25: note = Core
  misc_feature 26..50: note = RF
ctgcatccatctaactaagctacctgtccacaattaaaggggtgtacaac

SEQ ID NO: 26846 - DNA, 50 bp, unidentified
  source 1..50: mol_type = unassigned DNA; note = target_a5c5386
  misc_feature 1..23: note = LF
  misc_feature 24..25: note = Core
  misc_feature 26..50: note = RF
ggacgcccttcatcgatcagaccctaggtgatggcccatggcccatttgg

SEQ ID NO: 26847 - DNA, 50 bp, unidentified
  source 1..50: mol_type = unassigned DNA; note = target_a5c9391
  misc_feature 1..23: note = LF
  misc_feature 24..25: note = Core
  misc_feature 26..50: note = RF
cagccggccgggttcgtgggcgcctagaccgcccgcatgatcacgacgca

SEQ ID NO: 26848 - DNA, 50 bp, unidentified
  source 1..50: mol_type = unassigned DNA; note = target_a5d0f4e
  misc_feature 1..24: note = LF
  misc_feature 25: note = Core
  misc_feature 26..50: note = RF
caaaggtctgctttcggccaaaagcggccgttcaaatactcatcttagcg

SEQ ID NO: 26849 - DNA, 50 bp, unidentified
  source 1..50: mol_type = unassigned DNA; note = target_a5d4899
  misc_feature 1..23: note = LF
  misc_feature 24..25: note = Core
  misc_feature 26..50: note = RF
ggcctcttcgcggggcaagcccgctcccacaggtgtggtgcatggcagac

SEQ ID NO: 26850 - DNA, 50 bp, unidentified
  source 1..50: mol_type = unassigned DNA; note = target_a5dda5d
  misc_feature 1..24: note = LF
  misc_feature 25: note = Core
  misc_feature 26..50: note = RF
gtgcgcatccagctgcatttgcggcggaaagacgcaggcaaaacgtctcc

SEQ ID NO: 26851 - DNA, 50 bp, unidentified
  source 1..50: mol_type = unassigned DNA; note = target_a5e343e
  misc_feature 1..23: note = LF
  misc_feature 24..25: note = Core
  misc_feature 26..50: note = RF
aaaaacatataccaaagatcaacagccactagctattcacgcaaaatttt

SEQ ID NO: 26852 - DNA, 50 bp, unidentified
  source 1..50: mol_type = unassigned DNA; note = target_a5e91a7
  misc_feature 1..23: note = LF
  misc_feature 24..25: note = Core
  misc_feature 26..50: note = RF
ctctcgcagagcggcatgcgcatgtccttcggtgaccgggtcggcgcccg

SEQ ID NO: 26853 - DNA, 50 bp, unidentified
  source 1..50: mol_type = unassigned DNA; note = target_a5ed2a8
  misc_feature 1..23: note = LF
  misc_feature 24..25: note = Core
  misc_feature 26..50: note = RF
ccacaccactgtggtcagaaagcctagctgaggattgaactcatgggctg

SEQ ID NO: 26854 - DNA, 50 bp, unidentified
  source 1..50: mol_type = unassigned DNA; note = target_a5f31bc
  misc_feature 1..23: note = LF
  misc_feature 24..25: note = Core
  misc_feature 26..50: note = RF
aactgtcgccctaaaggaacgacctacacttcatgtgaaacttgaaactt

SEQ ID NO: 26855 - DNA, 50 bp, unidentified
  source 1..50: mol_type = unassigned DNA; note = target_a5f97f6
  misc_feature 1..22: note = LF
  misc_feature 23..25: note = Core
  misc_feature 26..50: note = RF
cctagcatttctagcatttcggtgacagtgcatttaactaccatctctca

SEQ ID NO: 26856 - DNA, 50 bp, unidentified
  source 1..50: mol_type = unassigned DNA; note = target_a60c093
  misc_feature 1..23: note = LF
  misc_feature 24..25: note = Core
  misc_feature 26..50: note = RF
agattgccacgtcacttcgttcctcgcaatgacggatttagataggtatt

SEQ ID NO: 26857 - DNA, 50 bp, unidentified
  source 1..50: mol_type = unassigned DNA; note = target_a60cc5a
  misc_feature 1..24: note = LF
  misc_feature 25: note = Core
  misc_feature 26..50: note = RF
catttagaaatattagcgtataacgccgcgttaagttgatgagatggtct

SEQ ID NO: 26858 - DNA, 50 bp, unidentified
  source 1..50: mol_type = unassigned DNA; note = target_a6117c9
  misc_feature 1..24: note = LF
  misc_feature 25: note = Core
  misc_feature 26..50: note = RF
cgacaggcaaaaatcggccagaagcggacggtcgaacgcttactattctc

SEQ ID NO: 26859 - DNA, 50 bp, unidentified
  source 1..50: mol_type = unassigned DNA; note = target_a614e31
  misc_feature 1..23: note = LF
  misc_feature 24..25: note = Core
  misc_feature 26..50: note = RF
gacgtctggcgtcttgtagtagtccacagtcgatgcgtgcgtaacctcca

SEQ ID NO: 26860 - DNA, 50 bp, unidentified
  source 1..50: mol_type = unassigned DNA; note = target_a6165b7
  misc_feature 1..24: note = LF
  misc_feature 25: note = Core
  misc_feature 26..50: note = RF
ggggtgttgcggcgctatgtccgcttttggcacaaagcagacatccccag

SEQ ID NO: 26861 - DNA, 50 bp, unidentified
  source 1..50: mol_type = unassigned DNA; note = target_a61be00
  misc_feature 1..21: note = LF
  misc_feature 22..25: note = Core
  misc_feature 26..50: note = RF
ttataattgactttcatactttcacctcttaattttttttaattataaca

SEQ ID NO: 26862 - DNA, 50 bp, unidentified
  source 1..50: mol_type = unassigned DNA; note = target_a61ccb5
  misc_feature 1..23: note = LF
  misc_feature 24..25: note = Core
  misc_feature 26..50: note = RF
ttctcccaagtgaatgactatccttttttaccgggatcgatgtacccgtc

SEQ ID NO: 26863 - DNA, 50 bp, unidentified
  source 1..50: mol_type = unassigned DNA; note = target_a620c7f
  misc_feature 1..23: note = LF
  misc_feature 24..25: note = Core
  misc_feature 26..50: note = RF
tcggggtttcgctggcgagcccgctcctacggggcttgtgtttcgcatga

SEQ ID NO: 26864 - DNA, 50 bp, unidentified
  source 1..50: mol_type = unassigned DNA; note = target_a62129b
  misc_feature 1..24: note = LF
  misc_feature 25: note = Core
  misc_feature 26..50: note = RF
ttcgtcaataggcgcgacttccgctttgggtcacaagcagacatcgcgcc

SEQ ID NO: 26865 - DNA, 50 bp, unidentified
  source 1..50: mol_type = unassigned DNA; note = target_a62c80a
  misc_feature 1..24: note = LF
  misc_feature 25: note = Core
  misc_feature 26..50: note = RF
ggacccccacggcttctggtccgctctgggtcaaaagctccgtcgagcca

SEQ ID NO: 26866 - DNA, 50 bp, unidentified
  source 1..50: mol_type = unassigned DNA; note = target_a6335a2
  misc_feature 1..22: note = LF
  misc_feature 23..25: note = Core
  misc_feature 26..50: note = RF
agcacccttcgccgctgaagcggctcccacaggggctcctcccacagggg

SEQ ID NO: 26867 - DNA, 50 bp, unidentified
  source 1..50: mol_type = unassigned DNA; note = target_a636142
  misc_feature 1..23: note = LF
  misc_feature 24..25: note = Core
  misc_feature 26..50: note = RF
gggcacgctgcgctttgcccaccctacaagaccactcgtttcgccgatac

SEQ ID NO: 26868 - DNA, 50 bp, unidentified
  source 1..50: mol_type = unassigned DNA; note = target_a637503
  misc_feature 1..23: note = LF
  misc_feature 24..25: note = Core
  misc_feature 26..50: note = RF
cgggccggtatccgctgctatcactaacgctggcgttggcaattttatca

SEQ ID NO: 26869 - DNA, 50 bp, unidentified
  source 1..50: mol_type = unassigned DNA; note = target_a63a368
  misc_feature 1..23: note = LF
  misc_feature 24..25: note = Core
  misc_feature 26..50: note = RF
gagtgcgcttaacacaagcgcctctacaccaaaccaagaaattcgcgtgc

SEQ ID NO: 26870 - DNA, 50 bp, unidentified
  source 1..50: mol_type = unassigned DNA; note = target_a648ca5
  misc_feature 1..23: note = LF
  misc_feature 24..25: note = Core
  misc_feature 26..50: note = RF
caaaaatttttcagcatatcttactcctattctatttggaaaatttcatc

SEQ ID NO: 26871 - DNA, 50 bp, unidentified
  source 1..50: mol_type = unassigned DNA; note = target_a65131c
  misc_feature 1..21: note = LF
  misc_feature 22..25: note = Core
  misc_feature 26..50: note = RF
tttctaatctgacattcgcgaaaattactatgaccaagttgactctgcga

SEQ ID NO: 26872 - DNA, 50 bp, unidentified
  source 1..50: mol_type = unassigned DNA; note = target_a65740b
  misc_feature 1..24: note = LF
  misc_feature 25: note = Core
  misc_feature 26..50: note = RF
cagagagaacgctcgccgagccgccgttcggtgcggctgacggctcccgg

SEQ ID NO: 26873 - DNA, 50 bp, unidentified
  source 1..50: mol_type = unassigned DNA; note = target_a65a5a9
  misc_feature 1..24: note = LF
  misc_feature 25: note = Core
  misc_feature 26..50: note = RF
caggaatacccgcccggtcggcggcatgagcgcgcagtctcgtcggaccg

SEQ ID NO: 26874 - DNA, 50 bp, unidentified
  source 1..50: mol_type = unassigned DNA; note = target_a66086d
  misc_feature 1..23: note = LF
  misc_feature 24..25: note = Core
  misc_feature 26..50: note = RF
cctgagaattccatactttctacctccttacgagttatgcattcgcattt

SEQ ID NO: 26875 - DNA, 50 bp, unidentified
  source 1..50: mol_type = unassigned DNA; note = target_a66d9f5
  misc_feature 1..24: note = LF
  misc_feature 25: note = Core
  misc_feature 26..50: note = RF
tagcagcatggtcggcccctaacgtaaagctaaggggcgccgcgcttttg

SEQ ID NO: 26876 - DNA, 50 bp, unidentified
  source 1..50: mol_type = unassigned DNA; note = target_a676ac1
  misc_feature 1..23: note = LF
  misc_feature 24..25: note = Core
  misc_feature 26..50: note = RF
tcctttctacggggccgaaggtccccccctggtgggcggatctgatactt

SEQ ID NO: 26877 - DNA, 50 bp, unidentified
  source 1..50: mol_type = unassigned DNA; note = target_a679fb2
  misc_feature 1..21: note = LF
  misc_feature 22..25: note = Core
  misc_feature 26..50: note = RF
ttcgggcggccgtgcaaagcgctcatgccggcacctcttcgaacgtgaag

SEQ ID NO: 26878 - DNA, 50 bp, unidentified
  source 1..50: mol_type = unassigned DNA; note = target_a67ada2
  misc_feature 1..21: note = LF
  misc_feature 22..25: note = Core
  misc_feature 26..50: note = RF
atgacgtcgtcggggatcaagctcatgcggtgaactccacgatggtcacg

SEQ ID NO: 26879 - DNA, 50 bp, unidentified
  source 1..50: mol_type = unassigned DNA; note = target_a67e9cf
  misc_feature 1..23: note = LF
  misc_feature 24..25: note = Core
  misc_feature 26..50: note = RF
cttaccttatatatttattatatcatattttaatgaaatttgtttttttt

SEQ ID NO: 26880 - DNA, 50 bp, unidentified
  source 1..50: mol_type = unassigned DNA; note = target_a684a83
  misc_feature 1..24: note = LF
  misc_feature 25: note = Core
  misc_feature 26..50: note = RF
gaaccaagcaattaattatacacgttgttgtaggtagttttttttattcc

SEQ ID NO: 26881 - DNA, 50 bp, unidentified
  source 1..50: mol_type = unassigned DNA; note = target_a6a2c9e
  misc_feature 1..21: note = LF
  misc_feature 22..25: note = Core
  misc_feature 26..50: note = RF
ccgtgccgacgaggtgatcgaatgaggcgtcgcgagttcatcacgctgct

SEQ ID NO: 26882 - DNA, 50 bp, unidentified
  source 1..50: mol_type = unassigned DNA; note = target_a6a4cf7
  misc_feature 1..23: note = LF
  misc_feature 24..25: note = Core
  misc_feature 26..50: note = RF
agttcgtcctccataatctaatccttcctactcttctcttgtttaagtca

SEQ ID NO: 26883 - DNA, 50 bp, unidentified
  source 1..50: mol_type = unassigned DNA; note = target_a6aa1f3
  misc_feature 1..24: note = LF
  misc_feature 25: note = Core
  misc_feature 26..50: note = RF
accggaacgatcaaagcaagatgtaggaactcccacaaaagtttagcaac

SEQ ID NO: 26884 - DNA, 50 bp, unidentified
  source 1..50: mol_type = unassigned DNA; note = target_a6ab947
  misc_feature 1..23: note = LF
  misc_feature 24..25: note = Core
  misc_feature 26..50: note = RF
atcggcaccgcgacgacgggttttgtcgcaaacttcggggtagcttgagg

SEQ ID NO: 26885 - DNA, 50 bp, unidentified
  source 1..50: mol_type = unassigned DNA; note = target_a6b4899
  misc_feature 1..23: note = LF
  misc_feature 24..25: note = Core
  misc_feature 26..50: note = RF
aaatcttttttttccatataatcctccatttctattctttatataaagtg

SEQ ID NO: 26886 - DNA, 50 bp, unidentified
  source 1..50: mol_type = unassigned DNA; note = target_a6c7f8b
  misc_feature 1..24: note = LF
  misc_feature 25: note = Core
  misc_feature 26..50: note = RF
cctcttactttgtatcccgattttcgggacagtcaatggtacttggtaca

SEQ ID NO: 26887 - DNA, 50 bp, unidentified
  source 1..50: mol_type = unassigned DNA; note = target_a6c8aac
  misc_feature 1..23: note = LF
  misc_feature 24..25: note = Core
  misc_feature 26..50: note = RF
tcatcttctggctctgatcaatgagtcctgaccctaacatgtacgccgcg

SEQ ID NO: 26888 - DNA, 50 bp, unidentified
  source 1..50: mol_type = unassigned DNA; note = target_a6ce69d
  misc_feature 1..22: note = LF
  misc_feature 23..25: note = Core
  misc_feature 26..50: note = RF
tgttaacggcgagcacaaagtccccccgtactacacgttaaaccggaact

SEQ ID NO: 26889 - DNA, 50 bp, unidentified
  source 1..50: mol_type = unassigned DNA; note = target_a6d1541
  misc_feature 1..23: note = LF
  misc_feature 24..25: note = Core
  misc_feature 26..50: note = RF
atttacagaaaagaacgaccgattatggaagacatatacgcacagagtaa

SEQ ID NO: 26890 - DNA, 50 bp, unidentified
  source 1..50: mol_type = unassigned DNA; note = target_a6d8f8c
  misc_feature 1..23: note = LF
  misc_feature 24..25: note = Core
  misc_feature 26..50: note = RF
tcacgaaagtcattgtatcattcctttctctaaatcatctcaaatatgga

SEQ ID NO: 26891 - DNA, 50 bp, unidentified
  source 1..50: mol_type = unassigned DNA; note = target_a6e8011
  misc_feature 1..24: note = LF
  misc_feature 25: note = Core
  misc_feature 26..50: note = RF
tcgtcttgcggcgctcgtaggtgccgctctgtgcgccctgacgggcgatg

SEQ ID NO: 26892 - DNA, 50 bp, unidentified
  source 1..50: mol_type = unassigned DNA; note = target_a6e9a85
  misc_feature 1..24: note = LF
  misc_feature 25: note = Core
  misc_feature 26..50: note = RF
tcctgaaggtgcggtccttggcggcgcaatgacgtacccagccacactcc

SEQ ID NO: 26893 - DNA, 50 bp, unidentified
  source 1..50: mol_type = unassigned DNA; note = target_a6ec347
  misc_feature 1..23: note = LF
  misc_feature 24..25: note = Core
  misc_feature 26..50: note = RF
gtccgccttcgcgagcaagctcgctcccacaggaccgatgagcgcgacgc

SEQ ID NO: 26894 - DNA, 50 bp, unidentified
  source 1..50: mol_type = unassigned DNA; note = target_a6eead6
  misc_feature 1..24: note = LF
  misc_feature 25: note = Core
  misc_feature 26..50: note = RF
gggtcgctcagcgtgaaccactgctgcagaagtggatgcgcagcagcgat

SEQ ID NO: 26895 - DNA, 50 bp, unidentified
  source 1..50: mol_type = unassigned DNA; note = target_a6f6994
  misc_feature 1..22: note = LF
  misc_feature 23..25: note = Core
  misc_feature 26..50: note = RF
gaggagttagaaatatctattggaggtatgtttatatttatctgcggcag

SEQ ID NO: 26896 - DNA, 50 bp, unidentified
  source 1..50: mol_type = unassigned DNA; note = target_a6fad0c
  misc_feature 1..23: note = LF
  misc_feature 24..25: note = Core
  misc_feature 26..50: note = RF
ttgcatacaccacaaatccaataatgtgggagcgagcctgctcgcgatga

SEQ ID NO: 26897 - DNA, 50 bp, unidentified
  source 1..50: mol_type = unassigned DNA; note = target_a708c35
  misc_feature 1..23: note = LF
  misc_feature 24..25: note = Core
  misc_feature 26..50: note = RF
cttgtcctgtccgcaatccagtcgacccatcatgacgaatcactcccgtc

SEQ ID NO: 26898 - DNA, 50 bp, unidentified
  source 1..50: mol_type = unassigned DNA; note = target_a70ddb3
  misc_feature 1..23: note = LF
  misc_feature 24..25: note = Core
  misc_feature 26..50: note = RF
tgatgctaccggcgtcagccggtagtggttcacttcgggtgtttcggtgt

SEQ ID NO: 26899 - DNA, 50 bp, unidentified
  source 1..50: mol_type = unassigned DNA; note = target_a70dee1
  misc_feature 1..24: note = LF
  misc_feature 25: note = Core
  misc_feature 26..50: note = RF
cccgcggcccagggattatgagagccacgccagttgtcactccggttgac

SEQ ID NO: 26900 - DNA, 50 bp, unidentified
  source 1..50: mol_type = unassigned DNA; note = target_a7128a6
  misc_feature 1..23: note = LF
  misc_feature 24..25: note = Core
  misc_feature 26..50: note = RF
cgactgctgccctcgctctgaggtggtgctggaaatctggacagggtgtt

SEQ ID NO: 26901 - DNA, 50 bp, unidentified
  source 1..50: mol_type = unassigned DNA; note = target_a7143ca
  misc_feature 1..23: note = LF
  misc_feature 24..25: note = Core
  misc_feature 26..50: note = RF
tgcccgcagtttcaaaatgtatcctcccgtattactcaactcatctaaga

SEQ ID NO: 26902 - DNA, 50 bp, unidentified
  source 1..50: mol_type = unassigned DNA; note = target_a71b931
  misc_feature 1..24: note = LF
  misc_feature 25: note = Core
  misc_feature 26..50: note = RF
gtttttggaaaaagcatggaaggagaggatgctgggaagatggaattgcg

SEQ ID NO: 26903 - DNA, 50 bp, unidentified
  source 1..50: mol_type = unassigned DNA; note = target_a7229a4
  misc_feature 1..23: note = LF
  misc_feature 24..25: note = Core
  misc_feature 26..50: note = RF
gggtgcggtcgagcgcctggatttgcgacttctcgtcgacggacaagacc

SEQ ID NO: 26904 - DNA, 50 bp, unidentified
  source 1..50: mol_type = unassigned DNA; note = target_a72b364
  misc_feature 1..24: note = LF
  misc_feature 25: note = Core
  misc_feature 26..50: note = RF
tcctgctgtatttggctttccagttatagtagctggttttggatataccg

SEQ ID NO: 26905 - DNA, 50 bp, unidentified
  source 1..50: mol_type = unassigned DNA; note = target_a72d708
  misc_feature 1..24: note = LF
  misc_feature 25: note = Core
  misc_feature 26..50: note = RF
gcgagcggtcacgtcttcagttaacccccgacagcgtcgggggtacacgc

SEQ ID NO: 26906 - DNA, 50 bp, unidentified
  source 1..50: mol_type = unassigned DNA; note = target_a730270
  misc_feature 1..23: note = LF
  misc_feature 24..25: note = Core
  misc_feature 26..50: note = RF
gactgtgttccaatgtccgctattgggggtaaagcggacacgacgcggac

SEQ ID NO: 26907 - DNA, 50 bp, unidentified
  source 1..50: mol_type = unassigned DNA; note = target_a73cbd5
  misc_feature 1..23: note = LF
  misc_feature 24..25: note = Core
  misc_feature 26..50: note = RF
aacgcccgccctctcccccgcccctctcccgcaagcgggagaggggagca

SEQ ID NO: 26908 - DNA, 50 bp, unidentified
  source 1..50: mol_type = unassigned DNA; note = target_a73dcf3
  misc_feature 1..23: note = LF
  misc_feature 24..25: note = Core
  misc_feature 26..50: note = RF
agagcggcatcagggtcacgcattggagactggttcaagaaccgaaggac

SEQ ID NO: 26909 - DNA, 50 bp, unidentified
  source 1..50: mol_type = unassigned DNA; note = target_a73de33
  misc_feature 1..23: note = LF
  misc_feature 24..25: note = Core
  misc_feature 26..50: note = RF
tcgaaagagatcttccactggattcaagatgacaaggtggagatatgtta

SEQ ID NO: 26910 - DNA, 50 bp, unidentified
  source 1..50: mol_type = unassigned DNA; note = target_a7418c6
  misc_feature 1..23: note = LF
  misc_feature 24..25: note = Core
  misc_feature 26..50: note = RF
cgcccgccccaccatcattatccctagtcagagagtatttcgcttgacgt

SEQ ID NO: 26911 - DNA, 50 bp, unidentified
  source 1..50: mol_type = unassigned DNA; note = target_a745919
  misc_feature 1..23: note = LF
  misc_feature 24..25: note = Core
  misc_feature 26..50: note = RF
tgtcacgcgatcatgtgcacatgttcgtcgagatcccgccacacattgca

SEQ ID NO: 26912 - DNA, 50 bp, unidentified
  source 1..50: mol_type = unassigned DNA; note = target_a745e6c
  misc_feature 1..24: note = LF
  misc_feature 25: note = Core
  misc_feature 26..50: note = RF
agcagcctaaacatgcggtctaacgtaaagatgaccggacaacaacacct

SEQ ID NO: 26913 - DNA, 50 bp, unidentified
  source 1..50: mol_type = unassigned DNA; note = target_a75e90f
  misc_feature 1..20: note = LF
  misc_feature 21..25: note = Core
  misc_feature 26..50: note = RF
tgcgacgccagccctttctcctgctttctttttcggcgcactggaatctt

SEQ ID NO: 26914 - DNA, 50 bp, unidentified
  source 1..50: mol_type = unassigned DNA; note = target_a76257b
  misc_feature 1..23: note = LF
  misc_feature 24..25: note = Core
  misc_feature 26..50: note = RF
gccgccgcttgcgagcggacccttgaccgcaccgtcctcatgtggtgaaa

SEQ ID NO: 26915 - DNA, 50 bp, unidentified
  source 1..50: mol_type = unassigned DNA; note = target_a76265b
  misc_feature 1..23: note = LF
  misc_feature 24..25: note = Core
  misc_feature 26..50: note = RF
tttggaatgttacaatataatagtgtaacaggctcaaggagagcggcggg

SEQ ID NO: 26916 - DNA, 50 bp, unidentified
  source 1..50: mol_type = unassigned DNA; note = target_a762c67
  misc_feature 1..24: note = LF
  misc_feature 25: note = Core
  misc_feature 26..50: note = RF
ttgtcttatgagactggcctacccgaaaaccgacgctcgcgaccgtctgc

SEQ ID NO: 26917 - DNA, 50 bp, unidentified
  source 1..50: mol_type = unassigned DNA; note = target_a76dcd0
  misc_feature 1..22: note = LF
  misc_feature 23..25: note = Core
  misc_feature 26..50: note = RF
ttatcgcgcaataaattgcgccgctacggaatgtgcgcttttgagagggc

SEQ ID NO: 26918 - DNA, 50 bp, unidentified
  source 1..50: mol_type = unassigned DNA; note = target_a77576e
  misc_feature 1..21: note = LF
  misc_feature 22..25: note = Core
  misc_feature 26..50: note = RF
ccggcccagcagcaggtctccttcccagtgccccggaattgcccgatctt

SEQ ID NO: 26919 - DNA, 50 bp, unidentified
  source 1..50: mol_type = unassigned DNA; note = target_a776579
  misc_feature 1..22: note = LF
  misc_feature 23..25: note = Core
  misc_feature 26..50: note = RF
ccccccgaactgatcccggaggaagggtcaccccccggtttcgacatcgt

SEQ ID NO: 26920 - DNA, 50 bp, unidentified
  source 1..50: mol_type = unassigned DNA; note = target_a7771fc
  misc_feature 1..23: note = LF
  misc_feature 24..25: note = Core
  misc_feature 26..50: note = RF
gcacacgccgcttgataggtgaacgtccggtgaacgcattttcagctaag

SEQ ID NO: 26921 - DNA, 50 bp, unidentified
  source 1..50: mol_type = unassigned DNA; note = target_a7774d5
  misc_feature 1..24: note = LF
  misc_feature 25: note = Core
  misc_feature 26..50: note = RF
ttccgctcgtggtcagcacgtggccgccacatgatgcggtgggatggagg

SEQ ID NO: 26922 - DNA, 50 bp, unidentified
  source 1..50: mol_type = unassigned DNA; note = target_a77913b
  misc_feature 1..24: note = LF
  misc_feature 25: note = Core
  misc_feature 26..50: note = RF
taaggggttgtgcaacggttaccattgttgtgcgttcgtttttattttta

SEQ ID NO: 26923 - DNA, 50 bp, unidentified
  source 1..50: mol_type = unassigned DNA; note = target_a786609
  misc_feature 1..23: note = LF
  misc_feature 24..25: note = Core
  misc_feature 26..50: note = RF
tataatgccatagtcattgtctcctttcagatcagatgcggccgcaggcc

SEQ ID NO: 26924 - DNA, 50 bp, unidentified
  source 1..50: mol_type = unassigned DNA; note = target_a78a7e6
  misc_feature 1..23: note = LF
  misc_feature 24..25: note = Core
  misc_feature 26..50: note = RF
aattgacgcgaaccggccaagatagttgacgccgaacaatgattgacgat

SEQ ID NO: 26925 - DNA, 50 bp, unidentified
  source 1..50: mol_type = unassigned DNA; note = target_a78edde
  misc_feature 1..23: note = LF
  misc_feature 24..25: note = Core
  misc_feature 26..50: note = RF
cagcttgcgtcattgaaaacctcctttccgtcggggttcccgctatccgg

SEQ ID NO: 26926 - DNA, 50 bp, unidentified
  source 1..50: mol_type = unassigned DNA; note = target_a790f8c
  misc_feature 1..23: note = LF
  misc_feature 24..25: note = Core
  misc_feature 26..50: note = RF
ccggttgggcgtcaggcagccgcctaacccccggtctaccatgtcaggat

SEQ ID NO: 26927 - DNA, 50 bp, unidentified
  source 1..50: mol_type = unassigned DNA; note = target_a793e36
  misc_feature 1..23: note = LF
  misc_feature 24..25: note = Core
  misc_feature 26..50: note = RF
acaggttctgacaccgtagtattagcactaccttgccacctttggcccgg

SEQ ID NO: 26928 - DNA, 50 bp, unidentified
  source 1..50: mol_type = unassigned DNA; note = target_a798514
  misc_feature 1..20: note = LF
  misc_feature 21..25: note = Core
  misc_feature 26..50: note = RF
ctatgggagagtagatagattttgtgtaaaaaataaatctaactactgta

SEQ ID NO: 26929 - DNA, 50 bp, unidentified
  source 1..50: mol_type = unassigned DNA; note = target_a7a811b
  misc_feature 1..23: note = LF
  misc_feature 24..25: note = Core
  misc_feature 26..50: note = RF
atttgttgtctgattttgaagggagctgtcatgaaaccttcactgcgctt

SEQ ID NO: 26930 - DNA, 50 bp, unidentified
  source 1..50: mol_type = unassigned DNA; note = target_a7af989
  misc_feature 1..23: note = LF
  misc_feature 24..25: note = Core
  misc_feature 26..50: note = RF
gcctcgcttgcgctcgacagctgctacgggggggcggtgctgggtaatac

SEQ ID NO: 26931 - DNA, 50 bp, unidentified
  source 1..50: mol_type = unassigned DNA; note = target_a7b841e
  misc_feature 1..21: note = LF
  misc_feature 22..25: note = Core
  misc_feature 26..50: note = RF
ccgtgatcgtgcgcatgatgtctcctggatccgataagtccctgttgcac

SEQ ID NO: 26932 - DNA, 50 bp, unidentified
  source 1..50: mol_type = unassigned DNA; note = target_a7b9159
  misc_feature 1..22: note = LF
  misc_feature 23..25: note = Core
  misc_feature 26..50: note = RF
aatttttctaaattcatttttctctccttaaattttttagaaatttgtta

SEQ ID NO: 26933 - DNA, 50 bp, unidentified
  source 1..50: mol_type = unassigned DNA; note = target_a7ce96a
  misc_feature 1..24: note = LF
  misc_feature 25: note = Core
  misc_feature 26..50: note = RF
cccatgaacaacaagcttacagagtgtgtttagggttattgaacttagct

SEQ ID NO: 26934 - DNA, 50 bp, unidentified
  source 1..50: mol_type = unassigned DNA; note = target_a7d20d4
  misc_feature 1..23: note = LF
  misc_feature 24..25: note = Core
  misc_feature 26..50: note = RF
aaaaaaccgcctgcacaggcggttttttatgaaagagcaattgagcacca

SEQ ID NO: 26935 - DNA, 50 bp, unidentified
  source 1..50: mol_type = unassigned DNA; note = target_a7d5799
  misc_feature 1..23: note = LF
  misc_feature 24..25: note = Core
  misc_feature 26..50: note = RF
ccgtcgtttgagaagatggagatggccatcatcttcctccggttcaattt

SEQ ID NO: 26936 - DNA, 50 bp, unidentified
  source 1..50: mol_type = unassigned DNA; note = target_a7dd2b5
  misc_feature 1..24: note = LF
  misc_feature 25: note = Core
  misc_feature 26..50: note = RF
ttgcgcaatttccgccttgactgaatcggcatggaagcttgctctggcgc

SEQ ID NO: 26937 - DNA, 50 bp, unidentified
  source 1..50: mol_type = unassigned DNA; note = target_a7df084
  misc_feature 1..24: note = LF
  misc_feature 25: note = Core
  misc_feature 26..50: note = RF
caggattcggacctgtcaggtccccaccttttcagggcccgcatgctgac

SEQ ID NO: 26938 - DNA, 50 bp, unidentified
  source 1..50: mol_type = unassigned DNA; note = target_a7ef6d0
  misc_feature 1..23: note = LF
  misc_feature 24..25: note = Core
  misc_feature 26..50: note = RF
tcgtctttctatgacaattatcgctctggtcctcgaatacctcagcgtcc

SEQ ID NO: 26939 - DNA, 50 bp, unidentified
  source 1..50: mol_type = unassigned DNA; note = target_a7f4de9
  misc_feature 1..22: note = LF
  misc_feature 23..25: note = Core
  misc_feature 26..50: note = RF
aagttttgttgtcattctgacgtgagggcgccgccgcccctctagcgcga

SEQ ID NO: 26940 - DNA, 50 bp, unidentified
  source 1..50: mol_type = unassigned DNA; note = target_a7f5b39
  misc_feature 1..24: note = LF
  misc_feature 25: note = Core
  misc_feature 26..50: note = RF
cttagtgtcccctgcgtgcggaagcagacattgaccgtaccgcccccggc

SEQ ID NO: 26941 - DNA, 50 bp, unidentified
  source 1..50: mol_type = unassigned DNA; note = target_a7f9314
  misc_feature 1..24: note = LF
  misc_feature 25: note = Core
  misc_feature 26..50: note = RF
gaatctacccggcctcatggctgcttgggtcagaaacggccgttcgacgc

SEQ ID NO: 26942 - DNA, 50 bp, unidentified
  source 1..50: mol_type = unassigned DNA; note = target_a8043ca
  misc_feature 1..23: note = LF
  misc_feature 24..25: note = Core
  misc_feature 26..50: note = RF
atcatgacacgtcgccccaaatatgcattccggaaccatgatggtgtggt

SEQ ID NO: 26943 - DNA, 50 bp, unidentified
  source 1..50: mol_type = unassigned DNA; note = target_a819fa5
  misc_feature 1..23: note = LF
  misc_feature 24..25: note = Core
  misc_feature 26..50: note = RF
taagtggagccccacatgaaatctgctcttctggtgaatgcaagcccgat

SEQ ID NO: 26944 - DNA, 50 bp, unidentified
  source 1..50: mol_type = unassigned DNA; note = target_a82365c
  misc_feature 1..23: note = LF
  misc_feature 24..25: note = Core
  misc_feature 26..50: note = RF
ggtgagcgatgagtcgagcatggctcgactctacaagggcatccacgcat

SEQ ID NO: 26945 - DNA, 50 bp, unidentified
  source 1..50: mol_type = unassigned DNA; note = target_a823b4f
  misc_feature 1..24: note = LF
  misc_feature 25: note = Core
  misc_feature 26..50: note = RF
atcctcgtatccggcgcctgcccccaccccccggggccggttcggaacgc

SEQ ID NO: 26946 - DNA, 50 bp, unidentified
  source 1..50: mol_type = unassigned DNA; note = target_a827b62
  misc_feature 1..24: note = LF
  misc_feature 25: note = Core
  misc_feature 26..50: note = RF
ttatctgttttctgttcgtgggacttattttcggttcagacagatgctgc

SEQ ID NO: 26947 - DNA, 50 bp, unidentified
  source 1..50: mol_type = unassigned DNA; note = target_a827bd7
  misc_feature 1..23: note = LF
  misc_feature 24..25: note = Core
  misc_feature 26..50: note = RF
caatgccaccgaagggggcatccaccccatcagttcaccttgctttagct

SEQ ID NO: 26948 - DNA, 50 bp, unidentified
  source 1..50: mol_type = unassigned DNA; note = target_a8355c5
  misc_feature 1..21: note = LF
  misc_feature 22..25: note = Core
  misc_feature 26..50: note = RF
cgctcctcgatcacacgctcgctcatcgcaccgcctcctggagcaacgtc

SEQ ID NO: 26949 - DNA, 50 bp, unidentified
  source 1..50: mol_type = unassigned DNA; note = target_a83bc7b
  misc_feature 1..23: note = LF
  misc_feature 24..25: note = Core
  misc_feature 26..50: note = RF
gggacggtctgggtcatggtaggtctccttctttgcggctcagttgtggt

SEQ ID NO: 26950 - DNA, 50 bp, unidentified
  source 1..50: mol_type = unassigned DNA; note = target_a845e93
  misc_feature 1..24: note = LF
  misc_feature 25: note = Core
  misc_feature 26..50: note = RF
ccactcaggccggtatttcgtaagcgtccggtaaacccatcagcagttca

SEQ ID NO: 26951 - DNA, 50 bp, unidentified
  source 1..50: mol_type = unassigned DNA; note = target_a8469db
  misc_feature 1..22: note = LF
  misc_feature 23..25: note = Core
  misc_feature 26..50: note = RF
ggattgtaataagtttccataataacctcctgataataaattagttttcc

SEQ ID NO: 26952 - DNA, 50 bp, unidentified
  source 1..50: mol_type = unassigned DNA; note = target_a847da0
  misc_feature 1..23: note = LF
  misc_feature 24..25: note = Core
  misc_feature 26..50: note = RF
tttcaaagtatggtaggaatttcctatgatacaaaaaagccggccaggac

SEQ ID NO: 26953 - DNA, 50 bp, unidentified
  source 1..50: mol_type = unassigned DNA; note = target_a84a691
  misc_feature 1..23: note = LF
  misc_feature 24..25: note = Core
  misc_feature 26..50: note = RF
aaagacaaccgagccccgagtaatcggggcgaaggagggaaccttagcct

SEQ ID NO: 26954 - DNA, 50 bp, unidentified
  source 1..50: mol_type = unassigned DNA; note = target_a84eb8b
  misc_feature 1..23: note = LF
  misc_feature 24..25: note = Core
  misc_feature 26..50: note = RF
cgcgtgcatttcttgtcctcctcctgtcaaaattataccgtatttcagca

SEQ ID NO: 26955 - DNA, 50 bp, unidentified
  source 1..50: mol_type = unassigned DNA; note = target_a85e42d
  misc_feature 1..23: note = LF
  misc_feature 24..25: note = Core
  misc_feature 26..50: note = RF
ttggatgagaagctgaaatgaattcagtttgacagactacatttcaaata

SEQ ID NO: 26956 - DNA, 50 bp, unidentified
  source 1..50: mol_type = unassigned DNA; note = target_a860649
  misc_feature 1..23: note = LF
  misc_feature 24..25: note = Core
  misc_feature 26..50: note = RF
gatggggcctgtgggccaggctcctatcgggtcacattcgcccgaccggt

SEQ ID NO: 26957 - DNA, 50 bp, unidentified
  source 1..50: mol_type = unassigned DNA; note = target_a8628e0
  misc_feature 1..24: note = LF
  misc_feature 25: note = Core
  misc_feature 26..50: note = RF
aaattgctcttgcaaagccggggccgtccacacatgaccctaattccttc

SEQ ID NO: 26958 - DNA, 50 bp, unidentified
  source 1..50: mol_type = unassigned DNA; note = target_a86e31e
  misc_feature 1..23: note = LF
  misc_feature 24..25: note = Core
  misc_feature 26..50: note = RF
tgcagtcgacatggttgcgccattggttcgagcaacaatgtcgacggcag

SEQ ID NO: 26959 - DNA, 50 bp, unidentified
  source 1..50: mol_type = unassigned DNA; note = target_a8721ab
  misc_feature 1..24: note = LF
  misc_feature 25: note = Core
  misc_feature 26..50: note = RF
ttcttaagcaccaagagccctaacgccgcgttaagtgttcaataacggac

SEQ ID NO: 26960 - DNA, 50 bp, unidentified
  source 1..50: mol_type = unassigned DNA; note = target_a8776db
  misc_feature 1..24: note = LF
  misc_feature 25: note = Core
  misc_feature 26..50: note = RF
ctcacaactaaaagcctccggctttgccgggggatacctaatccgattgg

SEQ ID NO: 26961 - DNA, 50 bp, unidentified
  source 1..50: mol_type = unassigned DNA; note = target_a888c79
  misc_feature 1..6: note = LF
  misc_feature 7..25: note = Core
  misc_feature 26..50: note = RF
aacaataaaagaggagatccttcggacttatgtccttaggataacgaaca

SEQ ID NO: 26962 - DNA, 50 bp, unidentified
  source 1..50: mol_type = unassigned DNA; note = target_a890797
  misc_feature 1..24: note = LF
  misc_feature 25: note = Core
  misc_feature 26..50: note = RF
tgacgctctaagtgtagtgtccgctttgggtcaatcgcgtccgattgata

SEQ ID NO: 26963 - DNA, 50 bp, unidentified
  source 1..50: mol_type = unassigned DNA; note = target_a891a16
  misc_feature 1..24: note = LF
  misc_feature 25: note = Core
  misc_feature 26..50: note = RF
gggcggattgagccgaagccggtcatgggtcccggctttcgcactagggc

SEQ ID NO: 26964 - DNA, 50 bp, unidentified
  source 1..50: mol_type = unassigned DNA; note = target_a89c026
  misc_feature 1..21: note = LF
  misc_feature 22..25: note = Core
  misc_feature 26..50: note = RF
aatacttctacataatagtatatcacattttgtgcatatttagagaagaa

SEQ ID NO: 26965 - DNA, 50 bp, unidentified
  source 1..50: mol_type = unassigned DNA; note = target_a8a5a98
  misc_feature 1..23: note = LF
  misc_feature 24..25: note = Core
  misc_feature 26..50: note = RF
tgcactggtgcgcgcggcgcaccctaccttaattgcgtttcggccagggt

SEQ ID NO: 26966 - DNA, 50 bp, unidentified
  source 1..50: mol_type = unassigned DNA; note = target_a8a8dab
  misc_feature 1..23: note = LF
  misc_feature 24..25: note = Core
  misc_feature 26..50: note = RF
tgtatttattcaatcagtatcacctcctagtgcttctctcaaaaagttct

SEQ ID NO: 26967 - DNA, 50 bp, unidentified
  source 1..50: mol_type = unassigned DNA; note = target_a8adc35
  misc_feature 1..24: note = LF
  misc_feature 25: note = Core
  misc_feature 26..50: note = RF
ataactccacgctaaacttcccgttagcgtaatgaggagggtaacccaac

SEQ ID NO: 26968 - DNA, 50 bp, unidentified
  source 1..50: mol_type = unassigned DNA; note = target_a8b8fad
  misc_feature 1..23: note = LF
  misc_feature 24..25: note = Core
  misc_feature 26..50: note = RF
tgcatatgcacttactgtgcttgctacaaatgagagattagtaaaagatg

SEQ ID NO: 26969 - DNA, 50 bp, unidentified
  source 1..50: mol_type = unassigned DNA; note = target_a8c8330
  misc_feature 1..24: note = LF
  misc_feature 25: note = Core
  misc_feature 26..50: note = RF
agtggctactcacgtcattctgggcggaatgggcgacgcaggctgcttgg

SEQ ID NO: 26970 - DNA, 50 bp, unidentified
  source 1..50: mol_type = unassigned DNA; note = target_a8e0337
  misc_feature 1..24: note = LF
  misc_feature 25: note = Core
  misc_feature 26..50: note = RF
cgatagaagggcgatgtcgccccttggcacttcgcggacgtggcccaacg

SEQ ID NO: 26971 - DNA, 50 bp, unidentified
  source 1..50: mol_type = unassigned DNA; note = target_a8eae72
  misc_feature 1..23: note = LF
  misc_feature 24..25: note = Core
  misc_feature 26..50: note = RF
gaggcccaaaatcgccacggtggagcgccgagaggcgcgcgttcccgatc

SEQ ID NO: 26972 - DNA, 50 bp, unidentified
  source 1..50: mol_type = unassigned DNA; note = target_a8f3afa
  misc_feature 1..24: note = LF
  misc_feature 25: note = Core
  misc_feature 26..50: note = RF
cccaatatctcgcagggaggaggccgtccacatatgggctcagtagagcg

SEQ ID NO: 26973 - DNA, 50 bp, unidentified
  source 1..50: mol_type = unassigned DNA; note = target_a8f7be6
  misc_feature 1..23: note = LF
  misc_feature 24..25: note = Core
  misc_feature 26..50: note = RF
agttcatccatttcacgttcctcctttgttctaagcatgaaaaaagcacc

SEQ ID NO: 26974 - DNA, 50 bp, unidentified
  source 1..50: mol_type = unassigned DNA; note = target_a8fa437
  misc_feature 1..24: note = LF
  misc_feature 25: note = Core
  misc_feature 26..50: note = RF
atggcctgggccgcgctttgttagaccggttcttaatgccaagaaggcgg

SEQ ID NO: 26975 - DNA, 50 bp, unidentified
  source 1..50: mol_type = unassigned DNA; note = target_a8ff684
  misc_feature 1..24: note = LF
  misc_feature 25: note = Core
  misc_feature 26..50: note = RF
cgaacgcgtactcccgacctaaagcggtagttggcgactgtccgctttcc

SEQ ID NO: 26976 - DNA, 50 bp, unidentified
  source 1..50: mol_type = unassigned DNA; note = target_a900b49
  misc_feature 1..23: note = LF
  misc_feature 24..25: note = Core
  misc_feature 26..50: note = RF
gctggttacagttggccgtttcgtcactgtgacggtagaccgcggccgct

SEQ ID NO: 26977 - DNA, 50 bp, unidentified
  source 1..50: mol_type = unassigned DNA; note = target_a90dd7d
  misc_feature 1..24: note = LF
  misc_feature 25: note = Core
  misc_feature 26..50: note = RF
cgggatcagcaccggcaagtcggcttatcgttaatgctgttaggcctctg

SEQ ID NO: 26978 - DNA, 50 bp, unidentified
  source 1..50: mol_type = unassigned DNA; note = target_a92267b
  misc_feature 1..24: note = LF
  misc_feature 25: note = Core
  misc_feature 26..50: note = RF
actctctaatgtcagccgatgacccgtagcagactgttgatgcactaaga

SEQ ID NO: 26979 - DNA, 50 bp, unidentified
  source 1..50: mol_type = unassigned DNA; note = target_a924a4d
  misc_feature 1..21: note = LF
  misc_feature 22..25: note = Core
  misc_feature 26..50: note = RF
tggcgaggtcggtcatcggttctccagggacggtgcggaaggttcggcgg

SEQ ID NO: 26980 - DNA, 50 bp, unidentified
  source 1..50: mol_type = unassigned DNA; note = target_a925934
  misc_feature 1..23: note = LF
  misc_feature 24..25: note = Core
  misc_feature 26..50: note = RF
gtacccggcatgcggacttcatcagggccagcggttatatgcaccgcgca

SEQ ID NO: 26981 - DNA, 50 bp, unidentified
  source 1..50: mol_type = unassigned DNA; note = target_a925a94
  misc_feature 1..22: note = LF
  misc_feature 23..25: note = Core
  misc_feature 26..50: note = RF
ggcagaagaaagactcttctatcttcgcagtcaacttaaccggaaatatt

SEQ ID NO: 26982 - DNA, 50 bp, unidentified
  source 1..50: mol_type = unassigned DNA; note = target_a9269e8
  misc_feature 1..23: note = LF
  misc_feature 24..25: note = Core
  misc_feature 26..50: note = RF
aatctttttcatcctcgattctcctttcattcatgcagctttgcgccgca

SEQ ID NO: 26983 - DNA, 50 bp, unidentified
  source 1..50: mol_type = unassigned DNA; note = target_a92a41e
  misc_feature 1..23: note = LF
  misc_feature 24..25: note = Core
  misc_feature 26..50: note = RF
agcggcttgccaccggcaaagcggacattcttgagcagctgcggcaccgg

SEQ ID NO: 26984 - DNA, 50 bp, unidentified
  source 1..50: mol_type = unassigned DNA; note = target_a92dd7e
  misc_feature 1..23: note = LF
  misc_feature 24..25: note = Core
  misc_feature 26..50: note = RF
aaagcgggtactttcatagatacctcctataaaataaaaatcagacattt

SEQ ID NO: 26985 - DNA, 50 bp, unidentified
  source 1..50: mol_type = unassigned DNA; note = target_a93014d
  misc_feature 1..24: note = LF
  misc_feature 25: note = Core
  misc_feature 26..50: note = RF
gggcaaggtcctggtccactccgaccagggctcccagttcaccagcatgg

SEQ ID NO: 26986 - DNA, 50 bp, unidentified
  source 1..50: mol_type = unassigned DNA; note = target_a931166
  misc_feature 1..22: note = LF
  misc_feature 23..25: note = Core
  misc_feature 26..50: note = RF
ctgccgaacgcagccttcggcagctgctacaacagcggtttgcggcgcta

SEQ ID NO: 26987 - DNA, 50 bp, unidentified
  source 1..50: mol_type = unassigned DNA; note = target_a932b15
  misc_feature 1..23: note = LF
  misc_feature 24..25: note = Core
  misc_feature 26..50: note = RF
tacctcgtgcctcagtattttactcgaactgacaatctaactaaaattac

SEQ ID NO: 26988 - DNA, 50 bp, unidentified
  source 1..50: mol_type = unassigned DNA; note = target_a93d83f
  misc_feature 1..20: note = LF
  misc_feature 21..25: note = Core
  misc_feature 26..50: note = RF
gggttcgcgtacatccctgcctcctttcctgcggcgcatccggtgccgca

SEQ ID NO: 26989 - DNA, 50 bp, unidentified
  source 1..50: mol_type = unassigned DNA; note = target_a93e88f
  misc_feature 1..24: note = LF
  misc_feature 25: note = Core
  misc_feature 26..50: note = RF
tgggcagaaggaagcgtagccgacttctcgtccatgtggacttggttccg

SEQ ID NO: 26990 - DNA, 50 bp, unidentified
  source 1..50: mol_type = unassigned DNA; note = target_a94f7ce
  misc_feature 1..23: note = LF
  misc_feature 24..25: note = Core
  misc_feature 26..50: note = RF
gcggagtggtccgcccctcgtgactagcccttgggctcgaccgcgaccgt

SEQ ID NO: 26991 - DNA, 50 bp, unidentified
  source 1..50: mol_type = unassigned DNA; note = target_a94fb12
  misc_feature 1..23: note = LF
  misc_feature 24..25: note = Core
  misc_feature 26..50: note = RF
cgcgcttttcaaaagcgcgaacctcttttttgctacttttttcagttatg

SEQ ID NO: 26992 - DNA, 50 bp, unidentified
  source 1..50: mol_type = unassigned DNA; note = target_a95012c
  misc_feature 1..23: note = LF
  misc_feature 24..25: note = Core
  misc_feature 26..50: note = RF
acccatctaatctcatatattacctccataaatgataatttttcattctg

SEQ ID NO: 26993 - DNA, 50 bp, unidentified
  source 1..50: mol_type = unassigned DNA; note = target_a95573e
  misc_feature 1..22: note = LF
  misc_feature 23..25: note = Core
  misc_feature 26..50: note = RF
gtctcagaaactgagatggccttttttatgctttccttatggaaaagtcc

SEQ ID NO: 26994 - DNA, 50 bp, unidentified
  source 1..50: mol_type = unassigned DNA; note = target_a9573ac
  misc_feature 1..23: note = LF
  misc_feature 24..25: note = Core
  misc_feature 26..50: note = RF
taatcctttctcccaaattcctcctctttaaaagcggtggaaatgctgta

SEQ ID NO: 26995 - DNA, 50 bp, unidentified
  source 1..50: mol_type = unassigned DNA; note = target_a95a110
  misc_feature 1..23: note = LF
  misc_feature 24..25: note = Core
  misc_feature 26..50: note = RF
caacaatcgcgagcgcccaatgttgggtctcgctgacgctcgacccaacc

SEQ ID NO: 26996 - DNA, 50 bp, unidentified
  source 1..50: mol_type = unassigned DNA; note = target_a95b9b3
  misc_feature 1..23: note = LF
  misc_feature 24..25: note = Core
  misc_feature 26..50: note = RF
ttgacggtgcggcggtcaaggggtggttagccgtcgaccctcaaggccaa

SEQ ID NO: 26997 - DNA, 50 bp, unidentified
  source 1..50: mol_type = unassigned DNA; note = target_a965c18
  misc_feature 1..23: note = LF
  misc_feature 24..25: note = Core
  misc_feature 26..50: note = RF
tgtccgtacacttactgtgcttgctacaaaagaatgattagagtagcaag

SEQ ID NO: 26998 - DNA, 50 bp, unidentified
  source 1..50: mol_type = unassigned DNA; note = target_a96c0c8
  misc_feature 1..23: note = LF
  misc_feature 24..25: note = Core
  misc_feature 26..50: note = RF
aaatgttctgtagattcccattcctcagggttgttggttcttgttcttgt

SEQ ID NO: 26999 - DNA, 50 bp, unidentified
  source 1..50: mol_type = unassigned DNA; note = target_a96fd79
  misc_feature 1..23: note = LF
  misc_feature 24..25: note = Core
  misc_feature 26..50: note = RF
gtgcatggtgtttttcttcccctctcacgaatactttttcacgatggacg

SEQ ID NO: 27000 - DNA, 50 bp, unidentified
  source 1..50: mol_type = unassigned DNA; note = target_a971e53
  misc_feature 1..23: note = LF
  misc_feature 24..25: note = Core
  misc_feature 26..50: note = RF
gccttcagcgtgcgtggccagttttttgaactcctcgacaatatgggcgt

SEQ ID NO: 27001 - DNA, 50 bp, unidentified
  source 1..50: mol_type = unassigned DNA; note = target_a9749e8
  misc_feature 1..23: note = LF
  misc_feature 24..25: note = Core
  misc_feature 26..50: note = RF
gtgatgctgtggtttcgtttcggtgccactgcacttaatcggcgccagtt

SEQ ID NO: 27002 - DNA, 50 bp, unidentified
  source 1..50: mol_type = unassigned DNA; note = target_a978ff7
  misc_feature 1..23: note = LF
  misc_feature 24..25: note = Core
  misc_feature 26..50: note = RF
gctgaatcagaatccctctgatttgggaatcccaaatcgattcagactaa

SEQ ID NO: 27003 - DNA, 50 bp, unidentified
  source 1..50: mol_type = unassigned DNA; note = target_a97a587
  misc_feature 1..22: note = LF
  misc_feature 23..25: note = Core
  misc_feature 26..50: note = RF
agaagtcgctgattagcggctttttttattggagggaaaacatcatgaat

SEQ ID NO: 27004 - DNA, 50 bp, unidentified
  source 1..50: mol_type = unassigned DNA; note = target_a97e117
  misc_feature 1..23: note = LF
  misc_feature 24..25: note = Core
  misc_feature 26..50: note = RF
ccgcatggatgcggcgaccaagcctacaaggacgtacttgcggcgtcccc

SEQ ID NO: 27005 - DNA, 50 bp, unidentified
  source 1..50: mol_type = unassigned DNA; note = target_a987e75
  misc_feature 1..23: note = LF
  misc_feature 24..25: note = Core
  misc_feature 26..50: note = RF
tcgtccgacggtatttccgcttttggcacatagcggacaagcgcgcgttg

SEQ ID NO: 27006 - DNA, 50 bp, unidentified
  source 1..50: mol_type = unassigned DNA; note = target_a98a6db
  misc_feature 1..24: note = LF
  misc_feature 25: note = Core
  misc_feature 26..50: note = RF
cagcttaacttaaggattacggagagacatcatggccaagaacaaaccca

SEQ ID NO: 27007 - DNA, 50 bp, unidentified
  source 1..50: mol_type = unassigned DNA; note = target_a98f2e9
  misc_feature 1..23: note = LF
  misc_feature 24..25: note = Core
  misc_feature 26..50: note = RF
taatattcatgctcatcatccttgtctttcattaaggttagatggatatt

SEQ ID NO: 27008 - DNA, 50 bp, unidentified
  source 1..50: mol_type = unassigned DNA; note = target_a99ab58
  misc_feature 1..23: note = LF
  misc_feature 24..25: note = Core
  misc_feature 26..50: note = RF
gccagccgcggcgtttataggtcccggcgcgggattcgcacggggcactg

SEQ ID NO: 27009 - DNA, 50 bp, unidentified
  source 1..50: mol_type = unassigned DNA; note = target_a99ddb1
  misc_feature 1..23: note = LF
  misc_feature 24..25: note = Core
  misc_feature 26..50: note = RF
cagcgcttcgctgtgcgaagcggctacagttacaaaacgcggcgacgtgg

SEQ ID NO: 27010 - DNA, 50 bp, unidentified
  source 1..50: mol_type = unassigned DNA; note = target_a9a24d6
  misc_feature 1..21: note = LF
  misc_feature 22..25: note = Core
  misc_feature 26..50: note = RF
acgacgtcgcgcagccggacgctcacgcggccaccgccccggcccgcagg

SEQ ID NO: 27011 - DNA, 50 bp, unidentified
  source 1..50: mol_type = unassigned DNA; note = target_a9af473
  misc_feature 1..23: note = LF
  misc_feature 24..25: note = Core
  misc_feature 26..50: note = RF
gtaaaaatataatctttcataaattatctccttccctttaccataaaaaa

SEQ ID NO: 27012 - DNA, 50 bp, unidentified
  source 1..50: mol_type = unassigned DNA; note = target_a9d10e4
  misc_feature 1..23: note = LF
  misc_feature 24..25: note = Core
  misc_feature 26..50: note = RF
cacgctggctgaatgtccgcttttggcacttagcggacatttctcaggtc

SEQ ID NO: 27013 - DNA, 50 bp, unidentified
  source 1..50: mol_type = unassigned DNA; note = target_a9deed0
  misc_feature 1..24: note = LF
  misc_feature 25: note = Core
  misc_feature 26..50: note = RF
cgagattttgtcatgacgcctaacgtcttggtcagcggcgcgcttcagcg

SEQ ID NO: 27014 - DNA, 50 bp, unidentified
  source 1..50: mol_type = unassigned DNA; note = target_a9dff88
  misc_feature 1..23: note = LF
  misc_feature 24..25: note = Core
  misc_feature 26..50: note = RF
gcacactctcggccctcgacgcccccccccagcgatcgaagaccgacacc

SEQ ID NO: 27015 - DNA, 50 bp, unidentified
  source 1..50: mol_type = unassigned DNA; note = target_a9e83ff
  misc_feature 1..23: note = LF
  misc_feature 24..25: note = Core
  misc_feature 26..50: note = RF
cgaaaattttgcgacaagccctttgttgcgtaatagaacaaatttccata

SEQ ID NO: 27016 - DNA, 50 bp, unidentified
  source 1..50: mol_type = unassigned DNA; note = target_a9e8b76
  misc_feature 1..20: note = LF
  misc_feature 21..25: note = Core
  misc_feature 26..50: note = RF
ctcacagcatcagcctgccaccccccggatcgaccggccgggcgcgtcgc

SEQ ID NO: 27017 - DNA, 50 bp, unidentified; identical to SEQ ID NO: 23997
  source 1..50: mol_type = unassigned DNA; note = target_a9e9d5b
  misc_feature 1..22: note = LF
  misc_feature 23..25: note = Core
  misc_feature 26..50: note = RF

SEQ ID NO: 27018 - DNA, 50 bp, unidentified
  source 1..50: mol_type = unassigned DNA; note = target_a9ef4e8
  misc_feature 1..24: note = LF
  misc_feature 25: note = Core
  misc_feature 26..50: note = RF
ttgcgcctcggcttatcattcagctatccgggggatgtcagatttccctg

SEQ ID NO: 27019 - DNA, 50 bp, unidentified
  source 1..50: mol_type = unassigned DNA; note = target_a9ef7ff
  misc_feature 1..21: note = LF
  misc_feature 22..25: note = Core
  misc_feature 26..50: note = RF
ggcacagcccctccatcttgcttgcagcggttgcaaatgcgaaaattttt

SEQ ID NO: 27020 - DNA, 50 bp, unidentified
  source 1..50: mol_type = unassigned DNA; note = target_a9f6a0b
  misc_feature 1..23: note = LF
  misc_feature 24..25: note = Core
  misc_feature 26..50: note = RF
ggacgggtgaaacgtcacccaccctacgtgactgaattaaggtcacagcg

SEQ ID NO: 27021 - DNA, 50 bp, unidentified
  source 1..50: mol_type = unassigned DNA; note = target_a9fecfb
  misc_feature 1..24: note = LF
  misc_feature 25: note = Core
  misc_feature 26..50: note = RF
aacatggtgctggatggtctagagcgcatagtagcgtttgcggttggaaa

SEQ ID NO: 27022 - DNA, 50 bp, unidentified
  source 1..50: mol_type = unassigned DNA; note = target_aa07dac
  misc_feature 1..24: note = LF
  misc_feature 25: note = Core
  misc_feature 26..50: note = RF
gtgttcggcggctcgtcggacgctcacgctcacgtatgcgggtgtttgcc

SEQ ID NO: 27023 - DNA, 50 bp, unidentified
  source 1..50: mol_type = unassigned DNA; note = target_aa0916d
  misc_feature 1..23: note = LF
  misc_feature 24..25: note = Core
  misc_feature 26..50: note = RF
ggcgttcgcggtggcgtcacgcttccgggacgacttgttcgactgcctga

SEQ ID NO: 27024 - DNA, 50 bp, unidentified
  source 1..50: mol_type = unassigned DNA; note = target_aa0ede2
  misc_feature 1..23: note = LF
  misc_feature 24..25: note = Core
  misc_feature 26..50: note = RF
acacccatggggggttatgccgactagagcgggaaacttatgccgacacc

SEQ ID NO: 27025 - DNA, 50 bp, unidentified
  source 1..50: mol_type = unassigned DNA; note = target_aa151be
  misc_feature 1..23: note = LF
  misc_feature 24..25: note = Core
  misc_feature 26..50: note = RF
cggctctccggccgatggtccccctcccgccgctgcgcgggggaggtagg

SEQ ID NO: 27026 - DNA, 50 bp, unidentified
  source 1..50: mol_type = unassigned DNA; note = target_aa15bc8
  misc_feature 1..22: note = LF
  misc_feature 23..25: note = Core
  misc_feature 26..50: note = RF
agtcttttaccaaaaaaaatgtcattctgaacgtagtgaagaatcttatt

SEQ ID NO: 27027 - DNA, 50 bp, unidentified
  source 1..50: mol_type = unassigned DNA; note = target_aa27613
  misc_feature 1..24: note = LF
  misc_feature 25: note = Core
  misc_feature 26..50: note = RF
tcgcgatggctcaatttccgagttttttcaacagtatcgacgtaaagcgg

SEQ ID NO: 27028 - DNA, 50 bp, unidentified
  source 1..50: mol_type = unassigned DNA; note = target_aa3032b
  misc_feature 1..22: note = LF
  misc_feature 23..25: note = Core
  misc_feature 26..50: note = RF
attcacttaaactaaactgccatttagttgaataagaaaaatcatattta

SEQ ID NO: 27029 - DNA, 50 bp, unidentified
  source 1..50: mol_type = unassigned DNA; note = target_aa31065
  misc_feature 1..23: note = LF
  misc_feature 24..25: note = Core
  misc_feature 26..50: note = RF
gagcctcaaaatatactatcctccttattaaagttttcttaccgacattt

SEQ ID NO: 27030 - DNA, 50 bp, unidentified
  source 1..50: mol_type = unassigned DNA; note = target_aa333bc
  misc_feature 1..22: note = LF
  misc_feature 23..25: note = Core
  misc_feature 26..50: note = RF
tcacacatcttgggccttgagcctagaggtggctgaaccctccggcctcg

SEQ ID NO: 27031 - DNA, 50 bp, unidentified
  source 1..50: mol_type = unassigned DNA; note = target_aa33d62
  misc_feature 1..23: note = LF
  misc_feature 24..25: note = Core
  misc_feature 26..50: note = RF
ctgcttatttcgcgatggcggagcttgtctttccgggagagttgagaggc

SEQ ID NO: 27032 - DNA, 50 bp, unidentified
  source 1..50: mol_type = unassigned DNA; note = target_aa35b03
  misc_feature 1..24: note = LF
  misc_feature 25: note = Core
  misc_feature 26..50: note = RF
tctagcccggctctctacctctgacccggcaccggcgccgtttgcggcgc

SEQ ID NO: 27033 - DNA, 50 bp, unidentified
  source 1..50: mol_type = unassigned DNA; note = target_aa4128b
  misc_feature 1..24: note = LF
  misc_feature 25: note = Core
  misc_feature 26..50: note = RF
gagcggttaaaaaacaaccttaacgtacaatattttccgtttcccaaacg

SEQ ID NO: 27034 - DNA, 50 bp, unidentified
  source 1..50: mol_type = unassigned DNA; note = target_aa45f41
  misc_feature 1..23: note = LF
  misc_feature 24..25: note = Core
  misc_feature 26..50: note = RF
atttctcgttcattgggcagctcctttcaaatcgttatttcctcagttcc

SEQ ID NO: 27035 - DNA, 50 bp, unidentified
  source 1..50: mol_type = unassigned DNA; note = target_aa4926b
  misc_feature 1..23: note = LF
  misc_feature 24..25: note = Core
  misc_feature 26..50: note = RF
agcaaaggcgcgcacggcacgccctacggaggatattcctatgcagggaa

SEQ ID NO: 27036 - DNA, 50 bp, unidentified
  source 1..50: mol_type = unassigned DNA; note = target_aa54961
  misc_feature 1..23: note = LF
  misc_feature 24..25: note = Core
  misc_feature 26..50: note = RF
gcgcagttccagagcaactgacgtggacctacaacgactgcaccttgcca

SEQ ID NO: 27037 - DNA, 50 bp, unidentified
  source 1..50: mol_type = unassigned DNA; note = target_aa603f6
  misc_feature 1..24: note = LF
  misc_feature 25: note = Core
  misc_feature 26..50: note = RF
aggacggccgcgcaccactcgcggcatgagcgcgcgtttcacgacgggtg

SEQ ID NO: 27038 - DNA, 50 bp, unidentified
  source 1..50: mol_type = unassigned DNA; note = target_aa6ba89
  misc_feature 1..23: note = LF
  misc_feature 24..25: note = Core
  misc_feature 26..50: note = RF
tgtcttcatcttctggatcaatgagtcctgagcctagccacccatgccat

SEQ ID NO: 27039 - DNA, 50 bp, unidentified
  source 1..50: mol_type = unassigned DNA; note = target_aa6f80f
  misc_feature 1..23: note = LF
  misc_feature 24..25: note = Core
  misc_feature 26..50: note = RF
catcgcgcgtgggttggccggctagttgtactgacccgccaggttgggta

SEQ ID NO: 27040 - DNA, 50 bp, unidentified
  source 1..50: mol_type = unassigned DNA; note = target_aa7851e
  misc_feature 1..23: note = LF
  misc_feature 24..25: note = Core
  misc_feature 26..50: note = RF
aactaggctttgatttccttaacctacgtattcgatatgaacaagaaaac

SEQ ID NO: 27041 - DNA, 50 bp, unidentified
  source 1..50: mol_type = unassigned DNA; note = target_aa786fd
  misc_feature 1..24: note = LF
  misc_feature 25: note = Core
  misc_feature 26..50: note = RF
gtcgtaccaacttgatttccggagaggccgacatgaccacgcctgctgag

SEQ ID NO: 27042 - DNA, 50 bp, unidentified
  source 1..50: mol_type = unassigned DNA; note = target_aa7b2bf
  misc_feature 1..23: note = LF
  misc_feature 24..25: note = Core
  misc_feature 26..50: note = RF
tgcgtttcacgatggggttcctccttcacattttgtcatattttgctcca

SEQ ID NO: 27043 - DNA, 50 bp, unidentified
  source 1..50: mol_type = unassigned DNA; note = target_aa7c21c
  misc_feature 1..23: note = LF
  misc_feature 24..25: note = Core
  misc_feature 26..50: note = RF
gctgaggcgccggcaccgggccgctcaggcgctcaggcgctcaggcgctc

SEQ ID NO: 27044 - DNA, 50 bp, unidentified
  source 1..50: mol_type = unassigned DNA; note = target_aa8bb99
  misc_feature 1..24: note = LF
  misc_feature 25: note = Core
  misc_feature 26..50: note = RF
ttattaacggcggcgttgctgtaaaattctgattcggacaattttttttc

SEQ ID NO: 27045 - DNA, 50 bp, unidentified
  source 1..50: mol_type = unassigned DNA; note = target_aa8c3f7
  misc_feature 1..23: note = LF
  misc_feature 24..25: note = Core
  misc_feature 26..50: note = RF
ggggagggcgtcccgggccgcacctcaggcggcgagctcttccacgtctt

SEQ ID NO: 27046 - DNA, 50 bp, unidentified
  source 1..50: mol_type = unassigned DNA; note = target_aa9148d
  misc_feature 1..23: note = LF
  misc_feature 24..25: note = Core
  misc_feature 26..50: note = RF
cagcaacccggggaaggctcgtttgacagttgtcagacgattggtctgtc

SEQ ID NO: 27047 - DNA, 50 bp, unidentified
  source 1..50: mol_type = unassigned DNA; note = target_aa9898b
  misc_feature 1..21: note = LF
  misc_feature 22..25: note = Core
  misc_feature 26..50: note = RF
ggtccagccaaaccgacgcgaatgacccaaactagacgtgctgcagactg

SEQ ID NO: 27048 - DNA, 50 bp, unidentified; identical to SEQ ID NO: 21190
  source 1..50: mol_type = unassigned DNA; note = target_aaa19ec
  misc_feature 1..22: note = LF
  misc_feature 23..25: note = Core
  misc_feature 26..50: note = RF

SEQ ID NO: 27049 - DNA, 50 bp, unidentified
  source 1..50: mol_type = unassigned DNA; note = target_aaa2461
  misc_feature 1..23: note = LF
  misc_feature 24..25: note = Core
  misc_feature 26..50: note = RF
tcgtattccgcggaatcaatctcctttcctttccgttccgagggtttggg

SEQ ID NO: 27050 - DNA, 50 bp, unidentified
  source 1..50: mol_type = unassigned DNA; note = target_aaa7a87
  misc_feature 1..21: note = LF
  misc_feature 22..25: note = Core
  misc_feature 26..50: note = RF
cgtaatgtcaaacgaaagcacctagcacgcacggctgcagctgcgctcgc

SEQ ID NO: 27051 - DNA, 50 bp, unidentified
  source 1..50: mol_type = unassigned DNA; note = target_aaac4a7
  misc_feature 1..24: note = LF
  misc_feature 25: note = Core
  misc_feature 26..50: note = RF
cagattcggatctccggcacgcggcggtatgacgcgactcctgatcgttc

SEQ ID NO: 27052 - DNA, 50 bp, unidentified
  source 1..50: mol_type = unassigned DNA; note = target_aab52a9
  misc_feature 1..23: note = LF
  misc_feature 24..25: note = Core
  misc_feature 26..50: note = RF
gtagatcaatgcagcctgtccggctagtgcgcggccaggcatgacgaggg

SEQ ID NO: 27053 - DNA, 50 bp, unidentified
  source 1..50: mol_type = unassigned DNA; note = target_aabcef7
  misc_feature 1..22: note = LF
  misc_feature 23..25: note = Core
  misc_feature 26..50: note = RF
tagactttgaactcaagcacccgtttactttaagtacaatactacacaaa

SEQ ID NO: 27054 - DNA, 50 bp, unidentified
  source 1..50: mol_type = unassigned DNA; note = target_aabd51e
  misc_feature 1..23: note = LF
  misc_feature 24..25: note = Core
  misc_feature 26..50: note = RF
gcccctaagactctgaataaagcagcgagtctgacaatgtaacgaagtcc

SEQ ID NO: 27055 - DNA, 50 bp, unidentified
  source 1..50: mol_type = unassigned DNA; note = target_aac1340
  misc_feature 1..24: note = LF
  misc_feature 25: note = Core
  misc_feature 26..50: note = RF
cgaataaggttagcccgcgtagggcgcaatcgttattgcgccgaatgaac

SEQ ID NO: 27056 - DNA, 50 bp, unidentified
  source 1..50: mol_type = unassigned DNA; note = target_aac8e77
  misc_feature 1..23: note = LF
  misc_feature 24..25: note = Core
  misc_feature 26..50: note = RF
cgaccagaccgccagggctcggcaggttgtcgtgatgcacggttcgcccg

SEQ ID NO: 27057 - DNA, 50 bp, unidentified
  source 1..50: mol_type = unassigned DNA; note = target_aad1ef0
  misc_feature 1..23: note = LF
  misc_feature 24..25: note = Core
  misc_feature 26..50: note = RF
agaaaccgggggtagtctgcctcctttcattcagtacatcataaactgcc

SEQ ID NO: 27058 - DNA, 50 bp, unidentified
  source 1..50: mol_type = unassigned DNA; note = target_aaf8d2b
  misc_feature 1..24: note = LF
  misc_feature 25: note = Core
  misc_feature 26..50: note = RF
cacttcacagataattaagtattatgtcccttttttctcaacttaaagat

SEQ ID NO: 27059 - DNA, 50 bp, unidentified
  source 1..50: mol_type = unassigned DNA; note = target_ab03241
  misc_feature 1..22: note = LF
  misc_feature 23..25: note = Core
  misc_feature 26..50: note = RF
agcgttttgagctcaggctgattttttgcagattctatccataatcatcg

SEQ ID NO: 27060 - DNA, 50 bp, unidentified
  source 1..50: mol_type = unassigned DNA; note = target_ab04a24
  misc_feature 1..23: note = LF
  misc_feature 24..25: note = Core
  misc_feature 26..50: note = RF
gagagcccggccacgcgccgggctttgtttgtgcgaggcagacgtcgacc

SEQ ID NO: 27061 - DNA, 50 bp, unidentified
  source 1..50: mol_type = unassigned DNA; note = target_ab082cb
  misc_feature 1..21: note = LF
  misc_feature 22..25: note = Core
  misc_feature 26..50: note = RF
gggcgggatcggtgccggtggctcacggcatcgccccgcggctccgggtc

SEQ ID NO: 27062 - DNA, 50 bp, unidentified
  source 1..50: mol_type = unassigned DNA; note = target_ab089dc
  misc_feature 1..23: note = LF
  misc_feature 24..25: note = Core
  misc_feature 26..50: note = RF
gagcgcggcaggttcacaagacggagccctgtaatgtggtacccaaccca

SEQ ID NO: 27063 - DNA, 50 bp, unidentified
  source 1..50: mol_type = unassigned DNA; note = target_ab08bb6
  misc_feature 1..23: note = LF
  misc_feature 24..25: note = Core
  misc_feature 26..50: note = RF
tcttgaaacatttttttctttcatctccttaataaatttttacttatata

SEQ ID NO: 27064 - DNA, 50 bp, unidentified
  source 1..50: mol_type = unassigned DNA; note = target_ab17b32
  misc_feature 1..23: note = LF
  misc_feature 24..25: note = Core
  misc_feature 26..50: note = RF
tttcggtgatcagccggctgacctggctcttcgagacgccggtcccgccc

SEQ ID NO: 27065 - DNA, 50 bp, unidentified
  source 1..50: mol_type = unassigned DNA; note = target_ab19203
  misc_feature 1..24: note = LF
  misc_feature 25: note = Core
  misc_feature 26..50: note = RF
ggtggaaatatggctgtttgcccccaccccccgcgaaaaccggacatgcg

SEQ ID NO: 27066 - DNA, 50 bp, unidentified
  source 1..50: mol_type = unassigned DNA; note = target_ab1c633
  misc_feature 1..23: note = LF
  misc_feature 24..25: note = Core
  misc_feature 26..50: note = RF
ttgagacactgaatgtcggcttgtgggtcttcgatctctattgatcatgg

SEQ ID NO: 27067 - DNA, 50 bp, unidentified
  source 1..50: mol_type = unassigned DNA; note = target_ab1e5ed
  misc_feature 1..23: note = LF
  misc_feature 24..25: note = Core
  misc_feature 26..50: note = RF
gctcttaagcaatcagatcaatctgtccggtaggtcctgacgggggacac

SEQ ID NO: 27068 - DNA, 50 bp, unidentified
  source 1..50: mol_type = unassigned DNA; note = target_ab20831
  misc_feature 1..23: note = LF
  misc_feature 24..25: note = Core
  misc_feature 26..50: note = RF
atgtttctgtaggtcgagcatggctcggctctacaggatgcggccggggc

SEQ ID NO: 27069 - DNA, 50 bp, unidentified
  source 1..50: mol_type = unassigned DNA; note = target_ab20978
  misc_feature 1..23: note = LF
  misc_feature 24..25: note = Core
  misc_feature 26..50: note = RF
gcggtacctcacccgaggatgagagtctgatcaaccgtcgttctgagctc

SEQ ID NO: 27070 - DNA, 50 bp, unidentified
  source 1..50: mol_type = unassigned DNA; note = target_ab25628
  misc_feature 1..23: note = LF
  misc_feature 24..25: note = Core
  misc_feature 26..50: note = RF
cggtcttcgccatcttcaatttagacatttgcggcatacattcgtagtca

SEQ ID NO: 27071 - DNA, 50 bp, unidentified
  source 1..50: mol_type = unassigned DNA; note = target_ab30f04
  misc_feature 1..22: note = LF
  misc_feature 23..25: note = Core
  misc_feature 26..50: note = RF
ggacgccctcttttgggaaaggagaacaccatggccagggtatttgagcg

SEQ ID NO: 27072 - DNA, 50 bp, unidentified
  source 1..50: mol_type = unassigned DNA; note = target_ab35213
  misc_feature 1..23: note = LF
  misc_feature 24..25: note = Core
  misc_feature 26..50: note = RF
tcggtccggtggcccgtgtgtccctaacctgaggcggtggagctcagcgt

SEQ ID NO: 27073 - DNA, 50 bp, unidentified
  source 1..50: mol_type = unassigned DNA; note = target_ab37669
  misc_feature 1..23: note = LF
  misc_feature 24..25: note = Core
  misc_feature 26..50: note = RF
ggcggctgcgggatggctctctcaggatgacaccctgtactacactgcca

SEQ ID NO: 27074 - DNA, 50 bp, unidentified
  source 1..50: mol_type = unassigned DNA; note = target_ab38190
  misc_feature 1..24: note = LF
  misc_feature 25: note = Core
  misc_feature 26..50: note = RF
cggcatgcgtgcatagccgacccttattaagggttgatggcgtcaggccc

SEQ ID NO: 27075 - DNA, 50 bp, unidentified
  source 1..50: mol_type = unassigned DNA; note = target_ab4a58b
  misc_feature 1..24: note = LF
  misc_feature 25: note = Core
  misc_feature 26..50: note = RF
tggatattgatctcataacttttacctcctaagttcaagatattcatcaa

SEQ ID NO: 27076 - DNA, 50 bp, unidentified
  source 1..50: mol_type = unassigned DNA; note = target_ab4a71a
  misc_feature 1..22: note = LF
  misc_feature 23..25: note = Core
  misc_feature 26..50: note = RF
gacagcccaagcgatcgtcgtccccgcgtcgaagagcgggaattccggcc

SEQ ID NO: 27077 - DNA, 50 bp, unidentified
  source 1..50: mol_type = unassigned DNA; note = target_ab4bc21
  misc_feature 1..24: note = LF
  misc_feature 25: note = Core
  misc_feature 26..50: note = RF
tctttacttaagaatagcgcccgattgctgaagattgctcttgactggtg

SEQ ID NO: 27078 - DNA, 50 bp, unidentified
  source 1..50: mol_type = unassigned DNA; note = target_ab579c7
  misc_feature 1..24: note = LF
  misc_feature 25: note = Core
  misc_feature 26..50: note = RF
tgaccggctcaaatcgaccgattctgttgaaaaactcggattttttttga

SEQ ID NO: 27079 - DNA, 50 bp, unidentified
  source 1..50: mol_type = unassigned DNA; note = target_ab58fc2
  misc_feature 1..23: note = LF
  misc_feature 24..25: note = Core
  misc_feature 26..50: note = RF
ggcgtttggcttttccttcactgtaggagcgagcatgctcgcgatggacg

SEQ ID NO: 27080 - DNA, 50 bp, unidentified
  source 1..50: mol_type = unassigned DNA; note = target_ab5a351
  misc_feature 1..23: note = LF
  misc_feature 24..25: note = Core
  misc_feature 26..50: note = RF
ctcgcaactcgtctcaccaggcccttcgaggcagtgagaccgggtgtagg

SEQ ID NO: 27081 - DNA, 50 bp, unidentified
  source 1..50: mol_type = unassigned DNA; note = target_ab635a9
  misc_feature 1..24: note = LF
  misc_feature 25: note = Core
  misc_feature 26..50: note = RF
acagcgaccgcgtccggccgaggctgtgtgaaaactctgcgcaaagcgga

SEQ ID NO: 27082 - DNA, 50 bp, unidentified
  source 1..50: mol_type = unassigned DNA; note = target_ab6804b
  misc_feature 1..22: note = LF
  misc_feature 23..25: note = Core
  misc_feature 26..50: note = RF
gcctcctcaccagtggccagcttgaatcacaaaatcagccccccgggaat

SEQ ID NO: 27083 - DNA, 50 bp, unidentified
  source 1..50: mol_type = unassigned DNA; note = target_ab69cfd
  misc_feature 1..23: note = LF
  misc_feature 24..25: note = Core
  misc_feature 26..50: note = RF
gctgtctgtcgcggctgaagccgctcctacattggcgcgcatgctgccgg

SEQ ID NO: 27084 - DNA, 50 bp, unidentified
  source 1..50: mol_type = unassigned DNA; note = target_ab6f453
  misc_feature 1..23: note = LF
  misc_feature 24..25: note = Core
  misc_feature 26..50: note = RF
tggcgtgccgcagtccagcatgactcgactctacagagccgcgagctgcg

SEQ ID NO: 27085 - DNA, 50 bp, unidentified
  source 1..50: mol_type = unassigned DNA; note = target_ab77126
  misc_feature 1..24: note = LF
  misc_feature 25: note = Core
  misc_feature 26..50: note = RF
ccattcacgccatagcgccgtaagcgtccagcgcttccacctacgcagca

SEQ ID NO: 27086 - DNA, 50 bp, unidentified
  source 1..50: mol_type = unassigned DNA; note = target_ab82e50
  misc_feature 1..24: note = LF
  misc_feature 25: note = Core
  misc_feature 26..50: note = RF
tttgactttcgtcttcctccttcacgactcggcaaaactcaagccaactt

SEQ ID NO: 27087 - DNA, 50 bp, unidentified
  source 1..50: mol_type = unassigned DNA; note = target_ab8cf9e
  misc_feature 1..21: note = LF
  misc_feature 22..25: note = Core
  misc_feature 26..50: note = RF
ctgacgggcgtcccgtgcacgctcagtcggaacgcacgtccaggcccagc

SEQ ID NO: 27088 - DNA, 50 bp, unidentified
  source 1..50: mol_type = unassigned DNA; note = target_ab8eb82
  misc_feature 1..24: note = LF
  misc_feature 25: note = Core
  misc_feature 26..50: note = RF
cgatctggagctcgtcggcttgcccaaattagacttgctcggcctgaaga

SEQ ID NO: 27089 - DNA, 50 bp, unidentified
  source 1..50: mol_type = unassigned DNA; note = target_ab93afe
  misc_feature 1..23: note = LF
  misc_feature 24..25: note = Core
  misc_feature 26..50: note = RF
cctgatgtgagaattgcccttagtgtccactaacgatagtggacactaag

SEQ ID NO: 27090 - DNA, 50 bp, unidentified
  source 1..50: mol_type = unassigned DNA; note = target_ab948b9
  misc_feature 1..23: note = LF
  misc_feature 24..25: note = Core
  misc_feature 26..50: note = RF
cagccaacccataaagaagcctcctttcgtttacaccataattgcgtcca

SEQ ID NO: 27091 - DNA, 50 bp, unidentified
  source 1..50: mol_type = unassigned DNA; note = target_ab9cc8b
  misc_feature 1..23: note = LF
  misc_feature 24..25: note = Core
  misc_feature 26..50: note = RF
aggaggacggggggcggctgatttgtctcgcgatgcaaaggcggggctcg

SEQ ID NO: 27092 - DNA, 50 bp, unidentified
  source 1..50: mol_type = unassigned DNA; note = target_abae11a
  misc_feature 1..21: note = LF
  misc_feature 22..25: note = Core
  misc_feature 26..50: note = RF
gtggctcatggattgggatttatgagtacacgccttagcaaaacggcccg

SEQ ID NO: 27093 - DNA, 50 bp, unidentified
  source 1..50: mol_type = unassigned DNA; note = target_abae59b
  misc_feature 1..23: note = LF
  misc_feature 24..25: note = Core
  misc_feature 26..50: note = RF
ctgagccgaacttccgcaaagggtggaaagcggaagcctgctgtccccat

SEQ ID NO: 27094 - DNA, 50 bp, unidentified
  source 1..50: mol_type = unassigned DNA; note = target_abafa88
  misc_feature 1..23: note = LF
  misc_feature 24..25: note = Core
  misc_feature 26..50: note = RF
aattttcggcatcgatatggctttgttgcgtaattcgatcagagaaccac

SEQ ID NO: 27095 - DNA, 50 bp, unidentified
  source 1..50: mol_type = unassigned DNA; note = target_abd6fde
  misc_feature 1..22: note = LF
  misc_feature 23..25: note = Core
  misc_feature 26..50: note = RF
ctccggcgagtactattcctttcatatatttgttgtatttctttttaaaa

SEQ ID NO: 27096 - DNA, 50 bp, unidentified
  source 1..50: mol_type = unassigned DNA; note = target_abe0608
  misc_feature 1..24: note = LF
  misc_feature 25: note = Core
  misc_feature 26..50: note = RF
agatgttgccgagtaccgattcggcgttatgcgtactcttactgtttgcc

SEQ ID NO: 27097 - DNA, 50 bp, unidentified
  source 1..50: mol_type = unassigned DNA; note = target_abe0f0b
  misc_feature 1..24: note = LF
  misc_feature 25: note = Core
  misc_feature 26..50: note = RF
atttgtaatgtgtgtgaaaccgatttctcaacaattatcgcgcatccatt

SEQ ID NO: 27098 - DNA, 50 bp, unidentified
  source 1..50: mol_type = unassigned DNA; note = target_abe8330
  misc_feature 1..23: note = LF
  misc_feature 24..25: note = Core
  misc_feature 26..50: note = RF
caacgtctgctcagggtcgaggctgtgtgaaaacgtaaccttgtgatggc

SEQ ID NO: 27099 - DNA, 50 bp, unidentified
  source 1..50: mol_type = unassigned DNA; note = target_abec547
  misc_feature 1..23: note = LF
  misc_feature 24..25: note = Core
  misc_feature 26..50: note = RF
attttagcgctcatcattttctcctttttagcatacactaattactatag

SEQ ID NO: 27100 - DNA, 50 bp, unidentified
  source 1..50: mol_type = unassigned DNA; note = target_abfbfcd
  misc_feature 1..24: note = LF
  misc_feature 25: note = Core
  misc_feature 26..50: note = RF
ttgggctgagatgttgtcgtcgccccccccgcttcgtgaacgcgccgctc

SEQ ID NO: 27101 - DNA, 50 bp, unidentified
  source 1..50: mol_type = unassigned DNA; note = target_abff0de
  misc_feature 1..24: note = LF
  misc_feature 25: note = Core
  misc_feature 26..50: note = RF
ccggagcagacgcccgctcatcggcaataccgcgcgttcgttcggtcgcg

SEQ ID NO: 27102 - DNA, 50 bp, unidentified
  source 1..50: mol_type = unassigned DNA; note = target_ac03b22
  misc_feature 1..24: note = LF
  misc_feature 25: note = Core
  misc_feature 26..50: note = RF
cgaccggccggaatcggccagaagcggtcagtcggttgcatctatcgaac

SEQ ID NO: 27103 - DNA, 50 bp, unidentified
  source 1..50: mol_type = unassigned DNA; note = target_ac11e32
  misc_feature 1..23: note = LF
  misc_feature 24..25: note = Core
  misc_feature 26..50: note = RF
aaaaacgggatcagcgcaagatctgttcccattgacacgctaaggcagaa

SEQ ID NO: 27104 - DNA, 50 bp, unidentified
  source 1..50: mol_type = unassigned DNA; note = target_ac1557f
  misc_feature 1..24: note = LF
  misc_feature 25: note = Core
  misc_feature 26..50: note = RF
aatagagtttcaggcatattgacgtgtatggtttaatgaaaccggacaga

SEQ ID NO: 27105 - DNA, 50 bp, unidentified
  source 1..50: mol_type = unassigned DNA; note = target_ac16591
  misc_feature 1..24: note = LF
  misc_feature 25: note = Core
  misc_feature 26..50: note = RF
ctttgtttcactaggacacctaacgccccaataagaggccaaaaatcagt

SEQ ID NO: 27106 - DNA, 50 bp, unidentified
  source 1..50: mol_type = unassigned DNA; note = target_ac27aa2
  misc_feature 1..23: note = LF
  misc_feature 24..25: note = Core
  misc_feature 26..50: note = RF
ccagctcggcggcaaagcccccttttttttgaacgtcagtccctcgcgtt

SEQ ID NO: 27107 - DNA, 50 bp, unidentified
  source 1..50: mol_type = unassigned DNA; note = target_ac34357
  misc_feature 1..22: note = LF
  misc_feature 23..25: note = Core
  misc_feature 26..50: note = RF
tcgcagtcaatcagcatcaccctctttccctcgcgggccagatcaatgcc

SEQ ID NO: 27108 - DNA, 50 bp, unidentified
  source 1..50: mol_type = unassigned DNA; note = target_ac3ba3f
  misc_feature 1..23: note = LF
  misc_feature 24..25: note = Core
  misc_feature 26..50: note = RF
gatgcacgagttcgctatctgagagcctattttacatccgttttacaaac

SEQ ID NO: 27109 - DNA, 50 bp, unidentified
  source 1..50: mol_type = unassigned DNA; note = target_ac434de
  misc_feature 1..23: note = LF
  misc_feature 24..25: note = Core
  misc_feature 26..50: note = RF
cgtcggtgactgttggctcccagcttggctcccacagctcttcacagcgg

SEQ ID NO: 27110 - DNA, 50 bp, unidentified
  source 1..50: mol_type = unassigned DNA; note = target_ac4bf21
  misc_feature 1..23: note = LF
  misc_feature 24..25: note = Core
  misc_feature 26..50: note = RF
gccaggtaccgtcccctgctgcgctgagccgctgcttcgcccctgcgcgg

SEQ ID NO: 27111 - DNA, 50 bp, unidentified
  source 1..50: mol_type = unassigned DNA; note = target_ac674f2
  misc_feature 1..22: note = LF
  misc_feature 23..25: note = Core
  misc_feature 26..50: note = RF
gagcgtcctggcaataggtgcatttttttacctaaaaaaccaaggaggaa

SEQ ID NO: 27112 - DNA, 50 bp, unidentified
  source 1..50: mol_type = unassigned DNA; note = target_ac79cda
  misc_feature 1..21: note = LF
  misc_feature 22..25: note = Core
  misc_feature 26..50: note = RF
cgcagttcttcggacatggctctcctcggctgagggcgatggggatgtcg

SEQ ID NO: 27113 - DNA, 50 bp, unidentified
  source 1..50: mol_type = unassigned DNA; note = target_ac7f657
  misc_feature 1..23: note = LF
  misc_feature 24..25: note = Core
  misc_feature 26..50: note = RF
gcccgtccgccggcgttatcgacagcccagtcggtgaagaccaccgaaag

SEQ ID NO: 27114 - DNA, 50 bp, unidentified
  source 1..50: mol_type = unassigned DNA; note = target_ac84b7d
  misc_feature 1..24: note = LF
  misc_feature 25: note = Core
  misc_feature 26..50: note = RF
tccgacttagctcccggatcgcggcatgtgaggacatttcttagtctctg

SEQ ID NO: 27115 - DNA, 50 bp, unidentified
  source 1..50: mol_type = unassigned DNA; note = target_ac84f5c
  misc_feature 1..24: note = LF
  misc_feature 25: note = Core
  misc_feature 26..50: note = RF
tggggtcaatgtccggcgcctaacgtgtattggttgacaaaatgtcgtcc

SEQ ID NO: 27116 - DNA, 50 bp, unidentified
  source 1..50: mol_type = unassigned DNA; note = target_ac87252
  misc_feature 1..23: note = LF
  misc_feature 24..25: note = Core
  misc_feature 26..50: note = RF
ccgcccatcatcgatgaggcggctttttgtgctcgtcgtctccatacttg

SEQ ID NO: 27117 - DNA, 50 bp, unidentified
  source 1..50: mol_type = unassigned DNA; note = target_ac87ee2
  misc_feature 1..24: note = LF
  misc_feature 25: note = Core
  misc_feature 26..50: note = RF
taatggggggcgacgcgtcccgcgtcgggaactaagacaaaggctcacag

SEQ ID NO: 27118 - DNA, 50 bp, unidentified
  source 1..50: mol_type = unassigned DNA; note = target_ac8a7d0
  misc_feature 1..24: note = LF
  misc_feature 25: note = Core
  misc_feature 26..50: note = RF
gttggccggtcgcgacccttgcggcgatatgacagacggggcaaggcctc

SEQ ID NO: 27119 - DNA, 50 bp, unidentified
  source 1..50: mol_type = unassigned DNA; note = target_ac958d2
  misc_feature 1..23: note = LF
  misc_feature 24..25: note = Core
  misc_feature 26..50: note = RF
tatcaaaccgcatagcggtgaacagtttggtactaaactgttcactcttg

SEQ ID NO: 27120 - DNA, 50 bp, unidentified
  source 1..50: mol_type = unassigned DNA; note = target_ac9a76d
  misc_feature 1..22: note = LF
  misc_feature 23..25: note = Core
  misc_feature 26..50: note = RF
cttcttgcatgatacttacctcctttcagctttataacttcacgttgcca

SEQ ID NO: 27121 - DNA, 50 bp, unidentified
  source 1..50: mol_type = unassigned DNA; note = target_ac9b0f7
  misc_feature 1..23: note = LF
  misc_feature 24..25: note = Core
  misc_feature 26..50: note = RF
cggcctacacattgtccttttcgaggcttgctcggcgttcactcgcgttg

SEQ ID NO: 27122 - DNA, 50 bp, unidentified
  source 1..50: mol_type = unassigned DNA; note = target_aca6af9
  misc_feature 1..23: note = LF
  misc_feature 24..25: note = Core
  misc_feature 26..50: note = RF
aatctaccactcccgaccgcttctggttactacctgatctggttcgtgcg

SEQ ID NO: 27123 - DNA, 50 bp, unidentified
  source 1..50: mol_type = unassigned DNA; note = target_aca6be3
  misc_feature 1..23: note = LF
  misc_feature 24..25: note = Core
  misc_feature 26..50: note = RF
cgtatgaaaactatacgttctattttttttgcctttttaagaaaagtgaa

SEQ ID NO: 27124 - DNA, 50 bp, unidentified
  source 1..50: mol_type = unassigned DNA; note = target_aca86e1
  misc_feature 1..24: note = LF
  misc_feature 25: note = Core
  misc_feature 26..50: note = RF
cagtcaccgggcgggcggggagcctacgaggggcggggccgataggggga

SEQ ID NO: 27125 - DNA, 50 bp, unidentified
  source 1..50: mol_type = unassigned DNA; note = target_aca997d
  misc_feature 1..23: note = LF
  misc_feature 24..25: note = Core
  misc_feature 26..50: note = RF
gtaacggtgacgctggtcgtcagctagtccgcctgacgcggctcggagtg

SEQ ID NO: 27126 - DNA, 50 bp, unidentified
  source 1..50: mol_type = unassigned DNA; note = target_acb963d
  misc_feature 1..24: note = LF
  misc_feature 25: note = Core
  misc_feature 26..50: note = RF
accatcacatacatttggttaaacttttgtccaataaaacggaaattaat

SEQ ID NO: 27127 - DNA, 50 bp, unidentified
  source 1..50: mol_type = unassigned DNA; note = target_acc84e4
  misc_feature 1..23: note = LF
  misc_feature 24..25: note = Core
  misc_feature 26..50: note = RF
gccacaccgcgaggcggagccggctagctcggcgtggatgttggtccgtg

SEQ ID NO: 27128 - DNA, 50 bp, unidentified
  source 1..50: mol_type = unassigned DNA; note = target_acca8a3
  misc_feature 1..23: note = LF
  misc_feature 24..25: note = Core
  misc_feature 26..50: note = RF
tggcgggccggatcaagcggcagcttcgcttaatgcaggccgccaatgac

SEQ ID NO: 27129 - DNA, 50 bp, unidentified
  source 1..50: mol_type = unassigned DNA; note = target_accbebe
  misc_feature 1..23: note = LF
  misc_feature 24..25: note = Core
  misc_feature 26..50: note = RF
gtggcggctacgccttacccggcctacatcgtctgcttgattttgtaggt

SEQ ID NO: 27130 - DNA, 50 bp, unidentified
  source 1..50: mol_type = unassigned DNA; note = target_acccfa7
  misc_feature 1..22: note = LF
  misc_feature 23..25: note = Core
  misc_feature 26..50: note = RF
agttttccgtatatcatattttcacccccatgtgaagctgcccgcgccct

SEQ ID NO: 27131 - DNA, 50 bp, unidentified
  source 1..50: mol_type = unassigned DNA; note = target_accf91c
  misc_feature 1..23: note = LF
  misc_feature 24..25: note = Core
  misc_feature 26..50: note = RF
atcgctgtgttggcgacacatggtggaaagcggacattctaacctcggta

SEQ ID NO: 27132 - DNA, 50 bp, unidentified
  source 1..50: mol_type = unassigned DNA; note = target_acd0658
  misc_feature 1..24: note = LF
  misc_feature 25: note = Core
  misc_feature 26..50: note = RF
agattctccttgccaaccaggagccgtccacatatgaaccgagccgcttc

SEQ ID NO: 27133 - DNA, 50 bp, unidentified
  source 1..50: mol_type = unassigned DNA; note = target_acd512f
  misc_feature 1..24: note = LF
  misc_feature 25: note = Core
  misc_feature 26..50: note = RF
gagcttgtcgaaggacttgttcagaggacttccttaactctcgagcggct

SEQ ID NO: 27134 - DNA, 50 bp, unidentified
  source 1..50: mol_type = unassigned DNA; note = target_ace086a
  misc_feature 1..23: note = LF
  misc_feature 24..25: note = Core
  misc_feature 26..50: note = RF
gaagttgccatatataacacctccttctatagtatggctcatacacaatt

SEQ ID NO: 27135 - DNA, 50 bp, unidentified
  source 1..50: mol_type = unassigned DNA; note = target_ace0e5e
  misc_feature 1..23: note = LF
  misc_feature 24..25: note = Core
  misc_feature 26..50: note = RF
cgacgcggggcctggcctgggcgctcacagctcgtccacctccaggaggt

SEQ ID NO: 27136 - DNA, 50 bp, unidentified
  source 1..50: mol_type = unassigned DNA; note = target_acedaab
  misc_feature 1..22: note = LF
  misc_feature 23..25: note = Core
  misc_feature 26..50: note = RF
ccagtagtcagttttcactgactttctggacagcccctttgttttttgag

SEQ ID NO: 27137 - DNA, 50 bp, unidentified
  source 1..50: mol_type = unassigned DNA; note = target_acef0d3
  misc_feature 1..24: note = LF
  misc_feature 25: note = Core
  misc_feature 26..50: note = RF
gcgtgatggatgcactctcatcggcaaatgagtgaatcgatcatgaagtc

SEQ ID NO: 27138 - DNA, 50 bp, unidentified
  source 1..50: mol_type = unassigned DNA; note = target_acefdc2
  misc_feature 1..24: note = LF
  misc_feature 25: note = Core
  misc_feature 26..50: note = RF
catggggaagttctcctgcggtaaaaccggccatgataccgggaacgtcg

SEQ ID NO: 27139 - DNA, 50 bp, unidentified
  source 1..50: mol_type = unassigned DNA; note = target_acf0d3f
  misc_feature 1..24: note = LF
  misc_feature 25: note = Core
  misc_feature 26..50: note = RF
cttttctaatgtccatactttatcctccatctaaattttataatttatta

SEQ ID NO: 27140 - DNA, 50 bp, unidentified
  source 1..50: mol_type = unassigned DNA; note = target_acf3b35
  misc_feature 1..23: note = LF
  misc_feature 24..25: note = Core
  misc_feature 26..50: note = RF
gttttaacggcttatttcgtgctctccccggtgagcgaattcgtcttgtc

SEQ ID NO: 27141 - DNA, 50 bp, unidentified
  source 1..50: mol_type = unassigned DNA; note = target_acfc724
  misc_feature 1..24: note = LF
  misc_feature 25: note = Core
  misc_feature 26..50: note = RF
cgcgcaacggacggtaaaggtgaaaacgtctatggggtcgccgcgagcca

SEQ ID NO: 27142 - DNA, 50 bp, unidentified
  source 1..50: mol_type = unassigned DNA; note = target_acfcbff
  misc_feature 1..23: note = LF
  misc_feature 24..25: note = Core
  misc_feature 26..50: note = RF
tgctttcggctatatccttcccactaccgggcggattcgagactttcact

SEQ ID NO: 27143 - DNA, 50 bp, unidentified
  source 1..50: mol_type = unassigned DNA; note = target_ad01ac9
  misc_feature 1..23: note = LF
  misc_feature 24..25: note = Core
  misc_feature 26..50: note = RF
aagatcggtcccgacatgtcggctagtgtcatgagatcccgggactgagt

SEQ ID NO: 27144 - DNA, 50 bp, unidentified; identical to SEQ ID NO: 21334
  source 1..50: mol_type = unassigned DNA; note = target_ad13dca
  misc_feature 1..21: note = LF
  misc_feature 22..25: note = Core
  misc_feature 26..50: note = RF

SEQ ID NO: 27145 - DNA, 50 bp, unidentified
  source 1..50: mol_type = unassigned DNA; note = target_ad1ac5e
  misc_feature 1..23: note = LF
  misc_feature 24..25: note = Core
  misc_feature 26..50: note = RF
tctatatttatcataatgttttactcctttttctacataaattctaaaca

SEQ ID NO: 27146 - DNA, 50 bp, unidentified
  source 1..50: mol_type = unassigned DNA; note = target_ad1d2cc
  misc_feature 1..22: note = LF
  misc_feature 23..25: note = Core
  misc_feature 26..50: note = RF
agcaaggcatttcacacccccttttcaatatatttaaggcttaatatagc

SEQ ID NO: 27147 - DNA, 50 bp, unidentified
  source 1..50: mol_type = unassigned DNA; note = target_ad24379
  misc_feature 1..24: note = LF
  misc_feature 25: note = Core
  misc_feature 26..50: note = RF
tttttcaacagaatcggccaaaagcggacgttccaactacgtctgcttct

SEQ ID NO: 27148 - DNA, 50 bp, unidentified
  source 1..50: mol_type = unassigned DNA; note = target_ad2765a
  misc_feature 1..23: note = LF
  misc_feature 24..25: note = Core
  misc_feature 26..50: note = RF
aaatgtcctgtccctttttcatttttcattcatcatccgattcatttacg

SEQ ID NO: 27149 - DNA, 50 bp, unidentified
  source 1..50: mol_type = unassigned DNA; note = target_ad2f6e1
  misc_feature 1..24: note = LF
  misc_feature 25: note = Core
  misc_feature 26..50: note = RF
gttcaaagagattgggaggtccgctttcggggggtgccacatcgcacgac

SEQ ID NO: 27150 - DNA, 50 bp, unidentified
  source 1..50: mol_type = unassigned DNA; note = target_ad31bb8
  misc_feature 1..22: note = LF
  misc_feature 23..25: note = Core
  misc_feature 26..50: note = RF
aagatgcgaatgcctgcgtggttgaaatttggagacaacatttcgagccc

SEQ ID NO: 27151 - DNA, 50 bp, unidentified
  source 1..50: mol_type = unassigned DNA; note = target_ad3508f
  misc_feature 1..22: note = LF
  misc_feature 23..25: note = Core
  misc_feature 26..50: note = RF
cggccctttcgcgggtaaacccgctcccacagggcccccactgcttgtaa

SEQ ID NO: 27152 - DNA, 50 bp, unidentified
  source 1..50: mol_type = unassigned DNA; note = target_ad357f7
  misc_feature 1..23: note = LF
  misc_feature 24..25: note = Core
  misc_feature 26..50: note = RF
ccgtcacgacctcgtacgaatcgctcatcagctttcgtcctccatcacgg

SEQ ID NO: 27153 - DNA, 50 bp, unidentified
  source 1..50: mol_type = unassigned DNA; note = target_ad358dd
  misc_feature 1..23: note = LF
  misc_feature 24..25: note = Core
  misc_feature 26..50: note = RF
gatagtgattcttacttttgacacaacctcatcctgaaatgggtttataa

SEQ ID NO: 27154 - DNA, 50 bp, unidentified
  source 1..50: mol_type = unassigned DNA; note = target_ad3a1b8
  misc_feature 1..23: note = LF
  misc_feature 24..25: note = Core
  misc_feature 26..50: note = RF
aaaaagccgcttaaatcagtggctttttgtataaacattttggtttaagc

SEQ ID NO: 27155 - DNA, 50 bp, unidentified; identical to SEQ ID NO: 21190
  source 1..50: mol_type = unassigned DNA; note = target_ad3cb47
  misc_feature 1..22: note = LF
  misc_feature 23..25: note = Core
  misc_feature 26..50: note = RF

SEQ ID NO: 27156 - DNA, 50 bp, unidentified
  source 1..50: mol_type = unassigned DNA; note = target_ad3e9cf
  misc_feature 1..23: note = LF
  misc_feature 24..25: note = Core
  misc_feature 26..50: note = RF
gggccgccgcgcagcgcccgccgctcaggcgagcgcgttgcgcgacttcg

SEQ ID NO: 27157 - DNA, 50 bp, unidentified
  source 1..50: mol_type = unassigned DNA; note = target_ad422a6
  misc_feature 1..22: note = LF
  misc_feature 23..25: note = Core
  misc_feature 26..50: note = RF
aaatgtcatgagcatattcctcctttctcgtatgacttgtatccataatt

SEQ ID NO: 27158 - DNA, 50 bp, unidentified
  source 1..50: mol_type = unassigned DNA; note = target_ad46335
  misc_feature 1..24: note = LF
  misc_feature 25: note = Core
  misc_feature 26..50: note = RF
aacactccagctcgtgacgaagtttttttacggactgcggtaacgagcag

SEQ ID NO: 27159 - DNA, 50 bp, unidentified
  source 1..50: mol_type = unassigned DNA; note = target_ad484e9
  misc_feature 1..23: note = LF
  misc_feature 24..25: note = Core
  misc_feature 26..50: note = RF
gccggtgttcgcgggcatgcccgctcccacaggtcactccgacgccaggc

SEQ ID NO: 27160 - DNA, 50 bp, unidentified
  source 1..50: mol_type = unassigned DNA; note = target_ad5ef33
  misc_feature 1..23: note = LF
  misc_feature 24..25: note = Core
  misc_feature 26..50: note = RF
aaactgccgcattcttacaattaagtgcaaagcacggagcctggctagcc

SEQ ID NO: 27161 - DNA, 50 bp, unidentified
  source 1..50: mol_type = unassigned DNA; note = target_ad63805
  misc_feature 1..23: note = LF
  misc_feature 24..25: note = Core
  misc_feature 26..50: note = RF
gtgggctcaggcatcgcatgctcctttgcgcgaaagcgaactgacgttgt

SEQ ID NO: 27162 - DNA, 50 bp, unidentified
  source 1..50: mol_type = unassigned DNA; note = target_ad6a5ef
  misc_feature 1..23: note = LF
  misc_feature 24..25: note = Core
  misc_feature 26..50: note = RF
gcatcgcctcgctgatcgaaacctgcaagatcaatggcgtcgagcccttc

SEQ ID NO: 27163 - DNA, 50 bp, unidentified
  source 1..50: mol_type = unassigned DNA; note = target_ad72ff3
  misc_feature 1..23: note = LF
  misc_feature 24..25: note = Core
  misc_feature 26..50: note = RF
gctcgactgcatcttcggggatctgggttctggtcagggtggggctgttc

SEQ ID NO: 27164 - DNA, 50 bp, unidentified
  source 1..50: mol_type = unassigned DNA; note = target_ad780c0
  misc_feature 1..24: note = LF
  misc_feature 25: note = Core
  misc_feature 26..50: note = RF
gcttagctcagtaggtagagcaactgacttgtaatcagtaggtcaccagt

SEQ ID NO: 27165 - DNA, 50 bp, unidentified
  source 1..50: mol_type = unassigned DNA; note = target_ad7e607
  misc_feature 1..23: note = LF
  misc_feature 24..25: note = Core
  misc_feature 26..50: note = RF
ttgtctcctgttcgatgggacagctctagcaatcgcagcgattgctcgat

SEQ ID NO: 27166 - DNA, 50 bp, unidentified
  source 1..50: mol_type = unassigned DNA; note = target_ad843fb
  misc_feature 1..23: note = LF
  misc_feature 24..25: note = Core
  misc_feature 26..50: note = RF
ccaatgtccgctttacccccaaaagcggacatggatcagtcgggctgtga

SEQ ID NO: 27167 - DNA, 50 bp, unidentified
  source 1..50: mol_type = unassigned DNA; note = target_ad85eeb
  misc_feature 1..22: note = LF
  misc_feature 23..25: note = Core
  misc_feature 26..50: note = RF
ttgcgtctgagggaaagaaaaggaggaaattttttatgttaacatcattg

SEQ ID NO: 27168 - DNA, 50 bp, unidentified
  source 1..50: mol_type = unassigned DNA; note = target_ad8896b
  misc_feature 1..23: note = LF
  misc_feature 24..25: note = Core
  misc_feature 26..50: note = RF
tggatccaccttttcgtccgatgctctaggtggaaggtcaggtatggcac

SEQ ID NO: 27169 - DNA, 50 bp, unidentified
  source 1..50: mol_type = unassigned DNA; note = target_ad893d4
  misc_feature 1..24: note = LF
  misc_feature 25: note = Core
  misc_feature 26..50: note = RF
ggcgtcttccgccaccccgtagcccgcatgggcccaccgggccaaatgcg

SEQ ID NO: 27170 - DNA, 50 bp, unidentified
  source 1..50: mol_type = unassigned DNA; note = target_ad91d2a
  misc_feature 1..23: note = LF
  misc_feature 24..25: note = Core
  misc_feature 26..50: note = RF
aagaccaaggaccgggccttcacgccacctcccgcagccggcctcaggat

SEQ ID NO: 27171 - DNA, 50 bp, unidentified
  source 1..50: mol_type = unassigned DNA; note = target_ad91ed8
  misc_feature 1..24: note = LF
  misc_feature 25: note = Core
  misc_feature 26..50: note = RF
aaaaaactcctgcaaatcgggggccatccacacatgaggcggccttactt

SEQ ID NO: 27172 - DNA, 50 bp, unidentified
  source 1..50: mol_type = unassigned DNA; note = target_ad92078
  misc_feature 1..24: note = LF
  misc_feature 25: note = Core
  misc_feature 26..50: note = RF
ccgtttttgcgatcgggatcagattttgggaaggtgttccgatccagata

SEQ ID NO: 27173 - DNA, 50 bp, unidentified
  source 1..50: mol_type = unassigned DNA; note = target_ad97b25
  misc_feature 1..22: note = LF
  misc_feature 23..25: note = Core
  misc_feature 26..50: note = RF
caccccatattttataattattcatatttctttatcttatccaatttata

SEQ ID NO: 27174 - DNA, 50 bp, unidentified
  source 1..50: mol_type = unassigned DNA; note = target_ada86db
  misc_feature 1..24: note = LF
  misc_feature 25: note = Core
  misc_feature 26..50: note = RF
cgctcggccagacgtgctcgaaagcggacctggcatctgccgtcgtcgcg

SEQ ID NO: 27175 - DNA, 50 bp, unidentified
  source 1..50: mol_type = unassigned DNA; note = target_ada9890
  misc_feature 1..23: note = LF
  misc_feature 24..25: note = Core
  misc_feature 26..50: note = RF
gaaccccctagacggtactgacaagatactcggaccccatttaattatta

SEQ ID NO: 27176 - DNA, 50 bp, unidentified
  source 1..50: mol_type = unassigned DNA; note = target_adac4c4
  misc_feature 1..23: note = LF
  misc_feature 24..25: note = Core
  misc_feature 26..50: note = RF
cggattcgccccctggaagggaactcctacagcggcgttgcagaaagcct

SEQ ID NO: 27177 - DNA, 50 bp, unidentified
  source 1..50: mol_type = unassigned DNA; note = target_adb1dad
  misc_feature 1..24: note = LF
  misc_feature 25: note = Core
  misc_feature 26..50: note = RF
ttattgacaaacagaacaaagtaacataagaacactctttattgcataca

SEQ ID NO: 27178 - DNA, 50 bp, unidentified
  source 1..50: mol_type = unassigned DNA; note = target_adb92c7
  misc_feature 1..23: note = LF
  misc_feature 24..25: note = Core
  misc_feature 26..50: note = RF
aaaactataaggcttggttcttcctcacttcctgttgcagtgaccgctac

SEQ ID NO: 27179 - DNA, 50 bp, unidentified
  source 1..50: mol_type = unassigned DNA; note = target_adba730
  misc_feature 1..23: note = LF
  misc_feature 24..25: note = Core
  misc_feature 26..50: note = RF
acccgagagcttcgcggttgccctggacccccgcttgtcgcgggggtgac

SEQ ID NO: 27180 - DNA, 50 bp, unidentified
  source 1..50: mol_type = unassigned DNA; note = target_adbbbd6
  misc_feature 1..23: note = LF
  misc_feature 24..25: note = Core
  misc_feature 26..50: note = RF
aaattgattaaactctgtgagactctgtgtcctctgtggtgaaaagattc

SEQ ID NO: 27181 - DNA, 50 bp, unidentified
  source 1..50: mol_type = unassigned DNA; note = target_adbd5e9
  misc_feature 1..24: note = LF
  misc_feature 25: note = Core
  misc_feature 26..50: note = RF
ggggaggtgtgccccgtccgtgagcgggaacgagccatcgcgacggagcg

SEQ ID NO: 27182 - DNA, 50 bp, unidentified
  source 1..50: mol_type = unassigned DNA; note = target_adc9df6
  misc_feature 1..23: note = LF
  misc_feature 24..25: note = Core
  misc_feature 26..50: note = RF
gacacttttacttcgcaaacggtgacgactttattttggtctacggaagt

SEQ ID NO: 27183 - DNA, 50 bp, unidentified
  source 1..50: mol_type = unassigned DNA; note = target_add416c
  misc_feature 1..24: note = LF
  misc_feature 25: note = Core
  misc_feature 26..50: note = RF
acgccgacaacgcccgctattcggcatgagtgagcgtcggagggcaaggc

SEQ ID NO: 27184 - DNA, 50 bp, unidentified
  source 1..50: mol_type = unassigned DNA; note = target_ade5d7d
  misc_feature 1..20: note = LF
  misc_feature 21..25: note = Core
  misc_feature 26..50: note = RF
ggctgctcgcgggcctgccgctcacagcagctgtgagcgcacgatcggtc

SEQ ID NO: 27185 - DNA, 50 bp, unidentified
  source 1..50: mol_type = unassigned DNA; note = target_ade6841
  misc_feature 1..22: note = LF
  misc_feature 23..25: note = Core
  misc_feature 26..50: note = RF
cgttcataataatcatcgcctttctgaaagataggaatttctgcggattt

SEQ ID NO: 27186 - DNA, 50 bp, unidentified
  source 1..50: mol_type = unassigned DNA; note = target_ade7867
  misc_feature 1..23: note = LF
  misc_feature 24..25: note = Core
  misc_feature 26..50: note = RF
gcgttagcgtttggtttgataggaggaaagttgagatgtttgatgcaaaa

SEQ ID NO: 27187 - DNA, 50 bp, unidentified
  source 1..50: mol_type = unassigned DNA; note = target_adebe3f
  misc_feature 1..24: note = LF
  misc_feature 25: note = Core
  misc_feature 26..50: note = RF
agacccgaggcctgcgatcatggcttttttttgaacgtcgatgatgatct

SEQ ID NO: 27188 - DNA, 50 bp, unidentified
  source 1..50: mol_type = unassigned DNA; note = target_adf4187
  misc_feature 1..24: note = LF
  misc_feature 25: note = Core
  misc_feature 26..50: note = RF
gctattgatgtggctacactaaaccggacacacaatttaaaatattgtga

SEQ ID NO: 27189 - DNA, 50 bp, unidentified
  source 1..50: mol_type = unassigned DNA; note = target_ae01667
  misc_feature 1..23: note = LF
  misc_feature 24..25: note = Core
  misc_feature 26..50: note = RF
caattcaatcatatctatttatcctctctaaaatataattataatagtaa

SEQ ID NO: 27190 - DNA, 50 bp, unidentified
  source 1..50: mol_type = unassigned DNA; note = target_ae03a6f
  misc_feature 1..23: note = LF
  misc_feature 24..25: note = Core
  misc_feature 26..50: note = RF
ctcgatacgccgccaacctcatcctgaggagcgcgtctcgaaggatggga

SEQ ID NO: 27191 - DNA, 50 bp, unidentified
  source 1..50: mol_type = unassigned DNA; note = target_ae079aa
  misc_feature 1..24: note = LF
  misc_feature 25: note = Core
  misc_feature 26..50: note = RF
acgccgtcccgcggctgacagccccaccttttggcagccgatgtcacacg

SEQ ID NO: 27192 - DNA, 50 bp, unidentified
  source 1..50: mol_type = unassigned DNA; note = target_ae0c75b
  misc_feature 1..23: note = LF
  misc_feature 24..25: note = Core
  misc_feature 26..50: note = RF
ggagcagctcgtcgcgctgatccaggaaagtctgtcggtggcgcacaaga

SEQ ID NO: 27193 - DNA, 50 bp, unidentified
  source 1..50: mol_type = unassigned DNA; note = target_ae1c314
  misc_feature 1..23: note = LF
  misc_feature 24..25: note = Core
  misc_feature 26..50: note = RF
caaccgcctccaagagggggctctggtgcaaatggcttaagcggggcata

SEQ ID NO: 27194 - DNA, 50 bp, unidentified
  source 1..50: mol_type = unassigned DNA; note = target_ae1e0d7
  misc_feature 1..23: note = LF
  misc_feature 24..25: note = Core
  misc_feature 26..50: note = RF
gctcacagggtggtggggaccatctcattaaccgccacggaatatcatcc

SEQ ID NO: 27195 - DNA, 50 bp, unidentified
  source 1..50: mol_type = unassigned DNA; note = target_ae21836
  misc_feature 1..24: note = LF
  misc_feature 25: note = Core
  misc_feature 26..50: note = RF
taagctgagacggtaacatggtaaagggctatgtttccccttcatttcag

SEQ ID NO: 27196 - DNA, 50 bp, unidentified
  source 1..50: mol_type = unassigned DNA; note = target_ae222b4
  misc_feature 1..24: note = LF
  misc_feature 25: note = Core
  misc_feature 26..50: note = RF
tgacgcggccccgctgatgtctggttgtggcacgaagcggcggtagcgcg

SEQ ID NO: 27197 - DNA, 50 bp, unidentified
  source 1..50: mol_type = unassigned DNA; note = target_ae2a0d1
  misc_feature 1..23: note = LF
  misc_feature 24..25: note = Core
  misc_feature 26..50: note = RF
cggcatattttgcccaggcggagctcgaactcgtcaaaggggaactctcc

SEQ ID NO: 27198 - DNA, 50 bp, unidentified
  source 1..50: mol_type = unassigned DNA; note = target_ae30d1b
  misc_feature 1..23: note = LF
  misc_feature 24..25: note = Core
  misc_feature 26..50: note = RF
catcacacgcccgacaaggagcgctcaaccgccgcagctccttgacctct

SEQ ID NO: 27199 - DNA, 50 bp, unidentified
  source 1..50: mol_type = unassigned DNA; note = target_ae31dba
  misc_feature 1..21: note = LF
  misc_feature 22..25: note = Core
  misc_feature 26..50: note = RF
accggggcgtcggtcgcggcggtcatgaccgcaccgccgtggccgatcgt

SEQ ID NO: 27200 - DNA, 50 bp, unidentified
  source 1..50: mol_type = unassigned DNA; note = target_ae48313
  misc_feature 1..23: note = LF
  misc_feature 24..25: note = Core
  misc_feature 26..50: note = RF
aaagacagcctattgcttacagcctattgcttatagcctatcgcttacag

SEQ ID NO: 27201 - DNA, 50 bp, unidentified
  source 1..50: mol_type = unassigned DNA; note = target_ae497d6
  misc_feature 1..23: note = LF
  misc_feature 24..25: note = Core
  misc_feature 26..50: note = RF
tgttgcattcatgagttatcctccttcatgaaaaaagggagccgcgtggg

SEQ ID NO: 27202 - DNA, 50 bp, unidentified
  source 1..50: mol_type = unassigned DNA; note = target_ae49e6d
  misc_feature 1..24: note = LF
  misc_feature 25: note = Core
  misc_feature 26..50: note = RF
tgaggcgcgcccccaccactccgacggatggacggggcggcgccgttcgg

SEQ ID NO: 27203 - DNA, 50 bp, unidentified
  source 1..50: mol_type = unassigned DNA; note = target_ae52bcf
  misc_feature 1..23: note = LF
  misc_feature 24..25: note = Core
  misc_feature 26..50: note = RF
ataaaactacagccggtgtttactggatgccccgctttcgcggggcatga

SEQ ID NO: 27204 - DNA, 50 bp, unidentified
  source 1..50: mol_type = unassigned DNA; note = target_ae5c52d
  misc_feature 1..24: note = LF
  misc_feature 25: note = Core
  misc_feature 26..50: note = RF
cctcacgccggcaagctccacccgttttttgtgatcacggccttcagtac

SEQ ID NO: 27205 - DNA, 50 bp, unidentified
  source 1..50: mol_type = unassigned DNA; note = target_ae6a4ff
  misc_feature 1..23: note = LF
  misc_feature 24..25: note = Core
  misc_feature 26..50: note = RF
aagtttaacgcaattaccaatagtgttaaatccactcaaagcgtttggat

SEQ ID NO: 27206 - DNA, 50 bp, unidentified
  source 1..50: mol_type = unassigned DNA; note = target_ae77a96
  misc_feature 1..24: note = LF
  misc_feature 25: note = Core
  misc_feature 26..50: note = RF
cgctcatggcctcgacaccgtaagcggtccactaatacacatcttctcag

SEQ ID NO: 27207 - DNA, 50 bp, unidentified
  source 1..50: mol_type = unassigned DNA; note = target_ae7c82e
  misc_feature 1..23: note = LF
  misc_feature 24..25: note = Core
  misc_feature 26..50: note = RF
aaggacaggtgacaggcaggctctggtgcaaatggcttgtctggccgaga

SEQ ID NO: 27208 - DNA, 50 bp, unidentified
  source 1..50: mol_type = unassigned DNA; note = target_ae860ee
  misc_feature 1..23: note = LF
  misc_feature 24..25: note = Core
  misc_feature 26..50: note = RF
cccttggtggaaatcatcatatcaaactgcctccctttttgatataccta

SEQ ID NO: 27209 - DNA, 50 bp, unidentified
  source 1..50: mol_type = unassigned DNA; note = target_ae8ec79
  misc_feature 1..23: note = LF
  misc_feature 24..25: note = Core
  misc_feature 26..50: note = RF
tctccccacacgataccagtcaggaatgaccatggaaatattgcgcgcgg

SEQ ID NO: 27210 - DNA, 50 bp, unidentified
  source 1..50: mol_type = unassigned DNA; note = target_ae92ed4
  misc_feature 1..23: note = LF
  misc_feature 24..25: note = Core
  misc_feature 26..50: note = RF
aaaggcctgcttatgagccccctttgcgcccgctgcctctgaatggccgc

SEQ ID NO: 27211 - DNA, 50 bp, unidentified
  source 1..50: mol_type = unassigned DNA; note = target_ae97137
  misc_feature 1..22: note = LF
  misc_feature 23..25: note = Core
  misc_feature 26..50: note = RF
actgcgccgggcactgctgagctagctacttaggggaagtttcgtgcagt

SEQ ID NO: 27212 - DNA, 50 bp, unidentified
  source 1..50: mol_type = unassigned DNA; note = target_ae9842c
  misc_feature 1..20: note = LF
  misc_feature 21..25: note = Core
  misc_feature 26..50: note = RF
ataaaaattcaaaggacgagcttttttgtttcgtttttttggcggacaaa

SEQ ID NO: 27213 - DNA, 50 bp, unidentified
  source 1..50: mol_type = unassigned DNA; note = target_ae9871e
  misc_feature 1..21: note = LF
  misc_feature 22..25: note = Core
  misc_feature 26..50: note = RF
ttgtatatacgtctgccctgcttgcaacaactatgaagcctctcaatgcg

SEQ ID NO: 27214 - DNA, 50 bp, unidentified
  source 1..50: mol_type = unassigned DNA; note = target_ae99bad
  misc_feature 1..23: note = LF
  misc_feature 24..25: note = Core
  misc_feature 26..50: note = RF
tgtcctcctggccctggtagccggcatggagctggctgtggggcccgtcg

SEQ ID NO: 27215 - DNA, 50 bp, unidentified
  source 1..50: mol_type = unassigned DNA; note = target_ae9f8c4
  misc_feature 1..24: note = LF
  misc_feature 25: note = Core
  misc_feature 26..50: note = RF
ggctcttccgcgcccgaccatcggcatgtccggtctcgttttgacgttcg

SEQ ID NO: 27216 - DNA, 50 bp, unidentified
  source 1..50: mol_type = unassigned DNA; note = target_aea074e
  misc_feature 1..23: note = LF
  misc_feature 24..25: note = Core
  misc_feature 26..50: note = RF
atttccacgataatcatctccttctttttttatgataaacacatcatatg

SEQ ID NO: 27217 - DNA, 50 bp, unidentified
  source 1..50: mol_type = unassigned DNA; note = target_aea95f2
  misc_feature 1..24: note = LF
  misc_feature 25: note = Core
  misc_feature 26..50: note = RF
gcttcaagctgcatccggctcagttccgatatgcgcgcttattggtaact

SEQ ID NO: 27218 - DNA, 50 bp, unidentified
  source 1..50: mol_type = unassigned DNA; note = target_aebf3df
  misc_feature 1..24: note = LF
  misc_feature 25: note = Core
  misc_feature 26..50: note = RF
gtagcagtattcggatctaatgaaagctatttagacctaaccacagctaa

SEQ ID NO: 27219 - DNA, 50 bp, unidentified
  source 1..50: mol_type = unassigned DNA; note = target_aec3ccf
  misc_feature 1..23: note = LF
  misc_feature 24..25: note = Core
  misc_feature 26..50: note = RF
ggatggcgctgcgcttatccgccctacaatatgaacctctcaataaaaac

SEQ ID NO: 27220 - DNA, 50 bp, unidentified
  source 1..50: mol_type = unassigned DNA; note = target_aec505d
  misc_feature 1..20: note = LF
  misc_feature 21..25: note = Core
  misc_feature 26..50: note = RF
tttgtaaaccataactttacctccttgtgatatgacaggttttatcggtg

SEQ ID NO: 27221 - DNA, 50 bp, unidentified
  source 1..50: mol_type = unassigned DNA; note = target_aec6085
  misc_feature 1..23: note = LF
  misc_feature 24..25: note = Core
  misc_feature 26..50: note = RF
cggtgatggtggtggtcttgtagtgcccgtgaggtacggcgatccggcag

SEQ ID NO: 27222 - DNA, 50 bp, unidentified
  source 1..50: mol_type = unassigned DNA; note = target_aecbaa8
  misc_feature 1..23: note = LF
  misc_feature 24..25: note = Core
  misc_feature 26..50: note = RF
gatatttcttcattattccctcccttcaaactgctgtcccgtgcggtccg

SEQ ID NO: 27223 - DNA, 50 bp, unidentified
  source 1..50: mol_type = unassigned DNA; note = target_aecd6c8
  misc_feature 1..23: note = LF
  misc_feature 24..25: note = Core
  misc_feature 26..50: note = RF
aacgtgtgctttgtaggccggcctttcttgggcgtctgccggagccgctg

SEQ ID NO: 27224 - DNA, 50 bp, unidentified
  source 1..50: mol_type = unassigned DNA; note = target_aed56ea
  misc_feature 1..24: note = LF
  misc_feature 25: note = Core
  misc_feature 26..50: note = RF
agaacaagcaattacttatagccattgttggcaatagtgttttttaataa

SEQ ID NO: 27225 - DNA, 50 bp, unidentified
  source 1..50: mol_type = unassigned DNA; note = target_aed960d
  misc_feature 1..23: note = LF
  misc_feature 24..25: note = Core
  misc_feature 26..50: note = RF
tcggtttcacctcgcgcctcgcgctcactcacgcgctccttgtagtgtcg

SEQ ID NO: 27226 - DNA, 50 bp, unidentified
  source 1..50: mol_type = unassigned DNA; note = target_aeda0c5
  misc_feature 1..23: note = LF
  misc_feature 24..25: note = Core
  misc_feature 26..50: note = RF
gcggtttggccaagagctgggctcccgcttccgcgggagcgaacggagtt

SEQ ID NO: 27227 - DNA, 50 bp, unidentified
  source 1..50: mol_type = unassigned DNA; note = target_aedb6d6
  misc_feature 1..23: note = LF
  misc_feature 24..25: note = Core
  misc_feature 26..50: note = RF
gagagtgtctgagggtctgaaagtgggtctagtcacccggcagttttacc

SEQ ID NO: 27228 - DNA, 50 bp, unidentified
  source 1..50: mol_type = unassigned DNA; note = target_aeddc59
  misc_feature 1..23: note = LF
  misc_feature 24..25: note = Core
  misc_feature 26..50: note = RF
cgagacgcgggctgcgcccgctcctcaggatgaggtcggactgaagaccg

SEQ ID NO: 27229 - DNA, 50 bp, unidentified
  source 1..50: mol_type = unassigned DNA; note = target_aedfdb7
  misc_feature 1..23: note = LF
  misc_feature 24..25: note = Core
  misc_feature 26..50: note = RF
tatacatttaattttcattccttgtcttttctgtttctatatatactatt

SEQ ID NO: 27230 - DNA, 50 bp, unidentified
  source 1..50: mol_type = unassigned DNA; note = target_aee3633
  misc_feature 1..24: note = LF
  misc_feature 25: note = Core
  misc_feature 26..50: note = RF
gggtgacgctccaatgtccggaagtggcgcgagggagacgcccgagcagc

SEQ ID NO: 27231 - DNA, 50 bp, unidentified
  source 1..50: mol_type = unassigned DNA; note = target_aee46d4
  misc_feature 1..23: note = LF
  misc_feature 24..25: note = Core
  misc_feature 26..50: note = RF
atggtcaaacaaaaccaggctccctataggctacctcagaacagtaaaat

SEQ ID NO: 27232 - DNA, 50 bp, unidentified
  source 1..50: mol_type = unassigned DNA; note = target_aee5134
  misc_feature 1..23: note = LF
  misc_feature 24..25: note = Core
  misc_feature 26..50: note = RF
ccacgtaagatgctgaaaccagttcagcatgacaataattattatttacg

SEQ ID NO: 27233 - DNA, 50 bp, unidentified
  source 1..50: mol_type = unassigned DNA; note = target_aeebf04
  misc_feature 1..23: note = LF
  misc_feature 24..25: note = Core
  misc_feature 26..50: note = RF
ggttttttgcccggccgtcctcccttcggattccctcgcgcggctccaac

SEQ ID NO: 27234 - DNA, 50 bp, unidentified
  source 1..50: mol_type = unassigned DNA; note = target_aeecc8f
  misc_feature 1..24: note = LF
  misc_feature 25: note = Core
  misc_feature 26..50: note = RF
gcggccgggcatcttcaacaccgaccaaggcagccagttcaccagcccgc

SEQ ID NO: 27235 - DNA, 50 bp, unidentified
  source 1..50: mol_type = unassigned DNA; note = target_aeee139
  misc_feature 1..24: note = LF
  misc_feature 25: note = Core
  misc_feature 26..50: note = RF
ccatctttagataatcgcgcccttttgttgaatacggaggcttgattatt

SEQ ID NO: 27236 - DNA, 50 bp, unidentified
  source 1..50: mol_type = unassigned DNA; note = target_aef1e2e
  misc_feature 1..23: note = LF
  misc_feature 24..25: note = Core
  misc_feature 26..50: note = RF
gtcacacacggcgacctgggcgcctttcatgccgatcgcctcggtccacg

SEQ ID NO: 27237 - DNA, 50 bp, unidentified
  source 1..50: mol_type = unassigned DNA; note = target_aef4c7f
  misc_feature 1..22: note = LF
  misc_feature 23..25: note = Core
  misc_feature 26..50: note = RF
atgatgcttgagccgatttgtctgacagcaccccgatgggggctgttcgg

SEQ ID NO: 27238 - DNA, 50 bp, unidentified
  source 1..50: mol_type = unassigned DNA; note = target_aefc601
  misc_feature 1..22: note = LF
  misc_feature 23..25: note = Core
  misc_feature 26..50: note = RF
cgcacggccaaaacgacgctattgacccaactcggacaatcccttgattt

SEQ ID NO: 27239 - DNA, 50 bp, unidentified
  source 1..50: mol_type = unassigned DNA; note = target_af03049
  misc_feature 1..23: note = LF
  misc_feature 24..25: note = Core
  misc_feature 26..50: note = RF
acgggactggtcgtatcaggctcctatgaggtcatgtccgcctggctcga

SEQ ID NO: 27240 - DNA, 50 bp, unidentified
  source 1..50: mol_type = unassigned DNA; note = target_af1863f
  misc_feature 1..24: note = LF
  misc_feature 25: note = Core
  misc_feature 26..50: note = RF
caaggaagccggccacgagccggcttttaatgtctgaaaacccttaaaaa

SEQ ID NO: 27241 - DNA, 50 bp, unidentified
  source 1..50: mol_type = unassigned DNA; note = target_af1bb3c
  misc_feature 1..24: note = LF
  misc_feature 25: note = Core
  misc_feature 26..50: note = RF
agtcggcgtggaaactgctgggataatgccccgatggagcgattgttcag

SEQ ID NO: 27242 - DNA, 50 bp, unidentified
  source 1..50: mol_type = unassigned DNA; note = target_af22068
  misc_feature 1..23: note = LF
  misc_feature 24..25: note = Core
  misc_feature 26..50: note = RF
aggccaccagcacatcgtatatgtgggcttatcgcagtggcgaggatagt

SEQ ID NO: 27243 - DNA, 50 bp, unidentified
  source 1..50: mol_type = unassigned DNA; note = target_af26ff3
  misc_feature 1..23: note = LF
  misc_feature 24..25: note = Core
  misc_feature 26..50: note = RF
cgcatcgcgagcgaagctcgctccttttgtttcaggccaatgaatcttgt

SEQ ID NO: 27244 - DNA, 50 bp, unidentified
  source 1..50: mol_type = unassigned DNA; note = target_af2a178
  misc_feature 1..23: note = LF
  misc_feature 24..25: note = Core
  misc_feature 26..50: note = RF
aaaggggcgaaacctaacccaccctacgcatcttcacccgtttcaagttt

SEQ ID NO: 27245 - DNA, 50 bp, unidentified
  source 1..50: mol_type = unassigned DNA; note = target_af515c8
  misc_feature 1..24: note = LF
  misc_feature 25: note = Core
  misc_feature 26..50: note = RF
gtgcgcggtgcggtccacgtgcagaacgtgaacgcctaccaccagcgctt

SEQ ID NO: 27246 - DNA, 50 bp, unidentified
  source 1..50: mol_type = unassigned DNA; note = target_af57143
  misc_feature 1..22: note = LF
  misc_feature 23..25: note = Core
  misc_feature 26..50: note = RF
atacttaataaaaatgttaaaggagagcaaaattatgaaagcaaaggttt

SEQ ID NO: 27247 - DNA, 50 bp, unidentified
  source 1..50: mol_type = unassigned DNA; note = target_af5a1c2
  misc_feature 1..23: note = LF
  misc_feature 24..25: note = Core
  misc_feature 26..50: note = RF
ctcttcttcaactaacctgctcctttagtttaacattaatttcctttttg

SEQ ID NO: 27248 - DNA, 50 bp, unidentified
  source 1..50: mol_type = unassigned DNA; note = target_af5befe
  misc_feature 1..23: note = LF
  misc_feature 24..25: note = Core
  misc_feature 26..50: note = RF
tccacctatgcccacccctcgccctgccagactatacccgccataagcca

SEQ ID NO: 27249 - DNA, 50 bp, unidentified
  source 1..50: mol_type = unassigned DNA; note = target_af74b25
  misc_feature 1..23: note = LF
  misc_feature 24..25: note = Core
  misc_feature 26..50: note = RF
gccgcgtggaccgccggattccgtggttttcacgctctgactatcgatga

SEQ ID NO: 27250 - DNA, 50 bp, unidentified
  source 1..50: mol_type = unassigned DNA; note = target_af81ef5
  misc_feature 1..24: note = LF
  misc_feature 25: note = Core
  misc_feature 26..50: note = RF
ccgtaagacggattaaatgtagggcgcattagcgatagcgtaatgcgtcg

SEQ ID NO: 27251 - DNA, 50 bp, unidentified
  source 1..50: mol_type = unassigned DNA; note = target_af834e0
  misc_feature 1..23: note = LF
  misc_feature 24..25: note = Core
  misc_feature 26..50: note = RF
tactgattttcataaaattcctcctatattaaaatatcgatgtacttaat

SEQ ID NO: 27252 - DNA, 50 bp, unidentified; identical to SEQ ID NO: 25761
  source 1..50: mol_type = unassigned DNA; note = target_af8cf08
  misc_feature 1..22: note = LF
  misc_feature 23..25: note = Core
  misc_feature 26..50: note = RF

SEQ ID NO: 27253 - DNA, 50 bp, unidentified
  source 1..50: mol_type = unassigned DNA; note = target_af9573d
  misc_feature 1..21: note = LF
  misc_feature 22..25: note = Core
  misc_feature 26..50: note = RF
gcccgacgggcgcaagagcttctcctggaaggactaccgcgacctgatcc

SEQ ID NO: 27254 - DNA, 50 bp, unidentified
  source 1..50: mol_type = unassigned DNA; note = target_afb53c2
  misc_feature 1..23: note = LF
  misc_feature 24..25: note = Core
  misc_feature 26..50: note = RF
gtcattccattacaacaaaacactcgaactgacgtaattttcttatacag

SEQ ID NO: 27255 - DNA, 50 bp, unidentified
  source 1..50: mol_type = unassigned DNA; note = target_afb84d9
  misc_feature 1..23: note = LF
  misc_feature 24..25: note = Core
  misc_feature 26..50: note = RF
cagatcggaaaggttatctgccgtggaattgcgcaatgcccgcgatgcgt

SEQ ID NO: 27256 - DNA, 50 bp, unidentified
  source 1..50: mol_type = unassigned DNA; note = target_afba894
  misc_feature 1..24: note = LF
  misc_feature 25: note = Core
  misc_feature 26..50: note = RF
aaccgaataggttcaataagtcattgacgagtaagcaatcgaggccaggg

SEQ ID NO: 27257 - DNA, 50 bp, unidentified
  source 1..50: mol_type = unassigned DNA; note = target_afbfcd3
  misc_feature 1..23: note = LF
  misc_feature 24..25: note = Core
  misc_feature 26..50: note = RF
gcagaatgagtttgtgcgcgtccctttgaccgccgggttagaccgattgt

SEQ ID NO: 27258 - DNA, 50 bp, unidentified
  source 1..50: mol_type = unassigned DNA; note = target_afbffa3
  misc_feature 1..22: note = LF
  misc_feature 23..25: note = Core
  misc_feature 26..50: note = RF
gtattcggtcatgccactcaacctagggcaccgattcagttcgcctcgac

SEQ ID NO: 27259 - DNA, 50 bp, unidentified
  source 1..50: mol_type = unassigned DNA; note = target_afc69d5
  misc_feature 1..23: note = LF
  misc_feature 24..25: note = Core
  misc_feature 26..50: note = RF
agccgtccacggcatcataagcagacattcgcagtcgcacaagaatctca

SEQ ID NO: 27260 - DNA, 50 bp, unidentified
  source 1..50: mol_type = unassigned DNA; note = target_afc9256
  misc_feature 1..23: note = LF
  misc_feature 24..25: note = Core
  misc_feature 26..50: note = RF
gtttgcgacgatggccaacgcccctctggcgggacaggatggctggattt

SEQ ID NO: 27261 - DNA, 50 bp, unidentified
  source 1..50: mol_type = unassigned DNA; note = target_afcae56
  misc_feature 1..23: note = LF
  misc_feature 24..25: note = Core
  misc_feature 26..50: note = RF
tgtaaataaattgtttaacatattaaaatctcctttataatttagttgat

SEQ ID NO: 27262 - DNA, 50 bp, unidentified
  source 1..50: mol_type = unassigned DNA; note = target_afcb3f3
  misc_feature 1..23: note = LF
  misc_feature 24..25: note = Core
  misc_feature 26..50: note = RF
gactgaacaggcacggtcgcggcctaacgactcagcgctcaggtgcgggc

SEQ ID NO: 27263 - DNA, 50 bp, unidentified
  source 1..50: mol_type = unassigned DNA; note = target_afd64aa
  misc_feature 1..23: note = LF
  misc_feature 24..25: note = Core
  misc_feature 26..50: note = RF
gcagacattttgttatgtgcttgccccacccacttgcttgagcaagagaa

SEQ ID NO: 27264 - DNA, 50 bp, unidentified
  source 1..50: mol_type = unassigned DNA; note = target_afd95bc
  misc_feature 1..24: note = LF
  misc_feature 25: note = Core
  misc_feature 26..50: note = RF
attttgattcaatgggaaattcctctttggttgactggcctgtacagccc

SEQ ID NO: 27265 - DNA, 50 bp, unidentified
  source 1..50: mol_type = unassigned DNA; note = target_afdcbc7
  misc_feature 1..23: note = LF
  misc_feature 24..25: note = Core
  misc_feature 26..50: note = RF
cttggtgccaaatcctccacgtgagcggccaggagcctcacgatcctttc

SEQ ID NO: 27266 - DNA, 50 bp, unidentified
  source 1..50: mol_type = unassigned DNA; note = target_afe937c
  misc_feature 1..23: note = LF
  misc_feature 24..25: note = Core
  misc_feature 26..50: note = RF
cctgtcggtgcccgggacagaccctaggcctggtagaacgtcggtacggc

SEQ ID NO: 27267 - DNA, 50 bp, unidentified
  source 1..50: mol_type = unassigned DNA; note = target_afe9818
  misc_feature 1..24: note = LF
  misc_feature 25: note = Core
  misc_feature 26..50: note = RF
catacttaaaaacatcaatcaacaatgaaaaaaaccaattatatacttta

SEQ ID NO: 27268 - DNA, 50 bp, unidentified
  source 1..50: mol_type = unassigned DNA; note = target_aff5f07
  misc_feature 1..23: note = LF
  misc_feature 24..25: note = Core
  misc_feature 26..50: note = RF
gggcgcgcagcatgaagcgaccgtgttgcacggatcgaccggggcatgga

SEQ ID NO: 27269 - DNA, 50 bp, unidentified
  source 1..50: mol_type = unassigned DNA; note = target_aff69fe
  misc_feature 1..24: note = LF
  misc_feature 25: note = Core
  misc_feature 26..50: note = RF
tattaatttcgtttgatatgtgatttcacagtctccagttgggaggccgt

SEQ ID NO: 27270 - DNA, 50 bp, unidentified
  source 1..50: mol_type = unassigned DNA; note = target_affbffd
  misc_feature 1..24: note = LF
  misc_feature 25: note = Core
  misc_feature 26..50: note = RF
tcttcttcgcttccatgaccccattcctctcaagagttggggcctccggc

SEQ ID NO: 27271 - DNA, 50 bp, unidentified
  source 1..50: mol_type = unassigned DNA; note = target_affc1c7
  misc_feature 1..23: note = LF
  misc_feature 24..25: note = Core
  misc_feature 26..50: note = RF
tcaaggaggatttgggcttcatcttcgttccttcgtcactacgacgaagc

SEQ ID NO: 27272 - DNA, 50 bp, unidentified
  source 1..50: mol_type = unassigned DNA; note = target_b003356
  misc_feature 1..24: note = LF
  misc_feature 25: note = Core
  misc_feature 26..50: note = RF
tcgccgctgagatggcgctaccacttttttgtcagcgcctcggccacaat

SEQ ID NO: 27273 - DNA, 50 bp, unidentified
  source 1..50: mol_type = unassigned DNA; note = target_b003f5b
  misc_feature 1..23: note = LF
  misc_feature 24..25: note = Core
  misc_feature 26..50: note = RF
cgggttgataaagccaacccgccctacccggctcgacgtcctgttaccga

SEQ ID NO: 27274 - DNA, 50 bp, unidentified
  source 1..50: mol_type = unassigned DNA; note = target_b004105
  misc_feature 1..21: note = LF
  misc_feature 22..25: note = Core
  misc_feature 26..50: note = RF
ttgtatatacaaagacattgcttgctacaacaatgcgtcctttcagtccg

SEQ ID NO: 27275 - DNA, 50 bp, unidentified
  source 1..50: mol_type = unassigned DNA; note = target_b00c08a
  misc_feature 1..22: note = LF
  misc_feature 23..25: note = Core
  misc_feature 26..50: note = RF
tcttcttcaactaaactgcaccgtttagttgaataagaaaaagatgggtt

SEQ ID NO: 27276 - DNA, 50 bp, unidentified
  source 1..50: mol_type = unassigned DNA; note = target_b00da19
  misc_feature 1..22: note = LF
  misc_feature 23..25: note = Core
  misc_feature 26..50: note = RF
tcggattgacgagaggttttgcagaccctccctaggcctgccggcacccc

SEQ ID NO: 27277 - DNA, 50 bp, unidentified
  source 1..50: mol_type = unassigned DNA; note = target_b025712
  misc_feature 1..23: note = LF
  misc_feature 24..25: note = Core
  misc_feature 26..50: note = RF
atctcgtccctaaagagtacttcctgaaagtgtgatttttaaacttcacc

SEQ ID NO: 27278 - DNA, 50 bp, unidentified
  source 1..50: mol_type = unassigned DNA; note = target_b028ba6
  misc_feature 1..22: note = LF
  misc_feature 23..25: note = Core
  misc_feature 26..50: note = RF
tcatctctaattggcagacggctgacattttgatcgggcgcttacaggtc

SEQ ID NO: 27279 - DNA, 50 bp, unidentified
  source 1..50: mol_type = unassigned DNA; note = target_b030d4a
  misc_feature 1..23: note = LF
  misc_feature 24..25: note = Core
  misc_feature 26..50: note = RF
tgggggagggccgccccaaccacctgccttggcgacgaggatcgtgcgcc

SEQ ID NO: 27280 - DNA, 50 bp, unidentified
  source 1..50: mol_type = unassigned DNA; note = target_b032f22
  misc_feature 1..23: note = LF
  misc_feature 24..25: note = Core
  misc_feature 26..50: note = RF
aatcaaattcattgtttatcctccttttgattcaactggtatagtttata

SEQ ID NO: 27281 - DNA, 50 bp, unidentified
  source 1..50: mol_type = unassigned DNA; note = target_b038221
  misc_feature 1..23: note = LF
  misc_feature 24..25: note = Core
  misc_feature 26..50: note = RF
cggctcccggtcttccctgcgccctctttcaattgagggtgaggcgacga

SEQ ID NO: 27282 - DNA, 50 bp, unidentified
  source 1..50: mol_type = unassigned DNA; note = target_b038735
  misc_feature 1..23: note = LF
  misc_feature 24..25: note = Core
  misc_feature 26..50: note = RF
tttgttttgtttctcgactccgctcgaactgacgaattttaatttggcga

SEQ ID NO: 27283 - DNA, 50 bp, unidentified
  source 1..50: mol_type = unassigned DNA; note = target_b03ca5d
  misc_feature 1..24: note = LF
  misc_feature 25: note = Core
  misc_feature 26..50: note = RF
gccgcggccctgcgggcctcgcaatgacggaaaggaaacgtcattgcgag

SEQ ID NO: 27284 - DNA, 50 bp, unidentified
  source 1..50: mol_type = unassigned DNA; note = target_b03d965
  misc_feature 1..22: note = LF
  misc_feature 23..25: note = Core
  misc_feature 26..50: note = RF
ctctgtctgattacttataaaaacttcccacaacttgtatttacctgact

SEQ ID NO: 27285 - DNA, 50 bp, unidentified
  source 1..50: mol_type = unassigned DNA; note = target_b04be00
  misc_feature 1..24: note = LF
  misc_feature 25: note = Core
  misc_feature 26..50: note = RF
gattatttaagctctcgtttccgttcgttaaataacttgttgctgcaatt

SEQ ID NO: 27286 - DNA, 50 bp, unidentified
  source 1..50: mol_type = unassigned DNA; note = target_b050f93
  misc_feature 1..23: note = LF
  misc_feature 24..25: note = Core
  misc_feature 26..50: note = RF
catgaaggggcatcgttccgtccctacggggcgggagattcgcttgatgt

SEQ ID NO: 27287 - DNA, 50 bp, unidentified
  source 1..50: mol_type = unassigned DNA; note = target_b0517ed
  misc_feature 1..22: note = LF
  misc_feature 23..25: note = Core
  misc_feature 26..50: note = RF
tcgtacttgagctaaagcacccgtttagctgaagaagaaaatcaacacat

SEQ ID NO: 27288 - DNA, 50 bp, unidentified
  source 1..50: mol_type = unassigned DNA; note = target_b051e99
  misc_feature 1..24: note = LF
  misc_feature 25: note = Core
  misc_feature 26..50: note = RF
tgctcgctggcgtgggccgtctttttttgcgcgtgatcccgtggcgagcg

SEQ ID NO: 27289 - DNA, 50 bp, unidentified
  source 1..50: mol_type = unassigned DNA; note = target_b06ac17
  misc_feature 1..23: note = LF
  misc_feature 24..25: note = Core
  misc_feature 26..50: note = RF
gacacatttactgtcgcaacggtgacagatctaatacggtctacgacttt

SEQ ID NO: 27290 - DNA, 50 bp, unidentified
  source 1..50: mol_type = unassigned DNA; note = target_b0728f8
  misc_feature 1..23: note = LF
  misc_feature 24..25: note = Core
  misc_feature 26..50: note = RF
gatgccggccggagggggcatccaccccatgagttcactatgacgaccac

SEQ ID NO: 27291 - DNA, 50 bp, unidentified
  source 1..50: mol_type = unassigned DNA; note = target_b0819a8
  misc_feature 1..24: note = LF
  misc_feature 25: note = Core
  misc_feature 26..50: note = RF
ccatgccgggcgaacgcacggaggactactgatggcgtggtcattgccct

SEQ ID NO: 27292 - DNA, 50 bp, unidentified
  source 1..50: mol_type = unassigned DNA; note = target_b08cb8b
  misc_feature 1..22: note = LF
  misc_feature 23..25: note = Core
  misc_feature 26..50: note = RF
cggagaccggttagcgttagactgacagcacccttttcctcgccaggtcc

SEQ ID NO: 27293 - DNA, 50 bp, unidentified
  source 1..50: mol_type = unassigned DNA; note = target_b095d63
  misc_feature 1..23: note = LF
  misc_feature 24..25: note = Core
  misc_feature 26..50: note = RF
ttaataattaggcttttgcccttacagggcgcagcgctcaatatataatt

SEQ ID NO: 27294 - DNA, 50 bp, unidentified
  source 1..50: mol_type = unassigned DNA; note = target_b09aad7
  misc_feature 1..23: note = LF
  misc_feature 24..25: note = Core
  misc_feature 26..50: note = RF
tatattaaagttcacataatcacctcaaatttatattttaagatataatt

SEQ ID NO: 27295 - DNA, 50 bp, unidentified
  source 1..50: mol_type = unassigned DNA; note = target_b09c146
  misc_feature 1..24: note = LF
  misc_feature 25: note = Core
  misc_feature 26..50: note = RF
tgcctcctcaggtcactcacgccccaccttttgggccagcaagcggcacg

SEQ ID NO: 27296 - DNA, 50 bp, unidentified
  source 1..50: mol_type = unassigned DNA; note = target_b0a5f5b
  misc_feature 1..24: note = LF
  misc_feature 25: note = Core
  misc_feature 26..50: note = RF
ctgtcccgagacggcgttgtccgcttgcgccaattgctgacattagccgc

SEQ ID NO: 27297 - DNA, 50 bp, unidentified
  source 1..50: mol_type = unassigned DNA; note = target_b0bd5c7
  misc_feature 1..21: note = LF
  misc_feature 22..25: note = Core
  misc_feature 26..50: note = RF
ccgcgccgcggcgccgggcacctagggcctgcggtggacctggtcgcgtt

SEQ ID NO: 27298 - DNA, 50 bp, unidentified
  source 1..50: mol_type = unassigned DNA; note = target_b0c6a31
  misc_feature 1..23: note = LF
  misc_feature 24..25: note = Core
  misc_feature 26..50: note = RF
gctgccttttttaagatttccctctcctcgcgcagaggtcgaattccttt

SEQ ID NO: 27299 - DNA, 50 bp, unidentified
  source 1..50: mol_type = unassigned DNA; note = target_b0ccd01
  misc_feature 1..23: note = LF
  misc_feature 24..25: note = Core
  misc_feature 26..50: note = RF
ttaatcgatttagccatattttcctccaataacaaaaaagaagtccatag

SEQ ID NO: 27300 - DNA, 50 bp, unidentified; identical to SEQ ID NO: 20354
  source 1..50: mol_type = unassigned DNA; note = target_b0d5a60
  misc_feature 1..23: note = LF
  misc_feature 24..25: note = Core
  misc_feature 26..50: note = RF

SEQ ID NO: 27301 - DNA, 50 bp, unidentified
  source 1..50: mol_type = unassigned DNA; note = target_b0d6db3
  misc_feature 1..23: note = LF
  misc_feature 24..25: note = Core
  misc_feature 26..50: note = RF
ggtccgcaggaccgcgaagcgtccttgacgcgaccgccgcgggccgtggg

SEQ ID NO: 27302 - DNA, 50 bp, unidentified
  source 1..50: mol_type = unassigned DNA; note = target_b0d83f3
  misc_feature 1..23: note = LF
  misc_feature 24..25: note = Core
  misc_feature 26..50: note = RF
atttttgcattcgccattttcccctccatataactaattttatatttaac

SEQ ID NO: 27303 - DNA, 50 bp, unidentified
  source 1..50: mol_type = unassigned DNA; note = target_b0dece3
  misc_feature 1..21: note = LF
  misc_feature 22..25: note = Core
  misc_feature 26..50: note = RF
cgccgcgcgtcccccgtctctcccccccccgccgcagtgtgcctgccacc

SEQ ID NO: 27304 - DNA, 50 bp, unidentified
  source 1..50: mol_type = unassigned DNA; note = target_b0e8563
  misc_feature 1..23: note = LF
  misc_feature 24..25: note = Core
  misc_feature 26..50: note = RF
tgatggccacgggcgcgttgacgtggacctacaacgaccgcagtattgca

SEQ ID NO: 27305 - DNA, 50 bp, unidentified
  source 1..50: mol_type = unassigned DNA; note = target_b0e9998
  misc_feature 1..23: note = LF
  misc_feature 24..25: note = Core
  misc_feature 26..50: note = RF
tccatgtgtccgcacgtcgaatcagattttaagccgcttgggaatcccca

SEQ ID NO: 27306 - DNA, 50 bp, unidentified
  source 1..50: mol_type = unassigned DNA; note = target_b0f5be4
  misc_feature 1..23: note = LF
  misc_feature 24..25: note = Core
  misc_feature 26..50: note = RF
cttttctttctcatataaagtacctccagatatgcaaaaagagccggaaa

SEQ ID NO: 27307 - DNA, 50 bp, unidentified
  source 1..50: mol_type = unassigned DNA; note = target_b0fdb0b
  misc_feature 1..24: note = LF
  misc_feature 25: note = Core
  misc_feature 26..50: note = RF
gatgatcgtgagtccaaacttgtttggggcaattttgagttacccggttg

SEQ ID NO: 27308 - DNA, 50 bp, unidentified
  source 1..50: mol_type = unassigned DNA; note = target_b0ff892
  misc_feature 1..23: note = LF
  misc_feature 24..25: note = Core
  misc_feature 26..50: note = RF
agggtaaatgtacaaaggctcacctccaaataaaaataccgccggttttt

SEQ ID NO: 27309 - DNA, 50 bp, unidentified
  source 1..50: mol_type = unassigned DNA; note = target_b104391
  misc_feature 1..23: note = LF
  misc_feature 24..25: note = Core
  misc_feature 26..50: note = RF
agggcggccggcgacggcttttttgcttcgcgatgcaaagccgaaggcgg

SEQ ID NO: 27310 - DNA, 50 bp, unidentified
  source 1..50: mol_type = unassigned DNA; note = target_b10bb74
  misc_feature 1..24: note = LF
  misc_feature 25: note = Core
  misc_feature 26..50: note = RF
acaatctcattgacgcatacgggttgttgtcgagggtttctgtccttcag

SEQ ID NO: 27311 - DNA, 50 bp, unidentified
  source 1..50: mol_type = unassigned DNA; note = target_b118804
  misc_feature 1..24: note = LF
  misc_feature 25: note = Core
  misc_feature 26..50: note = RF
cgacgcgacccgcaccgatatcggcagttgagtgcgcttccgcttgaggg

SEQ ID NO: 27312 - DNA, 50 bp, unidentified
  source 1..50: mol_type = unassigned DNA; note = target_b1211ec
  misc_feature 1..23: note = LF
  misc_feature 24..25: note = Core
  misc_feature 26..50: note = RF
cgggactcgcttggctcaggttcctatcaggtcacgtccgcccggcccgg

SEQ ID NO: 27313 - DNA, 50 bp, unidentified
  source 1..50: mol_type = unassigned DNA; note = target_b13379d
  misc_feature 1..23: note = LF
  misc_feature 24..25: note = Core
  misc_feature 26..50: note = RF
tcgtcttcacgatccacaggctcctgtcaagcggcctccaaacggacctc

SEQ ID NO: 27314 - DNA, 50 bp, unidentified
  source 1..50: mol_type = unassigned DNA; note = target_b135dcb
  misc_feature 1..24: note = LF
  misc_feature 25: note = Core
  misc_feature 26..50: note = RF
ccggttctcgtccggccgccaaagcagtcattgaaccgctagcctccgaa

SEQ ID NO: 27315 - DNA, 50 bp, unidentified
  source 1..50: mol_type = unassigned DNA; note = target_b13cfbc
  misc_feature 1..24: note = LF
  misc_feature 25: note = Core
  misc_feature 26..50: note = RF
attgaatagaaatatgttgtagggcgggtcgagacccgcgtaatacaatg

SEQ ID NO: 27316 - DNA, 50 bp, unidentified
  source 1..50: mol_type = unassigned DNA; note = target_b142534
  misc_feature 1..20: note = LF
  misc_feature 21..25: note = Core
  misc_feature 26..50: note = RF
ataaaactctgacaccggtctttttgtaaaaaattccttgcagctttcaa

SEQ ID NO: 27317 - DNA, 50 bp, unidentified
  source 1..50: mol_type = unassigned DNA; note = target_b149a6a
  misc_feature 1..24: note = LF
  misc_feature 25: note = Core
  misc_feature 26..50: note = RF
gaagactccagcacagtacgtaagcgctcggcgatctcatacgcgaattt

SEQ ID NO: 27318 - DNA, 50 bp, unidentified
  source 1..50: mol_type = unassigned DNA; note = target_b153c7e
  misc_feature 1..21: note = LF
  misc_feature 22..25: note = Core
  misc_feature 26..50: note = RF
gtccgtacgtggtcatgagtgctcccggtgagttggagtgccggtggatc

SEQ ID NO: 27319 - DNA, 50 bp, unidentified
  source 1..50: mol_type = unassigned DNA; note = target_b157edc
  misc_feature 1..23: note = LF
  misc_feature 24..25: note = Core
  misc_feature 26..50: note = RF
cccagcgccgagtgcagccgtcttgagttatagacgtcgtcgataaagag

SEQ ID NO: 27320 - DNA, 50 bp, unidentified
  source 1..50: mol_type = unassigned DNA; note = target_b15ac78
  misc_feature 1..24: note = LF
  misc_feature 25: note = Core
  misc_feature 26..50: note = RF
ccggtccgcctgattaaacggagaacgcaatgaaactcatcgaagacctg

SEQ ID NO: 27321 - DNA, 50 bp, unidentified
  source 1..50: mol_type = unassigned DNA; note = target_b15c6ba
  misc_feature 1..24: note = LF
  misc_feature 25: note = Core
  misc_feature 26..50: note = RF
tcaccttgaaggcaaaacacgacattgaacttgggacctacatcatatga

SEQ ID NO: 27322 - DNA, 50 bp, unidentified
  source 1..50: mol_type = unassigned DNA; note = target_b15d78e
  misc_feature 1..23: note = LF
  misc_feature 24..25: note = Core
  misc_feature 26..50: note = RF
tttaactatgccgagattccgtacgacgcttcaatttttcggtgaccaca

SEQ ID NO: 27323 - DNA, 50 bp, unidentified
  source 1..50: mol_type = unassigned DNA; note = target_b164570
  misc_feature 1..23: note = LF
  misc_feature 24..25: note = Core
  misc_feature 26..50: note = RF
tccagtttccggctggtcacctcctatctgaaaaaatgagggagtgccca

SEQ ID NO: 27324 - DNA, 50 bp, unidentified
  source 1..50: mol_type = unassigned DNA; note = target_b170a8b
  misc_feature 1..24: note = LF
  misc_feature 25: note = Core
  misc_feature 26..50: note = RF
gctgcggcgaaccgctgtgagccccccccccccacaacaccaggatcgga

SEQ ID NO: 27325 - DNA, 50 bp, unidentified
  source 1..50: mol_type = unassigned DNA; note = target_b176dc2
  misc_feature 1..22: note = LF
  misc_feature 23..25: note = Core
  misc_feature 26..50: note = RF
cgggttccacagactttgaggaagacccgtttcatttgagactgtgcctt

SEQ ID NO: 27326 - DNA, 50 bp, unidentified
  source 1..50: mol_type = unassigned DNA; note = target_b181731
  misc_feature 1..24: note = LF
  misc_feature 25: note = Core
  misc_feature 26..50: note = RF
aagcccgctatttgcgcttaatcgttgttggcaagcgttattttatattc

SEQ ID NO: 27327 - DNA, 50 bp, unidentified
  source 1..50: mol_type = unassigned DNA; note = target_b183aef
  misc_feature 1..22: note = LF
  misc_feature 23..25: note = Core
  misc_feature 26..50: note = RF
cgcctgcttcgcggctgaagccgctcccacaagatacgcggcgcgttcgc

SEQ ID NO: 27328 - DNA, 50 bp, unidentified
  source 1..50: mol_type = unassigned DNA; note = target_b185e7d
  misc_feature 1..23: note = LF
  misc_feature 24..25: note = Core
  misc_feature 26..50: note = RF
cgctgcaactttcatatcttcttgtctcctttcctatccttttgttagtt

SEQ ID NO: 27329 - DNA, 50 bp, unidentified
  source 1..50: mol_type = unassigned DNA; note = target_b18636f
  misc_feature 1..23: note = LF
  misc_feature 24..25: note = Core
  misc_feature 26..50: note = RF
gcaaaaaatacttgactgattacctcagggcgtgaagcagtggttcgatc

SEQ ID NO: 27330 - DNA, 50 bp, unidentified
  source 1..50: mol_type = unassigned DNA; note = target_b194fb0
  misc_feature 1..23: note = LF
  misc_feature 24..25: note = Core
  misc_feature 26..50: note = RF
atggccgcccggaaccgcgtcgcctgacccacgcggaagggcaggggagg

SEQ ID NO: 27331 - DNA, 50 bp, unidentified
  source 1..50: mol_type = unassigned DNA; note = target_b1984d6
  misc_feature 1..23: note = LF
  misc_feature 24..25: note = Core
  misc_feature 26..50: note = RF
agccgatcaaagtgttttctttgcgtcttggcgatgagatggtctcctcc

SEQ ID NO: 27332 - DNA, 50 bp, unidentified
  source 1..50: mol_type = unassigned DNA; note = target_b1988eb
  misc_feature 1..24: note = LF
  misc_feature 25: note = Core
  misc_feature 26..50: note = RF
tggcgaaatcatcgccatcctcccctccgtcaggctgcgcctgccacctc

SEQ ID NO: 27333 - DNA, 50 bp, unidentified
  source 1..50: mol_type = unassigned DNA; note = target_b199272
  misc_feature 1..24: note = LF
  misc_feature 25: note = Core
  misc_feature 26..50: note = RF
tgaaaaaagtaagagcccagccggcttgaggcggtgaatatttaattgaa

SEQ ID NO: 27334 - DNA, 50 bp, unidentified
  source 1..50: mol_type = unassigned DNA; note = target_b1a1b3c
  misc_feature 1..22: note = LF
  misc_feature 23..25: note = Core
  misc_feature 26..50: note = RF
tgctcagcctcacgttcctctcctttcctctcttgctgctccatggccaa

SEQ ID NO: 27335 - DNA, 50 bp, unidentified
  source 1..50: mol_type = unassigned DNA; note = target_b1a4c58
  misc_feature 1..23: note = LF
  misc_feature 24..25: note = Core
  misc_feature 26..50: note = RF
tacgtcgcagccgcgttgtaaagaggtcccaatgagccgtttcagacatg

SEQ ID NO: 27336 - DNA, 50 bp, unidentified
  source 1..50: mol_type = unassigned DNA; note = target_b1aa2ce
  misc_feature 1..22: note = LF
  misc_feature 23..25: note = Core
  misc_feature 26..50: note = RF
gatcaccttcataaagatctcctttctgcttttctgttatttagttgcac

SEQ ID NO: 27337 - DNA, 50 bp, unidentified
  source 1..50: mol_type = unassigned DNA; note = target_b1afccb
  misc_feature 1..24: note = LF
  misc_feature 25: note = Core
  misc_feature 26..50: note = RF
ctctaaacttcatattctattcctctctaaaaaatgattgcaaaattatc

SEQ ID NO: 27338 - DNA, 50 bp, unidentified
  source 1..50: mol_type = unassigned DNA; note = target_b1b1017
  misc_feature 1..23: note = LF
  misc_feature 24..25: note = Core
  misc_feature 26..50: note = RF
ccgcgcgcctcgtagaccgctcttggcgcatcgtgctccacccatccccc

SEQ ID NO: 27339 - DNA, 50 bp, unidentified
  source 1..50: mol_type = unassigned DNA; note = target_b1b4813
  misc_feature 1..23: note = LF
  misc_feature 24..25: note = Core
  misc_feature 26..50: note = RF
ggcggctcacgcggcggcccgcgctaggccggctcgtcgaccgggaattc

SEQ ID NO: 27340 - DNA, 50 bp, unidentified
  source 1..50: mol_type = unassigned DNA; note = target_b1c56ad
  misc_feature 1..23: note = LF
  misc_feature 24..25: note = Core
  misc_feature 26..50: note = RF
ttccggcagatgaaagccttctcctttccttccacaaaccagcggggggc

SEQ ID NO: 27341 - DNA, 50 bp, unidentified
  source 1..50: mol_type = unassigned DNA; note = target_b1c73a4
  misc_feature 1..22: note = LF
  misc_feature 23..25: note = Core
  misc_feature 26..50: note = RF
aatcaaaattcattcttacctcctttctttaaaataaaaaagagcagcct

SEQ ID NO: 27342 - DNA, 50 bp, unidentified
  source 1..50: mol_type = unassigned DNA; note = target_b1c899a
  misc_feature 1..23: note = LF
  misc_feature 24..25: note = Core
  misc_feature 26..50: note = RF
agcgatagggcacggagtaataatgagcgtcgatctcgacgtgataatca

SEQ ID NO: 27343 - DNA, 50 bp, unidentified
  source 1..50: mol_type = unassigned DNA; note = target_b1d86df
  misc_feature 1..23: note = LF
  misc_feature 24..25: note = Core
  misc_feature 26..50: note = RF
cggttccatagtcttctcaggcgtgacaacgcccgatggaattcttccgc

SEQ ID NO: 27344 - DNA, 50 bp, unidentified
  source 1..50: mol_type = unassigned DNA; note = target_b1ef221
  misc_feature 1..23: note = LF
  misc_feature 24..25: note = Core
  misc_feature 26..50: note = RF
tacaggcggctgcaaactccttcctgttatcctcaggatgatatttattg

SEQ ID NO: 27345 - DNA, 50 bp, unidentified
  source 1..50: mol_type = unassigned DNA; note = target_b1efa28
  misc_feature 1..23: note = LF
  misc_feature 24..25: note = Core
  misc_feature 26..50: note = RF
gcagcagttcctcggctatgtatagagatgacacccctctgcaagataga

SEQ ID NO: 27346 - DNA, 50 bp, unidentified
  source 1..50: mol_type = unassigned DNA; note = target_b1f4d22
  misc_feature 1..23: note = LF
  misc_feature 24..25: note = Core
  misc_feature 26..50: note = RF
gcaccatcagccaggcctctaacaggctgcggaaaaaggcgcttgctgcg

SEQ ID NO: 27347 - DNA, 50 bp, unidentified
  source 1..50: mol_type = unassigned DNA; note = target_b1ff777
  misc_feature 1..24: note = LF
  misc_feature 25: note = Core
  misc_feature 26..50: note = RF
tttccctaatttcatttttttccttttgtttagagtattttaggctaata

SEQ ID NO: 27348 - DNA, 50 bp, unidentified
  source 1..50: mol_type = unassigned DNA; note = target_b202428
  misc_feature 1..24: note = LF
  misc_feature 25: note = Core
  misc_feature 26..50: note = RF
gtttttcccgttgggttgctgacctggtcaacatcaccgaaggcgaagtg

SEQ ID NO: 27349 - DNA, 50 bp, unidentified
  source 1..50: mol_type = unassigned DNA; note = target_b20544b
  misc_feature 1..24: note = LF
  misc_feature 25: note = Core
  misc_feature 26..50: note = RF
tggcagacccggggctggtccctgtgttactcggcggctctcaaggggtc

SEQ ID NO: 27350 - DNA, 50 bp, unidentified
  source 1..50: mol_type = unassigned DNA; note = target_b20b15d
  misc_feature 1..24: note = LF
  misc_feature 25: note = Core
  misc_feature 26..50: note = RF
ccgctgtttttatcgagtgttaacgccttattaatcggcataatctgaga

SEQ ID NO: 27351 - DNA, 50 bp, unidentified
  source 1..50: mol_type = unassigned DNA; note = target_b20dbe5
  misc_feature 1..23: note = LF
  misc_feature 24..25: note = Core
  misc_feature 26..50: note = RF
gttgcagcgcgagagtccgctattggcacttagcgtcattcgctgcgccg

SEQ ID NO: 27352 - DNA, 50 bp, unidentified
  source 1..50: mol_type = unassigned DNA; note = target_b2128c5
  misc_feature 1..21: note = LF
  misc_feature 22..25: note = Core
  misc_feature 26..50: note = RF
gcgcgggcggcgacggcggcgctcatgccggcagccagcggcccatgcgg

SEQ ID NO: 27353 - DNA, 50 bp, unidentified
  source 1..50: mol_type = unassigned DNA; note = target_b219eef
  misc_feature 1..24: note = LF
  misc_feature 25: note = Core
  misc_feature 26..50: note = RF
ctcgtgtcccattaaagcgccagattgcggaaactgacgaaaggcattaa

SEQ ID NO: 27354 - DNA, 50 bp, unidentified
  source 1..50: mol_type = unassigned DNA; note = target_b21f7cc
  misc_feature 1..23: note = LF
  misc_feature 24..25: note = Core
  misc_feature 26..50: note = RF
aacggatgcgcggcgcgcattgttgggtgcacgcaaggcgtaaactgaaa

SEQ ID NO: 27355 - DNA, 50 bp, unidentified
  source 1..50: mol_type = unassigned DNA; note = target_b2224a2
  misc_feature 1..23: note = LF
  misc_feature 24..25: note = Core
  misc_feature 26..50: note = RF
aggtttccatcgcggtccccttgcggacacacacacaacttagcggttat

SEQ ID NO: 27356 - DNA, 50 bp, unidentified
  source 1..50: mol_type = unassigned DNA; note = target_b22b665
  misc_feature 1..23: note = LF
  misc_feature 24..25: note = Core
  misc_feature 26..50: note = RF
acgcggtctgtctgttgccatccttcacctctggccctattatacacgag

SEQ ID NO: 27357 - DNA, 50 bp, unidentified
  source 1..50: mol_type = unassigned DNA; note = target_b22dd64
  misc_feature 1..22: note = LF
  misc_feature 23..25: note = Core
  misc_feature 26..50: note = RF
aacaaatgacaaaaacgggtgtcatgctgaggctctcgaagcatgagcgc

SEQ ID NO: 27358 - DNA, 50 bp, unidentified
  source 1..50: mol_type = unassigned DNA; note = target_b231f9c
  misc_feature 1..24: note = LF
  misc_feature 25: note = Core
  misc_feature 26..50: note = RF
gaccgtcctcggacttcaaagaacttcctgtttgcctgtaatccgggcat

SEQ ID NO: 27359 - DNA, 50 bp, unidentified
  source 1..50: mol_type = unassigned DNA; note = target_b23ba3d
  misc_feature 1..24: note = LF
  misc_feature 25: note = Core
  misc_feature 26..50: note = RF
aggagttgcaacgcctgctgggcaagaagaccacggagaacgagattctc

SEQ ID NO: 27360 - DNA, 50 bp, unidentified
  source 1..50: mol_type = unassigned DNA; note = target_b23c231
  misc_feature 1..23: note = LF
  misc_feature 24..25: note = Core
  misc_feature 26..50: note = RF
ctccgtcttcgcgctctttgtggctttgtggttttatagagcttcgcctg

SEQ ID NO: 27361 - DNA, 50 bp, unidentified
  source 1..50: mol_type = unassigned DNA; note = target_b2444e1
  misc_feature 1..23: note = LF
  misc_feature 24..25: note = Core
  misc_feature 26..50: note = RF
taacatcagtcattaaattcctcctattatatccccagtgttttaactaa

SEQ ID NO: 27362 - DNA, 50 bp, unidentified
  source 1..50: mol_type = unassigned DNA; note = target_b245048
  misc_feature 1..21: note = LF
  misc_feature 22..25: note = Core
  misc_feature 26..50: note = RF
ctgcggtcgagtcgctgggcggtcatgcgccaacccccagcggcgaaatc

SEQ ID NO: 27363 - DNA, 50 bp, unidentified
  source 1..50: mol_type = unassigned DNA; note = target_b2487f8
  misc_feature 1..23: note = LF
  misc_feature 24..25: note = Core
  misc_feature 26..50: note = RF
gccgctcgatctgaaggagccgtagggcgggcaaaggagcgcagcgacgt

SEQ ID NO: 27364 - DNA, 50 bp, unidentified
  source 1..50: mol_type = unassigned DNA; note = target_b25705c
  misc_feature 1..21: note = LF
  misc_feature 22..25: note = Core
  misc_feature 26..50: note = RF
acctccggctccggggtggcggtcatgccccctccgccagggcttcggga

SEQ ID NO: 27365 - DNA, 50 bp, unidentified
  source 1..50: mol_type = unassigned DNA; note = target_b2601fb
  misc_feature 1..23: note = LF
  misc_feature 24..25: note = Core
  misc_feature 26..50: note = RF
gtggcggttcgcctcgaccactcctagaacgtggcgatgttggagaaggc

SEQ ID NO: 27366 - DNA, 50 bp, unidentified
  source 1..50: mol_type = unassigned DNA; note = target_b267f9a
  misc_feature 1..22: note = LF
  misc_feature 23..25: note = Core
  misc_feature 26..50: note = RF
tcgaataccgtgaaagttgaatagaccgtcctccactgaatgtgtcgcag

SEQ ID NO: 27367 - DNA, 50 bp, unidentified
  source 1..50: mol_type = unassigned DNA; note = target_b269f61
  misc_feature 1..22: note = LF
  misc_feature 23..25: note = Core
  misc_feature 26..50: note = RF
gtcagcgttcataattatcctcactttccatattgcccctacagtaaact

SEQ ID NO: 27368 - DNA, 50 bp, unidentified
  source 1..50: mol_type = unassigned DNA; note = target_b26ad0b
  misc_feature 1..23: note = LF
  misc_feature 24..25: note = Core
  misc_feature 26..50: note = RF
cggcgtccgaaagcctccaaaggagggttgtccgtgctcatccgccggat

SEQ ID NO: 27369 - DNA, 50 bp, unidentified
  source 1..50: mol_type = unassigned DNA; note = target_b27a196
  misc_feature 1..23: note = LF
  misc_feature 24..25: note = Core
  misc_feature 26..50: note = RF
gctgcattgcatatgtccgcttttggcacatttgagccgcggcgggttgc

SEQ ID NO: 27370 - DNA, 50 bp, unidentified
  source 1..50: mol_type = unassigned DNA; note = target_b27c434
  misc_feature 1..23: note = LF
  misc_feature 24..25: note = Core
  misc_feature 26..50: note = RF
ttgtttgctttcagtttttcaacctcgctcgtaagttctccgagtttctt

SEQ ID NO: 27371 - DNA, 50 bp, unidentified
  source 1..50: mol_type = unassigned DNA; note = target_b27decf
  misc_feature 1..23: note = LF
  misc_feature 24..25: note = Core
  misc_feature 26..50: note = RF
aggcggagatctcacagcgccccctcatccgtctcggctgcgccgagcca

SEQ ID NO: 27372 - DNA, 50 bp, unidentified
  source 1..50: mol_type = unassigned DNA; note = target_b285be5
  misc_feature 1..21: note = LF
  misc_feature 22..25: note = Core
  misc_feature 26..50: note = RF
agcgcccaggatcaaatcgccttcccaatgcccgggcacggcgcggtcgg

SEQ ID NO: 27373 - DNA, 50 bp, unidentified
  source 1..50: mol_type = unassigned DNA; note = target_b289899
  misc_feature 1..22: note = LF
  misc_feature 23..25: note = Core
  misc_feature 26..50: note = RF
tgcccttccccgtggccgggcttgacccggccacccacgaagcgtttgcg

SEQ ID NO: 27374 - DNA, 50 bp, unidentified
  source 1..50: mol_type = unassigned DNA; note = target_b28a58e
  misc_feature 1..24: note = LF
  misc_feature 25: note = Core
  misc_feature 26..50: note = RF
cccggggggggggggttgtgtgatttcatcggtttccggttttggtgggc

SEQ ID NO: 27375 - DNA, 50 bp, unidentified
  source 1..50: mol_type = unassigned DNA; note = target_b28ee7b
  misc_feature 1..23: note = LF
  misc_feature 24..25: note = Core
  misc_feature 26..50: note = RF
tctcaaccctctatcataagcggcttacgatagatgagctgaacagctgt

SEQ ID NO: 27376 - DNA, 50 bp, unidentified
  source 1..50: mol_type = unassigned DNA; note = target_b2920f8
  misc_feature 1..24: note = LF
  misc_feature 25: note = Core
  misc_feature 26..50: note = RF
ctttttccgttaccaagctgtgcccgtctggcaaaaatgtcatggcccag

SEQ ID NO: 27377 - DNA, 50 bp, unidentified
  source 1..50: mol_type = unassigned DNA; note = target_b295ab9
  misc_feature 1..23: note = LF
  misc_feature 24..25: note = Core
  misc_feature 26..50: note = RF
tgtcccgatcctttccaaaaaggctccgctactgctcccccaataccttc

SEQ ID NO: 27378 - DNA, 50 bp, unidentified
  source 1..50: mol_type = unassigned DNA; note = target_b2960aa
  misc_feature 1..23: note = LF
  misc_feature 24..25: note = Core
  misc_feature 26..50: note = RF
ctttctgggggcagcgcaagatctgttcctgattgagcgccggcattatc

SEQ ID NO: 27379 - DNA, 50 bp, unidentified
  source 1..50: mol_type = unassigned DNA; note = target_b2989f7
  misc_feature 1..24: note = LF
  misc_feature 25: note = Core
  misc_feature 26..50: note = RF
cagggtccctttcaggagaccctgcggtgacggaacacagcgggcacaaa

SEQ ID NO: 27380 - DNA, 50 bp, unidentified
  source 1..50: mol_type = unassigned DNA; note = target_b29b0f4
  misc_feature 1..23: note = LF
  misc_feature 24..25: note = Core
  misc_feature 26..50: note = RF
cgatgtgttcaaatttttgtcatgtacttaaatggagaagaaaaggagaa

SEQ ID NO: 27381 - DNA, 50 bp, unidentified
  source 1..50: mol_type = unassigned DNA; note = target_b29b535
  misc_feature 1..23: note = LF
  misc_feature 24..25: note = Core
  misc_feature 26..50: note = RF
agctgttgagactgaaatggttcctgatacctttatctgcctcctgaccc

SEQ ID NO: 27382 - DNA, 50 bp, unidentified
  source 1..50: mol_type = unassigned DNA; note = target_b29df0f
  misc_feature 1..24: note = LF
  misc_feature 25: note = Core
  misc_feature 26..50: note = RF
gcggccccgtagcgctggcctaacgtccggcttcaggcgcgcgccgcttg

SEQ ID NO: 27383 - DNA, 50 bp, unidentified; identical to SEQ ID NO: 27279
  source 1..50: mol_type = unassigned DNA; note = target_b2a29a7
  misc_feature 1..23: note = LF
  misc_feature 24..25: note = Core
  misc_feature 26..50: note = RF

SEQ ID NO: 27384 - DNA, 50 bp, unidentified
  source 1..50: mol_type = unassigned DNA; note = target_b2aa09e
  misc_feature 1..23: note = LF
  misc_feature 24..25: note = Core
  misc_feature 26..50: note = RF
agcgcctgaagcgcgccgtcaaatgcttcgtcgccgagggcttgatcgag

SEQ ID NO: 27385 - DNA, 50 bp, unidentified
  source 1..50: mol_type = unassigned DNA; note = target_b2aede4
  misc_feature 1..23: note = LF
  misc_feature 24..25: note = Core
  misc_feature 26..50: note = RF
cttccggcgaaaccggaaatcccctcatccgccctccgggcaccttctcc

SEQ ID NO: 27386 - DNA, 50 bp, unidentified
  source 1..50: mol_type = unassigned DNA; note = target_b2b764d
  misc_feature 1..23: note = LF
  misc_feature 24..25: note = Core
  misc_feature 26..50: note = RF
cgcggtgcgacacagctcccacaatgactttacggcgcgatgcgtctcct

SEQ ID NO: 27387 - DNA, 50 bp, unidentified
  source 1..50: mol_type = unassigned DNA; note = target_b2b8608
  misc_feature 1..23: note = LF
  misc_feature 24..25: note = Core
  misc_feature 26..50: note = RF
cagcccgaccttgtggccctgggtgtagagcagatgggcggcgccggcgc

SEQ ID NO: 27388 - DNA, 50 bp, unidentified
  source 1..50: mol_type = unassigned DNA; note = target_b2c066c
  misc_feature 1..21: note = LF
  misc_feature 22..25: note = Core
  misc_feature 26..50: note = RF
ccagtgacaaggacgggcgaggtcatgggctctccttacgctgatcctcg

SEQ ID NO: 27389 - DNA, 50 bp, unidentified
  source 1..50: mol_type = unassigned DNA; note = target_b2c0861
  misc_feature 1..24: note = LF
  misc_feature 25: note = Core
  misc_feature 26..50: note = RF
gggtccgagaggctgaaccactgctgcaggaagtgaatgcgcaacatcgt

SEQ ID NO: 27390 - DNA, 50 bp, unidentified
  source 1..50: mol_type = unassigned DNA; note = target_b2c6095
  misc_feature 1..22: note = LF
  misc_feature 23..25: note = Core
  misc_feature 26..50: note = RF
ccggtactgggaacgctgttcagctagctggtcgagctctcgctgctggg

SEQ ID NO: 27391 - DNA, 50 bp, unidentified
  source 1..50: mol_type = unassigned DNA; note = target_b2c7315
  misc_feature 1..24: note = LF
  misc_feature 25: note = Core
  misc_feature 26..50: note = RF
gttacaaagtgccaactattaaggttctggacaattccgagtttggattt

SEQ ID NO: 27392 - DNA, 50 bp, unidentified
  source 1..50: mol_type = unassigned DNA; note = target_b2ca6e4
  misc_feature 1..23: note = LF
  misc_feature 24..25: note = Core
  misc_feature 26..50: note = RF
gctcagcttcggctgggcggtttttttcgcctgtacgtttcgccgccgcc

SEQ ID NO: 27393 - DNA, 50 bp, unidentified
  source 1..50: mol_type = unassigned DNA; note = target_b2d8183
  misc_feature 1..23: note = LF
  misc_feature 24..25: note = Core
  misc_feature 26..50: note = RF
aagttagctaggttcgaggtagcagcgattttacatcgcgacctagcgcc

SEQ ID NO: 27394 - DNA, 50 bp, unidentified
  source 1..50: mol_type = unassigned DNA; note = target_b2db41d
  misc_feature 1..24: note = LF
  misc_feature 25: note = Core
  misc_feature 26..50: note = RF
ctttgtcattcagactgaaaggaaaagcatcgtgattaaaggtctcgcca

SEQ ID NO: 27395 - DNA, 50 bp, unidentified
  source 1..50: mol_type = unassigned DNA; note = target_b2e23ad
  misc_feature 1..23: note = LF
  misc_feature 24..25: note = Core
  misc_feature 26..50: note = RF
ctcggcgatgctggggagtagggcggatttcaatccgccagcaaataggg

SEQ ID NO: 27396 - DNA, 50 bp, unidentified
  source 1..50: mol_type = unassigned DNA; note = target_b2e3a27
  misc_feature 1..22: note = LF
  misc_feature 23..25: note = Core
  misc_feature 26..50: note = RF
agttgagttgacagatctgacctgacagctcgccctctgcgcatggttaa

SEQ ID NO: 27397 - DNA, 50 bp, unidentified
  source 1..50: mol_type = unassigned DNA; note = target_b2ebe4a
  misc_feature 1..23: note = LF
  misc_feature 24..25: note = Core
  misc_feature 26..50: note = RF
aaaaatcttcatctttatgtctccttttataataattagacgttttgctg

SEQ ID NO: 27398 - DNA, 50 bp, unidentified
  source 1..50: mol_type = unassigned DNA; note = target_b2ef0d4
  misc_feature 1..23: note = LF
  misc_feature 24..25: note = Core
  misc_feature 26..50: note = RF
ttcttcatcatggtgttcaggatagttaactgcttccgcatacaggctac

SEQ ID NO: 27399 - DNA, 50 bp, unidentified
  source 1..50: mol_type = unassigned DNA; note = target_b2ef954
  misc_feature 1..24: note = LF
  misc_feature 25: note = Core
  misc_feature 26..50: note = RF
ttgatgatcggcacacatagtgcccgctccgcgctcgttccgtcgagggc

SEQ ID NO: 27400 - DNA, 50 bp, unidentified
  source 1..50: mol_type = unassigned DNA; note = target_b2f5051
  misc_feature 1..24: note = LF
  misc_feature 25: note = Core
  misc_feature 26..50: note = RF
gctgattccctgacccgggcggccccccccggatcatccttttcccgtca

SEQ ID NO: 27401 - DNA, 50 bp, unidentified
  source 1..50: mol_type = unassigned DNA; note = target_b2f77db
  misc_feature 1..21: note = LF
  misc_feature 22..25: note = Core
  misc_feature 26..50: note = RF
aatcccaataaataatcactgtcattcccgaagtcttttatcgggaatct

SEQ ID NO: 27402 - DNA, 50 bp, unidentified
  source 1..50: mol_type = unassigned DNA; note = target_b2f7edf
  misc_feature 1..22: note = LF
  misc_feature 23..25: note = Core
  misc_feature 26..50: note = RF
caacacattagttatccagagctgaggttaaataggcttcaataactgta

SEQ ID NO: 27403 - DNA, 50 bp, unidentified
  source 1..50: mol_type = unassigned DNA; note = target_b3015a8
  misc_feature 1..23: note = LF
  misc_feature 24..25: note = Core
  misc_feature 26..50: note = RF
agtttttccaattgcacctcctcctttttttcatctgcctgaagcagaaa

SEQ ID NO: 27404 - DNA, 50 bp, unidentified
  source 1..50: mol_type = unassigned DNA; note = target_b30277f
  misc_feature 1..24: note = LF
  misc_feature 25: note = Core
  misc_feature 26..50: note = RF
aatatagttcatattgtattacctcaatctctatacgctcaaatagagca

SEQ ID NO: 27405 - DNA, 50 bp, unidentified
  source 1..50: mol_type = unassigned DNA; note = target_b3129e5
  misc_feature 1..23: note = LF
  misc_feature 24..25: note = Core
  misc_feature 26..50: note = RF
agagatcctgataaccccctgtcctgttgaggaacctgtaaaacggaaag

SEQ ID NO: 27406 - DNA, 50 bp, unidentified
  source 1..50: mol_type = unassigned DNA; note = target_b3141fc
  misc_feature 1..24: note = LF
  misc_feature 25: note = Core
  misc_feature 26..50: note = RF
agcagtaacaacggtgacagcgcctttttgtttggcgcggggcggatcag

SEQ ID NO: 27407 - DNA, 50 bp, unidentified
  source 1..50: mol_type = unassigned DNA; note = target_b315314
  misc_feature 1..23: note = LF
  misc_feature 24..25: note = Core
  misc_feature 26..50: note = RF
tatagcagaataattaaattcaccttcttataatttcaagccccaaatcg

SEQ ID NO: 27408 - DNA, 50 bp, unidentified
  source 1..50: mol_type = unassigned DNA; note = target_b316be8
  misc_feature 1..22: note = LF
  misc_feature 23..25: note = Core
  misc_feature 26..50: note = RF
ttgcaaagtagtgcatggccttttttagaatgtcattttcttcttgcaag

SEQ ID NO: 27409 - DNA, 50 bp, unidentified
  source 1..50: mol_type = unassigned DNA; note = target_b327d40
  misc_feature 1..24: note = LF
  misc_feature 25: note = Core
  misc_feature 26..50: note = RF
tcctgcccggcgtccggtaatcggcactacagggtttggcgctcgcttga

SEQ ID NO: 27410 - DNA, 50 bp, unidentified
  source 1..50: mol_type = unassigned DNA; note = target_b3295ca
  misc_feature 1..23: note = LF
  misc_feature 24..25: note = Core
  misc_feature 26..50: note = RF
aagcgttcgacaatgtccgctgttggcacaaagcggacattcacgtccgt

SEQ ID NO: 27411 - DNA, 50 bp, unidentified
  source 1..50: mol_type = unassigned DNA; note = target_b32b216
  misc_feature 1..24: note = LF
  misc_feature 25: note = Core
  misc_feature 26..50: note = RF
tccgccccctcggctgacgcccccccaccggccccccgtcccggctctcc

SEQ ID NO: 27412 - DNA, 50 bp, unidentified
  source 1..50: mol_type = unassigned DNA; note = target_b32e11a
  misc_feature 1..23: note = LF
  misc_feature 24..25: note = Core
  misc_feature 26..50: note = RF
ttttgagtacacatttaagcaacctccttaatccctttgattctattata

SEQ ID NO: 27413 - DNA, 50 bp, unidentified
  source 1..50: mol_type = unassigned DNA; note = target_b335cdd
  misc_feature 1..22: note = LF
  misc_feature 23..25: note = Core
  misc_feature 26..50: note = RF
gttcacgggaccttttctcctcctttcggctcgcactacgccgccgcata

SEQ ID NO: 27414 - DNA, 50 bp, unidentified
  source 1..50: mol_type = unassigned DNA; note = target_b34712b
  misc_feature 1..23: note = LF
  misc_feature 24..25: note = Core
  misc_feature 26..50: note = RF
aaggagcttaccataataaactcctttcatacttcatacctccttttatc

SEQ ID NO: 27415 - DNA, 50 bp, unidentified
  source 1..50: mol_type = unassigned DNA; note = target_b34c096
  misc_feature 1..24: note = LF
  misc_feature 25: note = Core
  misc_feature 26..50: note = RF
ggttcaacgtacttataccaatcccaggcttagctgaaccaagcgatgtg

SEQ ID NO: 27416 - DNA, 50 bp, unidentified
  source 1..50: mol_type = unassigned DNA; note = target_b35dfc7
  misc_feature 1..23: note = LF
  misc_feature 24..25: note = Core
  misc_feature 26..50: note = RF
cgcatggcatacatgcccggaagcggacattcaggaccgccgctatgagc

SEQ ID NO: 27417 - DNA, 50 bp, unidentified
  source 1..50: mol_type = unassigned DNA; note = target_b35f187
  misc_feature 1..21: note = LF
  misc_feature 22..25: note = Core
  misc_feature 26..50: note = RF
agccgggccaggtccgcgctggtcatgacgccagccccagcatccaggcc

SEQ ID NO: 27418 - DNA, 50 bp, unidentified
  source 1..50: mol_type = unassigned DNA; note = target_b3658db
  misc_feature 1..22: note = LF
  misc_feature 23..25: note = Core
  misc_feature 26..50: note = RF
gtcgcgttccgatatccgctactgacccagagcggacatcgagaggagag

SEQ ID NO: 27419 - DNA, 50 bp, unidentified
  source 1..50: mol_type = unassigned DNA; note = target_b36f033
  misc_feature 1..22: note = LF
  misc_feature 23..25: note = Core
  misc_feature 26..50: note = RF
ctggccgttgaagacggcccagagcggacatcgatgtgtcgcgcggcgaa

SEQ ID NO: 27420 - DNA, 50 bp, unidentified
  source 1..50: mol_type = unassigned DNA; note = target_b373cea
  misc_feature 1..23: note = LF
  misc_feature 24..25: note = Core
  misc_feature 26..50: note = RF
atacaagcagtgatgtccggacgtggcccatcgtgacctttcccgaagaa

SEQ ID NO: 27421 - DNA, 50 bp, unidentified
  source 1..50: mol_type = unassigned DNA; note = target_b375eb1
  misc_feature 1..23: note = LF
  misc_feature 24..25: note = Core
  misc_feature 26..50: note = RF
caaacgaaggagaagaccatgactgacatcacaaacatcccgctcaacaa

SEQ ID NO: 27422 - DNA, 50 bp, unidentified
  source 1..50: mol_type = unassigned DNA; note = target_b37cf40
  misc_feature 1..23: note = LF
  misc_feature 24..25: note = Core
  misc_feature 26..50: note = RF
catattccagaggcccgtgttcatggattccgggccttcgccctgcgggc

SEQ ID NO: 27423 - DNA, 50 bp, unidentified
  source 1..50: mol_type = unassigned DNA; note = target_b37f23c
  misc_feature 1..23: note = LF
  misc_feature 24..25: note = Core
  misc_feature 26..50: note = RF
tgttgtgcgtactcgacagcttcctgaaatccacacagacagccttttaa

SEQ ID NO: 27424 - DNA, 50 bp, unidentified
  source 1..50: mol_type = unassigned DNA; note = target_b383c3a
  misc_feature 1..23: note = LF
  misc_feature 24..25: note = Core
  misc_feature 26..50: note = RF
gctgcactgcatatgtccgcttttggcacaaagcggatatcgcgtcgcat

SEQ ID NO: 27425 - DNA, 50 bp, unidentified
  source 1..50: mol_type = unassigned DNA; note = target_b38c41b
  misc_feature 1..21: note = LF
  misc_feature 22..25: note = Core
  misc_feature 26..50: note = RF
tgccggcaggcaggcgctgctatccctaacgcatttttagccaaagcccg

SEQ ID NO: 27426 - DNA, 50 bp, unidentified
  source 1..50: mol_type = unassigned DNA; note = target_b3909d7
  misc_feature 1..24: note = LF
  misc_feature 25: note = Core
  misc_feature 26..50: note = RF
acaaagcctcctttattgtataacgcccaattaaggggtgaacaacgcct

SEQ ID NO: 27427 - DNA, 50 bp, unidentified
  source 1..50: mol_type = unassigned DNA; note = target_b393082
  misc_feature 1..23: note = LF
  misc_feature 24..25: note = Core
  misc_feature 26..50: note = RF
gctgtgtctcatctctggtcctcctttcgctcactggattggatccgtgg

SEQ ID NO: 27428 - DNA, 50 bp, unidentified
  source 1..50: mol_type = unassigned DNA; note = target_b39c6c4
  misc_feature 1..24: note = LF
  misc_feature 25: note = Core
  misc_feature 26..50: note = RF
gtaccaagcaattatttttacacgttgttgggtgtagtgctttattcagt

SEQ ID NO: 27429 - DNA, 50 bp, unidentified
  source 1..50: mol_type = unassigned DNA; note = target_b3aee1c
  misc_feature 1..23: note = LF
  misc_feature 24..25: note = Core
  misc_feature 26..50: note = RF
gaagcccgcgtgttgcttgggcgtgtcgcactgggcgaaaacccggctga

SEQ ID NO: 27430 - DNA, 50 bp, unidentified
  source 1..50: mol_type = unassigned DNA; note = target_b3b3781
  misc_feature 1..22: note = LF
  misc_feature 23..25: note = Core
  misc_feature 26..50: note = RF
tccttctaaaacaaaagcccccgttttgtttcagtaaagtcatccgttta

SEQ ID NO: 27431 - DNA, 50 bp, unidentified
  source 1..50: mol_type = unassigned DNA; note = target_b3b7ce2
  misc_feature 1..24: note = LF
  misc_feature 25: note = Core
  misc_feature 26..50: note = RF
cgcatcggcgtctcctcaggtaagcgtccgatggcaagcatgaaccggaa

SEQ ID NO: 27432 - DNA, 50 bp, unidentified
  source 1..50: mol_type = unassigned DNA; note = target_b3b80b6
  misc_feature 1..24: note = LF
  misc_feature 25: note = Core
  misc_feature 26..50: note = RF
caaactatttattccccacaaaaaatactcggatgaacctttgaagaaaa

SEQ ID NO: 27433 - DNA, 50 bp, unidentified
  source 1..50: mol_type = unassigned DNA; note = target_b3bc951
  misc_feature 1..23: note = LF
  misc_feature 24..25: note = Core
  misc_feature 26..50: note = RF
ttcctggacgaccccgagctcgtctgagccggcctgcgcgaccgctctcc

SEQ ID NO: 27434 - DNA, 50 bp, unidentified
  source 1..50: mol_type = unassigned DNA; note = target_b3e7ff6
  misc_feature 1..24: note = LF
  misc_feature 25: note = Core
  misc_feature 26..50: note = RF
gattccgagcgaaaatcttccaacttccggttggcgacaatccgtccaga

SEQ ID NO: 27435 - DNA, 50 bp, unidentified
  source 1..50: mol_type = unassigned DNA; note = target_b3e826f
  misc_feature 1..21: note = LF
  misc_feature 22..25: note = Core
  misc_feature 26..50: note = RF
atgtcagccgctacgtcaacgctcatgacttaacccgtccccattcccgt

SEQ ID NO: 27436 - DNA, 50 bp, unidentified
  source 1..50: mol_type = unassigned DNA; note = target_b3f434f
  misc_feature 1..22: note = LF
  misc_feature 23..25: note = Core
  misc_feature 26..50: note = RF
tccaccatcaaaagcacgccacctaggcgcaatgagcgatggatattcgc

SEQ ID NO: 27437 - DNA, 50 bp, unidentified
  source 1..50: mol_type = unassigned DNA; note = target_b3fb068
  misc_feature 1..23: note = LF
  misc_feature 24..25: note = Core
  misc_feature 26..50: note = RF
gaccgccgaaggcggcttgaccttgacggcgagcacgccgatggcagcgc

SEQ ID NO: 27438 - DNA, 50 bp, unidentified
  source 1..50: mol_type = unassigned DNA; note = target_b3fee31
  misc_feature 1..23: note = LF
  misc_feature 24..25: note = Core
  misc_feature 26..50: note = RF
ggatgtaagaggcgacatcccccctacggtcttgcgagatcgatgggtcg

SEQ ID NO: 27439 - DNA, 50 bp, unidentified
  source 1..50: mol_type = unassigned DNA; note = target_b405d33
  misc_feature 1..23: note = LF
  misc_feature 24..25: note = Core
  misc_feature 26..50: note = RF
cgcaggcgatgaatgtccgctattggcgcaaagcggacatatagcttgtt

SEQ ID NO: 27440 - DNA, 50 bp, unidentified
  source 1..50: mol_type = unassigned DNA; note = target_b40a76d
  misc_feature 1..24: note = LF
  misc_feature 25: note = Core
  misc_feature 26..50: note = RF
tcaatggcggcttcgggtcgaggctgtgtaaaaacgtaaaatcatgtctc

SEQ ID NO: 27441 - DNA, 50 bp, unidentified
  source 1..50: mol_type = unassigned DNA; note = target_b40cec8
  misc_feature 1..22: note = LF
  misc_feature 23..25: note = Core
  misc_feature 26..50: note = RF
agcctcctctcgaaagccatcttgaatcatgcttcagctgatttgggaat

SEQ ID NO: 27442 - DNA, 50 bp, unidentified
  source 1..50: mol_type = unassigned DNA; note = target_b4320af
  misc_feature 1..24: note = LF
  misc_feature 25: note = Core
  misc_feature 26..50: note = RF
ccttgactgtatcgtcggctttgttgaataaatcgaactttcaggagatg

SEQ ID NO: 27443 - DNA, 50 bp, unidentified
  source 1..50: mol_type = unassigned DNA; note = target_b43390e
  misc_feature 1..23: note = LF
  misc_feature 24..25: note = Core
  misc_feature 26..50: note = RF
attggggccggtcagcgttcccccttttcgcgcggaccgcggcggcgtcc

SEQ ID NO: 27444 - DNA, 50 bp, unidentified
  source 1..50: mol_type = unassigned DNA; note = target_b4504e4
  misc_feature 1..24: note = LF
  misc_feature 25: note = Core
  misc_feature 26..50: note = RF
taggggataggcgaaagagccagtttccgacacagccctaagacttctcg

SEQ ID NO: 27445 - DNA, 50 bp, unidentified
  source 1..50: mol_type = unassigned DNA; note = target_b45b316
  misc_feature 1..23: note = LF
  misc_feature 24..25: note = Core
  misc_feature 26..50: note = RF
gatcgctattaaccccctccttcctgcaaagcttaaatccgctatcagat

SEQ ID NO: 27446 - DNA, 50 bp, unidentified
  source 1..50: mol_type = unassigned DNA; note = target_b4612e1
  misc_feature 1..21: note = LF
  misc_feature 22..25: note = Core
  misc_feature 26..50: note = RF
acgacgagggacagattgacggtcatgcggagaccgcctcctctgtcttg

SEQ ID NO: 27447 - DNA, 50 bp, unidentified
  source 1..50: mol_type = unassigned DNA; note = target_b46f866
  misc_feature 1..22: note = LF
  misc_feature 23..25: note = Core
  misc_feature 26..50: note = RF
ttcttattgaactaacctgcccgtttagttgaataagaaaacgcgatccc

SEQ ID NO: 27448 - DNA, 50 bp, unidentified
  source 1..50: mol_type = unassigned DNA; note = target_b474fd8
  misc_feature 1..24: note = LF
  misc_feature 25: note = Core
  misc_feature 26..50: note = RF
aatgtcccctgggcaccgtcgccccaccccccgcagcacggcggctggcg

SEQ ID NO: 27449 - DNA, 50 bp, unidentified
  source 1..50: mol_type = unassigned DNA; note = target_b4786de
  misc_feature 1..24: note = LF
  misc_feature 25: note = Core
  misc_feature 26..50: note = RF
gtttctttttcatgtactcgttctcttaaataagtatttggtatttgttc

SEQ ID NO: 27450 - DNA, 50 bp, unidentified
  source 1..50: mol_type = unassigned DNA; note = target_b484606
  misc_feature 1..23: note = LF
  misc_feature 24..25: note = Core
  misc_feature 26..50: note = RF
cctcaataacctcgtaacactgcccccctcaccacttaaccaggtaccaa

SEQ ID NO: 27451 - DNA, 50 bp, unidentified
  source 1..50: mol_type = unassigned DNA; note = target_b48a397
  misc_feature 1..23: note = LF
  misc_feature 24..25: note = Core
  misc_feature 26..50: note = RF
gcagccgcataacgccgcagctcagctgcgggcgagtcaaataaaagcaa

SEQ ID NO: 27452 - DNA, 50 bp, unidentified
  source 1..50: mol_type = unassigned DNA; note = target_b48ca7a
  misc_feature 1..23: note = LF
  misc_feature 24..25: note = Core
  misc_feature 26..50: note = RF
gttttaacggtttccttcgcgctctccccggtgaccgggcttgtttgcca

SEQ ID NO: 27453 - DNA, 50 bp, unidentified
  source 1..50: mol_type = unassigned DNA; note = target_b48f764
  misc_feature 1..24: note = LF
  misc_feature 25: note = Core
  misc_feature 26..50: note = RF
tttgagatgcggcttgagaatgttttttttgagcgtgcgtccgatcgtgt

SEQ ID NO: 27454 - DNA, 50 bp, unidentified
  source 1..50: mol_type = unassigned DNA; note = target_b493529
  misc_feature 1..23: note = LF
  misc_feature 24..25: note = Core
  misc_feature 26..50: note = RF
ggcgaggctttccgcccccttaacccccatttttgtaattcttatcacat

SEQ ID NO: 27455 - DNA, 50 bp, unidentified
  source 1..50: mol_type = unassigned DNA; note = target_b49f581
  misc_feature 1..20: note = LF
  misc_feature 21..25: note = Core
  misc_feature 26..50: note = RF
ttttagaaaaatgtagcgtctttttgtgcaaaaaaagagcaacaatacag

SEQ ID NO: 27456 - DNA, 50 bp, unidentified
  source 1..50: mol_type = unassigned DNA; note = target_b4a1af9
  misc_feature 1..23: note = LF
  misc_feature 24..25: note = Core
  misc_feature 26..50: note = RF
ggctgttctcggcacggttattgagccccttgtgtgaccaatgatcaagg

SEQ ID NO: 27457 - DNA, 50 bp, unidentified
  source 1..50: mol_type = unassigned DNA; note = target_b4a79fb
  misc_feature 1..24: note = LF
  misc_feature 25: note = Core
  misc_feature 26..50: note = RF
gccggcataggacgcggtggcgagagcagcacaaggccgcgggcgcggcg

SEQ ID NO: 27458 - DNA, 50 bp, unidentified
  source 1..50: mol_type = unassigned DNA; note = target_b4a9eba
  misc_feature 1..23: note = LF
  misc_feature 24..25: note = Core
  misc_feature 26..50: note = RF
aacggcgctaatgtgcaatgtgcaggttttcggccgccgggattacggcc

SEQ ID NO: 27459 - DNA, 50 bp, unidentified
  source 1..50: mol_type = unassigned DNA; note = target_b4b544c
  misc_feature 1..23: note = LF
  misc_feature 24..25: note = Core
  misc_feature 26..50: note = RF
cgacccggccgagcggtcagcttgttccttatggtcggacccagtcgtgt

SEQ ID NO: 27460 - DNA, 50 bp, unidentified
  source 1..50: mol_type = unassigned DNA; note = target_b4bb2e0
  misc_feature 1..23: note = LF
  misc_feature 24..25: note = Core
  misc_feature 26..50: note = RF
tgaatcactttttacagacattttaatatcctccatatttttatttaata

SEQ ID NO: 27461 - DNA, 50 bp, unidentified
  source 1..50: mol_type = unassigned DNA; note = target_b4bfad0
  misc_feature 1..24: note = LF
  misc_feature 25: note = Core
  misc_feature 26..50: note = RF
aggatcgcttcccagatcgcctgacaggacggggacagccgtccctccag

SEQ ID NO: 27462 - DNA, 50 bp, unidentified
  source 1..50: mol_type = unassigned DNA; note = target_b4ce6b2
  misc_feature 1..23: note = LF
  misc_feature 24..25: note = Core
  misc_feature 26..50: note = RF
ggctgagggcgcgttttacagggatgttacctcgcgcccgacccggtagc

SEQ ID NO: 27463 - DNA, 50 bp, unidentified
  source 1..50: mol_type = unassigned DNA; note = target_b4cf279
  misc_feature 1..22: note = LF
  misc_feature 23..25: note = Core
  misc_feature 26..50: note = RF
aggttaaatatgaaacgtcaacagaccctagcccttggaaggggagaagt

SEQ ID NO: 27464 - DNA, 50 bp, unidentified
  source 1..50: mol_type = unassigned DNA; note = target_b4d00ee
  misc_feature 1..24: note = LF
  misc_feature 25: note = Core
  misc_feature 26..50: note = RF
gtctgttcgcccgtcagctggggttttgagcgtaatcgggatgttgcaat

SEQ ID NO: 27465 - DNA, 50 bp, unidentified
  source 1..50: mol_type = unassigned DNA; note = target_b4dc62d
  misc_feature 1..22: note = LF
  misc_feature 23..25: note = Core
  misc_feature 26..50: note = RF
agaaacaatgtagtagctttatagaaatgtcgtgttccagccaggttcaa

SEQ ID NO: 27466 - DNA, 50 bp, unidentified
  source 1..50: mol_type = unassigned DNA; note = target_b4e018c
  misc_feature 1..24: note = LF
  misc_feature 25: note = Core
  misc_feature 26..50: note = RF
gtcgccactgtcgtgggccagtttttttgaacgcctcgatggcccccgcc

SEQ ID NO: 27467 - DNA, 50 bp, unidentified
  source 1..50: mol_type = unassigned DNA; note = target_b4e5199
  misc_feature 1..22: note = LF
  misc_feature 23..25: note = Core
  misc_feature 26..50: note = RF
aaaagtcgcataattgcggctttttttatttatcaaaatctcgagagtga

SEQ ID NO: 27468 - DNA, 50 bp, unidentified
  source 1..50: mol_type = unassigned DNA; note = target_b4ec7fb
  misc_feature 1..22: note = LF
  misc_feature 23..25: note = Core
  misc_feature 26..50: note = RF
gtagttcttttatcaacaacggtacgtattcagtcgcttttatcatgttt

SEQ ID NO: 27469 - DNA, 50 bp, unidentified
  source 1..50: mol_type = unassigned DNA; note = target_b4ec90e
  misc_feature 1..24: note = LF
  misc_feature 25: note = Core
  misc_feature 26..50: note = RF
ttcgtcaaagtgcgcggaccgcggcagatccgggtgttccgatcagtcgc

SEQ ID NO: 27470 - DNA, 50 bp, unidentified
  source 1..50: mol_type = unassigned DNA; note = target_b4fdd7f
  misc_feature 1..24: note = LF
  misc_feature 25: note = Core
  misc_feature 26..50: note = RF
gggccagccgggacactgtgtaggcgctcattgaacacctccttttcctc

SEQ ID NO: 27471 - DNA, 50 bp, unidentified
  source 1..50: mol_type = unassigned DNA; note = target_b51574b
  misc_feature 1..23: note = LF
  misc_feature 24..25: note = Core
  misc_feature 26..50: note = RF
gctcgggccggtcaaaggtacccctttttcgcccgaacactcgccgcatc

SEQ ID NO: 27472 - DNA, 50 bp, unidentified
  source 1..50: mol_type = unassigned DNA; note = target_b51eb84
  misc_feature 1..23: note = LF
  misc_feature 24..25: note = Core
  misc_feature 26..50: note = RF
ctccggtacgacaagcataccggagtgcggtggataagttactgcgggct

SEQ ID NO: 27473 - DNA, 50 bp, unidentified
  source 1..50: mol_type = unassigned DNA; note = target_b5201d8
  misc_feature 1..23: note = LF
  misc_feature 24..25: note = Core
  misc_feature 26..50: note = RF
gctttaaaaatcatatctttctcctccttataagaatgtatatagtaccg

SEQ ID NO: 27474 - DNA, 50 bp, unidentified
  source 1..50: mol_type = unassigned DNA; note = target_b526b70
  misc_feature 1..23: note = LF
  misc_feature 24..25: note = Core
  misc_feature 26..50: note = RF
gcggacgcggaatagcggctttatgggtctacggcctagatcagcacgcg

SEQ ID NO: 27475 - DNA, 50 bp, unidentified
  source 1..50: mol_type = unassigned DNA; note = target_b52b3a0
  misc_feature 1..23: note = LF
  misc_feature 24..25: note = Core
  misc_feature 26..50: note = RF
ccgcgccgaaggtccgagttgggtggagagctgtcattgagctttcgctc

SEQ ID NO: 27476 - DNA, 50 bp, unidentified
  source 1..50: mol_type = unassigned DNA; note = target_b52d2ef
  misc_feature 1..23: note = LF
  misc_feature 24..25: note = Core
  misc_feature 26..50: note = RF
tcgaagccctcgtccgcaatcgcctcaaacgactgcagtaccgctccgac

SEQ ID NO: 27477 - DNA, 50 bp, unidentified
  source 1..50: mol_type = unassigned DNA; note = target_b534731
  misc_feature 1..23: note = LF
  misc_feature 24..25: note = Core
  misc_feature 26..50: note = RF
gcccaaggcgaatgaattcgcccctacaaggaaatcagggaaattttttt

SEQ ID NO: 27478 - DNA, 50 bp, unidentified
  source 1..50: mol_type = unassigned DNA; note = target_b538910
  misc_feature 1..22: note = LF
  misc_feature 23..25: note = Core
  misc_feature 26..50: note = RF
atgaaagaaactcataatgtacctccaattttcattttgaacatgaaaaa

SEQ ID NO: 27479 - DNA, 50 bp, unidentified
  source 1..50: mol_type = unassigned DNA; note = target_b53e6b5
  misc_feature 1..23: note = LF
  misc_feature 24..25: note = Core
  misc_feature 26..50: note = RF
ctgtggccagttttacttgaccactacaattcttacaggcaccatactag

SEQ ID NO: 27480 - DNA, 50 bp, unidentified
  source 1..50: mol_type = unassigned DNA; note = target_b54815e
  misc_feature 1..23: note = LF
  misc_feature 24..25: note = Core
  misc_feature 26..50: note = RF
ccaataagcaacaccgaaatccgtaggagcgagcttgcctcgcgatcttt

SEQ ID NO: 27481 - DNA, 50 bp, unidentified
  source 1..50: mol_type = unassigned DNA; note = target_b54ee21
  misc_feature 1..23: note = LF
  misc_feature 24..25: note = Core
  misc_feature 26..50: note = RF
ggctgtcggcgattatagtacgtagggtgggcaaagcgaagcgtgcccac

SEQ ID NO: 27482 - DNA, 50 bp, unidentified
  source 1..50: mol_type = unassigned DNA; note = target_b554190
  misc_feature 1..23: note = LF
  misc_feature 24..25: note = Core
  misc_feature 26..50: note = RF
cggcacccggccttccctgcgccctcttggattttagagggtcgcgagac

SEQ ID NO: 27483 - DNA, 50 bp, unidentified
  source 1..50: mol_type = unassigned DNA; note = target_b556a80
  misc_feature 1..24: note = LF
  misc_feature 25: note = Core
  misc_feature 26..50: note = RF
gcgcgggtgaagtactcatttcggcatttgaggtacacccggctcacgaa

SEQ ID NO: 27484 - DNA, 50 bp, unidentified
  source 1..50: mol_type = unassigned DNA; note = target_b55b17b
  misc_feature 1..23: note = LF
  misc_feature 24..25: note = Core
  misc_feature 26..50: note = RF
agattctctcaaacgcattgtgctaaatttgtgctaaacgtccttcccgc

SEQ ID NO: 27485 - DNA, 50 bp, unidentified
  source 1..50: mol_type = unassigned DNA; note = target_b562b94
  misc_feature 1..23: note = LF
  misc_feature 24..25: note = Core
  misc_feature 26..50: note = RF
tagatgcactcaactcttacttcctgtagtcagtaatattgtcgtctcct

SEQ ID NO: 27486 - DNA, 50 bp, unidentified
  source 1..50: mol_type = unassigned DNA; note = target_b571f61
  misc_feature 1..24: note = LF
  misc_feature 25: note = Core
  misc_feature 26..50: note = RF
gtttgtaagtacagttaaaaaataagggagtgtttatctatgacaataat

SEQ ID NO: 27487 - DNA, 50 bp, unidentified
  source 1..50: mol_type = unassigned DNA; note = target_b57380e
  misc_feature 1..23: note = LF
  misc_feature 24..25: note = Core
  misc_feature 26..50: note = RF
tgaattttcaggtgccatgggattctccttgatcttcggcagccaggaac

SEQ ID NO: 27488 - DNA, 50 bp, unidentified
  source 1..50: mol_type = unassigned DNA; note = target_b5788e1
  misc_feature 1..24: note = LF
  misc_feature 25: note = Core
  misc_feature 26..50: note = RF
agaatcaccttgccaaaacgggggcatccacacacgacccgccgcgatcc

SEQ ID NO: 27489 - DNA, 50 bp, unidentified
  source 1..50: mol_type = unassigned DNA; note = target_b583aee
  misc_feature 1..22: note = LF
  misc_feature 23..25: note = Core
  misc_feature 26..50: note = RF
tttggcaaaaaacaaagaaaaaagttaatatgcgaaaactgagcgaacat

SEQ ID NO: 27490 - DNA, 50 bp, unidentified
  source 1..50: mol_type = unassigned DNA; note = target_b58c661
  misc_feature 1..23: note = LF
  misc_feature 24..25: note = Core
  misc_feature 26..50: note = RF
gtctgagcctgtcaaagacaggcttttgccgcccatttcgcactcagcac

SEQ ID NO: 27491 - DNA, 50 bp, unidentified
  source 1..50: mol_type = unassigned DNA; note = target_b58d0a5
  misc_feature 1..23: note = LF
  misc_feature 24..25: note = Core
  misc_feature 26..50: note = RF
atatctttttcatatatattttcctcgtataaaataatttataagattat

SEQ ID NO: 27492 - DNA, 50 bp, unidentified
  source 1..50: mol_type = unassigned DNA; note = target_b598958
  misc_feature 1..23: note = LF
  misc_feature 24..25: note = Core
  misc_feature 26..50: note = RF
catgctgcgcatgctcgcacctcaggatgaggagaatggagttggtatcc

SEQ ID NO: 27493 - DNA, 50 bp, unidentified
  source 1..50: mol_type = unassigned DNA; note = target_b5a1577
  misc_feature 1..24: note = LF
  misc_feature 25: note = Core
  misc_feature 26..50: note = RF
tttgactagtcatttaagaacgtccccaatgactagttcccaatgactag

SEQ ID NO: 27494 - DNA, 50 bp, unidentified
  source 1..50: mol_type = unassigned DNA; note = target_b5a1f57
  misc_feature 1..23: note = LF
  misc_feature 24..25: note = Core
  misc_feature 26..50: note = RF
aataatattgcccaaggggactccttcggagcagggcaagctgaacatgt

SEQ ID NO: 27495 - DNA, 50 bp, unidentified
  source 1..50: mol_type = unassigned DNA; note = target_b5a2607
  misc_feature 1..23: note = LF
  misc_feature 24..25: note = Core
  misc_feature 26..50: note = RF
ttttgtgttcaaaatgaccaggcctggccatttttttggctttattgcgc

SEQ ID NO: 27496 - DNA, 50 bp, unidentified
  source 1..50: mol_type = unassigned DNA; note = target_b5ac3fe
  misc_feature 1..24: note = LF
  misc_feature 25: note = Core
  misc_feature 26..50: note = RF
ccgtctcgcttgccagcaaagttttttttgaaggtgaggccttggcggcg

SEQ ID NO: 27497 - DNA, 50 bp, unidentified
  source 1..50: mol_type = unassigned DNA; note = target_b5ae6cc
  misc_feature 1..22: note = LF
  misc_feature 23..25: note = Core
  misc_feature 26..50: note = RF
ctttgcccctgaaaggaagtcctttcttttactgtgatacagaacgaatg

SEQ ID NO: 27498 - DNA, 50 bp, unidentified
  source 1..50: mol_type = unassigned DNA; note = target_b5c3e15
  misc_feature 1..23: note = LF
  misc_feature 24..25: note = Core
  misc_feature 26..50: note = RF
gacgattgcgacaaattctccttgtctttcggtaccgaaaaactaacttt

SEQ ID NO: 27499 - DNA, 50 bp, unidentified
  source 1..50: mol_type = unassigned DNA; note = target_b5c4b29
  misc_feature 1..23: note = LF
  misc_feature 24..25: note = Core
  misc_feature 26..50: note = RF
agaaagcgagtgacggactgaggtggtgccgccttcttggatagtttggc

SEQ ID NO: 27500 - DNA, 50 bp, unidentified
  source 1..50: mol_type = unassigned DNA; note = target_b5cc31b
  misc_feature 1..24: note = LF
  misc_feature 25: note = Core
  misc_feature 26..50: note = RF
catgaaaacgctttgatgggtcagttaacctttgtaagacaacttgcacc

SEQ ID NO: 27501 - DNA, 50 bp, unidentified
  source 1..50: mol_type = unassigned DNA; note = target_b5ce635
  misc_feature 1..23: note = LF
  misc_feature 24..25: note = Core
  misc_feature 26..50: note = RF
gccttgttacacaaccgccctgcctactcgagtccatcgcgagcgactgt

SEQ ID NO: 27502 - DNA, 50 bp, unidentified
  source 1..50: mol_type = unassigned DNA; note = target_b5d5232
  misc_feature 1..23: note = LF
  misc_feature 24..25: note = Core
  misc_feature 26..50: note = RF
gatttgtttagggtgcatagttcctccttctttctttggatttgtcagag

SEQ ID NO: 27503 - DNA, 50 bp, unidentified
  source 1..50: mol_type = unassigned DNA; note = target_b5dba49
  misc_feature 1..24: note = LF
  misc_feature 25: note = Core
  misc_feature 26..50: note = RF
aggcgcttctccttgccctcaaagcggacataagggcctacgacccagaa

SEQ ID NO: 27504 - DNA, 50 bp, unidentified
  source 1..50: mol_type = unassigned DNA; note = target_b5f051a
  misc_feature 1..23: note = LF
  misc_feature 24..25: note = Core
  misc_feature 26..50: note = RF
aaccaaggcgcgcacggcacgccctacagaggatagttccggacagtgat

SEQ ID NO: 27505 - DNA, 50 bp, unidentified
  source 1..50: mol_type = unassigned DNA; note = target_b5f1653
  misc_feature 1..23: note = LF
  misc_feature 24..25: note = Core
  misc_feature 26..50: note = RF
gcggccttcgcccagagggtcggctaggagcgggtcgagatcggaggggt

SEQ ID NO: 27506 - DNA, 50 bp, unidentified
  source 1..50: mol_type = unassigned DNA; note = target_b5f9c51
  misc_feature 1..22: note = LF
  misc_feature 23..25: note = Core
  misc_feature 26..50: note = RF
cccgtgttcggtccgccgcttttgacccgaagccgtcataatcgtcggtg

SEQ ID NO: 27507 - DNA, 50 bp, unidentified
  source 1..50: mol_type = unassigned DNA; note = target_b5fb022
  misc_feature 1..23: note = LF
  misc_feature 24..25: note = Core
  misc_feature 26..50: note = RF
caccgctttcgcgagcaagcccgctcccacaggggggtggtgataggtcc

SEQ ID NO: 27508 - DNA, 50 bp, unidentified
  source 1..50: mol_type = unassigned DNA; note = target_b5ff37b
  misc_feature 1..23: note = LF
  misc_feature 24..25: note = Core
  misc_feature 26..50: note = RF
ttgggaagtccgcgcccggcgtctgagggattttacgacgagccgactca

SEQ ID NO: 27509 - DNA, 50 bp, unidentified
  source 1..50: mol_type = unassigned DNA; note = target_b6037fa
  misc_feature 1..24: note = LF
  misc_feature 25: note = Core
  misc_feature 26..50: note = RF
gtccctccccggactacccgacggcggccctgatacctcgcgcaaggttg

SEQ ID NO: 27510 - DNA, 50 bp, unidentified
  source 1..50: mol_type = unassigned DNA; note = target_b606d21
  misc_feature 1..24: note = LF
  misc_feature 25: note = Core
  misc_feature 26..50: note = RF
gtcaatcgataaccgaggtaggggcgaattattattcgcccgcacggcat

SEQ ID NO: 27511 - DNA, 50 bp, unidentified
  source 1..50: mol_type = unassigned DNA; note = target_b6094f1
  misc_feature 1..24: note = LF
  misc_feature 25: note = Core
  misc_feature 26..50: note = RF
gcgaggtattggaatgcgctgctgttctgcatgggtctgccctccttggg

SEQ ID NO: 27512 - DNA, 50 bp, unidentified
  source 1..50: mol_type = unassigned DNA; note = target_b614316
  misc_feature 1..22: note = LF
  misc_feature 23..25: note = Core
  misc_feature 26..50: note = RF
gacctgcgccatcggtcgaaaatgaccctggctgtgtggaaacgccgcgt

SEQ ID NO: 27513 - DNA, 50 bp, unidentified
  source 1..50: mol_type = unassigned DNA; note = target_b6143cb
  misc_feature 1..20: note = LF
  misc_feature 21..25: note = Core
  misc_feature 26..50: note = RF
gtgtcgagcggcacggtgaggtcctttctcgaagagcgcgctacgtgcgg

SEQ ID NO: 27514 - DNA, 50 bp, unidentified
  source 1..50: mol_type = unassigned DNA; note = target_b6155cd
  misc_feature 1..23: note = LF
  misc_feature 24..25: note = Core
  misc_feature 26..50: note = RF
attcaactctgtccgtagaccctagcactactttggcagattaagtggtg

SEQ ID NO: 27515 - DNA, 50 bp, unidentified; identical to SEQ ID NO: 20410
  source 1..50: mol_type = unassigned DNA; note = target_b61587d
  misc_feature 1..21: note = LF
  misc_feature 22..25: note = Core
  misc_feature 26..50: note = RF

SEQ ID NO: 27516 - DNA, 50 bp, unidentified
  source 1..50: mol_type = unassigned DNA; note = target_b615c59
  misc_feature 1..21: note = LF
  misc_feature 22..25: note = Core
  misc_feature 26..50: note = RF
attttatttcgttcataattttctcctaataatcttttttcctaataatc

SEQ ID NO: 27517 - DNA, 50 bp, unidentified
  source 1..50: mol_type = unassigned DNA; note = target_b6163a8
  misc_feature 1..24: note = LF
  misc_feature 25: note = Core
  misc_feature 26..50: note = RF
tgaccgtctgctatccagcgaaagcggacattaggcttatcagtaattag

SEQ ID NO: 27518 - DNA, 50 bp, unidentified
  source 1..50: mol_type = unassigned DNA; note = target_b61bd4e
  misc_feature 1..23: note = LF
  misc_feature 24..25: note = Core
  misc_feature 26..50: note = RF
aggtcaaccggtgggcgagggcctgtcgcaaactcgggtccaggccgcag

SEQ ID NO: 27519 - DNA, 50 bp, unidentified
  source 1..50: mol_type = unassigned DNA; note = target_b61f59b
  misc_feature 1..24: note = LF
  misc_feature 25: note = Core
  misc_feature 26..50: note = RF
gtccgcgtcgagcaagagttacatgtggtgctaccgcagcgcccaggact

SEQ ID NO: 27520 - DNA, 50 bp, unidentified
  source 1..50: mol_type = unassigned DNA; note = target_b62ad69
  misc_feature 1..20: note = LF
  misc_feature 21..25: note = Core
  misc_feature 26..50: note = RF
ggaaggcgagctggcctttatccatatatggagtgtatgccgaatttgtc

SEQ ID NO: 27521 - DNA, 50 bp, unidentified
  source 1..50: mol_type = unassigned DNA; note = target_b62c1c1
  misc_feature 1..23: note = LF
  misc_feature 24..25: note = Core
  misc_feature 26..50: note = RF
tgaggttgctgtgaatcggtggactcaactcaccctgacaggcaggggcc

SEQ ID NO: 27522 - DNA, 50 bp, unidentified
  source 1..50: mol_type = unassigned DNA; note = target_b630de7
  misc_feature 1..24: note = LF
  misc_feature 25: note = Core
  misc_feature 26..50: note = RF
ccagcaccatgcttgacaccctttcagggtatctctccgttatttcccga

SEQ ID NO: 27523 - DNA, 50 bp, unidentified
  source 1..50: mol_type = unassigned DNA; note = target_b6372a2
  misc_feature 1..24: note = LF
  misc_feature 25: note = Core
  misc_feature 26..50: note = RF
gcagcgtcgtcacacgtcttcacccaacatcaccgctggtagtagtgtca

SEQ ID NO: 27524 - DNA, 50 bp, unidentified
  source 1..50: mol_type = unassigned DNA; note = target_b63a7be
  misc_feature 1..23: note = LF
  misc_feature 24..25: note = Core
  misc_feature 26..50: note = RF
gagtttagcgctgtgcataagtcctagtcaagcatatcttcgctatgccc

SEQ ID NO: 27525 - DNA, 50 bp, unidentified
  source 1..50: mol_type = unassigned DNA; note = target_b63caae
  misc_feature 1..23: note = LF
  misc_feature 24..25: note = Core
  misc_feature 26..50: note = RF
tcaaggcgcagttttttattaataggttgttcccttatttttatcatgga

SEQ ID NO: 27526 - DNA, 50 bp, unidentified
  source 1..50: mol_type = unassigned DNA; note = target_b63e24e
  misc_feature 1..24: note = LF
  misc_feature 25: note = Core
  misc_feature 26..50: note = RF
gattagagctattggtcatacccgttgttgtgcccagttacattaaacga

SEQ ID NO: 27527 - DNA, 50 bp, unidentified
  source 1..50: mol_type = unassigned DNA; note = target_b6571b6
  misc_feature 1..23: note = LF
  misc_feature 24..25: note = Core
  misc_feature 26..50: note = RF
ggcgtccacagatgcccctttaatgttcaggggcctattccctatgggat

SEQ ID NO: 27528 - DNA, 50 bp, unidentified
  source 1..50: mol_type = unassigned DNA; note = target_b65ecdb
  misc_feature 1..24: note = LF
  misc_feature 25: note = Core
  misc_feature 26..50: note = RF
aaggcggtctgctcaccgtcaatctgggtactggccaaggctattctgtg

SEQ ID NO: 27529 - DNA, 50 bp, unidentified
  source 1..50: mol_type = unassigned DNA; note = target_b66030c
  misc_feature 1..22: note = LF
  misc_feature 23..25: note = Core
  misc_feature 26..50: note = RF
attctctccttataccttgcgccttacgccttgtgcctcaaacctcttct

SEQ ID NO: 27530 - DNA, 50 bp, unidentified
  source 1..50: mol_type = unassigned DNA; note = target_b661377
  misc_feature 1..24: note = LF
  misc_feature 25: note = Core
  misc_feature 26..50: note = RF
tgggatgggacagcttatgtccgctgcgggtcaatcacgtcactttcctg

SEQ ID NO: 27531 - DNA, 50 bp, unidentified
  source 1..50: mol_type = unassigned DNA; note = target_b666bc8
  misc_feature 1..22: note = LF
  misc_feature 23..25: note = Core
  misc_feature 26..50: note = RF
tttaatacctccgcaaatcccgatttgtcaatataactatttctttctac

SEQ ID NO: 27532 - DNA, 50 bp, unidentified
  source 1..50: mol_type = unassigned DNA; note = target_b67f817
  misc_feature 1..23: note = LF
  misc_feature 24..25: note = Core
  misc_feature 26..50: note = RF
cccgcttggctatttgatggctctggtgcaaataagggagaactgggcat

SEQ ID NO: 27533 - DNA, 50 bp, unidentified
  source 1..50: mol_type = unassigned DNA; note = target_b6820b5
  misc_feature 1..23: note = LF
  misc_feature 24..25: note = Core
  misc_feature 26..50: note = RF
atgcaccgctttttcataataaccttgtatggccttaccattagtattat

SEQ ID NO: 27534 - DNA, 50 bp, unidentified
  source 1..50: mol_type = unassigned DNA; note = target_b685a81
  misc_feature 1..24: note = LF
  misc_feature 25: note = Core
  misc_feature 26..50: note = RF
gaccttgcctccgcgcaacgtaagcgtgcggcgattccatcctgagtttg

SEQ ID NO: 27535 - DNA, 50 bp, unidentified
  source 1..50: mol_type = unassigned DNA; note = target_b6863aa
  misc_feature 1..24: note = LF
  misc_feature 25: note = Core
  misc_feature 26..50: note = RF
aaaagcaagattcacgcctcaatatgccaggttcctgcaattcccacaac

SEQ ID NO: 27536 - DNA, 50 bp, unidentified
  source 1..50: mol_type = unassigned DNA; note = target_b689bc6
  misc_feature 1..23: note = LF
  misc_feature 24..25: note = Core
  misc_feature 26..50: note = RF
gatggagctgtagttggaacctcctttaagaaggacagagtattcgaaaa

SEQ ID NO: 27537 - DNA, 50 bp, unidentified
  source 1..50: mol_type = unassigned DNA; note = target_b68efc9
  misc_feature 1..23: note = LF
  misc_feature 24..25: note = Core
  misc_feature 26..50: note = RF
cgcgcttatgttccggccttcgccggaatgacggtagaggttactgacta

SEQ ID NO: 27538 - DNA, 50 bp, unidentified
  source 1..50: mol_type = unassigned DNA; note = target_b6937b9
  misc_feature 1..19: note = LF
  misc_feature 20..25: note = Core
  misc_feature 26..50: note = RF
ggttgtagtcgtgcatgaggtcctttcgactcacggaacgatgctggcgc

SEQ ID NO: 27539 - DNA, 50 bp, unidentified
  source 1..50: mol_type = unassigned DNA; note = target_b6a621b
  misc_feature 1..24: note = LF
  misc_feature 25: note = Core
  misc_feature 26..50: note = RF
ggttaatttgtaatgtcacataacgcctcgcatcagcggctgaggcgagc

SEQ ID NO: 27540 - DNA, 50 bp, unidentified
  source 1..50: mol_type = unassigned DNA; note = target_b6a71ae
  misc_feature 1..22: note = LF
  misc_feature 23..25: note = Core
  misc_feature 26..50: note = RF
tcgttgttgagctaacgggtgctttagtagaagatcatatttgttttatc

SEQ ID NO: 27541 - DNA, 50 bp, unidentified
  source 1..50: mol_type = unassigned DNA; note = target_b6a84e5
  misc_feature 1..23: note = LF
  misc_feature 24..25: note = Core
  misc_feature 26..50: note = RF
ggctcgcggcgaaacgcctcacatggggacttttcggtcaaggggtgatg

SEQ ID NO: 27542 - DNA, 50 bp, unidentified
  source 1..50: mol_type = unassigned DNA; note = target_b6a963f
  misc_feature 1..24: note = LF
  misc_feature 25: note = Core
  misc_feature 26..50: note = RF
ttttgaacttgccgcaaagacgactttgggggaaggtcgcgctagtttcc

SEQ ID NO: 27543 - DNA, 50 bp, unidentified
  source 1..50: mol_type = unassigned DNA; note = target_b6ab4a5
  misc_feature 1..23: note = LF
  misc_feature 24..25: note = Core
  misc_feature 26..50: note = RF
tcgtcacgggtttcttgctcatcttcgctccatgaaggctacgatgagcc

SEQ ID NO: 27544 - DNA, 50 bp, unidentified
  source 1..50: mol_type = unassigned DNA; note = target_b6c15c2
  misc_feature 1..21: note = LF
  misc_feature 22..25: note = Core
  misc_feature 26..50: note = RF
tctcttacatcattcataatatcacctcttttttattatacttggaactt

SEQ ID NO: 27545 - DNA, 50 bp, unidentified
  source 1..50: mol_type = unassigned DNA; note = target_b6c88bc
  misc_feature 1..23: note = LF
  misc_feature 24..25: note = Core
  misc_feature 26..50: note = RF
ctttcaccggttttgctccccaaagctgccggtccgctaccggtcagaat

SEQ ID NO: 27546 - DNA, 50 bp, unidentified
  source 1..50: mol_type = unassigned DNA; note = target_b6d064a
  misc_feature 1..24: note = LF
  misc_feature 25: note = Core
  misc_feature 26..50: note = RF
agtaaaaaaaataatactcactcctatttactaaaataataattactttt

SEQ ID NO: 27547 - DNA, 50 bp, unidentified
  source 1..50: mol_type = unassigned DNA; note = target_b6d9218
  misc_feature 1..23: note = LF
  misc_feature 24..25: note = Core
  misc_feature 26..50: note = RF
tcggcaaagttgggctcaaacctgacttgcggcggcgcgacagcccgata

SEQ ID NO: 27548 - DNA, 50 bp, unidentified
  source 1..50: mol_type = unassigned DNA; note = target_b6df760
  misc_feature 1..23: note = LF
  misc_feature 24..25: note = Core
  misc_feature 26..50: note = RF
gaacagagaaggtgaaactacacctctttttaattgatataggcttataa

SEQ ID NO: 27549 - DNA, 50 bp, unidentified
  source 1..50: mol_type = unassigned DNA; note = target_b6e3100
  misc_feature 1..24: note = LF
  misc_feature 25: note = Core
  misc_feature 26..50: note = RF
ccaacaccctcgcacgctcatcggcatgagtgggcgcctcaccgaacggc

SEQ ID NO: 27550 - DNA, 50 bp, unidentified
  source 1..50: mol_type = unassigned DNA; note = target_b6fd7c8
  misc_feature 1..23: note = LF
  misc_feature 24..25: note = Core
  misc_feature 26..50: note = RF
aacatttcatgttccataatttcctcctatccagaaccttcccgttttca

SEQ ID NO: 27551 - DNA, 50 bp, unidentified
  source 1..50: mol_type = unassigned DNA; note = target_b6fed16
  misc_feature 1..23: note = LF
  misc_feature 24..25: note = Core
  misc_feature 26..50: note = RF
gctggttgccattggagcgccattggtccgagcgacaatggcgacgaggc

SEQ ID NO: 27552 - DNA, 50 bp, unidentified
  source 1..50: mol_type = unassigned DNA; note = target_b7148d4
  misc_feature 1..23: note = LF
  misc_feature 24..25: note = Core
  misc_feature 26..50: note = RF
gctcgtcgcggctgaagccgctcctacagggacttgcggcgagccagctg

SEQ ID NO: 27553 - DNA, 50 bp, unidentified
  source 1..50: mol_type = unassigned DNA; note = target_b71d62b
  misc_feature 1..22: note = LF
  misc_feature 23..25: note = Core
  misc_feature 26..50: note = RF
ttcttattaaactaaagcacccgtttagttgaagaaggtaggtcatagtt

SEQ ID NO: 27554 - DNA, 50 bp, unidentified
  source 1..50: mol_type = unassigned DNA; note = target_b721984
  misc_feature 1..23: note = LF
  misc_feature 24..25: note = Core
  misc_feature 26..50: note = RF
atttcatttataattttattataactccttacttaacttatttcaactta

SEQ ID NO: 27555 - DNA, 50 bp, unidentified
  source 1..50: mol_type = unassigned DNA; note = target_b728bc4
  misc_feature 1..21: note = LF
  misc_feature 22..25: note = Core
  misc_feature 26..50: note = RF
gacccccatgatcaggtcgccttcccagtgtgcggcctcggcgggccgct

SEQ ID NO: 27556 - DNA, 50 bp, unidentified
  source 1..50: mol_type = unassigned DNA; note = target_b72bb39
  misc_feature 1..23: note = LF
  misc_feature 24..25: note = Core
  misc_feature 26..50: note = RF
gcgctttgtgatagctgtcgattagttggtttgaagcacaaggtgtgcat

SEQ ID NO: 27557 - DNA, 50 bp, unidentified
  source 1..50: mol_type = unassigned DNA; note = target_b733294
  misc_feature 1..23: note = LF
  misc_feature 24..25: note = Core
  misc_feature 26..50: note = RF
cggccggaaaggcgccgaccgccctacggtcagtgcggatgcaacggttt

SEQ ID NO: 27558 - DNA, 50 bp, unidentified
  source 1..50: mol_type = unassigned DNA; note = target_b73753b
  misc_feature 1..22: note = LF
  misc_feature 23..25: note = Core
  misc_feature 26..50: note = RF
aacagtatcccagcaaattccgattcacaaacccattataccgaataccc

SEQ ID NO: 27559 - DNA, 50 bp, unidentified
  source 1..50: mol_type = unassigned DNA; note = target_b73e2b6
  misc_feature 1..24: note = LF
  misc_feature 25: note = Core
  misc_feature 26..50: note = RF
ttatcattccggaatggcgcccgtttgttgaaaactttgattcccataaa

SEQ ID NO: 27560 - DNA, 50 bp, unidentified
  source 1..50: mol_type = unassigned DNA; note = target_b742056
  misc_feature 1..24: note = LF
  misc_feature 25: note = Core
  misc_feature 26..50: note = RF
acgccacagccttgcgctgtggcgttttcattgcgcgggttccggaaaat

SEQ ID NO: 27561 - DNA, 50 bp, unidentified
  source 1..50: mol_type = unassigned DNA; note = target_b742889
  misc_feature 1..23: note = LF
  misc_feature 24..25: note = Core
  misc_feature 26..50: note = RF
tccagattatcagggggccctattggacgccgatcaccccaagatggggg

SEQ ID NO: 27562 - DNA, 50 bp, unidentified
  source 1..50: mol_type = unassigned DNA; note = target_b757708
  misc_feature 1..24: note = LF
  misc_feature 25: note = Core
  misc_feature 26..50: note = RF
cctcaaacccgcgagctgtacccgttttttctgattctgatttaaccgaa

SEQ ID NO: 27563 - DNA, 50 bp, unidentified
  source 1..50: mol_type = unassigned DNA; note = target_b758d0d
  misc_feature 1..23: note = LF
  misc_feature 24..25: note = Core
  misc_feature 26..50: note = RF
tctgcttttgcgctcatgtctctctcctttatataaaacatttaatactc

SEQ ID NO: 27564 - DNA, 50 bp, unidentified
  source 1..50: mol_type = unassigned DNA; note = target_b75d163
  misc_feature 1..23: note = LF
  misc_feature 24..25: note = Core
  misc_feature 26..50: note = RF
gaccgttgagtagtcgtccgcttctgccgccgagaggtcgattccgcgcc

SEQ ID NO: 27565 - DNA, 50 bp, unidentified
  source 1..50: mol_type = unassigned DNA; note = target_b7605d6
  misc_feature 1..21: note = LF
  misc_feature 22..25: note = Core
  misc_feature 26..50: note = RF
tatcacttccatatttattatatcataatatgttgattatttgtgtactt

SEQ ID NO: 27566 - DNA, 50 bp, unidentified
  source 1..50: mol_type = unassigned DNA; note = target_b76223c
  misc_feature 1..23: note = LF
  misc_feature 24..25: note = Core
  misc_feature 26..50: note = RF
tcataaaaatccatatatttatcctcctgcacccaattgactttaatatg

SEQ ID NO: 27567 - DNA, 50 bp, unidentified
  source 1..50: mol_type = unassigned DNA; note = target_b76cce5
  misc_feature 1..24: note = LF
  misc_feature 25: note = Core
  misc_feature 26..50: note = RF
gtgacacagtcttcggggcgttgttgcccaaatcaacgagcaagtcatga

SEQ ID NO: 27568 - DNA, 50 bp, unidentified
  source 1..50: mol_type = unassigned DNA; note = target_b76ec54
  misc_feature 1..20: note = LF
  misc_feature 21..25: note = Core
  misc_feature 26..50: note = RF
ggagctattctcatggcttatttttatagaaaaattacagaagcaggcgc

SEQ ID NO: 27569 - DNA, 50 bp, unidentified
  source 1..50: mol_type = unassigned DNA; note = target_b76f27e
  misc_feature 1..23: note = LF
  misc_feature 24..25: note = Core
  misc_feature 26..50: note = RF
ctccggcaaagggcgaagccctttgcaatctgtcactgggttggttctcc

SEQ ID NO: 27570 - DNA, 50 bp, unidentified
  source 1..50: mol_type = unassigned DNA; note = target_b76f333
  misc_feature 1..23: note = LF
  misc_feature 24..25: note = Core
  misc_feature 26..50: note = RF
gaggcggtcggcgcggccgagtctgacccaaagcagtcaatctggcgcaa

SEQ ID NO: 27571 - DNA, 50 bp, unidentified
  source 1..50: mol_type = unassigned DNA; note = target_b770457
  misc_feature 1..22: note = LF
  misc_feature 23..25: note = Core
  misc_feature 26..50: note = RF
aaagatgcagcgggtttgcgtcagactcctcattccatgaaaaatcacaa

SEQ ID NO: 27572 - DNA, 50 bp, unidentified
  source 1..50: mol_type = unassigned DNA; note = target_b7771ec
  misc_feature 1..23: note = LF
  misc_feature 24..25: note = Core
  misc_feature 26..50: note = RF
gccgcccgacgacgtgcggggcgctcagtccggcggctgatgccccgccg

SEQ ID NO: 27573 - DNA, 50 bp, unidentified
  source 1..50: mol_type = unassigned DNA; note = target_b77d1bf
  misc_feature 1..23: note = LF
  misc_feature 24..25: note = Core
  misc_feature 26..50: note = RF
cgtggtgtgcccatagactcctcctatgctcaaactatagggcagatttg

SEQ ID NO: 27574 - DNA, 50 bp, unidentified
  source 1..50: mol_type = unassigned DNA; note = target_b77f117
  misc_feature 1..23: note = LF
  misc_feature 24..25: note = Core
  misc_feature 26..50: note = RF
cgagccaattcaatgtccgctattggcgcaaagccgacatttggctgacc

SEQ ID NO: 27575 - DNA, 50 bp, unidentified
  source 1..50: mol_type = unassigned DNA; note = target_b786b30
  misc_feature 1..23: note = LF
  misc_feature 24..25: note = Core
  misc_feature 26..50: note = RF
tgggtagattaccgttgtagggccgaattcattcggccaacaaccttgcc

SEQ ID NO: 27576 - DNA, 50 bp, unidentified
  source 1..50: mol_type = unassigned DNA; note = target_b78aa66
  misc_feature 1..24: note = LF
  misc_feature 25: note = Core
  misc_feature 26..50: note = RF
gtggggagtgccaggtgatggcagtgccatcacacatcacacagagcgct

SEQ ID NO: 27577 - DNA, 50 bp, unidentified
  source 1..50: mol_type = unassigned DNA; note = target_b78b044
  misc_feature 1..24: note = LF
  misc_feature 25: note = Core
  misc_feature 26..50: note = RF
gtggcctagcgcatgcgtagccgccgttctggcgcgtgggtagcgccgtc

SEQ ID NO: 27578 - DNA, 50 bp, unidentified
  source 1..50: mol_type = unassigned DNA; note = target_b78c093
  misc_feature 1..24: note = LF
  misc_feature 25: note = Core
  misc_feature 26..50: note = RF
aaccgaagcaatttgcgatatacgttgttgttaccagttatttatatttc

SEQ ID NO: 27579 - DNA, 50 bp, unidentified
  source 1..50: mol_type = unassigned DNA; note = target_b78f45e
  misc_feature 1..23: note = LF
  misc_feature 24..25: note = Core
  misc_feature 26..50: note = RF
tgtttccttttgtctcattttaacacctcgtttaatgcaccaaatctatt

SEQ ID NO: 27580 - DNA, 50 bp, unidentified
  source 1..50: mol_type = unassigned DNA; note = target_b791d6e
  misc_feature 1..23: note = LF
  misc_feature 24..25: note = Core
  misc_feature 26..50: note = RF
cgcagaaaccgacgtaacatgattgacgctggcacaaacacggtgtgcat

SEQ ID NO: 27581 - DNA, 50 bp, unidentified
  source 1..50: mol_type = unassigned DNA; note = target_b7994c6
  misc_feature 1..22: note = LF
  misc_feature 23..25: note = Core
  misc_feature 26..50: note = RF
aaatgtccgcttttggctacatagaaatgtccgctttcgcgccgcgtaag

SEQ ID NO: 27582 - DNA, 50 bp, unidentified
  source 1..50: mol_type = unassigned DNA; note = target_b7a3c3e
  misc_feature 1..23: note = LF
  misc_feature 24..25: note = Core
  misc_feature 26..50: note = RF
actcgtcgccctgcgccatcagttgaccgtcctgcgccggcaacgtcctg

SEQ ID NO: 27583 - DNA, 50 bp, unidentified
  source 1..50: mol_type = unassigned DNA; note = target_b7ace43
  misc_feature 1..23: note = LF
  misc_feature 24..25: note = Core
  misc_feature 26..50: note = RF
cagtattttggggaagtccggggtcagatcttcattcttcgggtcttctc

SEQ ID NO: 27584 - DNA, 50 bp, unidentified
  source 1..50: mol_type = unassigned DNA; note = target_b7b2cab
  misc_feature 1..24: note = LF
  misc_feature 25: note = Core
  misc_feature 26..50: note = RF
cccgcgccatttccacccgtagggcgcataaccgcgttcgcggttatgcg

SEQ ID NO: 27585 - DNA, 50 bp, unidentified
  source 1..50: mol_type = unassigned DNA; note = target_b7bc76f
  misc_feature 1..24: note = LF
  misc_feature 25: note = Core
  misc_feature 26..50: note = RF
cgggcacatggttcgatagctgtccgattagcccgacaagtactgaaagc

SEQ ID NO: 27586 - DNA, 50 bp, unidentified
  source 1..50: mol_type = unassigned DNA; note = target_b7d07cb
  misc_feature 1..23: note = LF
  misc_feature 24..25: note = Core
  misc_feature 26..50: note = RF
catcttcgtccgccttcggctcccttcagattccctcgggcttatcgacg

SEQ ID NO: 27587 - DNA, 50 bp, unidentified
  source 1..50: mol_type = unassigned DNA; note = target_b7d7d91
  misc_feature 1..24: note = LF
  misc_feature 25: note = Core
  misc_feature 26..50: note = RF
tagcaagtttgatactccggtgtctgacctctggtctgacaccacggttc

SEQ ID NO: 27588 - DNA, 50 bp, unidentified
  source 1..50: mol_type = unassigned DNA; note = target_b7ec3dc
  misc_feature 1..24: note = LF
  misc_feature 25: note = Core
  misc_feature 26..50: note = RF
ctggcgaagtagcgcacgaagtgccgttctcggacgggtaggcgatgcgc

SEQ ID NO: 27589 - DNA, 50 bp, unidentified
  source 1..50: mol_type = unassigned DNA; note = target_b7f792e
  misc_feature 1..24: note = LF
  misc_feature 25: note = Core
  misc_feature 26..50: note = RF
gtgtactgaaaggttttgccctgacagggcgcagaatctctcgtgtcgtc

SEQ ID NO: 27590 - DNA, 50 bp, unidentified
  source 1..50: mol_type = unassigned DNA; note = target_b7fb078
  misc_feature 1..24: note = LF
  misc_feature 25: note = Core
  misc_feature 26..50: note = RF
acctcctatcggcaaccgtataacgctgagcttagcggcgccacgtcagt

SEQ ID NO: 27591 - DNA, 50 bp, unidentified
  source 1..50: mol_type = unassigned DNA; note = target_b7fc59a
  misc_feature 1..23: note = LF
  misc_feature 24..25: note = Core
  misc_feature 26..50: note = RF
ctgcttgttcattgaaatcgctcctaagcgttcgttgtagtggtgtcagt

SEQ ID NO: 27592 - DNA, 50 bp, unidentified
  source 1..50: mol_type = unassigned DNA; note = target_b803d9f
  misc_feature 1..24: note = LF
  misc_feature 25: note = Core
  misc_feature 26..50: note = RF
gcgccgcgccgtcggtgcccgtagtgttcgaaaactcagctggcgatcgg

SEQ ID NO: 27593 - DNA, 50 bp, unidentified
  source 1..50: mol_type = unassigned DNA; note = target_b80f42f
  misc_feature 1..23: note = LF
  misc_feature 24..25: note = Core
  misc_feature 26..50: note = RF
caagcggcctgggcttcgacgagctcagcccgaacagcataccagtgata

SEQ ID NO: 27594 - DNA, 50 bp, unidentified
  source 1..50: mol_type = unassigned DNA; note = target_b816a80
  misc_feature 1..23: note = LF
  misc_feature 24..25: note = Core
  misc_feature 26..50: note = RF
tcccacccaggctaccaaaagcggacattgcgtgatcaaccgacttgccc

SEQ ID NO: 27595 - DNA, 50 bp, unidentified
  source 1..50: mol_type = unassigned DNA; note = target_b8194be
  misc_feature 1..24: note = LF
  misc_feature 25: note = Core
  misc_feature 26..50: note = RF
ttcgcgagacgccccaacttccgtttcgggtcaatttgggtcaccgaccg

SEQ ID NO: 27596 - DNA, 50 bp, unidentified
  source 1..50: mol_type = unassigned DNA; note = target_b822688
  misc_feature 1..24: note = LF
  misc_feature 25: note = Core
  misc_feature 26..50: note = RF
gtcgttgcggtacccgaagtcccccccccctcccgccacagacactgaat

SEQ ID NO: 27597 - DNA, 50 bp, unidentified
  source 1..50: mol_type = unassigned DNA; note = target_b82a131
  misc_feature 1..22: note = LF
  misc_feature 23..25: note = Core
  misc_feature 26..50: note = RF
ctttaaactgacagcaccagactgacagcaccacagcaccgtctcagttt

SEQ ID NO: 27598 - DNA, 50 bp, unidentified
  source 1..50: mol_type = unassigned DNA; note = target_b82dc47
  misc_feature 1..23: note = LF
  misc_feature 24..25: note = Core
  misc_feature 26..50: note = RF
aagtcttttcattttcttttttcctttcacaataattaatgtctgctgaa

SEQ ID NO: 27599 - DNA, 50 bp, unidentified
  source 1..50: mol_type = unassigned DNA; note = target_b82ebeb
  misc_feature 1..24: note = LF
  misc_feature 25: note = Core
  misc_feature 26..50: note = RF
ctgctgcggcgccccgtgaaccgccccgggttcaccggaggctccgactc

SEQ ID NO: 27600 - DNA, 50 bp, unidentified
  source 1..50: mol_type = unassigned DNA; note = target_b835dbe
  misc_feature 1..24: note = LF
  misc_feature 25: note = Core
  misc_feature 26..50: note = RF
cgcggagggcactgggaccccgccccccacactccgcatggcagaggatc

SEQ ID NO: 27601 - DNA, 50 bp, unidentified
  source 1..50: mol_type = unassigned DNA; note = target_b837c8b
  misc_feature 1..24: note = LF
  misc_feature 25: note = Core
  misc_feature 26..50: note = RF
gagaagaaggagacaagggagtgaaatgtcttgaagcagcatctacaaag

SEQ ID NO: 27602 - DNA, 50 bp, unidentified
  source 1..50: mol_type = unassigned DNA; note = target_b8381d7
  misc_feature 1..23: note = LF
  misc_feature 24..25: note = Core
  misc_feature 26..50: note = RF
aagtgtttcttccttaccaaccactttttcccattgagcgagcaatacga

SEQ ID NO: 27603 - DNA, 50 bp, unidentified
  source 1..50: mol_type = unassigned DNA; note = target_b83cac2
  misc_feature 1..23: note = LF
  misc_feature 24..25: note = Core
  misc_feature 26..50: note = RF
gggcacgcttcgctttgcccaccctacgcgctggcccgcaaggcgtaatc

SEQ ID NO: 27604 - DNA, 50 bp, unidentified
  source 1..50: mol_type = unassigned DNA; note = target_b8405a4
  misc_feature 1..22: note = LF
  misc_feature 23..25: note = Core
  misc_feature 26..50: note = RF
ttttaatttcatgtgtttcttcctttctttaagtgatagtttgttaatga

SEQ ID NO: 27605 - DNA, 50 bp, unidentified
  source 1..50: mol_type = unassigned DNA; note = target_b844b80
  misc_feature 1..23: note = LF
  misc_feature 24..25: note = Core
  misc_feature 26..50: note = RF
tccgcacctccttcactctttttctgttttatagggatctatgctattgg

SEQ ID NO: 27606 - DNA, 50 bp, unidentified
  source 1..50: mol_type = unassigned DNA; note = target_b847d36
  misc_feature 1..24: note = LF
  misc_feature 25: note = Core
  misc_feature 26..50: note = RF
accatgcaagcactttcccaacaaaaccattctgaatgcgcgagtcgcag

SEQ ID NO: 27607 - DNA, 50 bp, unidentified
  source 1..50: mol_type = unassigned DNA; note = target_b8569c3
  misc_feature 1..24: note = LF
  misc_feature 25: note = Core
  misc_feature 26..50: note = RF
gcgccttgagcgctggtcatccggcaatcggtgcggcttcgcgtagtccg

SEQ ID NO: 27608 - DNA, 50 bp, unidentified
  source 1..50: mol_type = unassigned DNA; note = target_b85c35a
  misc_feature 1..21: note = LF
  misc_feature 22..25: note = Core
  misc_feature 26..50: note = RF
tcccccgcccgtcaccccggccttgagccggggtccagcagacgcgcgtc

SEQ ID NO: 27609 - DNA, 50 bp, unidentified
  source 1..50: mol_type = unassigned DNA; note = target_b85f738
  misc_feature 1..23: note = LF
  misc_feature 24..25: note = Core
  misc_feature 26..50: note = RF
tgatcttcaatatcgagcggctttgttgcttaaatcaatggaactaaatc

SEQ ID NO: 27610 - DNA, 50 bp, unidentified
  source 1..50: mol_type = unassigned DNA; note = target_b86073e
  misc_feature 1..22: note = LF
  misc_feature 23..25: note = Core
  misc_feature 26..50: note = RF
gccctgcggggcggcagtaaggagatacccatgcaaactgttctgacccc

SEQ ID NO: 27611 - DNA, 50 bp, unidentified
  source 1..50: mol_type = unassigned DNA; note = target_b8695fb
  misc_feature 1..23: note = LF
  misc_feature 24..25: note = Core
  misc_feature 26..50: note = RF
taggaggtggtattttctccttcctgaactccttaaatcggcgacctcga

SEQ ID NO: 27612 - DNA, 50 bp, unidentified
  source 1..50: mol_type = unassigned DNA; note = target_b87a8f4
  misc_feature 1..23: note = LF
  misc_feature 24..25: note = Core
  misc_feature 26..50: note = RF
ccgctgtagccgtagccggcgccctgcttggcgtagccctagacggtcga

SEQ ID NO: 27613 - DNA, 50 bp, unidentified
  source 1..50: mol_type = unassigned DNA; note = target_b87bda6
  misc_feature 1..22: note = LF
  misc_feature 23..25: note = Core
  misc_feature 26..50: note = RF
cactcccgttcggtgttttccccttaagaatcccccgggaagaaccaccc

SEQ ID NO: 27614 - DNA, 50 bp, unidentified
  source 1..50: mol_type = unassigned DNA; note = target_b883505
  misc_feature 1..24: note = LF
  misc_feature 25: note = Core
  misc_feature 26..50: note = RF
gagctacaatttcagcaactgacccttatcggacgttgggaagaacattg

SEQ ID NO: 27615 - DNA, 50 bp, unidentified
  source 1..50: mol_type = unassigned DNA; note = target_b88f56d
  misc_feature 1..24: note = LF
  misc_feature 25: note = Core
  misc_feature 26..50: note = RF
ttagcttaggcaaaaggcaagacctgacaccttttacgcgcagcgtaaat

SEQ ID NO: 27616 - DNA, 50 bp, unidentified
  source 1..50: mol_type = unassigned DNA; note = target_b89a1b5
  misc_feature 1..24: note = LF
  misc_feature 25: note = Core
  misc_feature 26..50: note = RF
gtgccgactattggcgattaaccgttgttggcagtcgttatttcaattaa

SEQ ID NO: 27617 - DNA, 50 bp, unidentified
  source 1..50: mol_type = unassigned DNA; note = target_b89d8b9
  misc_feature 1..23: note = LF
  misc_feature 24..25: note = Core
  misc_feature 26..50: note = RF
aatatagttttcatttctattacctccttatacaacgcccataagagact

SEQ ID NO: 27618 - DNA, 50 bp, unidentified
  source 1..50: mol_type = unassigned DNA; note = target_b8a1a17
  misc_feature 1..23: note = LF
  misc_feature 24..25: note = Core
  misc_feature 26..50: note = RF
aggcttctgatttttcggggctttgttgcgtaattcggacaggaaaccaa

SEQ ID NO: 27619 - DNA, 50 bp, unidentified
  source 1..50: mol_type = unassigned DNA; note = target_b8a5fb2
  misc_feature 1..24: note = LF
  misc_feature 25: note = Core
  misc_feature 26..50: note = RF
tccccgcaccccactatcggccatttcgttcacgttgtcggacaactgcg

SEQ ID NO: 27620 - DNA, 50 bp, unidentified
  source 1..50: mol_type = unassigned DNA; note = target_b8a8818
  misc_feature 1..22: note = LF
  misc_feature 23..25: note = Core
  misc_feature 26..50: note = RF
cctttggttttgttggtcatggatgcacgatgaaagccaaacgacgattt

SEQ ID NO: 27621 - DNA, 50 bp, unidentified
  source 1..50: mol_type = unassigned DNA; note = target_b8b30dd
  misc_feature 1..22: note = LF
  misc_feature 23..25: note = Core
  misc_feature 26..50: note = RF
tcagtgctcagatgtccgctaatgacccatggcggacattcgacctctag

SEQ ID NO: 27622 - DNA, 50 bp, unidentified
  source 1..50: mol_type = unassigned DNA; note = target_b8bb67f
  misc_feature 1..23: note = LF
  misc_feature 24..25: note = Core
  misc_feature 26..50: note = RF
acctccttgctcagcaagcaggttgaatcagatttgcgcgcctaagggaa

SEQ ID NO: 27623 - DNA, 50 bp, unidentified
  source 1..50: mol_type = unassigned DNA; note = target_b8bd926
  misc_feature 1..22: note = LF
  misc_feature 23..25: note = Core
  misc_feature 26..50: note = RF
acccgggattttcgttgagaagtgacccgggtggatgttgtgtcccgcgt

SEQ ID NO: 27624 - DNA, 50 bp, unidentified
  source 1..50: mol_type = unassigned DNA; note = target_b8c7db2
  misc_feature 1..23: note = LF
  misc_feature 24..25: note = Core
  misc_feature 26..50: note = RF
cttccttcagaaatgcgcccgatagttgaacaaggaatacattttaaaag

SEQ ID NO: 27625 - DNA, 50 bp, unidentified
  source 1..50: mol_type = unassigned DNA; note = target_b8c8034
  misc_feature 1..23: note = LF
  misc_feature 24..25: note = Core
  misc_feature 26..50: note = RF
cggtggtgtggtcatctcagttctcctcctcggcggcgacggcggcgcgc

SEQ ID NO: 27626 - DNA, 50 bp, unidentified
  source 1..50: mol_type = unassigned DNA; note = target_b8d7bbf
  misc_feature 1..23: note = LF
  misc_feature 24..25: note = Core
  misc_feature 26..50: note = RF
tcctggcggcgttgtctacagggatgtagacaaggggcgtgagcaggatg

SEQ ID NO: 27627 - DNA, 50 bp, unidentified
  source 1..50: mol_type = unassigned DNA; note = target_b8da3a4
  misc_feature 1..24: note = LF
  misc_feature 25: note = Core
  misc_feature 26..50: note = RF
tcattaccctattatttttatacgttgttggcaaatcgtttttcttgttt

SEQ ID NO: 27628 - DNA, 50 bp, unidentified
  source 1..50: mol_type = unassigned DNA; note = target_b8dc7ac
  misc_feature 1..23: note = LF
  misc_feature 24..25: note = Core
  misc_feature 26..50: note = RF
ccgactccgcaatgagtcggttctgtcgcaaactcggagaggagacgcga

SEQ ID NO: 27629 - DNA, 50 bp, unidentified
  source 1..50: mol_type = unassigned DNA; note = target_b8df121
  misc_feature 1..20: note = LF
  misc_feature 21..25: note = Core
  misc_feature 26..50: note = RF
gaagaagaccgtcgaatttcttcatgtaacaataggggcaatcatgaaaa

SEQ ID NO: 27630 - DNA, 50 bp, unidentified
  source 1..50: mol_type = unassigned DNA; note = target_b8e5a4a
  misc_feature 1..23: note = LF
  misc_feature 24..25: note = Core
  misc_feature 26..50: note = RF
gcaacgaaaagctgttgcccgacctacggggctgtgtttcgttcatccac

SEQ ID NO: 27631 - DNA, 50 bp, unidentified
  source 1..50: mol_type = unassigned DNA; note = target_b8f7818
  misc_feature 1..23: note = LF
  misc_feature 24..25: note = Core
  misc_feature 26..50: note = RF
ggacacgcttcgctttgcccaccctacaagtttgcgtgtctcggctaaat

SEQ ID NO: 27632 - DNA, 50 bp, unidentified
  source 1..50: mol_type = unassigned DNA; note = target_b90331d
  misc_feature 1..24: note = LF
  misc_feature 25: note = Core
  misc_feature 26..50: note = RF
acagacatagaaggatcctgacggcggcccagtccacgccaggttgctgg

SEQ ID NO: 27633 - DNA, 50 bp, unidentified
  source 1..50: mol_type = unassigned DNA; note = target_b903ed2
  misc_feature 1..23: note = LF
  misc_feature 24..25: note = Core
  misc_feature 26..50: note = RF
tctggccggcaacaccaacagcctgcccctgcgaaggcgggggacagccg

SEQ ID NO: 27634 - DNA, 50 bp, unidentified
  source 1..50: mol_type = unassigned DNA; note = target_b90dd4c
  misc_feature 1..22: note = LF
  misc_feature 23..25: note = Core
  misc_feature 26..50: note = RF
aatgcctcaccgcaagttaacgtgacaacgccgtcgtgccacttgagaac

SEQ ID NO: 27635 - DNA, 50 bp, unidentified
  source 1..50: mol_type = unassigned DNA; note = target_b920aa3
  misc_feature 1..23: note = LF
  misc_feature 24..25: note = Core
  misc_feature 26..50: note = RF
tattttacaacccagcggggctctgttgcgtaaatccctgcagggattca

SEQ ID NO: 27636 - DNA, 50 bp, unidentified
  source 1..50: mol_type = unassigned DNA; note = target_b921965
  misc_feature 1..23: note = LF
  misc_feature 24..25: note = Core
  misc_feature 26..50: note = RF
atcatacatatcggggaagcctcctttccggtattgcctaagcgtgaaaa

SEQ ID NO: 27637 - DNA, 50 bp, unidentified
  source 1..50: mol_type = unassigned DNA; note = target_b92ba61
  misc_feature 1..23: note = LF
  misc_feature 24..25: note = Core
  misc_feature 26..50: note = RF
gaggttagtgggatgtccgctaatggcactaagcggacattctgttcgcc

SEQ ID NO: 27638 - DNA, 50 bp, unidentified
  source 1..50: mol_type = unassigned DNA; note = target_b92bb86
  misc_feature 1..22: note = LF
  misc_feature 23..25: note = Core
  misc_feature 26..50: note = RF
gggagacgagttcccgttgggctgacagcaccgtcaagagctcaaggcct

SEQ ID NO: 27639 - DNA, 50 bp, unidentified
  source 1..50: mol_type = unassigned DNA; note = target_b92d489
  misc_feature 1..21: note = LF
  misc_feature 22..25: note = Core
  misc_feature 26..50: note = RF
acttggccggtatacgctgccatccctaacgcggaattttttggtgaaaa

SEQ ID NO: 27640 - DNA, 50 bp, unidentified
  source 1..50: mol_type = unassigned DNA; note = target_b930b3c
  misc_feature 1..23: note = LF
  misc_feature 24..25: note = Core
  misc_feature 26..50: note = RF
aattataatcttatccattttttctccttctctccttataaaaacaaaag

SEQ ID NO: 27641 - DNA, 50 bp, unidentified
  source 1..50: mol_type = unassigned DNA; note = target_b93129f
  misc_feature 1..23: note = LF
  misc_feature 24..25: note = Core
  misc_feature 26..50: note = RF
cttaattttttcattttgatctcctttcttaacagtgtgataacttttac

SEQ ID NO: 27642 - DNA, 50 bp, unidentified
  source 1..50: mol_type = unassigned DNA; note = target_b93784e
  misc_feature 1..23: note = LF
  misc_feature 24..25: note = Core
  misc_feature 26..50: note = RF
atatcccggcactatgacgctattggcacatcgcgacatttcgcggcgac

SEQ ID NO: 27643 - DNA, 50 bp, unidentified
  source 1..50: mol_type = unassigned DNA; note = target_b93e54f
  misc_feature 1..22: note = LF
  misc_feature 23..25: note = Core
  misc_feature 26..50: note = RF
aagcttgccgtcaacaaggaggagacagaaatgcattttcaaaacaaggg

SEQ ID NO: 27644 - DNA, 50 bp, unidentified
  source 1..50: mol_type = unassigned DNA; note = target_b94165d
  misc_feature 1..23: note = LF
  misc_feature 24..25: note = Core
  misc_feature 26..50: note = RF
taaggatagcttggcacgagatgctctagctgtgaacctaaatcagccct

SEQ ID NO: 27645 - DNA, 50 bp, unidentified
  source 1..50: mol_type = unassigned DNA; note = target_b942663
  misc_feature 1..23: note = LF
  misc_feature 24..25: note = Core
  misc_feature 26..50: note = RF
tgccgggggaaagagcgccgcccctacgggactcccgatcccctttctgg

SEQ ID NO: 27646 - DNA, 50 bp, unidentified
  source 1..50: mol_type = unassigned DNA; note = target_b9469f2
  misc_feature 1..23: note = LF
  misc_feature 24..25: note = Core
  misc_feature 26..50: note = RF
aattttgacatagcatagatatactcctttgcttgtaatataattatatt

SEQ ID NO: 27647 - DNA, 50 bp, unidentified
  source 1..50: mol_type = unassigned DNA; note = target_b952d48
  misc_feature 1..21: note = LF
  misc_feature 22..25: note = Core
  misc_feature 26..50: note = RF
agcaggaacagcaagctatcggtcatgcgctcccctcctgaggacacgag

SEQ ID NO: 27648 - DNA, 50 bp, unidentified
  source 1..50: mol_type = unassigned DNA; note = target_b952ea7
  misc_feature 1..23: note = LF
  misc_feature 24..25: note = Core
  misc_feature 26..50: note = RF
aagttccaagaaaatcaatggggtcagactcgattgatttacaaggttaa

SEQ ID NO: 27649 - DNA, 50 bp, unidentified
  source 1..50: mol_type = unassigned DNA; note = target_b954775
  misc_feature 1..23: note = LF
  misc_feature 24..25: note = Core
  misc_feature 26..50: note = RF
agatctatcctgaagattccttcctaaagtcagtaagacgcccctctttg

SEQ ID NO: 27650 - DNA, 50 bp, unidentified
  source 1..50: mol_type = unassigned DNA; note = target_b971e5e
  misc_feature 1..23: note = LF
  misc_feature 24..25: note = Core
  misc_feature 26..50: note = RF
ttctgatgctgtgcggtcccgaaagcgacctaattgctgcggggcagcga

SEQ ID NO: 27651 - DNA, 50 bp, unidentified
  source 1..50: mol_type = unassigned DNA; note = target_b97a558
  misc_feature 1..24: note = LF
  misc_feature 25: note = Core
  misc_feature 26..50: note = RF
acaaaacccttgccacgcaggagccaaccatacatggattcagatccggg

SEQ ID NO: 27652 - DNA, 50 bp, unidentified
  source 1..50: mol_type = unassigned DNA; note = target_b97b07f
  misc_feature 1..23: note = LF
  misc_feature 24..25: note = Core
  misc_feature 26..50: note = RF
cactccatcagccgtcaacgcgcctttcacggcacagggcaggtcaccag

SEQ ID NO: 27653 - DNA, 50 bp, unidentified
  source 1..50: mol_type = unassigned DNA; note = target_b98017d
  misc_feature 1..24: note = LF
  misc_feature 25: note = Core
  misc_feature 26..50: note = RF
ttgaatcgccccgggttttgtagcggctccattgtttgagagaatggagc

SEQ ID NO: 27654 - DNA, 50 bp, unidentified
  source 1..50: mol_type = unassigned DNA; note = target_b98026d
  misc_feature 1..23: note = LF
  misc_feature 24..25: note = Core
  misc_feature 26..50: note = RF
agtcggcaacatcttgggttagctgaccttcgccgcagagtgcgcgaact

SEQ ID NO: 27655 - DNA, 50 bp, unidentified
  source 1..50: mol_type = unassigned DNA; note = target_b980c79
  misc_feature 1..24: note = LF
  misc_feature 25: note = Core
  misc_feature 26..50: note = RF
aaagggagtttgcagttgtttcatacttatacctatgcctttcccgcatg

SEQ ID NO: 27656 - DNA, 50 bp, unidentified
  source 1..50: mol_type = unassigned DNA; note = target_b984ca0
  misc_feature 1..24: note = LF
  misc_feature 25: note = Core
  misc_feature 26..50: note = RF
cggcatgcttgcatagccgacccttatacgggttgatggcgtcaggcgat

SEQ ID NO: 27657 - DNA, 50 bp, unidentified
  source 1..50: mol_type = unassigned DNA; note = target_b99d96a
  misc_feature 1..23: note = LF
  misc_feature 24..25: note = Core
  misc_feature 26..50: note = RF
cccgctttttcatgtttttactcctttcaagtctcttgaaatagtacgtg

SEQ ID NO: 27658 - DNA, 50 bp, unidentified
  source 1..50: mol_type = unassigned DNA; note = target_b99f13f
  misc_feature 1..24: note = LF
  misc_feature 25: note = Core
  misc_feature 26..50: note = RF
cgccgtgcacacacactgaaccgtcctggatcgagtggaggctgttgatc

SEQ ID NO: 27659 - DNA, 50 bp, unidentified
  source 1..50: mol_type = unassigned DNA; note = target_b9a9f52
  misc_feature 1..21: note = LF
  misc_feature 22..25: note = Core
  misc_feature 26..50: note = RF
aacccgcgcgcgcgtggagggcccccggtttttacgctaccggcaggcac

SEQ ID NO: 27660 - DNA, 50 bp, unidentified
  source 1..50: mol_type = unassigned DNA; note = target_b9ad2aa
  misc_feature 1..23: note = LF
  misc_feature 24..25: note = Core
  misc_feature 26..50: note = RF
cccggcaggccaggccggaaacaccgttagacccacagaccaatgccgag

SEQ ID NO: 27661 - DNA, 50 bp, unidentified
  source 1..50: mol_type = unassigned DNA; note = target_b9b1095
  misc_feature 1..23: note = LF
  misc_feature 24..25: note = Core
  misc_feature 26..50: note = RF
acaagccttcatatagattgctcctttgtaattaagataatctaattata

SEQ ID NO: 27662 - DNA, 50 bp, unidentified
  source 1..50: mol_type = unassigned DNA; note = target_b9b11a3
  misc_feature 1..23: note = LF
  misc_feature 24..25: note = Core
  misc_feature 26..50: note = RF
gctcccacagaccgggcaagctcctacagcggcgttgtagccacctctga

SEQ ID NO: 27663 - DNA, 50 bp, unidentified
  source 1..50: mol_type = unassigned DNA; note = target_b9b22dc
  misc_feature 1..24: note = LF
  misc_feature 25: note = Core
  misc_feature 26..50: note = RF
ccgctcatcagatgttagccgagcgtcggctttcgggcaggccagcgtgc

SEQ ID NO: 27664 - DNA, 50 bp, unidentified
  source 1..50: mol_type = unassigned DNA; note = target_b9b418a
  misc_feature 1..23: note = LF
  misc_feature 24..25: note = Core
  misc_feature 26..50: note = RF
tcagtcggggcgatgccacgctcctatcaagtcacgccagacatccccga

SEQ ID NO: 27665 - DNA, 50 bp, unidentified
  source 1..50: mol_type = unassigned DNA; note = target_b9c3bc2
  misc_feature 1..24: note = LF
  misc_feature 25: note = Core
  misc_feature 26..50: note = RF
gatttaatactcaaacaccagatttgacaataactcggggggctgacaca

SEQ ID NO: 27666 - DNA, 50 bp, unidentified
  source 1..50: mol_type = unassigned DNA; note = target_b9cf331
  misc_feature 1..23: note = LF
  misc_feature 24..25: note = Core
  misc_feature 26..50: note = RF
gcgacgttggactgaagtccaacctacaaagacttgtttcgcgagggggg

SEQ ID NO: 27667 - DNA, 50 bp, unidentified
  source 1..50: mol_type = unassigned DNA; note = target_b9d8aba
  misc_feature 1..23: note = LF
  misc_feature 24..25: note = Core
  misc_feature 26..50: note = RF
tcacagtaattgtagtgaacattccagacttcgacggcggtacgccgttg

SEQ ID NO: 27668 - DNA, 50 bp, unidentified
  source 1..50: mol_type = unassigned DNA; note = target_b9d9ae6
  misc_feature 1..23: note = LF
  misc_feature 24..25: note = Core
  misc_feature 26..50: note = RF
cgccccaaggcaaaaggcaccccctcggggggcagcaagccgcacagcgg

SEQ ID NO: 27669 - DNA, 50 bp, unidentified
  source 1..50: mol_type = unassigned DNA; note = target_b9e02d0
  misc_feature 1..23: note = LF
  misc_feature 24..25: note = Core
  misc_feature 26..50: note = RF
cgtcgagattgccgcgcgtcgctcgcaatgacatgcaatgtcattaatca

SEQ ID NO: 27670 - DNA, 50 bp, unidentified
  source 1..50: mol_type = unassigned DNA; note = target_b9e221f
  misc_feature 1..22: note = LF
  misc_feature 23..25: note = Core
  misc_feature 26..50: note = RF
gtagtacaaaaatctcaacacctttcatcgttctaagtcgtgccgcttgg

SEQ ID NO: 27671 - DNA, 50 bp, unidentified
  source 1..50: mol_type = unassigned DNA; note = target_b9edd7d
  misc_feature 1..24: note = LF
  misc_feature 25: note = Core
  misc_feature 26..50: note = RF
ccgcccggtttgcgccgcggcgggttttttatgtgcgctcgggaaggcgc

SEQ ID NO: 27672 - DNA, 50 bp, unidentified
  source 1..50: mol_type = unassigned DNA; note = target_b9f0648
  misc_feature 1..23: note = LF
  misc_feature 24..25: note = Core
  misc_feature 26..50: note = RF
attgccacgctttcttcgaaagctcgcaatgataaatcagtagtcagtag

SEQ ID NO: 27673 - DNA, 50 bp, unidentified
  source 1..50: mol_type = unassigned DNA; note = target_b9f0dbf
  misc_feature 1..23: note = LF
  misc_feature 24..25: note = Core
  misc_feature 26..50: note = RF
cgtttctttcatcttctcatctcctataaaaataaatcaacttccagtgt

SEQ ID NO: 27674 - DNA, 50 bp, unidentified
  source 1..50: mol_type = unassigned DNA; note = target_b9f1b03
  misc_feature 1..24: note = LF
  misc_feature 25: note = Core
  misc_feature 26..50: note = RF
gatcaaaactgacgagaagggcgtttatgaggattcatttagctgcggtt

SEQ ID NO: 27675 - DNA, 50 bp, unidentified
  source 1..50: mol_type = unassigned DNA; note = target_b9f7592
  misc_feature 1..24: note = LF
  misc_feature 25: note = Core
  misc_feature 26..50: note = RF
cacacgccgaagcaatcgcaggagagacaaacatgcccgattccaagcgc

SEQ ID NO: 27676 - DNA, 50 bp, unidentified
  source 1..50: mol_type = unassigned DNA; note = target_b9f7e5e
  misc_feature 1..21: note = LF
  misc_feature 22..25: note = Core
  misc_feature 26..50: note = RF
gtcggttgcgacaggggttgggtcatctcacatcaccagcttgcgtagcc

SEQ ID NO: 27677 - DNA, 50 bp, unidentified
  source 1..50: mol_type = unassigned DNA; note = target_b9f9220
  misc_feature 1..24: note = LF
  misc_feature 25: note = Core
  misc_feature 26..50: note = RF
taaatttggcgggtattgaggttctggtaacttaactcgtcgagacgacg

SEQ ID NO: 27678 - DNA, 50 bp, unidentified
  source 1..50: mol_type = unassigned DNA; note = target_b9fca4f
  misc_feature 1..24: note = LF
  misc_feature 25: note = Core
  misc_feature 26..50: note = RF
cggatcgtcttcaacgtccgctcctggcgcaaacctgcctgagacctgat

SEQ ID NO: 27679 - DNA, 50 bp, unidentified
  source 1..50: mol_type = unassigned DNA; note = target_ba09502
  misc_feature 1..23: note = LF
  misc_feature 24..25: note = Core
  misc_feature 26..50: note = RF
taatagatatacctccctcctaactaaataaaaattttactatttacttc

SEQ ID NO: 27680 - DNA, 50 bp, unidentified
  source 1..50: mol_type = unassigned DNA; note = target_ba098b0
  misc_feature 1..23: note = LF
  misc_feature 24..25: note = Core
  misc_feature 26..50: note = RF
cttggatccattgttattaactcctttcttgtatctcatcctccggagaa

SEQ ID NO: 27681 - DNA, 50 bp, unidentified
  source 1..50: mol_type = unassigned DNA; note = target_ba12776
  misc_feature 1..24: note = LF
  misc_feature 25: note = Core
  misc_feature 26..50: note = RF
tgtttgttcaacaatcgcgcccgttcgtattgaggaaatgttaatttatt

SEQ ID NO: 27682 - DNA, 50 bp, unidentified
  source 1..50: mol_type = unassigned DNA; note = target_ba1a9e5
  misc_feature 1..21: note = LF
  misc_feature 22..25: note = Core
  misc_feature 26..50: note = RF
aatgggtcacccagcttaaagagtcgctgacccctttattttcagtgagc

SEQ ID NO: 27683 - DNA, 50 bp, unidentified
  source 1..50: mol_type = unassigned DNA; note = target_ba2268e
  misc_feature 1..24: note = LF
  misc_feature 25: note = Core
  misc_feature 26..50: note = RF
ttcatttatataaacaccacgggatttttattgagcatatcccttaacta

SEQ ID NO: 27684 - DNA, 50 bp, unidentified
  source 1..50: mol_type = unassigned DNA; note = target_ba24367
  misc_feature 1..24: note = LF
  misc_feature 25: note = Core
  misc_feature 26..50: note = RF
aaacgccaagagcgcgtttcccgctttcccacaacctcggctgcgacggc

SEQ ID NO: 27685 - DNA, 50 bp, unidentified
  source 1..50: mol_type = unassigned DNA; note = target_ba2928e
  misc_feature 1..22: note = LF
  misc_feature 23..25: note = Core
  misc_feature 26..50: note = RF
atctaacttatgggaggtcagttttttatggcaaaatatagttttgagtt

SEQ ID NO: 27686 - DNA, 50 bp, unidentified
  source 1..50: mol_type = unassigned DNA; note = target_ba316aa
  misc_feature 1..22: note = LF
  misc_feature 23..25: note = Core
  misc_feature 26..50: note = RF
aagctccctcagttcggaagcttgaatcacacacaaccgcaaaggggaat

SEQ ID NO: 27687 - DNA, 50 bp, unidentified
  source 1..50: mol_type = unassigned DNA; note = target_ba35933
  misc_feature 1..23: note = LF
  misc_feature 24..25: note = Core
  misc_feature 26..50: note = RF
gcgctgtcgccatcggcgccgccctcagtgccaggcggtcctcggcgccg

SEQ ID NO: 27688 - DNA, 50 bp, unidentified
  source 1..50: mol_type = unassigned DNA; note = target_ba3d94f
  misc_feature 1..22: note = LF
  misc_feature 23..25: note = Core
  misc_feature 26..50: note = RF
cggggtgctgaagggcaactcatgacccaaagccgcccttcggctcgggg

SEQ ID NO: 27689 - DNA, 50 bp, unidentified
  source 1..50: mol_type = unassigned DNA; note = target_ba49799
  misc_feature 1..24: note = LF
  misc_feature 25: note = Core
  misc_feature 26..50: note = RF
caaatccaacggcaaaaccagacattcaacttagcccagaggcggacatc

SEQ ID NO: 27690 - DNA, 50 bp, unidentified
  source 1..50: mol_type = unassigned DNA; note = target_ba5d784
  misc_feature 1..24: note = LF
  misc_feature 25: note = Core
  misc_feature 26..50: note = RF
gaaagaactttagtaaaaaaacctctttggtataatgcaagaggtctggc

SEQ ID NO: 27691 - DNA, 50 bp, unidentified
  source 1..50: mol_type = unassigned DNA; note = target_ba5f4f4
  misc_feature 1..24: note = LF
  misc_feature 25: note = Core
  misc_feature 26..50: note = RF
ttcaggccgtggatagtgcgggagcagctattatttcaatagcattttaa

SEQ ID NO: 27692 - DNA, 50 bp, unidentified
  source 1..50: mol_type = unassigned DNA; note = target_ba61dc7
  misc_feature 1..23: note = LF
  misc_feature 24..25: note = Core
  misc_feature 26..50: note = RF
ggtggagttgtcagacataatatttccgttttattccggcagcgtgcgcc

SEQ ID NO: 27693 - DNA, 50 bp, unidentified
  source 1..50: mol_type = unassigned DNA; note = target_ba61f81
  misc_feature 1..23: note = LF
  misc_feature 24..25: note = Core
  misc_feature 26..50: note = RF
tgcgcaaaggtagctatttcccgagctttctggagccgcgtcgcatggcg

SEQ ID NO: 27694 - DNA, 50 bp, unidentified
  source 1..50: mol_type = unassigned DNA; note = target_ba62864
  misc_feature 1..24: note = LF
  misc_feature 25: note = Core
  misc_feature 26..50: note = RF
cgatggatacctcttcagtcaggagcaagccatgaaagtcatccgcagcc

SEQ ID NO: 27695 - DNA, 50 bp, unidentified
  source 1..50: mol_type = unassigned DNA; note = target_ba65ca5
  misc_feature 1..23: note = LF
  misc_feature 24..25: note = Core
  misc_feature 26..50: note = RF
agacgcatcgctacgcgatgctcctcagggtgacggagatggactgccta

SEQ ID NO: 27696 - DNA, 50 bp, unidentified
  source 1..50: mol_type = unassigned DNA; note = target_ba688b7
  misc_feature 1..23: note = LF
  misc_feature 24..25: note = Core
  misc_feature 26..50: note = RF
cccgtctttcaaacgaataattcctccgtcccctttgattcgtccccttt

SEQ ID NO: 27697 - DNA, 50 bp, unidentified
  source 1..50: mol_type = unassigned DNA; note = target_ba7a197
  misc_feature 1..22: note = LF
  misc_feature 23..25: note = Core
  misc_feature 26..50: note = RF
tggatgcctgctttcgcaggcatgacgggacgtgaacctcatggtcatgc

SEQ ID NO: 27698 - DNA, 50 bp, unidentified
  source 1..50: mol_type = unassigned DNA; note = target_ba7f880
  misc_feature 1..23: note = LF
  misc_feature 24..25: note = Core
  misc_feature 26..50: note = RF
ccgcatcgaccgccgttttcatgttgtcgtagattccgcgcgcgcaggcg

SEQ ID NO: 27699 - DNA, 50 bp, unidentified
  source 1..50: mol_type = unassigned DNA; note = target_ba886f1
  misc_feature 1..23: note = LF
  misc_feature 24..25: note = Core
  misc_feature 26..50: note = RF
gctgatcgcggctgaagccgctcctacggtggcgcgtattgccctgtagg

SEQ ID NO: 27700 - DNA, 50 bp, unidentified
  source 1..50: mol_type = unassigned DNA; note = target_ba8fbec
  misc_feature 1..23: note = LF
  misc_feature 24..25: note = Core
  misc_feature 26..50: note = RF
ctcatctagttgctatattatatcatattaaaataaaagatacaatatca

SEQ ID NO: 27701 - DNA, 50 bp, unidentified
  source 1..50: mol_type = unassigned DNA; note = target_ba99c5e
  misc_feature 1..23: note = LF
  misc_feature 24..25: note = Core
  misc_feature 26..50: note = RF
gtcgcaggcttcttagctttcgtaggatgggtagagcgcagcgaaaccca

SEQ ID NO: 27702 - DNA, 50 bp, unidentified
  source 1..50: mol_type = unassigned DNA; note = target_ba9ae09
  misc_feature 1..22: note = LF
  misc_feature 23..25: note = Core
  misc_feature 26..50: note = RF
acgcgggcatgacgagctaatgatgacagctagctttgccgaaaatctcg

SEQ ID NO: 27703 - DNA, 50 bp, unidentified
  source 1..50: mol_type = unassigned DNA; note = target_baa782f
  misc_feature 1..22: note = LF
  misc_feature 23..25: note = Core
  misc_feature 26..50: note = RF
cgggacgctggcccgtcacccgatcagtggccactctgaaagagctcact

SEQ ID NO: 27704 - DNA, 50 bp, unidentified
  source 1..50: mol_type = unassigned DNA; note = target_bab1acd
  misc_feature 1..24: note = LF
  misc_feature 25: note = Core
  misc_feature 26..50: note = RF
tggcgatctcctaatctgcataacgcccgcatttgcggctggtttggagc

SEQ ID NO: 27705 - DNA, 50 bp, unidentified
  source 1..50: mol_type = unassigned DNA; note = target_bab3007
  misc_feature 1..23: note = LF
  misc_feature 24..25: note = Core
  misc_feature 26..50: note = RF
atagagagaagggttctccatccctcacccttccggcgccggcccggtcg

SEQ ID NO: 27706 - DNA, 50 bp, unidentified
  source 1..50: mol_type = unassigned DNA; note = target_bab31f5
  misc_feature 1..20: note = LF
  misc_feature 21..25: note = Core
  misc_feature 26..50: note = RF
aaagacctacagacttgccgtttttatgtctatttatgcttactcacgct

SEQ ID NO: 27707 - DNA, 50 bp, unidentified
  source 1..50: mol_type = unassigned DNA; note = target_babd4e5
  misc_feature 1..23: note = LF
  misc_feature 24..25: note = Core
  misc_feature 26..50: note = RF
catgttcacgacagcatgggctctgttgcacaatcttccgagggattcat

SEQ ID NO: 27708 - DNA, 50 bp, unidentified
  source 1..50: mol_type = unassigned DNA; note = target_bada46d
  misc_feature 1..23: note = LF
  misc_feature 24..25: note = Core
  misc_feature 26..50: note = RF
agtgtacttcatgttttgacctcctttccgtaggatttcggaaggcgcca

SEQ ID NO: 27709 - DNA, 50 bp, unidentified
  source 1..50: mol_type = unassigned DNA; note = target_badeba4
  misc_feature 1..23: note = LF
  misc_feature 24..25: note = Core
  misc_feature 26..50: note = RF
tggtccagagctatgccggaatttgggtgacggggctgatcaggcggcgc

SEQ ID NO: 27710 - DNA, 50 bp, unidentified
  source 1..50: mol_type = unassigned DNA; note = target_bae28b3
  misc_feature 1..23: note = LF
  misc_feature 24..25: note = Core
  misc_feature 26..50: note = RF
cgctgaggccgtcgggggcgtccacaccatcaggcccggtgattgggcca

SEQ ID NO: 27711 - DNA, 50 bp, unidentified
  source 1..50: mol_type = unassigned DNA; note = target_baf5ab2
  misc_feature 1..23: note = LF
  misc_feature 24..25: note = Core
  misc_feature 26..50: note = RF
atgtggtgtagacatattaattcctcctcttattgtttgtttaaaagaat

SEQ ID NO: 27712 - DNA, 50 bp, unidentified
  source 1..50: mol_type = unassigned DNA; note = target_bb02d3c
  misc_feature 1..24: note = LF
  misc_feature 25: note = Core
  misc_feature 26..50: note = RF
acaccaggaccgcgcggatcgcggcagatccggacgttcacgggtgatgc

SEQ ID NO: 27713 - DNA, 50 bp, unidentified
  source 1..50: mol_type = unassigned DNA; note = target_bb0a9d8
  misc_feature 1..22: note = LF
  misc_feature 23..25: note = Core
  misc_feature 26..50: note = RF
cccctcatccgcctgccggcaccttctccccgcaagcggggagaagggga

SEQ ID NO: 27714 - DNA, 50 bp, unidentified
  source 1..50: mol_type = unassigned DNA; note = target_bb0bdb6
  misc_feature 1..23: note = LF
  misc_feature 24..25: note = Core
  misc_feature 26..50: note = RF
gttgcacttaaactaacgggtgcttagttgaataatccaatctaaaaagt

SEQ ID NO: 27715 - DNA, 50 bp, unidentified
  source 1..50: mol_type = unassigned DNA; note = target_bb0d414
  misc_feature 1..23: note = LF
  misc_feature 24..25: note = Core
  misc_feature 26..50: note = RF
ggcgtcaaccagcgaatcccatcagggacagcggcgaaagccgcattcaa

SEQ ID NO: 27716 - DNA, 50 bp, unidentified
  source 1..50: mol_type = unassigned DNA; note = target_bb10a9f
  misc_feature 1..22: note = LF
  misc_feature 23..25: note = Core
  misc_feature 26..50: note = RF
cagccgcttcgcggcttccggaatgacggcgcaccgatcacccggaaaca

SEQ ID NO: 27717 - DNA, 50 bp, unidentified
  source 1..50: mol_type = unassigned DNA; note = target_bb1ff81
  misc_feature 1..20: note = LF
  misc_feature 21..25: note = Core
  misc_feature 26..50: note = RF
gtccccggaagacccacaggctcacagcgccacccccgcgaaagacagcc

SEQ ID NO: 27718 - DNA, 50 bp, unidentified
  source 1..50: mol_type = unassigned DNA; note = target_bb2fbb7
  misc_feature 1..24: note = LF
  misc_feature 25: note = Core
  misc_feature 26..50: note = RF
cttgctccagtgcatgtgcggtctttttaaacgtccatccgcggcctcgc

SEQ ID NO: 27719 - DNA, 50 bp, unidentified
  source 1..50: mol_type = unassigned DNA; note = target_bb3767f
  misc_feature 1..23: note = LF
  misc_feature 24..25: note = Core
  misc_feature 26..50: note = RF
ttcaatttagctcttgacttttattagcaggtcttaaaatgtgattttga

SEQ ID NO: 27720 - DNA, 50 bp, unidentified
  source 1..50: mol_type = unassigned DNA; note = target_bb3d6c4
  misc_feature 1..23: note = LF
  misc_feature 24..25: note = Core
  misc_feature 26..50: note = RF
cgttgaagcgaccatatggctagtgtgaattagcgaaaatggactgtccg

SEQ ID NO: 27721 - DNA, 50 bp, unidentified
  source 1..50: mol_type = unassigned DNA; note = target_bb3d9f2
  misc_feature 1..21: note = LF
  misc_feature 22..25: note = Core
  misc_feature 26..50: note = RF
acaaatggcccgtgaagcaagcccccctgcaataaaacgcacctgcttag

SEQ ID NO: 27722 - DNA, 50 bp, unidentified
  source 1..50: mol_type = unassigned DNA; note = target_bb40a03
  misc_feature 1..23: note = LF
  misc_feature 24..25: note = Core
  misc_feature 26..50: note = RF
accacccactgcacccggactacctcacccgccggttccgccacctcgtc

SEQ ID NO: 27723 - DNA, 50 bp, unidentified
  source 1..50: mol_type = unassigned DNA; note = target_bb48fb1
  misc_feature 1..22: note = LF
  misc_feature 23..25: note = Core
  misc_feature 26..50: note = RF
gagatatctttttgtattactttctgcgggatatcgctcaaatgacagcg

SEQ ID NO: 27724 - DNA, 50 bp, unidentified
  source 1..50: mol_type = unassigned DNA; note = target_bb4b500
  misc_feature 1..23: note = LF
  misc_feature 24..25: note = Core
  misc_feature 26..50: note = RF
taacatccgacattttatacctcctttcttaaataaataattccacctat

SEQ ID NO: 27725 - DNA, 50 bp, unidentified
  source 1..50: mol_type = unassigned DNA; note = target_bb4e037
  misc_feature 1..19: note = LF
  misc_feature 20..25: note = Core
  misc_feature 26..50: note = RF
ttcgtgcgtcatgcactgattcctttcaggagcaacgtggtcgtgcgttc

SEQ ID NO: 27726 - DNA, 50 bp, unidentified
  source 1..50: mol_type = unassigned DNA; note = target_bb59b40
  misc_feature 1..22: note = LF
  misc_feature 23..25: note = Core
  misc_feature 26..50: note = RF
tttgtcgggcttccaaggatgttgacccatcactgcgacaccgctggcgc

SEQ ID NO: 27727 - DNA, 50 bp, unidentified
  source 1..50: mol_type = unassigned DNA; note = target_bb5b6a7
  misc_feature 1..23: note = LF
  misc_feature 24..25: note = Core
  misc_feature 26..50: note = RF
aatagccacatcacccggtagcccggataaggcgtcagccgccatccggg

SEQ ID NO: 27728 - DNA, 50 bp, unidentified
  source 1..50: mol_type = unassigned DNA; note = target_bb61ecc
  misc_feature 1..24: note = LF
  misc_feature 25: note = Core
  misc_feature 26..50: note = RF
ccgcttccccgcgggcgtcaccatttctttcccacgaggtccttcatgca

SEQ ID NO: 27729 - DNA, 50 bp, unidentified
  source 1..50: mol_type = unassigned DNA; note = target_bb6866b
  misc_feature 1..23: note = LF
  misc_feature 24..25: note = Core
  misc_feature 26..50: note = RF
cagacaccttgggctgaccaaggaggcttagggatatccttaggcacgta

SEQ ID NO: 27730 - DNA, 50 bp, unidentified
  source 1..50: mol_type = unassigned DNA; note = target_bb6eaa9
  misc_feature 1..23: note = LF
  misc_feature 24..25: note = Core
  misc_feature 26..50: note = RF
tccccatgacatataacttgtagtggtcaactaaaactggccaccgcttt

SEQ ID NO: 27731 - DNA, 50 bp, unidentified
  source 1..50: mol_type = unassigned DNA; note = target_bb758a3
  misc_feature 1..24: note = LF
  misc_feature 25: note = Core
  misc_feature 26..50: note = RF
cgctctggtagcaccaggcggcggttttttctggtggacgcggcgggcgc

SEQ ID NO: 27732 - DNA, 50 bp, unidentified
  source 1..50: mol_type = unassigned DNA; note = target_bb76162
  misc_feature 1..22: note = LF
  misc_feature 23..25: note = Core
  misc_feature 26..50: note = RF
ccggctatcgcggacaaggtccgctcctacgggaggcacgccgtgctccc

SEQ ID NO: 27733 - DNA, 50 bp, unidentified
  source 1..50: mol_type = unassigned DNA; note = target_bb78397
  misc_feature 1..23: note = LF
  misc_feature 24..25: note = Core
  misc_feature 26..50: note = RF
atgaggcctctctgcctggccacctaacgccctgggcttgagctgccagg

SEQ ID NO: 27734 - DNA, 50 bp, unidentified
  source 1..50: mol_type = unassigned DNA; note = target_bb7bcc4
  misc_feature 1..22: note = LF
  misc_feature 23..25: note = Core
  misc_feature 26..50: note = RF
tatcactccttatataattatatcataattttagatttaaaattacatcg

SEQ ID NO: 27735 - DNA, 50 bp, unidentified
  source 1..50: mol_type = unassigned DNA; note = target_bb87c4c
  misc_feature 1..23: note = LF
  misc_feature 24..25: note = Core
  misc_feature 26..50: note = RF
acaattcacctataatattatatcatataaattagaaaatatgcatttat

SEQ ID NO: 27736 - DNA, 50 bp, unidentified
  source 1..50: mol_type = unassigned DNA; note = target_bb8bf3c
  misc_feature 1..24: note = LF
  misc_feature 25: note = Core
  misc_feature 26..50: note = RF
ggcgtcaacccgtggatttccacattccgagaagccgacttcacaggcac

SEQ ID NO: 27737 - DNA, 50 bp, unidentified
  source 1..50: mol_type = unassigned DNA; note = target_bb8e313
  misc_feature 1..23: note = LF
  misc_feature 24..25: note = Core
  misc_feature 26..50: note = RF
gtttcgcaagagctcaacccatcctacgccagtcgccgcgtcggcaatga

SEQ ID NO: 27738 - DNA, 50 bp, unidentified
  source 1..50: mol_type = unassigned DNA; note = target_bb917ca
  misc_feature 1..24: note = LF
  misc_feature 25: note = Core
  misc_feature 26..50: note = RF
actctgcatcgtcactaatatgattggtattaaaaccaaatgcttgataa

SEQ ID NO: 27739 - DNA, 50 bp, unidentified
  source 1..50: mol_type = unassigned DNA; note = target_bb94c95
  misc_feature 1..23: note = LF
  misc_feature 24..25: note = Core
  misc_feature 26..50: note = RF
ttacgtattccataattcgtctccttattttatgaaattcggatcatttg

SEQ ID NO: 27740 - DNA, 50 bp, unidentified
  source 1..50: mol_type = unassigned DNA; note = target_bb97271
  misc_feature 1..23: note = LF
  misc_feature 24..25: note = Core
  misc_feature 26..50: note = RF
cccagagctcgcggctgaagccgctcctacgcatcagcggcgctacagca

SEQ ID NO: 27741 - DNA, 50 bp, unidentified
  source 1..50: mol_type = unassigned DNA; note = target_bb991d6
  misc_feature 1..23: note = LF
  misc_feature 24..25: note = Core
  misc_feature 26..50: note = RF
cccacagggacgccctcctgtcccttgacacgggcggcgttcggaaccga

SEQ ID NO: 27742 - DNA, 50 bp, unidentified
  source 1..50: mol_type = unassigned DNA; note = target_bb9b743
  misc_feature 1..23: note = LF
  misc_feature 24..25: note = Core
  misc_feature 26..50: note = RF
gcaatgggcttaacgtgctttatttccgttttctgagacgtccccagtat

SEQ ID NO: 27743 - DNA, 50 bp, unidentified
  source 1..50: mol_type = unassigned DNA; note = target_bba2685
  misc_feature 1..21: note = LF
  misc_feature 22..25: note = Core
  misc_feature 26..50: note = RF
tcctcccacgcgagcgacccgctcatgaggcgacctccgcgggaagctcc

SEQ ID NO: 27744 - DNA, 50 bp, unidentified
  source 1..50: mol_type = unassigned DNA; note = target_bba2f2e
  misc_feature 1..23: note = LF
  misc_feature 24..25: note = Core
  misc_feature 26..50: note = RF
tggcagcgaattttccaagaccggacattcaacttcgtttgggaaaccag

SEQ ID NO: 27745 - DNA, 50 bp, unidentified
  source 1..50: mol_type = unassigned DNA; note = target_bbad913
  misc_feature 1..22: note = LF
  misc_feature 23..25: note = Core
  misc_feature 26..50: note = RF
ctattgttagaaatatatcctccttattttcttccatttttgttacattc

SEQ ID NO: 27746 - DNA, 50 bp, unidentified
  source 1..50: mol_type = unassigned DNA; note = target_bbaf3f4
  misc_feature 1..23: note = LF
  misc_feature 24..25: note = Core
  misc_feature 26..50: note = RF
agcggcacggcagtcgagcatggctcgactctacagaagcaagccgactg

SEQ ID NO: 27747 - DNA, 50 bp, unidentified
  source 1..50: mol_type = unassigned DNA; note = target_bbb5a35
  misc_feature 1..24: note = LF
  misc_feature 25: note = Core
  misc_feature 26..50: note = RF
ggccggagctagggcctgttgacgttcacatggggagccatagaaacccg

SEQ ID NO: 27748 - DNA, 50 bp, unidentified
  source 1..50: mol_type = unassigned DNA; note = target_bbc12e4
  misc_feature 1..23: note = LF
  misc_feature 24..25: note = Core
  misc_feature 26..50: note = RF
ttcttattcaactaacctgccactttagttcaataagaaaaagagttgcc

SEQ ID NO: 27749 - DNA, 50 bp, unidentified
  source 1..50: mol_type = unassigned DNA; note = target_bbc6921
  misc_feature 1..23: note = LF
  misc_feature 24..25: note = Core
  misc_feature 26..50: note = RF
agcattctgtctgtacgaaaaagctccgctttttcaggggtcaagcgccg

SEQ ID NO: 27750 - DNA, 50 bp, unidentified
  source 1..50: mol_type = unassigned DNA; note = target_bbc8ece
  misc_feature 1..23: note = LF
  misc_feature 24..25: note = Core
  misc_feature 26..50: note = RF
cgacacgccagcccaggacgcccctagatggttccgacggcaatgacgac

SEQ ID NO: 27751 - DNA, 50 bp, unidentified
  source 1..50: mol_type = unassigned DNA; note = target_bbdb3be
  misc_feature 1..23: note = LF
  misc_feature 24..25: note = Core
  misc_feature 26..50: note = RF
attgccatcagtcttcgacaagctcagactgacaaaatgagagttttgtg

SEQ ID NO: 27752 - DNA, 50 bp, unidentified
  source 1..50: mol_type = unassigned DNA; note = target_bbdbb8b
  misc_feature 1..23: note = LF
  misc_feature 24..25: note = Core
  misc_feature 26..50: note = RF
tccaagttttttcattattcctcctttagaaacgatgctctccatcaaga

SEQ ID NO: 27753 - DNA, 50 bp, unidentified
  source 1..50: mol_type = unassigned DNA; note = target_bbdcabb
  misc_feature 1..21: note = LF
  misc_feature 22..25: note = Core
  misc_feature 26..50: note = RF
tttttattttctgacataaaatcacctcattctgtgctgccttttacggg

SEQ ID NO: 27754 - DNA, 50 bp, unidentified
  source 1..50: mol_type = unassigned DNA; note = target_bbdddfb
  misc_feature 1..23: note = LF
  misc_feature 24..25: note = Core
  misc_feature 26..50: note = RF
catccggtgattccgcacacggtgtctccttgggtggacggcgaggccga

SEQ ID NO: 27755 - DNA, 50 bp, unidentified
  source 1..50: mol_type = unassigned DNA; note = target_bc0152f
  misc_feature 1..23: note = LF
  misc_feature 24..25: note = Core
  misc_feature 26..50: note = RF
gtgaattaaatcttaggtcgaactcaggttattgataaaaaacttcaaaa

SEQ ID NO: 27756 - DNA, 50 bp, unidentified
  source 1..50: mol_type = unassigned DNA; note = target_bc04d5d
  misc_feature 1..24: note = LF
  misc_feature 25: note = Core
  misc_feature 26..50: note = RF
acttccccttttatagaacaggacttaccgtaacttacaaatcttgcacc

SEQ ID NO: 27757 - DNA, 50 bp, unidentified
  source 1..50: mol_type = unassigned DNA; note = target_bc0b408
  misc_feature 1..23: note = LF
  misc_feature 24..25: note = Core
  misc_feature 26..50: note = RF
gaccatcatcgcgagcaagctcgctcctacaggggagatcgggtatgcgc

SEQ ID NO: 27758 - DNA, 50 bp, unidentified
  source 1..50: mol_type = unassigned DNA; note = target_bc0f4e6
  misc_feature 1..23: note = LF
  misc_feature 24..25: note = Core
  misc_feature 26..50: note = RF
ggtccccaatgcgacgcaggctttgttgcattaagttcacgaggcataac

SEQ ID NO: 27759 - DNA, 50 bp, unidentified
  source 1..50: mol_type = unassigned DNA; note = target_bc12890
  misc_feature 1..23: note = LF
  misc_feature 24..25: note = Core
  misc_feature 26..50: note = RF
acttaggtctgctaagtgccaacagcagacatagaaatgaaaagagcccc

SEQ ID NO: 27760 - DNA, 50 bp, unidentified
  source 1..50: mol_type = unassigned DNA; note = target_bc4003c
  misc_feature 1..22: note = LF
  misc_feature 23..25: note = Core
  misc_feature 26..50: note = RF
gtaatactggtcggcatggcgaaaggacagataagcgaacttctgtcgcc

SEQ ID NO: 27761 - DNA, 50 bp, unidentified
  source 1..50: mol_type = unassigned DNA; note = target_bc406f2
  misc_feature 1..23: note = LF
  misc_feature 24..25: note = Core
  misc_feature 26..50: note = RF
atcaactaacatcgtttttccttctacttcttcatcacttaatatgttaa

SEQ ID NO: 27762 - DNA, 50 bp, unidentified
  source 1..50: mol_type = unassigned DNA; note = target_bc40741
  misc_feature 1..23: note = LF
  misc_feature 24..25: note = Core
  misc_feature 26..50: note = RF
gcgcacccggcattccctgcgccctcttcttgtgggggacatgcttgatg

SEQ ID NO: 27763 - DNA, 50 bp, unidentified
  source 1..50: mol_type = unassigned DNA; note = target_bc4ce60
  misc_feature 1..24: note = LF
  misc_feature 25: note = Core
  misc_feature 26..50: note = RF
taggcgagatgtctaagttgtaacttccgagtgggccacgatcccacccg

SEQ ID NO: 27764 - DNA, 50 bp, unidentified
  source 1..50: mol_type = unassigned DNA; note = target_bc5f268
  misc_feature 1..23: note = LF
  misc_feature 24..25: note = Core
  misc_feature 26..50: note = RF
gcgataaggctcatgtccgctattggcaccaagcggacatgctgaccaaa

SEQ ID NO: 27765 - DNA, 50 bp, unidentified
  source 1..50: mol_type = unassigned DNA; note = target_bc6242e
  misc_feature 1..23: note = LF
  misc_feature 24..25: note = Core
  misc_feature 26..50: note = RF
cttcggatctcgcatattttctcctttttataatgccgtctgtatggcga

SEQ ID NO: 27766 - DNA, 50 bp, unidentified
  source 1..50: mol_type = unassigned DNA; note = target_bc6998f
  misc_feature 1..21: note = LF
  misc_feature 22..25: note = Core
  misc_feature 26..50: note = RF
attgtttctgattcagttttctcacctctttctatattcgatgggcggct

SEQ ID NO: 27767 - DNA, 50 bp, unidentified
  source 1..50: mol_type = unassigned DNA; note = target_bc69bb4
  misc_feature 1..23: note = LF
  misc_feature 24..25: note = Core
  misc_feature 26..50: note = RF
catgataatgaatcttttctttcctattgaatttttatttcttctgtttc

SEQ ID NO: 27768 - DNA, 50 bp, unidentified
  source 1..50: mol_type = unassigned DNA; note = target_bc6a81a
  misc_feature 1..23: note = LF
  misc_feature 24..25: note = Core
  misc_feature 26..50: note = RF
gcgcaagtgcgcctttgcccaccctacgaatcccggctcgcgacgtgtaa

SEQ ID NO: 27769 - DNA, 50 bp, unidentified
  source 1..50: mol_type = unassigned DNA; note = target_bc70432
  misc_feature 1..23: note = LF
  misc_feature 24..25: note = Core
  misc_feature 26..50: note = RF
ccgctgagctaccggcacatcgaagagatgatggaagagcgaggcgtgtc

SEQ ID NO: 27770 - DNA, 50 bp, unidentified
  source 1..50: mol_type = unassigned DNA; note = target_bc7cad5
  misc_feature 1..23: note = LF
  misc_feature 24..25: note = Core
  misc_feature 26..50: note = RF
ttattgtttttcccatttttatcctccaaatcaaaagctctcatattaat

SEQ ID NO: 27771 - DNA, 50 bp, unidentified
  source 1..50: mol_type = unassigned DNA; note = target_bc96ab8
  misc_feature 1..23: note = LF
  misc_feature 24..25: note = Core
  misc_feature 26..50: note = RF
ggtttcgcttcgctctacccatcctacgcgctacatctttggagtcgtac

SEQ ID NO: 27772 - DNA, 50 bp, unidentified
  source 1..50: mol_type = unassigned DNA; note = target_bc97e0d
  misc_feature 1..22: note = LF
  misc_feature 23..25: note = Core
  misc_feature 26..50: note = RF
tccatgactttgacagcccctttctcataatgttccataatgaccatttc

SEQ ID NO: 27773 - DNA, 50 bp, unidentified
  source 1..50: mol_type = unassigned DNA; note = target_bc98d96
  misc_feature 1..24: note = LF
  misc_feature 25: note = Core
  misc_feature 26..50: note = RF
ggacaaaaaacagtttgctgttttcgttcctcaacattttagcaaactat

SEQ ID NO: 27774 - DNA, 50 bp, unidentified
  source 1..50: mol_type = unassigned DNA; note = target_bc9dda3
  misc_feature 1..23: note = LF
  misc_feature 24..25: note = Core
  misc_feature 26..50: note = RF
gtccgataaaagagacaagaccgctccgcttttagaatcgagaaccaaga

SEQ ID NO: 27775 - DNA, 50 bp, unidentified
  source 1..50: mol_type = unassigned DNA; note = target_bca3860
  misc_feature 1..22: note = LF
  misc_feature 23..25: note = Core
  misc_feature 26..50: note = RF
aaggcgttcatcaagcggcagaagaacgacgcagcggatgcggaggcgat

SEQ ID NO: 27776 - DNA, 50 bp, unidentified
  source 1..50: mol_type = unassigned DNA; note = target_bcaf4f6
  misc_feature 1..23: note = LF
  misc_feature 24..25: note = Core
  misc_feature 26..50: note = RF
atctgtgtaatcttcatgttatcctccggtatatatggttattcaataat

SEQ ID NO: 27777 - DNA, 50 bp, unidentified
  source 1..50: mol_type = unassigned DNA; note = target_bcb4508
  misc_feature 1..23: note = LF
  misc_feature 24..25: note = Core
  misc_feature 26..50: note = RF
atattgcgtcatatatataccccctaacatttattatcacatattgaatt

SEQ ID NO: 27778 - DNA, 50 bp, unidentified
  source 1..50: mol_type = unassigned DNA; note = target_bcbaa11
  misc_feature 1..23: note = LF
  misc_feature 24..25: note = Core
  misc_feature 26..50: note = RF
ggccgtcgaaagcgcacctgttcaggaccttttagtgcatgatgttgcgc

SEQ ID NO: 27779 - DNA, 50 bp, unidentified
  source 1..50: mol_type = unassigned DNA; note = target_bcc9cf7
  misc_feature 1..24: note = LF
  misc_feature 25: note = Core
  misc_feature 26..50: note = RF
caataaaacccacttcgggtggccttttttaatatttctagctcttcggc

SEQ ID NO: 27780 - DNA, 50 bp, unidentified
  source 1..50: mol_type = unassigned DNA; note = target_bcce063
  misc_feature 1..23: note = LF
  misc_feature 24..25: note = Core
  misc_feature 26..50: note = RF
gcggcaccaccagggcccggtgaagttgacagcataatgacgggtttgtt

SEQ ID NO: 27781 - DNA, 50 bp, unidentified
  source 1..50: mol_type = unassigned DNA; note = target_bcce634
  misc_feature 1..23: note = LF
  misc_feature 24..25: note = Core
  misc_feature 26..50: note = RF
tgggcactaaactgccacagcgttggtgcacggatccattgctgaccaca

SEQ ID NO: 27782 - DNA, 50 bp, unidentified
  source 1..50: mol_type = unassigned DNA; note = target_bcce8e7
  misc_feature 1..23: note = LF
  misc_feature 24..25: note = Core
  misc_feature 26..50: note = RF
agggacagggacgggtgctcctcctttctttcctcgcgggcggataggtc

SEQ ID NO: 27783 - DNA, 50 bp, unidentified
  source 1..50: mol_type = unassigned DNA; note = target_bcce9f1
  misc_feature 1..24: note = LF
  misc_feature 25: note = Core
  misc_feature 26..50: note = RF
caagccggagatcttcaatacggaccaaggctcgcagttcatcagccgcg

SEQ ID NO: 27784 - DNA, 50 bp, unidentified
  source 1..50: mol_type = unassigned DNA; note = target_bcd39d8
  misc_feature 1..23: note = LF
  misc_feature 24..25: note = Core
  misc_feature 26..50: note = RF
aagtggtctaaaatgttcttaaaaagtctagatgaattttagaaatttct

SEQ ID NO: 27785 - DNA, 50 bp, unidentified
  source 1..50: mol_type = unassigned DNA; note = target_bcd802d
  misc_feature 1..23: note = LF
  misc_feature 24..25: note = Core
  misc_feature 26..50: note = RF
gggcacgcttcgctttgcccaccctacaattcgtgtccgggacgacagcc

SEQ ID NO: 27786 - DNA, 50 bp, unidentified
  source 1..50: mol_type = unassigned DNA; note = target_bcd88eb
  misc_feature 1..22: note = LF
  misc_feature 23..25: note = Core
  misc_feature 26..50: note = RF
cggagagcagttcgcaaccgactgacagcaccgctcagagcactcagcta

SEQ ID NO: 27787 - DNA, 50 bp, unidentified
  source 1..50: mol_type = unassigned DNA; note = target_bcda791
  misc_feature 1..23: note = LF
  misc_feature 24..25: note = Core
  misc_feature 26..50: note = RF
accaccgtataagcatattaactctgcttcctccactttccaacttatta

SEQ ID NO: 27788 - DNA, 50 bp, unidentified
  source 1..50: mol_type = unassigned DNA; note = target_bcdc147
  misc_feature 1..23: note = LF
  misc_feature 24..25: note = Core
  misc_feature 26..50: note = RF
gcgtgggcacagacgtgcccaccctacttgactggtaatcaaatatttat

SEQ ID NO: 27789 - DNA, 50 bp, unidentified
  source 1..50: mol_type = unassigned DNA; note = target_bce267e
  misc_feature 1..24: note = LF
  misc_feature 25: note = Core
  misc_feature 26..50: note = RF
gcaggatttgaacccacgaccccctggttcgtaggcggccaggcgattgt

SEQ ID NO: 27790 - DNA, 50 bp, unidentified
  source 1..50: mol_type = unassigned DNA; note = target_bce82af
  misc_feature 1..23: note = LF
  misc_feature 24..25: note = Core
  misc_feature 26..50: note = RF
ttatctggcggaatgactacaaatggtcgtttcttgccgggcagttttcc

SEQ ID NO: 27791 - DNA, 50 bp, unidentified
  source 1..50: mol_type = unassigned DNA; note = target_bced576
  misc_feature 1..23: note = LF
  misc_feature 24..25: note = Core
  misc_feature 26..50: note = RF
tccaaacaacttcgatttcccttagcgggtattattgcagaaatgcccac

SEQ ID NO: 27792 - DNA, 50 bp, unidentified
  source 1..50: mol_type = unassigned DNA; note = target_bceed1e
  misc_feature 1..22: note = LF
  misc_feature 23..25: note = Core
  misc_feature 26..50: note = RF
tcgtcttcgaatcccatgatggaagggccttggtgccgattccgaagaga

SEQ ID NO: 27793 - DNA, 50 bp, unidentified
  source 1..50: mol_type = unassigned DNA; note = target_bcf3346
  misc_feature 1..23: note = LF
  misc_feature 24..25: note = Core
  misc_feature 26..50: note = RF
aacagcgcaatgtctgcgttgggtggaaagcggacattcaccctggaacg

SEQ ID NO: 27794 - DNA, 50 bp, unidentified
  source 1..50: mol_type = unassigned DNA; note = target_bcf36c3
  misc_feature 1..21: note = LF
  misc_feature 22..25: note = Core
  misc_feature 26..50: note = RF
cgggtggacaagcacgcgaagctcctggtcggcacgggtgatcttggtcg

SEQ ID NO: 27795 - DNA, 50 bp, unidentified
  source 1..50: mol_type = unassigned DNA; note = target_bd069b3
  misc_feature 1..23: note = LF
  misc_feature 24..25: note = Core
  misc_feature 26..50: note = RF
ttctttctttcataatctacctcctttccttgttcgctatctccaccacc

SEQ ID NO: 27796 - DNA, 50 bp, unidentified
  source 1..50: mol_type = unassigned DNA; note = target_bd10035
  misc_feature 1..23: note = LF
  misc_feature 24..25: note = Core
  misc_feature 26..50: note = RF
ttgacgcgccgtctcacattgattgtcgcgggacagggccgtgagtttcg

SEQ ID NO: 27797 - DNA, 50 bp, unidentified
  source 1..50: mol_type = unassigned DNA; note = target_bd138c7
  misc_feature 1..23: note = LF
  misc_feature 24..25: note = Core
  misc_feature 26..50: note = RF
gctgcactgcatgagtccgcttttggcccttctctgacctcgcgcgatgt

SEQ ID NO: 27798 - DNA, 50 bp, unidentified
  source 1..50: mol_type = unassigned DNA; note = target_bd1f09b
  misc_feature 1..24: note = LF
  misc_feature 25: note = Core
  misc_feature 26..50: note = RF
tcgggactcctctgcccgtagggatgttacgccagtttgttgagttgacc

SEQ ID NO: 27799 - DNA, 50 bp, unidentified
  source 1..50: mol_type = unassigned DNA; note = target_bd2170e
  misc_feature 1..23: note = LF
  misc_feature 24..25: note = Core
  misc_feature 26..50: note = RF
tgggtttcatgcttcaacccaacctacgaaagagagtttttttattgtgt

SEQ ID NO: 27800 - DNA, 50 bp, unidentified
  source 1..50: mol_type = unassigned DNA; note = target_bd23faa
  misc_feature 1..21: note = LF
  misc_feature 22..25: note = Core
  misc_feature 26..50: note = RF
atcctcgaccaggctcatgccgcctggtccatcgcggcgtgcagcgcggc

SEQ ID NO: 27801 - DNA, 50 bp, unidentified
  source 1..50: mol_type = unassigned DNA; note = target_bd260fc
  misc_feature 1..24: note = LF
  misc_feature 25: note = Core
  misc_feature 26..50: note = RF
gatgcaattctccatgtaaaagctctttcttgggtttatcagccgagcag

SEQ ID NO: 27802 - DNA, 50 bp, unidentified
  source 1..50: mol_type = unassigned DNA; note = target_bd272ce
  misc_feature 1..23: note = LF
  misc_feature 24..25: note = Core
  misc_feature 26..50: note = RF
agccgattccgctgtatttttgctgttttaacagcgaaccctcccctccc

SEQ ID NO: 27803 - DNA, 50 bp, unidentified
  source 1..50: mol_type = unassigned DNA; note = target_bd2a219
  misc_feature 1..23: note = LF
  misc_feature 24..25: note = Core
  misc_feature 26..50: note = RF
cgacgccgtagtcgccgcctgacctagccggcgtagccgtcgagggtgcc

SEQ ID NO: 27804 - DNA, 50 bp, unidentified
  source 1..50: mol_type = unassigned DNA; note = target_bd2c002
  misc_feature 1..23: note = LF
  misc_feature 24..25: note = Core
  misc_feature 26..50: note = RF
ccggggctattttcacgtcttccctacaggaagagtgaagaaaagtactg

SEQ ID NO: 27805 - DNA, 50 bp, unidentified
  source 1..50: mol_type = unassigned DNA; note = target_bd3365c
  misc_feature 1..24: note = LF
  misc_feature 25: note = Core
  misc_feature 26..50: note = RF
aatgccgctgctatgacgccgaacgccctgagttcagccgccgccgtagg

SEQ ID NO: 27806 - DNA, 50 bp, unidentified
  source 1..50: mol_type = unassigned DNA; note = target_bd3d9fa
  misc_feature 1..23: note = LF
  misc_feature 24..25: note = Core
  misc_feature 26..50: note = RF
tgcgctgccagtaaacacgggcgctcaatgtgagcgggtatcgccgagcg

SEQ ID NO: 27807 - DNA, 50 bp, unidentified
  source 1..50: mol_type = unassigned DNA; note = target_bd5201b
  misc_feature 1..24: note = LF
  misc_feature 25: note = Core
  misc_feature 26..50: note = RF
aagcttttaaactatcctgcccgttagcgcagcaaggctgccaatcgtgc

SEQ ID NO: 27808 - DNA, 50 bp, unidentified
  source 1..50: mol_type = unassigned DNA; note = target_bd5dcc9
  misc_feature 1..23: note = LF
  misc_feature 24..25: note = Core
  misc_feature 26..50: note = RF
cgaacaaaccgaaggcgccaagttggctcaaggtcatgaatgatctgaag

SEQ ID NO: 27809 - DNA, 50 bp, unidentified
  source 1..50: mol_type = unassigned DNA; note = target_bd619ad
  misc_feature 1..23: note = LF
  misc_feature 24..25: note = Core
  misc_feature 26..50: note = RF
gctatcgcggccataggcccctcctaccaataagagaatacctatacatt

SEQ ID NO: 27810 - DNA, 50 bp, unidentified
  source 1..50: mol_type = unassigned DNA; note = target_bd66b27
  misc_feature 1..23: note = LF
  misc_feature 24..25: note = Core
  misc_feature 26..50: note = RF
acgatttcctggaccctcaggagaataaataatgtttaccgaagcagaac

SEQ ID NO: 27811 - DNA, 50 bp, unidentified
  source 1..50: mol_type = unassigned DNA; note = target_bd6ccbe
  misc_feature 1..24: note = LF
  misc_feature 25: note = Core
  misc_feature 26..50: note = RF
caggaagattcgcgcctgaaggcgcctacaggggggcgaggcggttgtgg

SEQ ID NO: 27812 - DNA, 50 bp, unidentified
  source 1..50: mol_type = unassigned DNA; note = target_bd74f66
  misc_feature 1..22: note = LF
  misc_feature 23..25: note = Core
  misc_feature 26..50: note = RF
aatgtccactgttgcgcaaagtagaaatgtcactttgcgctgccatacga

SEQ ID NO: 27813 - DNA, 50 bp, unidentified
  source 1..50: mol_type = unassigned DNA; note = target_bd78734
  misc_feature 1..24: note = LF
  misc_feature 25: note = Core
  misc_feature 26..50: note = RF
ggccagggcgccaggattccggagagatcaccatgaacctgaagggcagc

SEQ ID NO: 27814 - DNA, 50 bp, unidentified
  source 1..50: mol_type = unassigned DNA; note = target_bd7cf26
  misc_feature 1..22: note = LF
  misc_feature 23..25: note = Core
  misc_feature 26..50: note = RF
aattacggtgacagaattacggtgacagtgcacttaactaacccgccgct

SEQ ID NO: 27815 - DNA, 50 bp, unidentified
  source 1..50: mol_type = unassigned DNA; note = target_bd80620
  misc_feature 1..23: note = LF
  misc_feature 24..25: note = Core
  misc_feature 26..50: note = RF
catttcatgaggatttgcggctttgttgcgcaaatgctgtgaaggtttca

SEQ ID NO: 27816 - DNA, 50 bp, unidentified
  source 1..50: mol_type = unassigned DNA; note = target_bd845e7
  misc_feature 1..22: note = LF
  misc_feature 23..25: note = Core
  misc_feature 26..50: note = RF
gggctcgagcccgaccggatataaggctgtggggggccgatggcccgccg

SEQ ID NO: 27817 - DNA, 50 bp, unidentified
  source 1..50: mol_type = unassigned DNA; note = target_bd88477
  misc_feature 1..23: note = LF
  misc_feature 24..25: note = Core
  misc_feature 26..50: note = RF
cttttgatttgctcatattgttccttttattggcagtcaaatcttccaat

SEQ ID NO: 27818 - DNA, 50 bp, unidentified
  source 1..50: mol_type = unassigned DNA; note = target_bd89fe4
  misc_feature 1..22: note = LF
  misc_feature 23..25: note = Core
  misc_feature 26..50: note = RF
ttgaggattaaagcacgaaagcagacattcatctcgccgttaggcaaagc

SEQ ID NO: 27819 - DNA, 50 bp, unidentified
  source 1..50: mol_type = unassigned DNA; note = target_bd98dba
  misc_feature 1..23: note = LF
  misc_feature 24..25: note = Core
  misc_feature 26..50: note = RF
tggcggatgacgctgcgcttatccgccctacgaggtacggtccccgggtt

SEQ ID NO: 27820 - DNA, 50 bp, unidentified
  source 1..50: mol_type = unassigned DNA; note = target_bda25c6
  misc_feature 1..23: note = LF
  misc_feature 24..25: note = Core
  misc_feature 26..50: note = RF
cgacgcctctgggtgcgtgggtgctcatgccgtcgcctccgtgctcgcca

SEQ ID NO: 27821 - DNA, 50 bp, unidentified
  source 1..50: mol_type = unassigned DNA; note = target_bdac358
  misc_feature 1..22: note = LF
  misc_feature 23..25: note = Core
  misc_feature 26..50: note = RF
gcttattaaattaacgccccccgtttcgtattatttatatccattgagag

SEQ ID NO: 27822 - DNA, 50 bp, unidentified
  source 1..50: mol_type = unassigned DNA; note = target_bdb3887
  misc_feature 1..23: note = LF
  misc_feature 24..25: note = Core
  misc_feature 26..50: note = RF
attgctatcatgatgggcacctcctttcattgatttttccttactcccaa

SEQ ID NO: 27823 - DNA, 50 bp, unidentified
  source 1..50: mol_type = unassigned DNA; note = target_bdb3f06
  misc_feature 1..24: note = LF
  misc_feature 25: note = Core
  misc_feature 26..50: note = RF
aggacagccgtctcaccgatgaccccccccaggggctgcagatgtactcc

SEQ ID NO: 27824 - DNA, 50 bp, unidentified
  source 1..50: mol_type = unassigned DNA; note = target_bdbca4f
  misc_feature 1..21: note = LF
  misc_feature 22..25: note = Core
  misc_feature 26..50: note = RF
tcagatcatcgtgcgtcaaatatgacgcacgatgatctcgctttatgttg

SEQ ID NO: 27825 - DNA, 50 bp, unidentified
  source 1..50: mol_type = unassigned DNA; note = target_bdbdd45
  misc_feature 1..22: note = LF
  misc_feature 23..25: note = Core
  misc_feature 26..50: note = RF
caagttccacattccgttaagttgacgatgctgcagcgtacaactccctt

SEQ ID NO: 27826 - DNA, 50 bp, unidentified
  source 1..50: mol_type = unassigned DNA; note = target_bdc60dc
  misc_feature 1..21: note = LF
  misc_feature 22..25: note = Core
  misc_feature 26..50: note = RF
tgtctcttcttcgcgcaagcgctcatcaggtgctctctcttcttcgcgca

SEQ ID NO: 27827 - DNA, 50 bp, unidentified
  source 1..50: mol_type = unassigned DNA; note = target_bdc748d
  misc_feature 1..24: note = LF
  misc_feature 25: note = Core
  misc_feature 26..50: note = RF
tcattctcgtttcccgccaccaatttcttgaaccgctgcgggattgccgg

SEQ ID NO: 27828 - DNA, 50 bp, unidentified
  source 1..50: mol_type = unassigned DNA; note = target_bdd35df
  misc_feature 1..23: note = LF
  misc_feature 24..25: note = Core
  misc_feature 26..50: note = RF
ttcacatcaccgaccaccagatgaggctgtacatgacctaccgactgaca

SEQ ID NO: 27829 - DNA, 50 bp, unidentified
  source 1..50: mol_type = unassigned DNA; note = target_bddc81b
  misc_feature 1..22: note = LF
  misc_feature 23..25: note = Core
  misc_feature 26..50: note = RF
acacgaaaagtgtcaggttgtgagacgtcattggcgtaaatcatgatgcg

SEQ ID NO: 27830 - DNA, 50 bp, unidentified
  source 1..50: mol_type = unassigned DNA; note = target_bde322e
  misc_feature 1..23: note = LF
  misc_feature 24..25: note = Core
  misc_feature 26..50: note = RF
gcggcagcttgctagccgacccctgcgggttgatcgacggagatccggac

SEQ ID NO: 27831 - DNA, 50 bp, unidentified
  source 1..50: mol_type = unassigned DNA; note = target_bde6c11
  misc_feature 1..23: note = LF
  misc_feature 24..25: note = Core
  misc_feature 26..50: note = RF
gatatgtgattgtctgctcttgttttttctacctctttaattttaccatt

SEQ ID NO: 27832 - DNA, 50 bp, unidentified
  source 1..50: mol_type = unassigned DNA; note = target_bde7da5
  misc_feature 1..22: note = LF
  misc_feature 23..25: note = Core
  misc_feature 26..50: note = RF
gcatttgggaccgcggttctcgaaccaccaattcagcgagccatcgatct

SEQ ID NO: 27833 - DNA, 50 bp, unidentified
  source 1..50: mol_type = unassigned DNA; note = target_bde99d9
  misc_feature 1..24: note = LF
  misc_feature 25: note = Core
  misc_feature 26..50: note = RF
taggttggttaggttaaggagatccagcctccactggaatcggtttaggg

SEQ ID NO: 27834 - DNA, 50 bp, unidentified
  source 1..50: mol_type = unassigned DNA; note = target_bdf0232
  misc_feature 1..23: note = LF
  misc_feature 24..25: note = Core
  misc_feature 26..50: note = RF
ttttcatctttacctccaaaatcctaattctagttacaaccttttttcac

SEQ ID NO: 27835 - DNA, 50 bp, unidentified
  source 1..50: mol_type = unassigned DNA; note = target_bdf75db
  misc_feature 1..24: note = LF
  misc_feature 25: note = Core
  misc_feature 26..50: note = RF
cgcggcggttgcgggcgcaaaatgaaaaaggggcgacgctctcgcgccgc

SEQ ID NO: 27836 - DNA, 50 bp, unidentified
  source 1..50: mol_type = unassigned DNA; note = target_be06605
  misc_feature 1..23: note = LF
  misc_feature 24..25: note = Core
  misc_feature 26..50: note = RF
ttgttaaatacttccataattatctccttagctatattttaaacttaact

SEQ ID NO: 27837 - DNA, 50 bp, unidentified
  source 1..50: mol_type = unassigned DNA; note = target_be09847
  misc_feature 1..23: note = LF
  misc_feature 24..25: note = Core
  misc_feature 26..50: note = RF
gcaaccggcttagcgtgctttatttccgttttctgagacgacccctatct

SEQ ID NO: 27838 - DNA, 50 bp, unidentified
  source 1..50: mol_type = unassigned DNA; note = target_be09c4b
  misc_feature 1..23: note = LF
  misc_feature 24..25: note = Core
  misc_feature 26..50: note = RF
attgtcctttatcataaaatcacctcaatggaattatttccaaattgagg

SEQ ID NO: 27839 - DNA, 50 bp, unidentified
  source 1..50: mol_type = unassigned DNA; note = target_be0b340
  misc_feature 1..22: note = LF
  misc_feature 23..25: note = Core
  misc_feature 26..50: note = RF
gttgttgattttcgctaagaactgacccggtgggggtgcggatctggtaa

SEQ ID NO: 27840 - DNA, 50 bp, unidentified
  source 1..50: mol_type = unassigned DNA; note = target_be0f88d
  misc_feature 1..22: note = LF
  misc_feature 23..25: note = Core
  misc_feature 26..50: note = RF
acggggttcgtcgtcatcggtctcctcctgcgtttcgggtgcaggttatg

SEQ ID NO: 27841 - DNA, 50 bp, unidentified
  source 1..50: mol_type = unassigned DNA; note = target_be129d2
  misc_feature 1..24: note = LF
  misc_feature 25: note = Core
  misc_feature 26..50: note = RF
tcgaccggttgagaccgcccgggtttccggcaagttcaatcgaactggcc

SEQ ID NO: 27842 - DNA, 50 bp, unidentified
  source 1..50: mol_type = unassigned DNA; note = target_be1d275
  misc_feature 1..22: note = LF
  misc_feature 23..25: note = Core
  misc_feature 26..50: note = RF
ccctctcttattggagagggcttttttaattataagggattatgtggggg

SEQ ID NO: 27843 - DNA, 50 bp, unidentified
  source 1..50: mol_type = unassigned DNA; note = target_be22b34
  misc_feature 1..23: note = LF
  misc_feature 24..25: note = Core
  misc_feature 26..50: note = RF
cctgccgtgtgtgccatgtgtgctaaatttgtgccccctgtgctaggcaa

SEQ ID NO: 27844 - DNA, 50 bp, unidentified
  source 1..50: mol_type = unassigned DNA; note = target_be2b14b
  misc_feature 1..23: note = LF
  misc_feature 24..25: note = Core
  misc_feature 26..50: note = RF
tcataccccattaccctcagggcttgttgacaaagacgaaggcggcgccc

SEQ ID NO: 27845 - DNA, 50 bp, unidentified
  source 1..50: mol_type = unassigned DNA; note = target_be300eb
  misc_feature 1..23: note = LF
  misc_feature 24..25: note = Core
  misc_feature 26..50: note = RF
tctgggtggcatgacagcggttcctttcgggggctggtgtcgtgcgaaga

SEQ ID NO: 27846 - DNA, 50 bp, unidentified
  source 1..50: mol_type = unassigned DNA; note = target_be32285
  misc_feature 1..24: note = LF
  misc_feature 25: note = Core
  misc_feature 26..50: note = RF
agtccagtcagtgcaaggatggagagcacggccatgacgacgagactcta

SEQ ID NO: 27847 - DNA, 50 bp, unidentified
  source 1..50: mol_type = unassigned DNA; note = target_be38277
  misc_feature 1..23: note = LF
  misc_feature 24..25: note = Core
  misc_feature 26..50: note = RF
aatagccgcctttgctctggattcccgatcgctcgctgcgcgagcgtcgg

SEQ ID NO: 27848 - DNA, 50 bp, unidentified
  source 1..50: mol_type = unassigned DNA; note = target_be3fd40
  misc_feature 1..23: note = LF
  misc_feature 24..25: note = Core
  misc_feature 26..50: note = RF
ttgcagctcatttcaccgaagcggacattgaactccgctgcgccttacgg

SEQ ID NO: 27849 - DNA, 50 bp, unidentified
  source 1..50: mol_type = unassigned DNA; note = target_be412fe
  misc_feature 1..22: note = LF
  misc_feature 23..25: note = Core
  misc_feature 26..50: note = RF
cctgaagatgggactgtatctcctttcatatgtacggatgcgtgaaagga

SEQ ID NO: 27850 - DNA, 50 bp, unidentified
  source 1..50: mol_type = unassigned DNA; note = target_be41ecc
  misc_feature 1..23: note = LF
  misc_feature 24..25: note = Core
  misc_feature 26..50: note = RF
atcactgtcgggcgagtcgacagtggcacacgatagttttattaaactat

SEQ ID NO: 27851 - DNA, 50 bp, unidentified
  source 1..50: mol_type = unassigned DNA; note = target_be429e6
  misc_feature 1..23: note = LF
  misc_feature 24..25: note = Core
  misc_feature 26..50: note = RF
gttctgatacaggcacttagcttgtcgtttaaggtccgcccgtagtccgg

SEQ ID NO: 27852 - DNA, 50 bp, unidentified
  source 1..50: mol_type = unassigned DNA; note = target_be4563f
  misc_feature 1..23: note = LF
  misc_feature 24..25: note = Core
  misc_feature 26..50: note = RF
tgcgataagattcttcgctacgctcagaatgacaaaaggataaacaaaaa

SEQ ID NO: 27853 - DNA, 50 bp, unidentified
  source 1..50: mol_type = unassigned DNA; note = target_be4a55b
  misc_feature 1..23: note = LF
  misc_feature 24..25: note = Core
  misc_feature 26..50: note = RF
gtagacgcgcttatggctcgcacctcaggatgacggattgagagtcccgg

SEQ ID NO: 27854 - DNA, 50 bp, unidentified
  source 1..50: mol_type = unassigned DNA; note = target_be4fb2b
  misc_feature 1..23: note = LF
  misc_feature 24..25: note = Core
  misc_feature 26..50: note = RF
atatcgaacgtcatgacgccaacctagggcgtggccatgtgcggcgaacg

SEQ ID NO: 27855 - DNA, 50 bp, unidentified
  source 1..50: mol_type = unassigned DNA; note = target_be51a46
  misc_feature 1..23: note = LF
  misc_feature 24..25: note = Core
  misc_feature 26..50: note = RF
tgagtagtcgtaagccatttgttctccttatgtgctattactctttgatc

SEQ ID NO: 27856 - DNA, 50 bp, unidentified
  source 1..50: mol_type = unassigned DNA; note = target_be57e26
  misc_feature 1..24: note = LF
  misc_feature 25: note = Core
  misc_feature 26..50: note = RF
atacggaagcacccatggaaaggagcaattatgttcatttcaatcactgt

SEQ ID NO: 27857 - DNA, 50 bp, unidentified
  source 1..50: mol_type = unassigned DNA; note = target_be5821e
  misc_feature 1..22: note = LF
  misc_feature 23..25: note = Core
  misc_feature 26..50: note = RF
ggccaagctacccacccaatcatgacccacatctgccgtccgccggtaca

SEQ ID NO: 27858 - DNA, 50 bp, unidentified
  source 1..50: mol_type = unassigned DNA; note = target_be5a0fd
  misc_feature 1..23: note = LF
  misc_feature 24..25: note = Core
  misc_feature 26..50: note = RF
cccctacgcccataaacaaactccttttaacgattatcaaatcaacaatt

SEQ ID NO: 27859 - DNA, 50 bp, unidentified
  source 1..50: mol_type = unassigned DNA; note = target_be5aaf6
  misc_feature 1..22: note = LF
  misc_feature 23..25: note = Core
  misc_feature 26..50: note = RF
gctgccggcttagtcggcggctttttcgtttgcgaaatgtgctaacgaac

SEQ ID NO: 27860 - DNA, 50 bp, unidentified
  source 1..50: mol_type = unassigned DNA; note = target_be5ac3a
  misc_feature 1..21: note = LF
  misc_feature 22..25: note = Core
  misc_feature 26..50: note = RF
ttagaccgctaaggcggtcttttttgttgaaaaagtatattctaaatctt

SEQ ID NO: 27861 - DNA, 50 bp, unidentified
  source 1..50: mol_type = unassigned DNA; note = target_be5cc52
  misc_feature 1..24: note = LF
  misc_feature 25: note = Core
  misc_feature 26..50: note = RF
cctctgtgggcgacgcgtctcgcgtcggcatcgcctacaacctatcagca

SEQ ID NO: 27862 - DNA, 50 bp, unidentified
  source 1..50: mol_type = unassigned DNA; note = target_be5ffdf
  misc_feature 1..23: note = LF
  misc_feature 24..25: note = Core
  misc_feature 26..50: note = RF
ccaccgaacaccaccgaatgaacagccccgagacgcgcacaggcaagcat

SEQ ID NO: 27863 - DNA, 50 bp, unidentified
  source 1..50: mol_type = unassigned DNA; note = target_be6a4f7
  misc_feature 1..23: note = LF
  misc_feature 24..25: note = Core
  misc_feature 26..50: note = RF
cggactctcaccgccactaagggctcaaagcggtcatcgcggaacctcga

SEQ ID NO: 27864 - DNA, 50 bp, unidentified
  source 1..50: mol_type = unassigned DNA; note = target_be6dcf4
  misc_feature 1..23: note = LF
  misc_feature 24..25: note = Core
  misc_feature 26..50: note = RF
ctgtcagaaggcaggtctgccagaggttggatatcaggcccctcccctcc

SEQ ID NO: 27865 - DNA, 50 bp, unidentified
  source 1..50: mol_type = unassigned DNA; note = target_be74cac
  misc_feature 1..23: note = LF
  misc_feature 24..25: note = Core
  misc_feature 26..50: note = RF
tcacgcgcgccgtctggtgcatgcgctgttagacggctgagcctcaggac

SEQ ID NO: 27866 - DNA, 50 bp, unidentified
  source 1..50: mol_type = unassigned DNA; note = target_be757bc
  misc_feature 1..23: note = LF
  misc_feature 24..25: note = Core
  misc_feature 26..50: note = RF
tgacaacacttggcttgaatctgctctaagcggcgcaacacacatcaaag

SEQ ID NO: 27867 - DNA, 50 bp, unidentified
  source 1..50: mol_type = unassigned DNA; note = target_be89640
  misc_feature 1..22: note = LF
  misc_feature 23..25: note = Core
  misc_feature 26..50: note = RF
aatttttcaaacatcttatctcctttctttattaaatgtgttagaacact

SEQ ID NO: 27868 - DNA, 50 bp, unidentified
  source 1..50: mol_type = unassigned DNA; note = target_be8bd89
  misc_feature 1..21: note = LF
  misc_feature 22..25: note = Core
  misc_feature 26..50: note = RF
acggtgcagtgccatgagggactcctcgactcctttgtccgtcgggcccc

SEQ ID NO: 27869 - DNA, 50 bp, unidentified
  source 1..50: mol_type = unassigned DNA; note = target_be8f4cb
  misc_feature 1..23: note = LF
  misc_feature 24..25: note = Core
  misc_feature 26..50: note = RF
gctccggcaaactcctccggtgcctgtccccacggggggactggcgcctg

SEQ ID NO: 27870 - DNA, 50 bp, unidentified; identical to SEQ ID NO: 25761
  source 1..50: mol_type = unassigned DNA; note = target_be967fa
  misc_feature 1..22: note = LF
  misc_feature 23..25: note = Core
  misc_feature 26..50: note = RF

SEQ ID NO: 27871 - DNA, 50 bp, unidentified
  source 1..50: mol_type = unassigned DNA; note = target_be96d04
  misc_feature 1..23: note = LF
  misc_feature 24..25: note = Core
  misc_feature 26..50: note = RF
aagcgcccagggatgggttcatgcggcccttggaatgggcgacccgatcc

SEQ ID NO: 27872 - DNA, 50 bp, unidentified
  source 1..50: mol_type = unassigned DNA; note = target_be98e32
  misc_feature 1..23: note = LF
  misc_feature 24..25: note = Core
  misc_feature 26..50: note = RF
agccgccgtgtgggtcggtgtccctaagcggcccactcagggacagttga

SEQ ID NO: 27873 - DNA, 50 bp, unidentified
  source 1..50: mol_type = unassigned DNA; note = target_bea8ffd
  misc_feature 1..23: note = LF
  misc_feature 24..25: note = Core
  misc_feature 26..50: note = RF
ccgcgtattttgcccaggcggagctcgaccgcccatttcgcaaatgatgg

SEQ ID NO: 27874 - DNA, 50 bp, unidentified
  source 1..50: mol_type = unassigned DNA; note = target_bea93fb
  misc_feature 1..24: note = LF
  misc_feature 25: note = Core
  misc_feature 26..50: note = RF
ccgtcttgatcttcgccatacagtttcttgataaggcgggaatccgccat

SEQ ID NO: 27875 - DNA, 50 bp, unidentified
  source 1..50: mol_type = unassigned DNA; note = target_beacbd3
  misc_feature 1..21: note = LF
  misc_feature 22..25: note = Core
  misc_feature 26..50: note = RF
tgctcgggcgggccgtgggcggtcatgggccgatcacgtgtgcggggagg

SEQ ID NO: 27876 - DNA, 50 bp, unidentified
  source 1..50: mol_type = unassigned DNA; note = target_beadd73
  misc_feature 1..23: note = LF
  misc_feature 24..25: note = Core
  misc_feature 26..50: note = RF
gccatttcactttcgcccacttgcggacgttcgcgcacgcggtcatgctg

SEQ ID NO: 27877 - DNA, 50 bp, unidentified
  source 1..50: mol_type = unassigned DNA; note = target_bec521b
  misc_feature 1..24: note = LF
  misc_feature 25: note = Core
  misc_feature 26..50: note = RF
agatctcgccgggatcgcgcagagcggcgggccagcagccagtgcccgcg

SEQ ID NO: 27878 - DNA, 50 bp, unidentified
  source 1..50: mol_type = unassigned DNA; note = target_bec7a17
  misc_feature 1..19: note = LF
  misc_feature 20..25: note = Core
  misc_feature 26..50: note = RF
cgagcaagctcagcgtcttgtatctacaacgggttattaaactcggtgtc

SEQ ID NO: 27879 - DNA, 50 bp, unidentified
  source 1..50: mol_type = unassigned DNA; note = target_becc327
  misc_feature 1..22: note = LF
  misc_feature 23..25: note = Core
  misc_feature 26..50: note = RF
ttgggggtacttgcggatattcctttcttgttatcaaaccatcattctcc

SEQ ID NO: 27880 - DNA, 50 bp, unidentified
  source 1..50: mol_type = unassigned DNA; note = target_bed1440
  misc_feature 1..23: note = LF
  misc_feature 24..25: note = Core
  misc_feature 26..50: note = RF
ttacggctatcgcctaacccaacctacgacaaagccgaatttaatatagt

SEQ ID NO: 27881 - DNA, 50 bp, unidentified
  source 1..50: mol_type = unassigned DNA; note = target_bed95e1
  misc_feature 1..23: note = LF
  misc_feature 24..25: note = Core
  misc_feature 26..50: note = RF
tcctcaatcaacgtccgttcgacctcctttttgcatgcaattataatttt

SEQ ID NO: 27882 - DNA, 50 bp, unidentified
  source 1..50: mol_type = unassigned DNA; note = target_beddf7c
  misc_feature 1..21: note = LF
  misc_feature 22..25: note = Core
  misc_feature 26..50: note = RF
tatgtatgcccttcatttcattcacctcaatcctatttatgctttataaa

SEQ ID NO: 27883 - DNA, 50 bp, unidentified
  source 1..50: mol_type = unassigned DNA; note = target_beed8cb
  misc_feature 1..23: note = LF
  misc_feature 24..25: note = Core
  misc_feature 26..50: note = RF
gtttattttcattgagatcattcctttcaaaaaaataacagcacccgatt

SEQ ID NO: 27884 - DNA, 50 bp, unidentified
  source 1..50: mol_type = unassigned DNA; note = target_beef511
  misc_feature 1..24: note = LF
  misc_feature 25: note = Core
  misc_feature 26..50: note = RF
caaaattagtgagctccgcccgcccaccccccccattcggggtccgagcc

SEQ ID NO: 27885 - DNA, 50 bp, unidentified
  source 1..50: mol_type = unassigned DNA; note = target_bef10b2
  misc_feature 1..23: note = LF
  misc_feature 24..25: note = Core
  misc_feature 26..50: note = RF
tcccggtatcgacaatcttgaagtggtcctgcaaattcggacagtctgtt

SEQ ID NO: 27886 - DNA, 50 bp, unidentified
  source 1..50: mol_type = unassigned DNA; note = target_bef6ff4
  misc_feature 1..24: note = LF
  misc_feature 25: note = Core
  misc_feature 26..50: note = RF
cgcaactacctgacccattctgggcggaatgtcgcggggtgactgcgtcg

SEQ ID NO: 27887 - DNA, 50 bp, unidentified
  source 1..50: mol_type = unassigned DNA; note = target_befa25a
  misc_feature 1..24: note = LF
  misc_feature 25: note = Core
  misc_feature 26..50: note = RF
ttattctgctgagagacagctcctttttatatcggctattaatgggacgg

SEQ ID NO: 27888 - DNA, 50 bp, unidentified
  source 1..50: mol_type = unassigned DNA; note = target_bf00849
  misc_feature 1..23: note = LF
  misc_feature 24..25: note = Core
  misc_feature 26..50: note = RF
gcgatcgaagtctaacataccagctagatgtggtcggggaggcgggattc

SEQ ID NO: 27889 - DNA, 50 bp, unidentified
  source 1..50: mol_type = unassigned DNA; note = target_bf02287
  misc_feature 1..24: note = LF
  misc_feature 25: note = Core
  misc_feature 26..50: note = RF
gatgaccgctcctcatattgttgaccctgcccgcctccttggtgaagccc

SEQ ID NO: 27890 - DNA, 50 bp, unidentified
  source 1..50: mol_type = unassigned DNA; note = target_bf0b71e
  misc_feature 1..23: note = LF
  misc_feature 24..25: note = Core
  misc_feature 26..50: note = RF
agattgcttcgtcgctttgcttctcgcaatgacagaagaaaaaggtatta

SEQ ID NO: 27891 - DNA, 50 bp, unidentified
  source 1..50: mol_type = unassigned DNA; note = target_bf2444a
  misc_feature 1..23: note = LF
  misc_feature 24..25: note = Core
  misc_feature 26..50: note = RF
ggcggcaatcatcttcatgcggaagccgatcatatcggccacgctgtgga

SEQ ID NO: 27892 - DNA, 50 bp, unidentified
  source 1..50: mol_type = unassigned DNA; note = target_bf25eab
  misc_feature 1..23: note = LF
  misc_feature 24..25: note = Core
  misc_feature 26..50: note = RF
cggctttgttgcttccgacgcgcctttagtgtcagacatatggagcgtcc

SEQ ID NO: 27893 - DNA, 50 bp, unidentified
  source 1..50: mol_type = unassigned DNA; note = target_bf32694
  misc_feature 1..23: note = LF
  misc_feature 24..25: note = Core
  misc_feature 26..50: note = RF
gggacactggagtgcacctggagtgcacccctaaaatgagacacggaatt

SEQ ID NO: 27894 - DNA, 50 bp, unidentified
  source 1..50: mol_type = unassigned DNA; note = target_bf3690d
  misc_feature 1..23: note = LF
  misc_feature 24..25: note = Core
  misc_feature 26..50: note = RF
tgctgcggctgggcgtgcgggtctggtgcgtggacgtagcgggcatcgtg

SEQ ID NO: 27895 - DNA, 50 bp, unidentified
  source 1..50: mol_type = unassigned DNA; note = target_bf39afd
  misc_feature 1..22: note = LF
  misc_feature 23..25: note = Core
  misc_feature 26..50: note = RF
gtccgaagaccatcagcccatgtgcaacctgtaccgtatgaccaaggccc

SEQ ID NO: 27896 - DNA, 50 bp, unidentified
  source 1..50: mol_type = unassigned DNA; note = target_bf4524a
  misc_feature 1..22: note = LF
  misc_feature 23..25: note = Core
  misc_feature 26..50: note = RF
cccgccgtgccggttcgcgccgccccccggtcggctcgaatctgttcggg

SEQ ID NO: 27897 - DNA, 50 bp, unidentified
  source 1..50: mol_type = unassigned DNA; note = target_bf516d1
  misc_feature 1..21: note = LF
  misc_feature 22..25: note = Core
  misc_feature 26..50: note = RF
cttcgctgcgcgcgccccggaatgaccggcgtggcgtttttcacctctcc

SEQ ID NO: 27898 - DNA, 50 bp, unidentified
  source 1..50: mol_type = unassigned DNA; note = target_bf52d99
  misc_feature 1..20: note = LF
  misc_feature 21..25: note = Core
  misc_feature 26..50: note = RF
cggagacaccacggcgtcaccccccccggggccgggcgccacccgctgtg

SEQ ID NO: 27899 - DNA, 50 bp, unidentified
  source 1..50: mol_type = unassigned DNA; note = target_bf5383c
  misc_feature 1..22: note = LF
  misc_feature 23..25: note = Core
  misc_feature 26..50: note = RF
cgtgcgtcgctcgccctgaaccccccccagcccgtcggcggcaccccctg

SEQ ID NO: 27900 - DNA, 50 bp, unidentified
  source 1..50: mol_type = unassigned DNA; note = target_bf53cc6
  misc_feature 1..24: note = LF
  misc_feature 25: note = Core
  misc_feature 26..50: note = RF
tcggtcggtgagtgaaatcgggatttatcgacagttatgcggcagtgggt

SEQ ID NO: 27901 - DNA, 50 bp, unidentified
  source 1..50: mol_type = unassigned DNA; note = target_bf595db
  misc_feature 1..23: note = LF
  misc_feature 24..25: note = Core
  misc_feature 26..50: note = RF
ttgtacatatccagtctcctttcctttttttaggtgacaatggggacggt

SEQ ID NO: 27902 - DNA, 50 bp, unidentified
  source 1..50: mol_type = unassigned DNA; note = target_bf5ba15
  misc_feature 1..23: note = LF
  misc_feature 24..25: note = Core
  misc_feature 26..50: note = RF
ggccgtacgaggacaacctgttgaggctccacagctagctcgcgcctgct

SEQ ID NO: 27903 - DNA, 50 bp, unidentified
  source 1..50: mol_type = unassigned DNA; note = target_bf7cbf4
  misc_feature 1..24: note = LF
  misc_feature 25: note = Core
  misc_feature 26..50: note = RF
ccgggtcaatgagtgtaagggcgattacgacagtgatcgtcagttggcgg

SEQ ID NO: 27904 - DNA, 50 bp, unidentified
  source 1..50: mol_type = unassigned DNA; note = target_bf7f9e0
  misc_feature 1..23: note = LF
  misc_feature 24..25: note = Core
  misc_feature 26..50: note = RF
gagttataccatatatgcaaagtaggaggtgggcaataggggtggaaact

SEQ ID NO: 27905 - DNA, 50 bp, unidentified
  source 1..50: mol_type = unassigned DNA; note = target_bf88789
  misc_feature 1..22: note = LF
  misc_feature 23..25: note = Core
  misc_feature 26..50: note = RF
cgcgtccgctcctgcggtcaacccccccgggtacttcaccctatgcggtg

SEQ ID NO: 27906 - DNA, 50 bp, unidentified
  source 1..50: mol_type = unassigned DNA; note = target_bfaaa4f
  misc_feature 1..23: note = LF
  misc_feature 24..25: note = Core
  misc_feature 26..50: note = RF
aagcccatccgccttcgctaacgcttcaggctccgaacctcacttcacca

SEQ ID NO: 27907 - DNA, 50 bp, unidentified
  source 1..50: mol_type = unassigned DNA; note = target_bfb53a9
  misc_feature 1..23: note = LF
  misc_feature 24..25: note = Core
  misc_feature 26..50: note = RF
tcgctccgtctcgaaaccgtagccgtcccaatccgtccaagcctcccaac

SEQ ID NO: 27908 - DNA, 50 bp, unidentified
  source 1..50: mol_type = unassigned DNA; note = target_bfb8d61
  misc_feature 1..22: note = LF
  misc_feature 23..25: note = Core
  misc_feature 26..50: note = RF
tgttcttcaactaacctgctccgtttagtttaataataatggttcttctt

SEQ ID NO: 27909 - DNA, 50 bp, unidentified
  source 1..50: mol_type = unassigned DNA; note = target_bfbf5df
  misc_feature 1..20: note = LF
  misc_feature 21..25: note = Core
  misc_feature 26..50: note = RF
agccacgtcgaaagatgtggctttttttgtgttttatggtcgcccatccg

SEQ ID NO: 27910 - DNA, 50 bp, unidentified
  source 1..50: mol_type = unassigned DNA; note = target_bfc508d
  misc_feature 1..23: note = LF
  misc_feature 24..25: note = Core
  misc_feature 26..50: note = RF
ggaggtccgctcgcgcccaatagcggacattctagcttggcggggcagac

SEQ ID NO: 27911 - DNA, 50 bp, unidentified
  source 1..50: mol_type = unassigned DNA; note = target_bfc86d0
  misc_feature 1..24: note = LF
  misc_feature 25: note = Core
  misc_feature 26..50: note = RF
gtcgacgccgagcccgaggcctgacgaccgggccggcgggatcagccgcc

SEQ ID NO: 27912 - DNA, 50 bp, unidentified
  source 1..50: mol_type = unassigned DNA; note = target_bfd203b
  misc_feature 1..23: note = LF
  misc_feature 24..25: note = Core
  misc_feature 26..50: note = RF
tcgccgaaacgccaattctcgactggtttcatctttcgatgcccatccag

SEQ ID NO: 27913 - DNA, 50 bp, unidentified
  source 1..50: mol_type = unassigned DNA; note = target_bfd3b3f
  misc_feature 1..24: note = LF
  misc_feature 25: note = Core
  misc_feature 26..50: note = RF
gtggaggaattgaaattgctaacgtggagctaaggggctgcgcgcttttg

SEQ ID NO: 27914 - DNA, 50 bp, unidentified
  source 1..50: mol_type = unassigned DNA; note = target_bfd4991
  misc_feature 1..22: note = LF
  misc_feature 23..25: note = Core
  misc_feature 26..50: note = RF
ccattcacaattcttgatggtctacgaccatctgtggtctgtagccatct

SEQ ID NO: 27915 - DNA, 50 bp, unidentified
  source 1..50: mol_type = unassigned DNA; note = target_bfd8fcd
  misc_feature 1..24: note = LF
  misc_feature 25: note = Core
  misc_feature 26..50: note = RF
cattgcccagccgcaaccaagacctgaccccgatattcttctcccgatat

SEQ ID NO: 27916 - DNA, 50 bp, unidentified
  source 1..50: mol_type = unassigned DNA; note = target_bfde68a
  misc_feature 1..24: note = LF
  misc_feature 25: note = Core
  misc_feature 26..50: note = RF
ttatcaggtcatacgcagatcaaatgtgggagcgggcttgctcgcgaaag

SEQ ID NO: 27917 - DNA, 50 bp, unidentified
  source 1..50: mol_type = unassigned DNA; note = target_bfe42c7
  misc_feature 1..23: note = LF
  misc_feature 24..25: note = Core
  misc_feature 26..50: note = RF
agctatcttcatgctaatccctccttaaaatgttgttagaatgtggtcaa

SEQ ID NO: 27918 - DNA, 50 bp, unidentified
  source 1..50: mol_type = unassigned DNA; note = target_bfe7514
  misc_feature 1..21: note = LF
  misc_feature 22..25: note = Core
  misc_feature 26..50: note = RF
cggccgcaggccgtttttccaatcaactagcgaaaccgctcgagcgcgcc

SEQ ID NO: 27919 - DNA, 50 bp, unidentified
  source 1..50: mol_type = unassigned DNA; note = target_c007889
  misc_feature 1..24: note = LF
  misc_feature 25: note = Core
  misc_feature 26..50: note = RF
gtgccatagggtgggcggcgacaaattatcttggccggcgcattgactca

SEQ ID NO: 27920 - DNA, 50 bp, unidentified
  source 1..50: mol_type = unassigned DNA; note = target_c01c7d0
  misc_feature 1..22: note = LF
  misc_feature 23..25: note = Core
  misc_feature 26..50: note = RF
ctttggcttctccatcactaaaagtcccttcgcatataggagtcaggtca

SEQ ID NO: 27921 - DNA, 50 bp, unidentified
  source 1..50: mol_type = unassigned DNA; note = target_c027a85
  misc_feature 1..24: note = LF
  misc_feature 25: note = Core
  misc_feature 26..50: note = RF
catgccgccgacgatcggctcagccaccccccgggcactgctggaacgat

SEQ ID NO: 27922 - DNA, 50 bp, unidentified
  source 1..50: mol_type = unassigned DNA; note = target_c02a9f6
  misc_feature 1..24: note = LF
  misc_feature 25: note = Core
  misc_feature 26..50: note = RF
gcaagcctgcccgacgatgtcattcaggcgggctcgcctaacgaatacac

SEQ ID NO: 27923 - DNA, 50 bp, unidentified
  source 1..50: mol_type = unassigned DNA; note = target_c02c3cc
  misc_feature 1..23: note = LF
  misc_feature 24..25: note = Core
  misc_feature 26..50: note = RF
aaagtcgtacgcatgagtccgtcccccccctgtgcatccccccgaatgcg

SEQ ID NO: 27924 - DNA, 50 bp, unidentified
  source 1..50: mol_type = unassigned DNA; note = target_c036047
  misc_feature 1..22: note = LF
  misc_feature 23..25: note = Core
  misc_feature 26..50: note = RF
tcgtcgagtcagggtcggaacaagagctgtgcgaaatcgtacgcggcttt

SEQ ID NO: 27925 - DNA, 50 bp, unidentified
  source 1..50: mol_type = unassigned DNA; note = target_c03c6ab
  misc_feature 1..23: note = LF
  misc_feature 24..25: note = Core
  misc_feature 26..50: note = RF
gtataactattttcattactatcctccaaaaaatatactatactctcaaa

SEQ ID NO: 27926 - DNA, 50 bp, unidentified
  source 1..50: mol_type = unassigned DNA; note = target_c03dd05
  misc_feature 1..23: note = LF
  misc_feature 24..25: note = Core
  misc_feature 26..50: note = RF
tgagtctttcccaacccgcaaggatgacggttcggttatttggtatggct

SEQ ID NO: 27927 - DNA, 50 bp, unidentified
  source 1..50: mol_type = unassigned DNA; note = target_c03e1e3
  misc_feature 1..23: note = LF
  misc_feature 24..25: note = Core
  misc_feature 26..50: note = RF
cgctgagcctgcgccacctcgaagaaatgatggccgaacggggaattgag

SEQ ID NO: 27928 - DNA, 50 bp, unidentified
  source 1..50: mol_type = unassigned DNA; note = target_c04393e
  misc_feature 1..24: note = LF
  misc_feature 25: note = Core
  misc_feature 26..50: note = RF
aatccttctccctccgctatatataaagagcctgaggcatttatttgtct

SEQ ID NO: 27929 - DNA, 50 bp, unidentified
  source 1..50: mol_type = unassigned DNA; note = target_c0442e8
  misc_feature 1..23: note = LF
  misc_feature 24..25: note = Core
  misc_feature 26..50: note = RF
ttttccgaattccaggcggccccctatttgtttactcagtatgattaaag

SEQ ID NO: 27930 - DNA, 50 bp, unidentified; identical to SEQ ID NO: 22831
  source 1..50: mol_type = unassigned DNA; note = target_c044d92
  misc_feature 1..23: note = LF
  misc_feature 24..25: note = Core
  misc_feature 26..50: note = RF

SEQ ID NO: 27931 - DNA, 50 bp, unidentified
  source 1..50: mol_type = unassigned DNA; note = target_c053750
  misc_feature 1..22: note = LF
  misc_feature 23..25: note = Core
  misc_feature 26..50: note = RF
gttgttcataggatttttcctcactttctgctgttgatggttcttttgct

SEQ ID NO: 27932 - DNA, 50 bp, unidentified
  source 1..50: mol_type = unassigned DNA; note = target_c062c2a
  misc_feature 1..23: note = LF
  misc_feature 24..25: note = Core
  misc_feature 26..50: note = RF
gccggaggactggtcggcatgggctaccgccttgcggcgggcctcttcac

SEQ ID NO: 27933 - DNA, 50 bp, unidentified
  source 1..50: mol_type = unassigned DNA; note = target_c06ae45
  misc_feature 1..23: note = LF
  misc_feature 24..25: note = Core
  misc_feature 26..50: note = RF
cttccaggcccgggatcgcggaaagctgccattcgctcgggctgcgacgg

SEQ ID NO: 27934 - DNA, 50 bp, unidentified
  source 1..50: mol_type = unassigned DNA; note = target_c06de9f
  misc_feature 1..23: note = LF
  misc_feature 24..25: note = Core
  misc_feature 26..50: note = RF
tgactgactacaaagccatgagggttatacaaaccaatggcaaggaggat

SEQ ID NO: 27935 - DNA, 50 bp, unidentified
  source 1..50: mol_type = unassigned DNA; note = target_c074544
  misc_feature 1..22: note = LF
  misc_feature 23..25: note = Core
  misc_feature 26..50: note = RF
ttatatcaatatcattatttattaatgtttaataaaaaaatgctgatata

SEQ ID NO: 27936 - DNA, 50 bp, unidentified
  source 1..50: mol_type = unassigned DNA; note = target_c080805
  misc_feature 1..23: note = LF
  misc_feature 24..25: note = Core
  misc_feature 26..50: note = RF
gaggtggcggctggggtggtggttggggtcccggtatcgctggcggacta

SEQ ID NO: 27937 - DNA, 50 bp, unidentified
  source 1..50: mol_type = unassigned DNA; note = target_c0865ec
  misc_feature 1..24: note = LF
  misc_feature 25: note = Core
  misc_feature 26..50: note = RF
aaaattttatttttcatacttccttctccttaattatcactttgtcgtaa

SEQ ID NO: 27938 - DNA, 50 bp, unidentified; identical to SEQ ID NO: 25761
  source 1..50: mol_type = unassigned DNA; note = target_c092f02
  misc_feature 1..22: note = LF
  misc_feature 23..25: note = Core
  misc_feature 26..50: note = RF

SEQ ID NO: 27939 - DNA, 50 bp, unidentified
  source 1..50: mol_type = unassigned DNA; note = target_c0955b3
  misc_feature 1..24: note = LF
  misc_feature 25: note = Core
  misc_feature 26..50: note = RF
gcaggtgttcggccacatgaaagacgagttcttcaaaggccggtcgtggg

SEQ ID NO: 27940 - DNA, 50 bp, unidentified
  source 1..50: mol_type = unassigned DNA; note = target_c0965b9
  misc_feature 1..24: note = LF
  misc_feature 25: note = Core
  misc_feature 26..50: note = RF
cgctgacccgccgatgcatgtcatcgttctgcgcgggcgtaggttcgatg

SEQ ID NO: 27941 - DNA, 50 bp, unidentified
  source 1..50: mol_type = unassigned DNA; note = target_c096b19
  misc_feature 1..23: note = LF
  misc_feature 24..25: note = Core
  misc_feature 26..50: note = RF
tggccgcaggcgatcgtccaaacctgcatcattcacctgatacgcaagac

SEQ ID NO: 27942 - DNA, 50 bp, unidentified
  source 1..50: mol_type = unassigned DNA; note = target_c0a5950
  misc_feature 1..24: note = LF
  misc_feature 25: note = Core
  misc_feature 26..50: note = RF
acaagacccggcttcggccgggtcttgctttagcgctactgcgcattgcg

SEQ ID NO: 27943 - DNA, 50 bp, unidentified
  source 1..50: mol_type = unassigned DNA; note = target_c0aa432
  misc_feature 1..22: note = LF
  misc_feature 23..25: note = Core
  misc_feature 26..50: note = RF
gttgccaagtgtcgtccctctaagaaccgtacgtgcaactttcactgcat

SEQ ID NO: 27944 - DNA, 50 bp, unidentified
  source 1..50: mol_type = unassigned DNA; note = target_c0acc25
  misc_feature 1..24: note = LF
  misc_feature 25: note = Core
  misc_feature 26..50: note = RF
acctgcgggatcgcccatgtgtgccgttatgtgcggctactggtggcctg

SEQ ID NO: 27945 - DNA, 50 bp, unidentified
  source 1..50: mol_type = unassigned DNA; note = target_c0ad4a4
  misc_feature 1..23: note = LF
  misc_feature 24..25: note = Core
  misc_feature 26..50: note = RF
ttcttttcatagtgctaaatctcctttattaaattgtcattaaagactac

SEQ ID NO: 27946 - DNA, 50 bp, unidentified
  source 1..50: mol_type = unassigned DNA; note = target_c0b377f
  misc_feature 1..24: note = LF
  misc_feature 25: note = Core
  misc_feature 26..50: note = RF
gcgacactggcgtctcactgaaaggaaacaccatgacttcatccgtagca

SEQ ID NO: 27947 - DNA, 50 bp, unidentified
  source 1..50: mol_type = unassigned DNA; note = target_c0b4bff
  misc_feature 1..23: note = LF
  misc_feature 24..25: note = Core
  misc_feature 26..50: note = RF
gagggggaaggcgccgaaggcgactcaggggggctacggtctgttcatct

SEQ ID NO: 27948 - DNA, 50 bp, unidentified
  source 1..50: mol_type = unassigned DNA; note = target_c0cdc68
  misc_feature 1..22: note = LF
  misc_feature 23..25: note = Core
  misc_feature 26..50: note = RF
aattctcagccgagaaagggatatgccacatgtcggagactaccatcagc

SEQ ID NO: 27949 - DNA, 50 bp, unidentified
  source 1..50: mol_type = unassigned DNA; note = target_c0de85f
  misc_feature 1..20: note = LF
  misc_feature 21..25: note = Core
  misc_feature 26..50: note = RF
tgcggacgctctgccagacgctcacgcggcgtcctcctccgccgggagcg

SEQ ID NO: 27950 - DNA, 50 bp, unidentified
  source 1..50: mol_type = unassigned DNA; note = target_c0e7f23
  misc_feature 1..22: note = LF
  misc_feature 23..25: note = Core
  misc_feature 26..50: note = RF
acgccggtgcaatgcggccatgagcagacctggacggcgctttcacacag

SEQ ID NO: 27951 - DNA, 50 bp, unidentified
  source 1..50: mol_type = unassigned DNA; note = target_c0eb0c0
  misc_feature 1..23: note = LF
  misc_feature 24..25: note = Core
  misc_feature 26..50: note = RF
cgcgtagccaggacagatgggactgttgcgttaattcgcgaagaccatga

SEQ ID NO: 27952 - DNA, 50 bp, unidentified
  source 1..50: mol_type = unassigned DNA; note = target_c0eec76
  misc_feature 1..23: note = LF
  misc_feature 24..25: note = Core
  misc_feature 26..50: note = RF
aaatttctcccggctcttcaatgagccggggtatacattgatattgctcg

SEQ ID NO: 27953 - DNA, 50 bp, unidentified
  source 1..50: mol_type = unassigned DNA; note = target_c0f9ecc
  misc_feature 1..24: note = LF
  misc_feature 25: note = Core
  misc_feature 26..50: note = RF
tcaattatgtaggtgtcagctaacgccgcgttaagtggtgagcaacgcag

SEQ ID NO: 27954 - DNA, 50 bp, unidentified
  source 1..50: mol_type = unassigned DNA; note = target_c0fe11c
  misc_feature 1..21: note = LF
  misc_feature 22..25: note = Core
  misc_feature 26..50: note = RF
aaatcacttaaattcatattctcacctctttatagacacatgtctaatct

SEQ ID NO: 27955 - DNA, 50 bp, unidentified
  source 1..50: mol_type = unassigned DNA; note = target_c101ad9
  misc_feature 1..23: note = LF
  misc_feature 24..25: note = Core
  misc_feature 26..50: note = RF
aggaagcctaacgctacatgtttagtcccggcatttgctggatcgggttg

SEQ ID NO: 27956 - DNA, 50 bp, unidentified
  source 1..50: mol_type = unassigned DNA; note = target_c102438
  misc_feature 1..23: note = LF
  misc_feature 24..25: note = Core
  misc_feature 26..50: note = RF
tttgagatcttcataggatcctccttaattattgatagcgttcggtagaa

SEQ ID NO: 27957 - DNA, 50 bp, unidentified
  source 1..50: mol_type = unassigned DNA; note = target_c10804a
  misc_feature 1..23: note = LF
  misc_feature 24..25: note = Core
  misc_feature 26..50: note = RF
caaagcaatcgaccaatacctccctctcccgctggcgggtcggggtgagg

SEQ ID NO: 27958 - DNA, 50 bp, unidentified
  source 1..50: mol_type = unassigned DNA; note = target_c10a174
  misc_feature 1..20: note = LF
  misc_feature 21..25: note = Core
  misc_feature 26..50: note = RF
ggctccgcattcgcggagcctttttgtgcttgggagtaactgtaaacgtt

SEQ ID NO: 27959 - DNA, 50 bp, unidentified
  source 1..50: mol_type = unassigned DNA; note = target_c115827
  misc_feature 1..23: note = LF
  misc_feature 24..25: note = Core
  misc_feature 26..50: note = RF
acttctcttttccataaattatcctcctttatatatatagaaatcatatc

SEQ ID NO: 27960 - DNA, 50 bp, unidentified
  source 1..50: mol_type = unassigned DNA; note = target_c11e491
  misc_feature 1..22: note = LF
  misc_feature 23..25: note = Core
  misc_feature 26..50: note = RF
gttaccgagtgccgccctcctaagaacccagcgtgcaactttcaccgcac

SEQ ID NO: 27961 - DNA, 50 bp, unidentified
  source 1..50: mol_type = unassigned DNA; note = target_c1216b8
  misc_feature 1..22: note = LF
  misc_feature 23..25: note = Core
  misc_feature 26..50: note = RF
tggttcttcaactcttgcacccgtttagcttaataacttcaacaaaaaag

SEQ ID NO: 27962 - DNA, 50 bp, unidentified
  source 1..50: mol_type = unassigned DNA; note = target_c12ac7b
  misc_feature 1..24: note = LF
  misc_feature 25: note = Core
  misc_feature 26..50: note = RF
cccccacgctgaggcgtcccagacccccccttttttccttgccggccggg

SEQ ID NO: 27963 - DNA, 50 bp, unidentified
  source 1..50: mol_type = unassigned DNA; note = target_c1382e0
  misc_feature 1..23: note = LF
  misc_feature 24..25: note = Core
  misc_feature 26..50: note = RF
tcggtgcacaggtgggccagatgctaggcgcgggcgagcaccggagcgag

SEQ ID NO: 27964 - DNA, 50 bp, unidentified
  source 1..50: mol_type = unassigned DNA; note = target_c154397
  misc_feature 1..24: note = LF
  misc_feature 25: note = Core
  misc_feature 26..50: note = RF
accgcgctctttgaacaatataacgctcgactaatacgtgatgcggtggc

SEQ ID NO: 27965 - DNA, 50 bp, unidentified
  source 1..50: mol_type = unassigned DNA; note = target_c157bf4
  misc_feature 1..23: note = LF
  misc_feature 24..25: note = Core
  misc_feature 26..50: note = RF
cttgggcatctcaagcatctaacgatgagcttgagcggccggcggatggc

SEQ ID NO: 27966 - DNA, 50 bp, unidentified
  source 1..50: mol_type = unassigned DNA; note = target_c160a51
  misc_feature 1..24: note = LF
  misc_feature 25: note = Core
  misc_feature 26..50: note = RF
ccgaacgcctggccgaacagccggtatgggtcaaaatgagccgtgccact

SEQ ID NO: 27967 - DNA, 50 bp, unidentified
  source 1..50: mol_type = unassigned DNA; note = target_c16d787
  misc_feature 1..23: note = LF
  misc_feature 24..25: note = Core
  misc_feature 26..50: note = RF
gcagtttcagccagaccgtaggccgggtaaggcgtagccgccacccggct

SEQ ID NO: 27968 - DNA, 50 bp, unidentified
  source 1..50: mol_type = unassigned DNA; note = target_c170742
  misc_feature 1..23: note = LF
  misc_feature 24..25: note = Core
  misc_feature 26..50: note = RF
gggcctcttcgcgggcatgcccgctcccacagggactgcgctattgttgt

SEQ ID NO: 27969 - DNA, 50 bp, unidentified
  source 1..50: mol_type = unassigned DNA; note = target_c171558
  misc_feature 1..23: note = LF
  misc_feature 24..25: note = Core
  misc_feature 26..50: note = RF
gtccctgatttgctttctggaggaatatctcatgcatgacagcctgcctg

SEQ ID NO: 27970 - DNA, 50 bp, unidentified
  source 1..50: mol_type = unassigned DNA; note = target_c17253d
  misc_feature 1..24: note = LF
  misc_feature 25: note = Core
  misc_feature 26..50: note = RF
ctgcacgaggcccccgccagattttgcacgaaaaggacgattacccctgc

SEQ ID NO: 27971 - DNA, 50 bp, unidentified
  source 1..50: mol_type = unassigned DNA; note = target_c174885
  misc_feature 1..23: note = LF
  misc_feature 24..25: note = Core
  misc_feature 26..50: note = RF
gctgcggtgcatgagtccggttatggcacatctgcgacctgtggggacgc

SEQ ID NO: 27972 - DNA, 50 bp, unidentified
  source 1..50: mol_type = unassigned DNA; note = target_c1769f6
  misc_feature 1..23: note = LF
  misc_feature 24..25: note = Core
  misc_feature 26..50: note = RF
atcggattaatgagttgctaccctggaactggataaaacctcgaaccgat

SEQ ID NO: 27973 - DNA, 50 bp, unidentified
  source 1..50: mol_type = unassigned DNA; note = target_c17749c
  misc_feature 1..23: note = LF
  misc_feature 24..25: note = Core
  misc_feature 26..50: note = RF
agacgcccggctttgccgggctcctcaggatgaggacgttaggcctctcg

SEQ ID NO: 27974 - DNA, 50 bp, unidentified
  source 1..50: mol_type = unassigned DNA; note = target_c188ca6
  misc_feature 1..23: note = LF
  misc_feature 24..25: note = Core
  misc_feature 26..50: note = RF
caccgtcgtccgatgtccgctcttggcgacttttggacactcgtggttcg

SEQ ID NO: 27975 - DNA, 50 bp, unidentified
  source 1..50: mol_type = unassigned DNA; note = target_c18d221
  misc_feature 1..23: note = LF
  misc_feature 24..25: note = Core
  misc_feature 26..50: note = RF
cgcaaccgcaggaggcttagcatagcgccgcccgaagggcggaagccggg

SEQ ID NO: 27976 - DNA, 50 bp, unidentified
  source 1..50: mol_type = unassigned DNA; note = target_c19a467
  misc_feature 1..21: note = LF
  misc_feature 22..25: note = Core
  misc_feature 26..50: note = RF
agacgcgagatcatccgctgcctcaaacgcgccgtcgcccgcgaagtctt

SEQ ID NO: 27977 - DNA, 50 bp, unidentified
  source 1..50: mol_type = unassigned DNA; note = target_c19ec37
  misc_feature 1..23: note = LF
  misc_feature 24..25: note = Core
  misc_feature 26..50: note = RF
tacggtatagcgcggtggcatggatgccaaagagcgcatatgtacaggat

SEQ ID NO: 27978 - DNA, 50 bp, unidentified
  source 1..50: mol_type = unassigned DNA; note = target_c1a5483
  misc_feature 1..23: note = LF
  misc_feature 24..25: note = Core
  misc_feature 26..50: note = RF
gggcgcgtcttgccgcgcgccccttcattcagatggctcgcgcctcagcg

SEQ ID NO: 27979 - DNA, 50 bp, unidentified
  source 1..50: mol_type = unassigned DNA; note = target_c1a59d6
  misc_feature 1..22: note = LF
  misc_feature 23..25: note = Core
  misc_feature 26..50: note = RF
acgcagaggccgagttggaactcgaccttcccaaaaacaaaccccgtgcg

SEQ ID NO: 27980 - DNA, 50 bp, unidentified
  source 1..50: mol_type = unassigned DNA; note = target_c1ae03f
  misc_feature 1..24: note = LF
  misc_feature 25: note = Core
  misc_feature 26..50: note = RF
cctgagtaactgcctgctctgccccactcccccttggtggaagggagcgt

SEQ ID NO: 27981 - DNA, 50 bp, unidentified
  source 1..50: mol_type = unassigned DNA; note = target_c1afab2
  misc_feature 1..23: note = LF
  misc_feature 24..25: note = Core
  misc_feature 26..50: note = RF
tggtcgggatcattgcttgtctccttgtagtgaatgcaggctgggcgcga

SEQ ID NO: 27982 - DNA, 50 bp, unidentified
  source 1..50: mol_type = unassigned DNA; note = target_c1b8e51
  misc_feature 1..23: note = LF
  misc_feature 24..25: note = Core
  misc_feature 26..50: note = RF
tccgtgacgatcatgatacgccccttgtgtggggtgggatggcgagagtt

SEQ ID NO: 27983 - DNA, 50 bp, unidentified
  source 1..50: mol_type = unassigned DNA; note = target_c1d14c8
  misc_feature 1..23: note = LF
  misc_feature 24..25: note = Core
  misc_feature 26..50: note = RF
gttccgcaggcgtaagcgcctacctttccatacccgctccccggcccgga

SEQ ID NO: 27984 - DNA, 50 bp, unidentified
  source 1..50: mol_type = unassigned DNA; note = target_c1e43e4
  misc_feature 1..24: note = LF
  misc_feature 25: note = Core
  misc_feature 26..50: note = RF
atctggaccgcgccgctgccctgacccggacggctcgctgggggcggccg

SEQ ID NO: 27985 - DNA, 50 bp, unidentified
  source 1..50: mol_type = unassigned DNA; note = target_c1e706f
  misc_feature 1..24: note = LF
  misc_feature 25: note = Core
  misc_feature 26..50: note = RF
tgtttgacccggttcggccaggaacagtcggtcgatgcggtggcctataa

SEQ ID NO: 27986 - DNA, 50 bp, unidentified
  source 1..50: mol_type = unassigned DNA; note = target_c1ebc7e
  misc_feature 1..24: note = LF
  misc_feature 25: note = Core
  misc_feature 26..50: note = RF
acatccacgagccggactgtccgcttcgggtcaaactcggacctcagccg

SEQ ID NO: 27987 - DNA, 50 bp, unidentified
  source 1..50: mol_type = unassigned DNA; note = target_c1f59b7
  misc_feature 1..23: note = LF
  misc_feature 24..25: note = Core
  misc_feature 26..50: note = RF
gaagactgcattttcttaacctgcttcggttttaccgtattttgctcctt

SEQ ID NO: 27988 - DNA, 50 bp, unidentified
  source 1..50: mol_type = unassigned DNA; note = target_c1fdb29
  misc_feature 1..23: note = LF
  misc_feature 24..25: note = Core
  misc_feature 26..50: note = RF
atcatcctcaacagcagcaaatgtgagtcagagccgaataaggacccgct

SEQ ID NO: 27989 - DNA, 50 bp, unidentified
  source 1..50: mol_type = unassigned DNA; note = target_c203c17
  misc_feature 1..24: note = LF
  misc_feature 25: note = Core
  misc_feature 26..50: note = RF
aacgccagatgaggcggaaacgagagaaagacgggggcgcgacgcgcctg

SEQ ID NO: 27990 - DNA, 50 bp, unidentified
  source 1..50: mol_type = unassigned DNA; note = target_c21b10d
  misc_feature 1..23: note = LF
  misc_feature 24..25: note = Core
  misc_feature 26..50: note = RF
gctgggttcaaggtccggcgctgctctgaggtatcggtcccagccacctg

SEQ ID NO: 27991 - DNA, 50 bp, unidentified
  source 1..50: mol_type = unassigned DNA; note = target_c224e6e
  misc_feature 1..23: note = LF
  misc_feature 24..25: note = Core
  misc_feature 26..50: note = RF
actccatttcagagaggcgacaactaccctgacaccgggggtttatggca

SEQ ID NO: 27992 - DNA, 50 bp, unidentified
  source 1..50: mol_type = unassigned DNA; note = target_c226f02
  misc_feature 1..23: note = LF
  misc_feature 24..25: note = Core
  misc_feature 26..50: note = RF
atattctgacaagccctgtaggtcggattagtgttagcgtaatccgacag

SEQ ID NO: 27993 - DNA, 50 bp, unidentified
  source 1..50: mol_type = unassigned DNA; note = target_c229f9c
  misc_feature 1..24: note = LF
  misc_feature 25: note = Core
  misc_feature 26..50: note = RF
ttcgcgtgcatggcggaataaaagtgtaccagtcttaagcctgtaagctg

SEQ ID NO: 27994 - DNA, 50 bp, unidentified
  source 1..50: mol_type = unassigned DNA; note = target_c22f637
  misc_feature 1..23: note = LF
  misc_feature 24..25: note = Core
  misc_feature 26..50: note = RF
cgggtccttgccgttcccgggagcggacgttcaggcgcatcttgccaact

SEQ ID NO: 27995 - DNA, 50 bp, unidentified
  source 1..50: mol_type = unassigned DNA; note = target_c2303ec
  misc_feature 1..21: note = LF
  misc_feature 22..25: note = Core
  misc_feature 26..50: note = RF
ccgtcggggacgatcgtgtcggtcatcggacgagcctcggtcgtgagtgg

SEQ ID NO: 27996 - DNA, 50 bp, unidentified
  source 1..50: mol_type = unassigned DNA; note = target_c23587f
  misc_feature 1..23: note = LF
  misc_feature 24..25: note = Core
  misc_feature 26..50: note = RF
ccgcgtgggctcgagagcccaccctacgagtttgtgaaaaaatccgccat

SEQ ID NO: 27997 - DNA, 50 bp, unidentified
  source 1..50: mol_type = unassigned DNA; note = target_c238a68
  misc_feature 1..23: note = LF
  misc_feature 24..25: note = Core
  misc_feature 26..50: note = RF
aacaaccttagtggagtgggctttgttgcgtaattcgatggaactaaact

SEQ ID NO: 27998 - DNA, 50 bp, unidentified
  source 1..50: mol_type = unassigned DNA; note = target_c2476c9
  misc_feature 1..23: note = LF
  misc_feature 24..25: note = Core
  misc_feature 26..50: note = RF
cccggagcggtaccactcccggcctagggctggagcgtcgaccctagcgg

SEQ ID NO: 27999 - DNA, 50 bp, unidentified
  source 1..50: mol_type = unassigned DNA; note = target_c262bcc
  misc_feature 1..23: note = LF
  misc_feature 24..25: note = Core
  misc_feature 26..50: note = RF
tttattctgtatcaaaacggctttgtttcctaaatcatcaatctacgatc

SEQ ID NO: 28000 - DNA, 50 bp, unidentified
  source 1..50: mol_type = unassigned DNA; note = target_c267b02
  misc_feature 1..23: note = LF
  misc_feature 24..25: note = Core
  misc_feature 26..50: note = RF
ccgcgcctcaagccgatttagtctgacaaagccccagcgccacctcaacc

SEQ ID NO: 28001 - DNA, 50 bp, unidentified
  source 1..50: mol_type = unassigned DNA; note = target_c268729
  misc_feature 1..23: note = LF
  misc_feature 24..25: note = Core
  misc_feature 26..50: note = RF
cggtggctctacgccgcccgttgtaggagcggccttgcgtcgcgacaggg

SEQ ID NO: 28002 - DNA, 50 bp, unidentified
  source 1..50: mol_type = unassigned DNA; note = target_c2690bd
  misc_feature 1..24: note = LF
  misc_feature 25: note = Core
  misc_feature 26..50: note = RF
agtctgcatgttctgaggcctaacgttaggtttaaccagctggacaccgc

SEQ ID NO: 28003 - DNA, 50 bp, unidentified
  source 1..50: mol_type = unassigned DNA; note = target_c26affb
  misc_feature 1..23: note = LF
  misc_feature 24..25: note = Core
  misc_feature 26..50: note = RF
ggaaaaagctctgctatcccgccctacggatttctcctcgatcctcgcat

SEQ ID NO: 28004 - DNA, 50 bp, unidentified
  source 1..50: mol_type = unassigned DNA; note = target_c26e6e6
  misc_feature 1..23: note = LF
  misc_feature 24..25: note = Core
  misc_feature 26..50: note = RF
tgggccgaacgttggggcaagcctttggttactttttcggcgtttggaaa

SEQ ID NO: 28005 - DNA, 50 bp, unidentified
  source 1..50: mol_type = unassigned DNA; note = target_c26fb57
  misc_feature 1..24: note = LF
  misc_feature 25: note = Core
  misc_feature 26..50: note = RF
ctcgacctcacgtccgctcatcggcaaagtcggacggatcgtcggccgca

SEQ ID NO: 28006 - DNA, 50 bp, unidentified
  source 1..50: mol_type = unassigned DNA; note = target_c27390e
  misc_feature 1..24: note = LF
  misc_feature 25: note = Core
  misc_feature 26..50: note = RF
tcgtcgagggtggcgagatattccttatggcacccctcagttcaggcacc

SEQ ID NO: 28007 - DNA, 50 bp, unidentified
  source 1..50: mol_type = unassigned DNA; note = target_c2765c0
  misc_feature 1..23: note = LF
  misc_feature 24..25: note = Core
  misc_feature 26..50: note = RF
ttctgacggcgctcatcgaaatcccccagtgatgctcatctgaattcccc

SEQ ID NO: 28008 - DNA, 50 bp, unidentified
  source 1..50: mol_type = unassigned DNA; note = target_c282630
  misc_feature 1..24: note = LF
  misc_feature 25: note = Core
  misc_feature 26..50: note = RF
gatggtccgctgttggccccaaagcggatatcgggccgcgactgaaaatg

SEQ ID NO: 28009 - DNA, 50 bp, unidentified
  source 1..50: mol_type = unassigned DNA; note = target_c2859d2
  misc_feature 1..23: note = LF
  misc_feature 24..25: note = Core
  misc_feature 26..50: note = RF
aagccattgttgccgtaacttccctgtatccgtctctgtaacgaatttcg

SEQ ID NO: 28010 - DNA, 50 bp, unidentified
  source 1..50: mol_type = unassigned DNA; note = target_c287f91
  misc_feature 1..24: note = LF
  misc_feature 25: note = Core
  misc_feature 26..50: note = RF
gcagcgcggcagcaacgaaaacaccaacggcctactacgccaatacttcc

SEQ ID NO: 28011 - DNA, 50 bp, unidentified
  source 1..50: mol_type = unassigned DNA; note = target_c2902d5
  misc_feature 1..22: note = LF
  misc_feature 23..25: note = Core
  misc_feature 26..50: note = RF
catgggtgacgagagtccgctcatggcacatctcggaaggggcattttcc

SEQ ID NO: 28012 - DNA, 50 bp, unidentified
  source 1..50: mol_type = unassigned DNA; note = target_c29a96b
  misc_feature 1..23: note = LF
  misc_feature 24..25: note = Core
  misc_feature 26..50: note = RF
aaactctcaaaataaagagcctccttttcagttgatgtaagcatatctaa

SEQ ID NO: 28013 - DNA, 50 bp, unidentified
  source 1..50: mol_type = unassigned DNA; note = target_c2b112e
  misc_feature 1..24: note = LF
  misc_feature 25: note = Core
  misc_feature 26..50: note = RF
ttaatgtgatttctaggacccctccgcggaggggtgctcagcaggtgtta

SEQ ID NO: 28014 - DNA, 50 bp, unidentified
  source 1..50: mol_type = unassigned DNA; note = target_c2b20fe
  misc_feature 1..23: note = LF
  misc_feature 24..25: note = Core
  misc_feature 26..50: note = RF
gataactgtcacggatatcactcctttcgatatgtaccttaatctgacac

SEQ ID NO: 28015 - DNA, 50 bp, unidentified
  source 1..50: mol_type = unassigned DNA; note = target_c2ca253
  misc_feature 1..23: note = LF
  misc_feature 24..25: note = Core
  misc_feature 26..50: note = RF
gaccgcaacagcagtcgagcaagctcgactctaccattgccgcagcgccc

SEQ ID NO: 28016 - DNA, 50 bp, unidentified
  source 1..50: mol_type = unassigned DNA; note = target_c2f4f8d
  misc_feature 1..23: note = LF
  misc_feature 24..25: note = Core
  misc_feature 26..50: note = RF
gccccaggtctggactttcagacctgggatagcacaaacccaaactacaa

SEQ ID NO: 28017 - DNA, 50 bp, unidentified
  source 1..50: mol_type = unassigned DNA; note = target_c2f8e7d
  misc_feature 1..22: note = LF
  misc_feature 23..25: note = Core
  misc_feature 26..50: note = RF
atcgggtcagcctctatcaagctgacccgtgaatcttgctctacatgtta

SEQ ID NO: 28018 - DNA, 50 bp, unidentified
  source 1..50: mol_type = unassigned DNA; note = target_c2fa234
  misc_feature 1..23: note = LF
  misc_feature 24..25: note = Core
  misc_feature 26..50: note = RF
gaagcctccgaaacgtccgctagtgggcgactgccgtccgtctgcttttc

SEQ ID NO: 28019 - DNA, 50 bp, unidentified
  source 1..50: mol_type = unassigned DNA; note = target_c2fca32
  misc_feature 1..23: note = LF
  misc_feature 24..25: note = Core
  misc_feature 26..50: note = RF
gcatcccgatgccgcgtccatgttggggcttgttcgcggaacccatctgg

SEQ ID NO: 28020 - DNA, 50 bp, unidentified
  source 1..50: mol_type = unassigned DNA; note = target_c2fdfa7
  misc_feature 1..23: note = LF
  misc_feature 24..25: note = Core
  misc_feature 26..50: note = RF
ggacgaacggatccttaggacccctctccccttgcgggagagggttgggg

SEQ ID NO: 28021 - DNA, 50 bp, unidentified
  source 1..50: mol_type = unassigned DNA; note = target_c308f49
  misc_feature 1..24: note = LF
  misc_feature 25: note = Core
  misc_feature 26..50: note = RF
cgggcaccaggcccggaatactgacacactggccgccgcccgcggacaag

SEQ ID NO: 28022 - DNA, 50 bp, unidentified
  source 1..50: mol_type = unassigned DNA; note = target_c30d462
  misc_feature 1..23: note = LF
  misc_feature 24..25: note = Core
  misc_feature 26..50: note = RF
ggcggggtcatggcagagtcgtcctttcaaggatgtgaggtgagcggtag

SEQ ID NO: 28023 - DNA, 50 bp, unidentified
  source 1..50: mol_type = unassigned DNA; note = target_c3174d0
  misc_feature 1..22: note = LF
  misc_feature 23..25: note = Core
  misc_feature 26..50: note = RF
atgagatttcataactcacctcctagtctggtcaaaaaagttgagtacta

SEQ ID NO: 28024 - DNA, 50 bp, unidentified
  source 1..50: mol_type = unassigned DNA; note = target_c3255b0
  misc_feature 1..23: note = LF
  misc_feature 24..25: note = Core
  misc_feature 26..50: note = RF
aaccactccctgtggttctgggtccggatctgcgcttcgcttgtccggga

SEQ ID NO: 28025 - DNA, 50 bp, unidentified
  source 1..50: mol_type = unassigned DNA; note = target_c32a27b
  misc_feature 1..23: note = LF
  misc_feature 24..25: note = Core
  misc_feature 26..50: note = RF
ctggctgtacgccgatccaattaatgtgggagcgagcctgctcgcgatga

SEQ ID NO: 28026 - DNA, 50 bp, unidentified
  source 1..50: mol_type = unassigned DNA; note = target_c32c544
  misc_feature 1..23: note = LF
  misc_feature 24..25: note = Core
  misc_feature 26..50: note = RF
agagttattcacaacaatacctcctaaatccttttatatttttgttgatt

SEQ ID NO: 28027 - DNA, 50 bp, unidentified
  source 1..50: mol_type = unassigned DNA; note = target_c342351
  misc_feature 1..23: note = LF
  misc_feature 24..25: note = Core
  misc_feature 26..50: note = RF
atgtgtttatccctctttctttcctttctttaattttcattcgatcagta

SEQ ID NO: 28028 - DNA, 50 bp, unidentified
  source 1..50: mol_type = unassigned DNA; note = target_c344848
  misc_feature 1..23: note = LF
  misc_feature 24..25: note = Core
  misc_feature 26..50: note = RF
ccctgtgggcgctccgtccggggtgacgacaggggaagggtggcaggtca

SEQ ID NO: 28029 - DNA, 50 bp, unidentified
  source 1..50: mol_type = unassigned DNA; note = target_c363695
  misc_feature 1..23: note = LF
  misc_feature 24..25: note = Core
  misc_feature 26..50: note = RF
gtcgagagtttgcctctagcttccttcggattccacctcacgatggacac

SEQ ID NO: 28030 - DNA, 50 bp, unidentified
  source 1..50: mol_type = unassigned DNA; note = target_c372305
  misc_feature 1..20: note = LF
  misc_feature 21..25: note = Core
  misc_feature 26..50: note = RF
ccgggcggcccggcgaaccgctcacgcggaccgctccggccgctggccgc

SEQ ID NO: 28031 - DNA, 50 bp, unidentified
  source 1..50: mol_type = unassigned DNA; note = target_c379a48
  misc_feature 1..23: note = LF
  misc_feature 24..25: note = Core
  misc_feature 26..50: note = RF
gcggatgctgtgacgggattgggtggttagacgtcagtccgatttgcgcg

SEQ ID NO: 28032 - DNA, 50 bp, unidentified
  source 1..50: mol_type = unassigned DNA; note = target_c3951a2
  misc_feature 1..24: note = LF
  misc_feature 25: note = Core
  misc_feature 26..50: note = RF
ccgttccgacgcaggcataggtgccgttagccgatcgtcagacgggacgc

SEQ ID NO: 28033 - DNA, 50 bp, unidentified
  source 1..50: mol_type = unassigned DNA; note = target_c39ebfb
  misc_feature 1..23: note = LF
  misc_feature 24..25: note = Core
  misc_feature 26..50: note = RF
gagccgtctcgaatgtccgctattggcccaaagcagacatcctgatcgcg

SEQ ID NO: 28034 - DNA, 50 bp, unidentified
  source 1..50: mol_type = unassigned DNA; note = target_c3ab03e
  misc_feature 1..21: note = LF
  misc_feature 22..25: note = Core
  misc_feature 26..50: note = RF
gaccttcagagatttctgcttatgacccaaagcggacgtgccgttcatag

SEQ ID NO: 28035 - DNA, 50 bp, unidentified
  source 1..50: mol_type = unassigned DNA; note = target_c3b1cd4
  misc_feature 1..22: note = LF
  misc_feature 23..25: note = Core
  misc_feature 26..50: note = RF
caatctcatctactcaatcagtcattctgaggagcgcattatgcgacgta

SEQ ID NO: 28036 - DNA, 50 bp, unidentified
  source 1..50: mol_type = unassigned DNA; note = target_c3be8e4
  misc_feature 1..24: note = LF
  misc_feature 25: note = Core
  misc_feature 26..50: note = RF
gaccggcgcggacatcaagcctgacggtccgcgacgggcgcggcggcgcc

SEQ ID NO: 28037 - DNA, 50 bp, unidentified
  source 1..50: mol_type = unassigned DNA; note = target_c3c2e29
  misc_feature 1..24: note = LF
  misc_feature 25: note = Core
  misc_feature 26..50: note = RF
ctcttgctcgctggcctgcagcgttttttttatggctgagcccgaggcgg

SEQ ID NO: 28038 - DNA, 50 bp, unidentified
  source 1..50: mol_type = unassigned DNA; note = target_c3cd4aa
  misc_feature 1..24: note = LF
  misc_feature 25: note = Core
  misc_feature 26..50: note = RF
cttcggccagtgagtctcatggtacaccctccgacacctgagttgaccgc

SEQ ID NO: 28039 - DNA, 50 bp, unidentified
  source 1..50: mol_type = unassigned DNA; note = target_c3cfd62
  misc_feature 1..24: note = LF
  misc_feature 25: note = Core
  misc_feature 26..50: note = RF
gccatgagctgccgatcgcgcacggcggctttcgggacagctaggatcgt

SEQ ID NO: 28040 - DNA, 50 bp, unidentified
  source 1..50: mol_type = unassigned DNA; note = target_c3d4bee
  misc_feature 1..24: note = LF
  misc_feature 25: note = Core
  misc_feature 26..50: note = RF
acaacagcttcctcggatgaccgctttgggtcaaactcgacccaggcggc

SEQ ID NO: 28041 - DNA, 50 bp, unidentified
  source 1..50: mol_type = unassigned DNA; note = target_c3d8ab1
  misc_feature 1..24: note = LF
  misc_feature 25: note = Core
  misc_feature 26..50: note = RF
gagtaatggtaacgaagcagctatcgacccaaagcagacgatgacaatga

SEQ ID NO: 28042 - DNA, 50 bp, unidentified
  source 1..50: mol_type = unassigned DNA; note = target_c3dac0c
  misc_feature 1..24: note = LF
  misc_feature 25: note = Core
  misc_feature 26..50: note = RF
tcaagcaacgttcgaagcaacgaaaaaggggtcgccgccactaaggcgtt

SEQ ID NO: 28043 - DNA, 50 bp, unidentified
  source 1..50: mol_type = unassigned DNA; note = target_c3dc0ad
  misc_feature 1..22: note = LF
  misc_feature 23..25: note = Core
  misc_feature 26..50: note = RF
gcgggtcaagcccaataacgcacccccccgtttgaatgaacaatgtatca

SEQ ID NO: 28044 - DNA, 50 bp, unidentified
  source 1..50: mol_type = unassigned DNA; note = target_c3dff76
  misc_feature 1..23: note = LF
  misc_feature 24..25: note = Core
  misc_feature 26..50: note = RF
atgagacattattctttctcctccttacttcttttcctgatagagggggc

SEQ ID NO: 28045 - DNA, 50 bp, unidentified
  source 1..50: mol_type = unassigned DNA; note = target_c3e5bcf
  misc_feature 1..24: note = LF
  misc_feature 25: note = Core
  misc_feature 26..50: note = RF
cctactggaaagccacgactggcgcgggtttccggcgtatcgccatgcgc

SEQ ID NO: 28046 - DNA, 50 bp, unidentified
  source 1..50: mol_type = unassigned DNA; note = target_c3f097e
  misc_feature 1..23: note = LF
  misc_feature 24..25: note = Core
  misc_feature 26..50: note = RF
ggcgttcagggctcgcgggaaatttttttaaatgccgcgattaccccggc

SEQ ID NO: 28047 - DNA, 50 bp, unidentified
  source 1..50: mol_type = unassigned DNA; note = target_c3f83de
  misc_feature 1..24: note = LF
  misc_feature 25: note = Core
  misc_feature 26..50: note = RF
ccttctaaacttatgaagttagaagccatcatggataaagtgaagctggt

SEQ ID NO: 28048 - DNA, 50 bp, unidentified
  source 1..50: mol_type = unassigned DNA; note = target_c402e22
  misc_feature 1..21: note = LF
  misc_feature 22..25: note = Core
  misc_feature 26..50: note = RF
taaagaagctgttgaatttaatcacctgtattttaatatttgtaaaaaca

SEQ ID NO: 28049 - DNA, 50 bp, unidentified
  source 1..50: mol_type = unassigned DNA; note = target_c405db7
  misc_feature 1..24: note = LF
  misc_feature 25: note = Core
  misc_feature 26..50: note = RF
aataatcttatccattaaaacccttttgtttgttgacattgaaatgaatg

SEQ ID NO: 28050 - DNA, 50 bp, unidentified
  source 1..50: mol_type = unassigned DNA; note = target_c40de00
  misc_feature 1..22: note = LF
  misc_feature 23..25: note = Core
  misc_feature 26..50: note = RF
gctgttgatttccgcagagaagtgaccctggatttccactgagaaccgac

SEQ ID NO: 28051 - DNA, 50 bp, unidentified
  source 1..50: mol_type = unassigned DNA; note = target_c413ec8
  misc_feature 1..23: note = LF
  misc_feature 24..25: note = Core
  misc_feature 26..50: note = RF
attttgtgttttgaaccatctttctttatttttacaaatgttttgcattg

SEQ ID NO: 28052 - DNA, 50 bp, unidentified
  source 1..50: mol_type = unassigned DNA; note = target_c41a67a
  misc_feature 1..23: note = LF
  misc_feature 24..25: note = Core
  misc_feature 26..50: note = RF
ccaaccaccacggaccgtagacccccccccgcgcgaaatgtcaacaaatc

SEQ ID NO: 28053 - DNA, 50 bp, unidentified
  source 1..50: mol_type = unassigned DNA; note = target_c41dc81
  misc_feature 1..23: note = LF
  misc_feature 24..25: note = Core
  misc_feature 26..50: note = RF
gcatctcttcgcggacaagtccgctcccacagggtatgcggtgcgcacgg

SEQ ID NO: 28054 - DNA, 50 bp, unidentified
  source 1..50: mol_type = unassigned DNA; note = target_c41dfda
  misc_feature 1..21: note = LF
  misc_feature 22..25: note = Core
  misc_feature 26..50: note = RF
ccgtcggccgccgtcgtcacgctcacaggagcccctccacgtccttcagc

SEQ ID NO: 28055 - DNA, 50 bp, unidentified
  source 1..50: mol_type = unassigned DNA; note = target_c424d5a
  misc_feature 1..23: note = LF
  misc_feature 24..25: note = Core
  misc_feature 26..50: note = RF
tcgcgttacaagccccgttcgccctgaggaggccatcgagggccgtctcg

SEQ ID NO: 28056 - DNA, 50 bp, unidentified
  source 1..50: mol_type = unassigned DNA; note = target_c42742a
  misc_feature 1..24: note = LF
  misc_feature 25: note = Core
  misc_feature 26..50: note = RF
ccgttatgggcgcgaacagcccctagccgtacagcagatgctcgacgagc

SEQ ID NO: 28057 - DNA, 50 bp, unidentified
  source 1..50: mol_type = unassigned DNA; note = target_c42a596
  misc_feature 1..23: note = LF
  misc_feature 24..25: note = Core
  misc_feature 26..50: note = RF
cgccgggtgatactcggtgaggctttttattgggcgtaatttgcagggtg

SEQ ID NO: 28058 - DNA, 50 bp, unidentified
  source 1..50: mol_type = unassigned DNA; note = target_c42f49e
  misc_feature 1..23: note = LF
  misc_feature 24..25: note = Core
  misc_feature 26..50: note = RF
catgatgccaaagattagggatctgtcgcaaactttttgttccagagttt

SEQ ID NO: 28059 - DNA, 50 bp, unidentified; identical to SEQ ID NO: 26552
  source 1..50: mol_type = unassigned DNA; note = target_c43d05d
  misc_feature 1..23: note = LF
  misc_feature 24..25: note = Core
  misc_feature 26..50: note = RF

SEQ ID NO: 28060 - DNA, 50 bp, unidentified
  source 1..50: mol_type = unassigned DNA; note = target_c442036
  misc_feature 1..23: note = LF
  misc_feature 24..25: note = Core
  misc_feature 26..50: note = RF
cacgaggccactttgccgacaagtggcagctcgatgagatagtggtgacg

SEQ ID NO: 28061 - DNA, 50 bp, unidentified
  source 1..50: mol_type = unassigned DNA; note = target_c4454a5
  misc_feature 1..24: note = LF
  misc_feature 25: note = Core
  misc_feature 26..50: note = RF
gcccggccagcccggggcggcgccccccccggtgttctcaatgtgcaatc

SEQ ID NO: 28062 - DNA, 50 bp, unidentified
  source 1..50: mol_type = unassigned DNA; note = target_c448881
  misc_feature 1..23: note = LF
  misc_feature 24..25: note = Core
  misc_feature 26..50: note = RF
attctctatatccaaactgacccctattagcgggttatggcttagcaggg

SEQ ID NO: 28063 - DNA, 50 bp, unidentified
  source 1..50: mol_type = unassigned DNA; note = target_c44da85
  misc_feature 1..23: note = LF
  misc_feature 24..25: note = Core
  misc_feature 26..50: note = RF
gtgcttccgtcatgcaatgcctcctccatctaaatttggatataaagaaa

SEQ ID NO: 28064 - DNA, 50 bp, unidentified
  source 1..50: mol_type = unassigned DNA; note = target_c44de6f
  misc_feature 1..24: note = LF
  misc_feature 25: note = Core
  misc_feature 26..50: note = RF
cgacacccaccgcgactgaaccgccccgggttcagtggaggctggttgct

SEQ ID NO: 28065 - DNA, 50 bp, unidentified
  source 1..50: mol_type = unassigned DNA; note = target_c46bf72
  misc_feature 1..23: note = LF
  misc_feature 24..25: note = Core
  misc_feature 26..50: note = RF
tatctaagttacgcgcaaaaccagacattgggaattatcaatattcggtt

SEQ ID NO: 28066 - DNA, 50 bp, unidentified
  source 1..50: mol_type = unassigned DNA; note = target_c46f838
  misc_feature 1..23: note = LF
  misc_feature 24..25: note = Core
  misc_feature 26..50: note = RF
ttcttaaacataaagaaaacctccttaacatactgatggtatgtatctac

SEQ ID NO: 28067 - DNA, 50 bp, unidentified
  source 1..50: mol_type = unassigned DNA; note = target_c4706e7
  misc_feature 1..23: note = LF
  misc_feature 24..25: note = Core
  misc_feature 26..50: note = RF
aacagggcatgtccactatgcccctatcccatcggtttacctttgggaat

SEQ ID NO: 28068 - DNA, 50 bp, unidentified
  source 1..50: mol_type = unassigned DNA; note = target_c478a65
  misc_feature 1..23: note = LF
  misc_feature 24..25: note = Core
  misc_feature 26..50: note = RF
tcaagtagcgtcgacgcacctgtagggtgggcaaaatcgcccgtttcggc

SEQ ID NO: 28069 - DNA, 50 bp, unidentified
  source 1..50: mol_type = unassigned DNA; note = target_c47d168
  misc_feature 1..23: note = LF
  misc_feature 24..25: note = Core
  misc_feature 26..50: note = RF
ctccgggctttacactgcaatccctaacgcggcccacgcgcaacaccgtt

SEQ ID NO: 28070 - DNA, 50 bp, unidentified
  source 1..50: mol_type = unassigned DNA; note = target_c47f0d9
  misc_feature 1..22: note = LF
  misc_feature 23..25: note = Core
  misc_feature 26..50: note = RF
tttccgtcccatctactacaccctttctgcccggaatgtaatcttcaaaa

SEQ ID NO: 28071 - DNA, 50 bp, unidentified
  source 1..50: mol_type = unassigned DNA; note = target_c482139
  misc_feature 1..23: note = LF
  misc_feature 24..25: note = Core
  misc_feature 26..50: note = RF
cacccggccaattcgaggtagggctagcccgaaggcggcagtggacctca

SEQ ID NO: 28072 - DNA, 50 bp, unidentified
  source 1..50: mol_type = unassigned DNA; note = target_c483ebe
  misc_feature 1..24: note = LF
  misc_feature 25: note = Core
  misc_feature 26..50: note = RF
gtttccggcgaaaacgcaccaatctgcacgaaaagtacgactaccccata

SEQ ID NO: 28073 - DNA, 50 bp, unidentified
  source 1..50: mol_type = unassigned DNA; note = target_c4860c4
  misc_feature 1..23: note = LF
  misc_feature 24..25: note = Core
  misc_feature 26..50: note = RF
tcagcggcagtgcgggatgcctcagtcgagcgacatcccggtgatgcgcg

SEQ ID NO: 28074 - DNA, 50 bp, unidentified
  source 1..50: mol_type = unassigned DNA; note = target_c489cd1
  misc_feature 1..24: note = LF
  misc_feature 25: note = Core
  misc_feature 26..50: note = RF
ttaatattccaatgcgcccgcaacgtctcgctgggttcaagaggcggtcg

SEQ ID NO: 28075 - DNA, 50 bp, unidentified
  source 1..50: mol_type = unassigned DNA; note = target_c4942c4
  misc_feature 1..24: note = LF
  misc_feature 25: note = Core
  misc_feature 26..50: note = RF
gagagttggcgcttgagaacgatttttggaaggcgcgctcatcaaggccg

SEQ ID NO: 28076 - DNA, 50 bp, unidentified
  source 1..50: mol_type = unassigned DNA; note = target_c49b7c0
  misc_feature 1..21: note = LF
  misc_feature 22..25: note = Core
  misc_feature 26..50: note = RF
tggagccatagctggcggtcgctcatcccgctgccgcgtcggggagcgcc

SEQ ID NO: 28077 - DNA, 50 bp, unidentified
  source 1..50: mol_type = unassigned DNA; note = target_c4a2d97
  misc_feature 1..23: note = LF
  misc_feature 24..25: note = Core
  misc_feature 26..50: note = RF
gctacttcgagcagagcaaacccctctcgagcctctccccgcccatgggc

SEQ ID NO: 28078 - DNA, 50 bp, unidentified
  source 1..50: mol_type = unassigned DNA; note = target_c4a7cdd
  misc_feature 1..23: note = LF
  misc_feature 24..25: note = Core
  misc_feature 26..50: note = RF
aaaaatgaatggtaaaaggtaaaaggttaaaggttgaagattttatctta

SEQ ID NO: 28079 - DNA, 50 bp, unidentified
  source 1..50: mol_type = unassigned DNA; note = target_c4ab12c
  misc_feature 1..21: note = LF
  misc_feature 22..25: note = Core
  misc_feature 26..50: note = RF
tgataaatgtcatgttcattcctccgttttctgtctgagttcttttgttg

SEQ ID NO: 28080 - DNA, 50 bp, unidentified
  source 1..50: mol_type = unassigned DNA; note = target_c4b26ee
  misc_feature 1..22: note = LF
  misc_feature 23..25: note = Core
  misc_feature 26..50: note = RF
cataatcttctttgtttatagggttatacattagtcattatcatagagcc

SEQ ID NO: 28081 - DNA, 50 bp, unidentified
  source 1..50: mol_type = unassigned DNA; note = target_c4ba3b8
  misc_feature 1..23: note = LF
  misc_feature 24..25: note = Core
  misc_feature 26..50: note = RF
ccgggccgcctgggtcggggctgctcagggcttgaggtaggcgaagccct

SEQ ID NO: 28082 - DNA, 50 bp, unidentified
  source 1..50: mol_type = unassigned DNA; note = target_c4ba9f3
  misc_feature 1..22: note = LF
  misc_feature 23..25: note = Core
  misc_feature 26..50: note = RF
taataataaaagaaaatagtaatttattagttgtttagaattttattatg

SEQ ID NO: 28083 - DNA, 50 bp, unidentified
  source 1..50: mol_type = unassigned DNA; note = target_c4bc288
  misc_feature 1..23: note = LF
  misc_feature 24..25: note = Core
  misc_feature 26..50: note = RF
acggcgcgccgcgccgtccccctttttgcgcaaggggcgtgccgggccgc

SEQ ID NO: 28084 - DNA, 50 bp, unidentified
  source 1..50: mol_type = unassigned DNA; note = target_c4c1de5
  misc_feature 1..23: note = LF
  misc_feature 24..25: note = Core
  misc_feature 26..50: note = RF
ctaccagttaaacgttactggagtgaacccctcgggctggatcaacgagg

SEQ ID NO: 28085 - DNA, 50 bp, unidentified
  source 1..50: mol_type = unassigned DNA; note = target_c4c29b5
  misc_feature 1..23: note = LF
  misc_feature 24..25: note = Core
  misc_feature 26..50: note = RF
gggcacaaaaaaccgtgcccaccctacgcaattggatttttaagatattc

SEQ ID NO: 28086 - DNA, 50 bp, unidentified
  source 1..50: mol_type = unassigned DNA; note = target_c4dd1ce
  misc_feature 1..23: note = LF
  misc_feature 24..25: note = Core
  misc_feature 26..50: note = RF
tagttctggcatttaattacctcctattggatatgttttgattggataaa

SEQ ID NO: 28087 - DNA, 50 bp, unidentified
  source 1..50: mol_type = unassigned DNA; note = target_c4de7a6
  misc_feature 1..23: note = LF
  misc_feature 24..25: note = Core
  misc_feature 26..50: note = RF
cgtctcgcataggtcagcacaacctataggcgggtgcacacttttggtat

SEQ ID NO: 28088 - DNA, 50 bp, unidentified
  source 1..50: mol_type = unassigned DNA; note = target_c4e62c9
  misc_feature 1..22: note = LF
  misc_feature 23..25: note = Core
  misc_feature 26..50: note = RF
ttctccgtgttagctttgcgtatctctgtgtaaaaactaatagagttcat

SEQ ID NO: 28089 - DNA, 50 bp, unidentified
  source 1..50: mol_type = unassigned DNA; note = target_c4e984c
  misc_feature 1..23: note = LF
  misc_feature 24..25: note = Core
  misc_feature 26..50: note = RF
atcgggtcctggccctgacccccctccatcccgcgccgacggctagaaga

SEQ ID NO: 28090 - DNA, 50 bp, unidentified
  source 1..50: mol_type = unassigned DNA; note = target_c4eeee7
  misc_feature 1..23: note = LF
  misc_feature 24..25: note = Core
  misc_feature 26..50: note = RF
tcttcgtgaccgcaggtcaggtcagtgactacacgggtgccgcagcactt

SEQ ID NO: 28091 - DNA, 50 bp, unidentified
  source 1..50: mol_type = unassigned DNA; note = target_c4f835f
  misc_feature 1..23: note = LF
  misc_feature 24..25: note = Core
  misc_feature 26..50: note = RF
tagtgagcgattagggcagctattggcactcaagagccatgcctcagtcg

SEQ ID NO: 28092 - DNA, 50 bp, unidentified
  source 1..50: mol_type = unassigned DNA; note = target_c5048f7
  misc_feature 1..23: note = LF
  misc_feature 24..25: note = Core
  misc_feature 26..50: note = RF
gcacggcggcgcttccccttctccttcccgggcgtcggcggctgctgccg

SEQ ID NO: 28093 - DNA, 50 bp, unidentified
  source 1..50: mol_type = unassigned DNA; note = target_c514021
  misc_feature 1..23: note = LF
  misc_feature 24..25: note = Core
  misc_feature 26..50: note = RF
atccatactctcggcggtggctatggattccgggctcgcccaccgctatc

SEQ ID NO: 28094 - DNA, 50 bp, unidentified
  source 1..50: mol_type = unassigned DNA; note = target_c518264
  misc_feature 1..24: note = LF
  misc_feature 25: note = Core
  misc_feature 26..50: note = RF
tcgggtacgacgttcgcccatcggcatgacagtgcattcgccgcggtgca

SEQ ID NO: 28095 - DNA, 50 bp, unidentified; identical to SEQ ID NO: 25339
  source 1..50: mol_type = unassigned DNA; note = target_c51b6e8
  misc_feature 1..23: note = LF
  misc_feature 24..25: note = Core
  misc_feature 26..50: note = RF

SEQ ID NO: 28096 - DNA, 50 bp, unidentified
  source 1..50: mol_type = unassigned DNA; note = target_c55feb2
  misc_feature 1..23: note = LF
  misc_feature 24..25: note = Core
  misc_feature 26..50: note = RF
tatgaaatttatattacttcctcctcctaagctaatctcttagcactttt

SEQ ID NO: 28097 - DNA, 50 bp, unidentified
  source 1..50: mol_type = unassigned DNA; note = target_c56c4b3
  misc_feature 1..23: note = LF
  misc_feature 24..25: note = Core
  misc_feature 26..50: note = RF
aaggtgaatgacgttgccggctctgttgcacaaatgccgtgagggattca

SEQ ID NO: 28098 - DNA, 50 bp, unidentified
  source 1..50: mol_type = unassigned DNA; note = target_c56f9df
  misc_feature 1..23: note = LF
  misc_feature 24..25: note = Core
  misc_feature 26..50: note = RF
gcagatggaatggatgcctccccctggaagcggacgtatgaataggctag

SEQ ID NO: 28099 - DNA, 50 bp, unidentified
  source 1..50: mol_type = unassigned DNA; note = target_c5715ba
  misc_feature 1..24: note = LF
  misc_feature 25: note = Core
  misc_feature 26..50: note = RF
agccgtaagggcaattgctgggataatgccgtgatggaacggttcttctt

SEQ ID NO: 28100 - DNA, 50 bp, unidentified
  source 1..50: mol_type = unassigned DNA; note = target_c578059
  misc_feature 1..21: note = LF
  misc_feature 22..25: note = Core
  misc_feature 26..50: note = RF
cgcagctgctcggccagatcgctcatcgctgccggccgacgctacccggc

SEQ ID NO: 28101 - DNA, 50 bp, unidentified
  source 1..50: mol_type = unassigned DNA; note = target_c5af62a
  misc_feature 1..23: note = LF
  misc_feature 24..25: note = Core
  misc_feature 26..50: note = RF
cgctcatctggctgatgggttccagcgtcatgtatctggcccgctgcact

SEQ ID NO: 28102 - DNA, 50 bp, unidentified
  source 1..50: mol_type = unassigned DNA; note = target_c5b0e07
  misc_feature 1..23: note = LF
  misc_feature 24..25: note = Core
  misc_feature 26..50: note = RF
tacggctttcaggctaatccgacctacataatgagcaagctgttactgag

SEQ ID NO: 28103 - DNA, 50 bp, unidentified
  source 1..50: mol_type = unassigned DNA; note = target_c5b2ede
  misc_feature 1..23: note = LF
  misc_feature 24..25: note = Core
  misc_feature 26..50: note = RF
ccgagcagcgcggccaggtgcgttggtgcatggatgccgcggttgcctgg

SEQ ID NO: 28104 - DNA, 50 bp, unidentified
  source 1..50: mol_type = unassigned DNA; note = target_c5be64a
  misc_feature 1..24: note = LF
  misc_feature 25: note = Core
  misc_feature 26..50: note = RF
gaaaaagagatgtcctcaaaagaaccgtccctttgattgctatatcagcc

SEQ ID NO: 28105 - DNA, 50 bp, unidentified
  source 1..50: mol_type = unassigned DNA; note = target_c5c1dc5
  misc_feature 1..23: note = LF
  misc_feature 24..25: note = Core
  misc_feature 26..50: note = RF
cgagtagtaattttctcatgtctctccttattgtacttaaatttatttga

SEQ ID NO: 28106 - DNA, 50 bp, unidentified
  source 1..50: mol_type = unassigned DNA; note = target_c5c2ab9
  misc_feature 1..23: note = LF
  misc_feature 24..25: note = Core
  misc_feature 26..50: note = RF
gatcaccggcggacaacgtatagtggcggatgagttcacgcggttccgtg

SEQ ID NO: 28107 - DNA, 50 bp, unidentified
  source 1..50: mol_type = unassigned DNA; note = target_c5c38da
  misc_feature 1..23: note = LF
  misc_feature 24..25: note = Core
  misc_feature 26..50: note = RF
gcatagccgggacgcgcggctggaggcgacatgatcaactgctatgcatt

SEQ ID NO: 28108 - DNA, 50 bp, unidentified
  source 1..50: mol_type = unassigned DNA; note = target_c5c39da
  misc_feature 1..23: note = LF
  misc_feature 24..25: note = Core
  misc_feature 26..50: note = RF
gctgcgcccgcatccccggtccgtgcaacacggccgcaaaaattcgtcat

SEQ ID NO: 28109 - DNA, 50 bp, unidentified
  source 1..50: mol_type = unassigned DNA; note = target_c5c957b
  misc_feature 1..23: note = LF
  misc_feature 24..25: note = Core
  misc_feature 26..50: note = RF
gcccgacggccggcgtcatcgacagccagtcggtcaagaccaccgaaagc

SEQ ID NO: 28110 - DNA, 50 bp, unidentified
  source 1..50: mol_type = unassigned DNA; note = target_c5d056e
  misc_feature 1..24: note = LF
  misc_feature 25: note = Core
  misc_feature 26..50: note = RF
aggttctttccttttccatcattatatcctcctgcgttattatttttaag

SEQ ID NO: 28111 - DNA, 50 bp, unidentified
  source 1..50: mol_type = unassigned DNA; note = target_c5d65cf
  misc_feature 1..23: note = LF
  misc_feature 24..25: note = Core
  misc_feature 26..50: note = RF
cctacgcccgtgacgtccgcagttggcacttctcggaagcgacgctcctc

SEQ ID NO: 28112 - DNA, 50 bp, unidentified
  source 1..50: mol_type = unassigned DNA; note = target_c5d6d41
  misc_feature 1..24: note = LF
  misc_feature 25: note = Core
  misc_feature 26..50: note = RF
ttattaattcttactattctttcctatctttcattgttaaaaaaaggcac

SEQ ID NO: 28113 - DNA, 50 bp, unidentified
  source 1..50: mol_type = unassigned DNA; note = target_c5d999f
  misc_feature 1..23: note = LF
  misc_feature 24..25: note = Core
  misc_feature 26..50: note = RF
tcatttctggtccccgtacaacagacatcgttagtggccgtcggcacgtc

SEQ ID NO: 28114 - DNA, 50 bp, unidentified
  source 1..50: mol_type = unassigned DNA; note = target_c5eb6c0
  misc_feature 1..23: note = LF
  misc_feature 24..25: note = Core
  misc_feature 26..50: note = RF
gacctgcgtgcgcctaacccaccctacgatgcatgcgccaggatcttatc

SEQ ID NO: 28115 - DNA, 50 bp, unidentified
  source 1..50: mol_type = unassigned DNA; note = target_c5ec070
  misc_feature 1..23: note = LF
  misc_feature 24..25: note = Core
  misc_feature 26..50: note = RF
cgctgcaaccggatgtctgctgttgggggtaaagcgcgcattgtggagat

SEQ ID NO: 28116 - DNA, 50 bp, unidentified
  source 1..50: mol_type = unassigned DNA; note = target_c5f7328
  misc_feature 1..23: note = LF
  misc_feature 24..25: note = Core
  misc_feature 26..50: note = RF
gcgggccggtcggcaccaaggcagacatcgatgaaaaattgatgatgccg

SEQ ID NO: 28117 - DNA, 50 bp, unidentified
  source 1..50: mol_type = unassigned DNA; note = target_c5f7a71
  misc_feature 1..23: note = LF
  misc_feature 24..25: note = Core
  misc_feature 26..50: note = RF
ctgaagaaatacctacagttatttttctcaatgcaacactacgaaaaaga

SEQ ID NO: 28118 - DNA, 50 bp, unidentified
  source 1..50: mol_type = unassigned DNA; note = target_c605eb6
  misc_feature 1..24: note = LF
  misc_feature 25: note = Core
  misc_feature 26..50: note = RF
ggtgcggacccgcatgccgggtggtgtgggaggggatcggtcaggctacc

SEQ ID NO: 28119 - DNA, 50 bp, unidentified
  source 1..50: mol_type = unassigned DNA; note = target_c606d54
  misc_feature 1..23: note = LF
  misc_feature 24..25: note = Core
  misc_feature 26..50: note = RF
taggttggttggatcattgaatcctgtaattgttaaaatcaaaattcggt

SEQ ID NO: 28120 - DNA, 50 bp, unidentified
  source 1..50: mol_type = unassigned DNA; note = target_c615a81
  misc_feature 1..23: note = LF
  misc_feature 24..25: note = Core
  misc_feature 26..50: note = RF
ggagatcatcatcccgccggatgtgaggtttgcaggctggtcctgccgga

SEQ ID NO: 28121 - DNA, 50 bp, unidentified
  source 1..50: mol_type = unassigned DNA; note = target_c61f66d
  misc_feature 1..23: note = LF
  misc_feature 24..25: note = Core
  misc_feature 26..50: note = RF
gatgattcgtccgatagtatcacctccaatctacaatccaaatttcaaaa

SEQ ID NO: 28122 - DNA, 50 bp, unidentified
  source 1..50: mol_type = unassigned DNA; note = target_c6213e1
  misc_feature 1..23: note = LF
  misc_feature 24..25: note = Core
  misc_feature 26..50: note = RF
tgtctggcggacatcgtgtagcccggatggagcgcgagcggaatccgggg

SEQ ID NO: 28123 - DNA, 50 bp, unidentified
  source 1..50: mol_type = unassigned DNA; note = target_c62782f
  misc_feature 1..24: note = LF
  misc_feature 25: note = Core
  misc_feature 26..50: note = RF
gcagataaatgtcatcatttttctcctcccgatcgattttcgtttgattt

SEQ ID NO: 28124 - DNA, 50 bp, unidentified
  source 1..50: mol_type = unassigned DNA; note = target_c636525
  misc_feature 1..23: note = LF
  misc_feature 24..25: note = Core
  misc_feature 26..50: note = RF
tggattaggactgatatgtcggctagggtccagcgaccttatgaccgaac

SEQ ID NO: 28125 - DNA, 50 bp, unidentified
  source 1..50: mol_type = unassigned DNA; note = target_c64226a
  misc_feature 1..23: note = LF
  misc_feature 24..25: note = Core
  misc_feature 26..50: note = RF
gcgggaggaaggcggcgtagctgctcagggggctgtcaccattttttcca

SEQ ID NO: 28126 - DNA, 50 bp, unidentified
  source 1..50: mol_type = unassigned DNA; note = target_c64510a
  misc_feature 1..23: note = LF
  misc_feature 24..25: note = Core
  misc_feature 26..50: note = RF
cgatgcgagccctcgtcgcggtgctcacggcagaaccgcctcgtagtcgg

SEQ ID NO: 28127 - DNA, 50 bp, unidentified
  source 1..50: mol_type = unassigned DNA; note = target_c6457e1
  misc_feature 1..24: note = LF
  misc_feature 25: note = Core
  misc_feature 26..50: note = RF
agtactagcaatgaattatacacgttgttagctacagttatttctaccat

SEQ ID NO: 28128 - DNA, 50 bp, unidentified
  source 1..50: mol_type = unassigned DNA; note = target_c64900f
  misc_feature 1..23: note = LF
  misc_feature 24..25: note = Core
  misc_feature 26..50: note = RF
gatcgtggtcaaggtggagttgtctaatcgcaatggtgacgtcaagtatc

SEQ ID NO: 28129 - DNA, 50 bp, unidentified
  source 1..50: mol_type = unassigned DNA; note = target_c64f0a5
  misc_feature 1..22: note = LF
  misc_feature 23..25: note = Core
  misc_feature 26..50: note = RF
gctatgtccagttcatcggtccctttctcaagagagaggccacgaagcgt

SEQ ID NO: 28130 - DNA, 50 bp, unidentified
  source 1..50: mol_type = unassigned DNA; note = target_c655f51
  misc_feature 1..23: note = LF
  misc_feature 24..25: note = Core
  misc_feature 26..50: note = RF
ttccggaacggtttggtcaacctcggacgttcggcatcaacgccttccag

SEQ ID NO: 28131 - DNA, 50 bp, unidentified
  source 1..50: mol_type = unassigned DNA; note = target_c65a911
  misc_feature 1..23: note = LF
  misc_feature 24..25: note = Core
  misc_feature 26..50: note = RF
agatctgttctcactttattatccttcaattcgcatccagattacgaata

SEQ ID NO: 28132 - DNA, 50 bp, unidentified
  source 1..50: mol_type = unassigned DNA; note = target_c65b6fc
  misc_feature 1..23: note = LF
  misc_feature 24..25: note = Core
  misc_feature 26..50: note = RF
ggcagagcgctcattttcaaaagagcgctctggctatttagccatttgca

SEQ ID NO: 28133 - DNA, 50 bp, unidentified
  source 1..50: mol_type = unassigned DNA; note = target_c65d81f
  misc_feature 1..23: note = LF
  misc_feature 24..25: note = Core
  misc_feature 26..50: note = RF
tgactgaatccaagaccacaagcagtcattcagattttttcaaatggcac

SEQ ID NO: 28134 - DNA, 50 bp, unidentified
  source 1..50: mol_type = unassigned DNA; note = target_c6823e9
  misc_feature 1..22: note = LF
  misc_feature 23..25: note = Core
  misc_feature 26..50: note = RF
cacgccggactgttggtagcgccccccggggacaccccacctgcagccat

SEQ ID NO: 28135 - DNA, 50 bp, unidentified
  source 1..50: mol_type = unassigned DNA; note = target_c68cc86
  misc_feature 1..24: note = LF
  misc_feature 25: note = Core
  misc_feature 26..50: note = RF
attgccattgtttcattaggtggatacctccctctaaatatagtaattga

SEQ ID NO: 28136 - DNA, 50 bp, unidentified
  source 1..50: mol_type = unassigned DNA; note = target_c68ce10
  misc_feature 1..24: note = LF
  misc_feature 25: note = Core
  misc_feature 26..50: note = RF
caggcgcgacagctcgagctgcgaatgggtcccggatcagcgctccgctt

SEQ ID NO: 28137 - DNA, 50 bp, unidentified
  source 1..50: mol_type = unassigned DNA; note = target_c6a2070
  misc_feature 1..23: note = LF
  misc_feature 24..25: note = Core
  misc_feature 26..50: note = RF
gggcgcatcagaatgtcctgaagtggccctcaggcgccgtgccgctcgat

SEQ ID NO: 28138 - DNA, 50 bp, unidentified
  source 1..50: mol_type = unassigned DNA; note = target_c6b46e0
  misc_feature 1..23: note = LF
  misc_feature 24..25: note = Core
  misc_feature 26..50: note = RF
caaaattgcggcagagccccttttgggcgccgctcaacacacaggacgga

SEQ ID NO: 28139 - DNA, 50 bp, unidentified
  source 1..50: mol_type = unassigned DNA; note = target_c6b49b4
  misc_feature 1..23: note = LF
  misc_feature 24..25: note = Core
  misc_feature 26..50: note = RF
agttcaatcatatccgctttctcctttatttatctgtctgtcagtcattg

SEQ ID NO: 28140 - DNA, 50 bp, unidentified
  source 1..50: mol_type = unassigned DNA; note = target_c6b85dd
  misc_feature 1..23: note = LF
  misc_feature 24..25: note = Core
  misc_feature 26..50: note = RF
tgtagcgatgtaacagccgctattgggactaaacgccaaattgtccgacg

SEQ ID NO: 28141 - DNA, 50 bp, unidentified
  source 1..50: mol_type = unassigned DNA; note = target_c6b9d16
  misc_feature 1..24: note = LF
  misc_feature 25: note = Core
  misc_feature 26..50: note = RF
cgtcctgcctcccaatcgcgccaaaattatctttggacgggaaacgagca

SEQ ID NO: 28142 - DNA, 50 bp, unidentified
  source 1..50: mol_type = unassigned DNA; note = target_c6c61c8
  misc_feature 1..23: note = LF
  misc_feature 24..25: note = Core
  misc_feature 26..50: note = RF
tttcacccacaaccgcctgtggttgggtcccggccttcgccgggacgacg

SEQ ID NO: 28143 - DNA, 50 bp, unidentified
  source 1..50: mol_type = unassigned DNA; note = target_c6cbe85
  misc_feature 1..24: note = LF
  misc_feature 25: note = Core
  misc_feature 26..50: note = RF
ctctctgactcccccgaagtcggcttctgggaagttgccgggatcgatac

SEQ ID NO: 28144 - DNA, 50 bp, unidentified
  source 1..50: mol_type = unassigned DNA; note = target_c6cdb79
  misc_feature 1..23: note = LF
  misc_feature 24..25: note = Core
  misc_feature 26..50: note = RF
atgtcagcttagatgcccactatagtgcggagagtacggcgaccacgaaa

SEQ ID NO: 28145 - DNA, 50 bp, unidentified
  source 1..50: mol_type = unassigned DNA; note = target_c6d07eb
  misc_feature 1..23: note = LF
  misc_feature 24..25: note = Core
  misc_feature 26..50: note = RF
cgcacctagcctacgtcggcttgtggcccatcgcgtcagttagtccgatg

SEQ ID NO: 28146 - DNA, 50 bp, unidentified
  source 1..50: mol_type = unassigned DNA; note = target_c6d4cbd
  misc_feature 1..24: note = LF
  misc_feature 25: note = Core
  misc_feature 26..50: note = RF
aagagactggcgcgtccttctgggcgaaaggacgcgcacgctcatcgata

SEQ ID NO: 28147 - DNA, 50 bp, unidentified
  source 1..50: mol_type = unassigned DNA; note = target_c6db7a6
  misc_feature 1..24: note = LF
  misc_feature 25: note = Core
  misc_feature 26..50: note = RF
aaaacaagctattagctatacacgttgttgtagccagtgcttttatttat

SEQ ID NO: 28148 - DNA, 50 bp, unidentified
  source 1..50: mol_type = unassigned DNA; note = target_c6df2c4
  misc_feature 1..23: note = LF
  misc_feature 24..25: note = Core
  misc_feature 26..50: note = RF
ggatgacgctgcgcttttccgccctacgggtcgccggggacacgagacag

SEQ ID NO: 28149 - DNA, 50 bp, unidentified
  source 1..50: mol_type = unassigned DNA; note = target_c6e38c8
  misc_feature 1..23: note = LF
  misc_feature 24..25: note = Core
  misc_feature 26..50: note = RF
ggtttttgacataatgattcctcctatataattagttgtgcgatagcatt

SEQ ID NO: 28150 - DNA, 50 bp, unidentified
  source 1..50: mol_type = unassigned DNA; note = target_c6f12b2
  misc_feature 1..23: note = LF
  misc_feature 24..25: note = Core
  misc_feature 26..50: note = RF
cgtcggggtgccgcgcggaagcagaccttcgcaggggcgcctggggatca

SEQ ID NO: 28151 - DNA, 50 bp, unidentified
  source 1..50: mol_type = unassigned DNA; note = target_c6f1619
  misc_feature 1..24: note = LF
  misc_feature 25: note = Core
  misc_feature 26..50: note = RF
gcagcggccgacgaatgagaacaccaacgggctgctggagtggtccccga

SEQ ID NO: 28152 - DNA, 50 bp, unidentified
  source 1..50: mol_type = unassigned DNA; note = target_c6f1be6
  misc_feature 1..23: note = LF
  misc_feature 24..25: note = Core
  misc_feature 26..50: note = RF
tttttggtcgaatgaattcgaccctacagtccttctccgattggtgaccc

SEQ ID NO: 28153 - DNA, 50 bp, unidentified
  source 1..50: mol_type = unassigned DNA; note = target_c6f2d46
  misc_feature 1..22: note = LF
  misc_feature 23..25: note = Core
  misc_feature 26..50: note = RF
tccgctcgcctatgtctgcttatgacccaaagcggacatggctcccactt

SEQ ID NO: 28154 - DNA, 50 bp, unidentified
  source 1..50: mol_type = unassigned DNA; note = target_c6f6650
  misc_feature 1..22: note = LF
  misc_feature 23..25: note = Core
  misc_feature 26..50: note = RF
catgagggtcatggtgcaactcctttcgtgttgcctgtgacaaggacgat

SEQ ID NO: 28155 - DNA, 50 bp, unidentified
  source 1..50: mol_type = unassigned DNA; note = target_c6f90b0
  misc_feature 1..23: note = LF
  misc_feature 24..25: note = Core
  misc_feature 26..50: note = RF
ctcgcgagatcggcgaccctggctgtgtcccgggtttcgccatagagcca

SEQ ID NO: 28156 - DNA, 50 bp, unidentified
  source 1..50: mol_type = unassigned DNA; note = target_c70609a
  misc_feature 1..24: note = LF
  misc_feature 25: note = Core
  misc_feature 26..50: note = RF
tattttatcgcgtctttccatagtttaacctttctgaaatagggctgagc

SEQ ID NO: 28157 - DNA, 50 bp, unidentified
  source 1..50: mol_type = unassigned DNA; note = target_c706c8c
  misc_feature 1..24: note = LF
  misc_feature 25: note = Core
  misc_feature 26..50: note = RF
atataactccattaaaaatataacgcccaattaagttgtgagcaacgctg

SEQ ID NO: 28158 - DNA, 50 bp, unidentified
  source 1..50: mol_type = unassigned DNA; note = target_c709d12
  misc_feature 1..22: note = LF
  misc_feature 23..25: note = Core
  misc_feature 26..50: note = RF
gaccgctttgcgattccacagcagacattcgcgacagcggccttgaatgg

SEQ ID NO: 28159 - DNA, 50 bp, unidentified
  source 1..50: mol_type = unassigned DNA; note = target_c710d6a
  misc_feature 1..23: note = LF
  misc_feature 24..25: note = Core
  misc_feature 26..50: note = RF
agaagtaaaaactatcgtcttatttttattgcaacaaacaggaggaaaaa

SEQ ID NO: 28160 - DNA, 50 bp, unidentified
  source 1..50: mol_type = unassigned DNA; note = target_c719036
  misc_feature 1..24: note = LF
  misc_feature 25: note = Core
  misc_feature 26..50: note = RF
ttccacgactgcattagaaatactttatttagaatttgtaaaccaccaac

SEQ ID NO: 28161 - DNA, 50 bp, unidentified
  source 1..50: mol_type = unassigned DNA; note = target_c72841a
  misc_feature 1..23: note = LF
  misc_feature 24..25: note = Core
  misc_feature 26..50: note = RF
gaggcgccggggcggcctgcggccttgattccgagcagggtgctatatga

SEQ ID NO: 28162 - DNA, 50 bp, unidentified
  source 1..50: mol_type = unassigned DNA; note = target_c72c8c1
  misc_feature 1..24: note = LF
  misc_feature 25: note = Core
  misc_feature 26..50: note = RF
ccgacatagcgtggttacccgaagcggacatgcgcttgcgtttaagaaga

SEQ ID NO: 28163 - DNA, 50 bp, unidentified
  source 1..50: mol_type = unassigned DNA; note = target_c735086
  misc_feature 1..24: note = LF
  misc_feature 25: note = Core
  misc_feature 26..50: note = RF
atggttggcttgaaatgagtatactgtccccgatttctgaatggataaat

SEQ ID NO: 28164 - DNA, 50 bp, unidentified
  source 1..50: mol_type = unassigned DNA; note = target_c738a2b
  misc_feature 1..23: note = LF
  misc_feature 24..25: note = Core
  misc_feature 26..50: note = RF
gcggacaagtcgctctacccatcctacgcgccctcaatcgatcgtgcgct

SEQ ID NO: 28165 - DNA, 50 bp, unidentified
  source 1..50: mol_type = unassigned DNA; note = target_c748767
  misc_feature 1..24: note = LF
  misc_feature 25: note = Core
  misc_feature 26..50: note = RF
gtcaaaatcgtcaattttctctgacaagaccccgatgagcgaccgcaaag

SEQ ID NO: 28166 - DNA, 50 bp, unidentified
  source 1..50: mol_type = unassigned DNA; note = target_c766ada
  misc_feature 1..23: note = LF
  misc_feature 24..25: note = Core
  misc_feature 26..50: note = RF
gccggacctcactgttgcgcttcctttcgatccccgtcttcgctattcga

SEQ ID NO: 28167 - DNA, 50 bp, unidentified
  source 1..50: mol_type = unassigned DNA; note = target_c76d413
  misc_feature 1..22: note = LF
  misc_feature 23..25: note = Core
  misc_feature 26..50: note = RF
acttttgccggtggcgccaactagatttgccggtgtgcggcggctgaact

SEQ ID NO: 28168 - DNA, 50 bp, unidentified
  source 1..50: mol_type = unassigned DNA; note = target_c76ffd0
  misc_feature 1..23: note = LF
  misc_feature 24..25: note = Core
  misc_feature 26..50: note = RF
agatcatcggatggggcttgacgtggacctacaacgaccacatcatgaca

SEQ ID NO: 28169 - DNA, 50 bp, unidentified
  source 1..50: mol_type = unassigned DNA; note = target_c776149
  misc_feature 1..24: note = LF
  misc_feature 25: note = Core
  misc_feature 26..50: note = RF
tccgccatcaagagagcggtagccttttttaggatcgctttctcccgctc

SEQ ID NO: 28170 - DNA, 50 bp, unidentified
  source 1..50: mol_type = unassigned DNA; note = target_c77a486
  misc_feature 1..24: note = LF
  misc_feature 25: note = Core
  misc_feature 26..50: note = RF
catgtgactgtgttcggattgcggcatgagcgagcgttgcgaacaggtac

SEQ ID NO: 28171 - DNA, 50 bp, unidentified
  source 1..50: mol_type = unassigned DNA; note = target_c77fcfd
  misc_feature 1..24: note = LF
  misc_feature 25: note = Core
  misc_feature 26..50: note = RF
gcgcttcacggcgggccctaccatttttttcccagaagctctcgcaacgc

SEQ ID NO: 28172 - DNA, 50 bp, unidentified
  source 1..50: mol_type = unassigned DNA; note = target_c780dec
  misc_feature 1..23: note = LF
  misc_feature 24..25: note = Core
  misc_feature 26..50: note = RF
tattgctctatacatatcttcacctttcaaaaaaagagggcttactactt

SEQ ID NO: 28173 - DNA, 50 bp, unidentified
  source 1..50: mol_type = unassigned DNA; note = target_c78405f
  misc_feature 1..22: note = LF
  misc_feature 23..25: note = Core
  misc_feature 26..50: note = RF
accgctgggatttgtctgctaatgacccaaaggagacattagcgatacag

SEQ ID NO: 28174 - DNA, 50 bp, unidentified
  source 1..50: mol_type = unassigned DNA; note = target_c788fab
  misc_feature 1..24: note = LF
  misc_feature 25: note = Core
  misc_feature 26..50: note = RF
tgatggctctcaactcgatgggagagaccatcatgggatcagcagccaac

SEQ ID NO: 28175 - DNA, 50 bp, unidentified
  source 1..50: mol_type = unassigned DNA; note = target_c792bb5
  misc_feature 1..23: note = LF
  misc_feature 24..25: note = Core
  misc_feature 26..50: note = RF
tcggtggcccctgccctcgggcttgacccgagggatcgccgcggtcaagg

SEQ ID NO: 28176 - DNA, 50 bp, unidentified
  source 1..50: mol_type = unassigned DNA; note = target_c792dc5
  misc_feature 1..22: note = LF
  misc_feature 23..25: note = Core
  misc_feature 26..50: note = RF
gagcccgttccgcccgcaaacgtgaccccaagccgttacgaccggatacc

SEQ ID NO: 28177 - DNA, 50 bp, unidentified
  source 1..50: mol_type = unassigned DNA; note = target_c794c11
  misc_feature 1..24: note = LF
  misc_feature 25: note = Core
  misc_feature 26..50: note = RF
ctgatgcgacggtttctcgtagcccggatgaaatccggggccatgccggc

SEQ ID NO: 28178 - DNA, 50 bp, unidentified
  source 1..50: mol_type = unassigned DNA; note = target_c7a267b
  misc_feature 1..24: note = LF
  misc_feature 25: note = Core
  misc_feature 26..50: note = RF
ctagcgagcaatccgtgagtctgctttgggtcgaacctccccgttccgag

SEQ ID NO: 28179 - DNA, 50 bp, unidentified
  source 1..50: mol_type = unassigned DNA; note = target_c7ac150
  misc_feature 1..22: note = LF
  misc_feature 23..25: note = Core
  misc_feature 26..50: note = RF
tttgggttcctcctttctccattctcctgtttcttttaagacttgatcgc

SEQ ID NO: 28180 - DNA, 50 bp, unidentified
  source 1..50: mol_type = unassigned DNA; note = target_c7b0f9f
  misc_feature 1..23: note = LF
  misc_feature 24..25: note = Core
  misc_feature 26..50: note = RF
cctcaacaccaccgcccgatccatgcaccacgcttgcgtgcgcgtccaga

SEQ ID NO: 28181 - DNA, 50 bp, unidentified
  source 1..50: mol_type = unassigned DNA; note = target_c7b6439
  misc_feature 1..22: note = LF
  misc_feature 23..25: note = Core
  misc_feature 26..50: note = RF
cctccacattttgcatccctcctttcagacaattaaaaagccgtccttga

SEQ ID NO: 28182 - DNA, 50 bp, unidentified
  source 1..50: mol_type = unassigned DNA; note = target_c7bfe05
  misc_feature 1..23: note = LF
  misc_feature 24..25: note = Core
  misc_feature 26..50: note = RF
gcaatacggcttctctcccagattgtcgcgctacaccgcttcccgggaag

SEQ ID NO: 28183 - DNA, 50 bp, unidentified
  source 1..50: mol_type = unassigned DNA; note = target_c7c7dd5
  misc_feature 1..22: note = LF
  misc_feature 23..25: note = Core
  misc_feature 26..50: note = RF
cgctacgacaccttgtcgctcgctacgcgggcaatttcaacaccaaccca

SEQ ID NO: 28184 - DNA, 50 bp, unidentified
  source 1..50: mol_type = unassigned DNA; note = target_c7d6ffc
  misc_feature 1..24: note = LF
  misc_feature 25: note = Core
  misc_feature 26..50: note = RF
gagttggtcaactatcctgcccgttagtttaatgaagccttgtgaatcta

SEQ ID NO: 28185 - DNA, 50 bp, unidentified
  source 1..50: mol_type = unassigned DNA; note = target_c7e39a8
  misc_feature 1..24: note = LF
  misc_feature 25: note = Core
  misc_feature 26..50: note = RF
ccaaagtcatgccaggacctatagcggacattaaataatattttttcaat

SEQ ID NO: 28186 - DNA, 50 bp, unidentified
  source 1..50: mol_type = unassigned DNA; note = target_c7e6158
  misc_feature 1..23: note = LF
  misc_feature 24..25: note = Core
  misc_feature 26..50: note = RF
aacagcctgcttctgctccccccttttccgcccgctgccgagcgatgcgc

SEQ ID NO: 28187 - DNA, 50 bp, unidentified
  source 1..50: mol_type = unassigned DNA; note = target_c7e7277
  misc_feature 1..24: note = LF
  misc_feature 25: note = Core
  misc_feature 26..50: note = RF
gatcagtaagtgactgctgctccccgcccgttgggcgaggcttccaactt

SEQ ID NO: 28188 - DNA, 50 bp, unidentified
  source 1..50: mol_type = unassigned DNA; note = target_c7f8717
  misc_feature 1..24: note = LF
  misc_feature 25: note = Core
  misc_feature 26..50: note = RF
ctctgcccctgaacatcaggagaaaatgcacatgtttttagtcatgggaa

SEQ ID NO: 28189 - DNA, 50 bp, unidentified
  source 1..50: mol_type = unassigned DNA; note = target_c8017c5
  misc_feature 1..23: note = LF
  misc_feature 24..25: note = Core
  misc_feature 26..50: note = RF
cgtcggcggcagagccgccaaccctacatgcatcgaatatcgcccgcatg

SEQ ID NO: 28190 - DNA, 50 bp, unidentified
  source 1..50: mol_type = unassigned DNA; note = target_c80b741
  misc_feature 1..24: note = LF
  misc_feature 25: note = Core
  misc_feature 26..50: note = RF
ggtgaccggtcgtcgaatttccgaccattgcggagttcccggatttagcg

SEQ ID NO: 28191 - DNA, 50 bp, unidentified
  source 1..50: mol_type = unassigned DNA; note = target_c80d686
  misc_feature 1..23: note = LF
  misc_feature 24..25: note = Core
  misc_feature 26..50: note = RF
gaatgtcccccgcttcgctcctcctttatttcgctgcggggagcacccgt

SEQ ID NO: 28192 - DNA, 50 bp, unidentified
  source 1..50: mol_type = unassigned DNA; note = target_c8117d4
  misc_feature 1..24: note = LF
  misc_feature 25: note = Core
  misc_feature 26..50: note = RF
ccggtgggctgggtccctaaccgccgttctgcgtggtcgtctgttcgttg

SEQ ID NO: 28193 - DNA, 50 bp, unidentified; identical to SEQ ID NO: 22229
  source 1..50: mol_type = unassigned DNA; note = target_c819303
  misc_feature 1..23: note = LF
  misc_feature 24..25: note = Core
  misc_feature 26..50: note = RF

SEQ ID NO: 28194 - DNA, 50 bp, unidentified
  source 1..50: mol_type = unassigned DNA; note = target_c82d740
  misc_feature 1..24: note = LF
  misc_feature 25: note = Core
  misc_feature 26..50: note = RF
caacgggtaggtataggactgtgtttgactaacttcaggcaggaagtgat

SEQ ID NO: 28195 - DNA, 50 bp, unidentified
  source 1..50: mol_type = unassigned DNA; note = target_c833f1d
  misc_feature 1..23: note = LF
  misc_feature 24..25: note = Core
  misc_feature 26..50: note = RF
tggttttacggcttatacgtgctctccccggtgagcggccttttttgtca

SEQ ID NO: 28196 - DNA, 50 bp, unidentified
  source 1..50: mol_type = unassigned DNA; note = target_c83ea9c
  misc_feature 1..23: note = LF
  misc_feature 24..25: note = Core
  misc_feature 26..50: note = RF
agtctgttactgacgaaccattcctaaaccgcgtgtcgcagggcggtccc

SEQ ID NO: 28197 - DNA, 50 bp, unidentified
  source 1..50: mol_type = unassigned DNA; note = target_c84e739
  misc_feature 1..24: note = LF
  misc_feature 25: note = Core
  misc_feature 26..50: note = RF
ttcagccgcaatgagctatacacgttgttacctacagttatttttttccg

SEQ ID NO: 28198 - DNA, 50 bp, unidentified
  source 1..50: mol_type = unassigned DNA; note = target_c850d87
  misc_feature 1..23: note = LF
  misc_feature 24..25: note = Core
  misc_feature 26..50: note = RF
gtggagacaagttgccgttagactgacagcaccgccaatcttctccctcg

SEQ ID NO: 28199 - DNA, 50 bp, unidentified
  source 1..50: mol_type = unassigned DNA; note = target_c85ae1e
  misc_feature 1..23: note = LF
  misc_feature 24..25: note = Core
  misc_feature 26..50: note = RF
cctaacacaacttattaggccgccgggttaataaagcgtagattgcctgt

SEQ ID NO: 28200 - DNA, 50 bp, unidentified
  source 1..50: mol_type = unassigned DNA; note = target_c85fcc5
  misc_feature 1..23: note = LF
  misc_feature 24..25: note = Core
  misc_feature 26..50: note = RF
cagtgatggaacaccggagaaggaggattaaccattgggagaagaatgcc

SEQ ID NO: 28201 - DNA, 50 bp, unidentified
  source 1..50: mol_type = unassigned DNA; note = target_c863837
  misc_feature 1..24: note = LF
  misc_feature 25: note = Core
  misc_feature 26..50: note = RF
cagctccgcgagcacgccgtgcggcagtaggggctgtcagactgggggct

SEQ ID NO: 28202 - DNA, 50 bp, unidentified
  source 1..50: mol_type = unassigned DNA; note = target_c864b13
  misc_feature 1..23: note = LF
  misc_feature 24..25: note = Core
  misc_feature 26..50: note = RF
atccataaccaccgcaggggttatggattccggacttgctcgttcttgcg

SEQ ID NO: 28203 - DNA, 50 bp, unidentified
  source 1..50: mol_type = unassigned DNA; note = target_c869008
  misc_feature 1..23: note = LF
  misc_feature 24..25: note = Core
  misc_feature 26..50: note = RF
caccgattgagcccatgtacctcctaattataccggttttaaggctctat

SEQ ID NO: 28204 - DNA, 50 bp, unidentified
  source 1..50: mol_type = unassigned DNA; note = target_c86d297
  misc_feature 1..24: note = LF
  misc_feature 25: note = Core
  misc_feature 26..50: note = RF
agctaatataatgaaatatagaaattgttggcaaatcgttttctttattg

SEQ ID NO: 28205 - DNA, 50 bp, unidentified
  source 1..50: mol_type = unassigned DNA; note = target_c8763ba
  misc_feature 1..24: note = LF
  misc_feature 25: note = Core
  misc_feature 26..50: note = RF
acacccagccagctcggtcggcggcagaggagtgcggtcgatcgtaggtc

SEQ ID NO: 28206 - DNA, 50 bp, unidentified
  source 1..50: mol_type = unassigned DNA; note = target_c87bc18
  misc_feature 1..23: note = LF
  misc_feature 24..25: note = Core
  misc_feature 26..50: note = RF
cattttcttcatatccttatttctcctgttcttttgcattttcacattcg

SEQ ID NO: 28207 - DNA, 50 bp, unidentified
  source 1..50: mol_type = unassigned DNA; note = target_c8932e2
  misc_feature 1..23: note = LF
  misc_feature 24..25: note = Core
  misc_feature 26..50: note = RF
caaaccggcggggacttttggggtcagatcttgccttttgcccattcagc

SEQ ID NO: 28208 - DNA, 50 bp, unidentified
  source 1..50: mol_type = unassigned DNA; note = target_c89bd0c
  misc_feature 1..24: note = LF
  misc_feature 25: note = Core
  misc_feature 26..50: note = RF
gcgccgcgacgcttcctgtaggagagcgccgcaggctcgcacgcgggctg

SEQ ID NO: 28209 - DNA, 50 bp, unidentified
  source 1..50: mol_type = unassigned DNA; note = target_c8a23f8
  misc_feature 1..23: note = LF
  misc_feature 24..25: note = Core
  misc_feature 26..50: note = RF
ctagttctgtgacagaatttcagttttgtaaatgaatattaatatcttaa

SEQ ID NO: 28210 - DNA, 50 bp, unidentified
  source 1..50: mol_type = unassigned DNA; note = target_c8a428c
  misc_feature 1..23: note = LF
  misc_feature 24..25: note = Core
  misc_feature 26..50: note = RF
gcgtgcccgaagggccaggggaactttcggggataggcgtcggcgaccgt

SEQ ID NO: 28211 - DNA, 50 bp, unidentified
  source 1..50: mol_type = unassigned DNA; note = target_c8a7281
  misc_feature 1..24: note = LF
  misc_feature 25: note = Core
  misc_feature 26..50: note = RF
gcccggaaatcgccagcgtcgccccaccccccccggcggctgggaacggt

SEQ ID NO: 28212 - DNA, 50 bp, unidentified
  source 1..50: mol_type = unassigned DNA; note = target_c8b416e
  misc_feature 1..20: note = LF
  misc_feature 21..25: note = Core
  misc_feature 26..50: note = RF
aacgctcgatctcgatctcgctcacagccacagcccgttcggtcagttga

SEQ ID NO: 28213 - DNA, 50 bp, unidentified
  source 1..50: mol_type = unassigned DNA; note = target_c8b717f
  misc_feature 1..23: note = LF
  misc_feature 24..25: note = Core
  misc_feature 26..50: note = RF
gatgctgtgaccctcatcggaaggacagcaatggcggacaacagcaccac

SEQ ID NO: 28214 - DNA, 50 bp, unidentified
  source 1..50: mol_type = unassigned DNA; note = target_c8b82c0
  misc_feature 1..23: note = LF
  misc_feature 24..25: note = Core
  misc_feature 26..50: note = RF
gccgaagcgccggccgacgcgtcctagccctccctagttgatcgccacgg

SEQ ID NO: 28215 - DNA, 50 bp, unidentified
  source 1..50: mol_type = unassigned DNA; note = target_c8c5d0b
  misc_feature 1..23: note = LF
  misc_feature 24..25: note = Core
  misc_feature 26..50: note = RF
aagagcgcgtcgatcagccccccttttccgcccgctgccgagatgtgggc

SEQ ID NO: 28216 - DNA, 50 bp, unidentified
  source 1..50: mol_type = unassigned DNA; note = target_c8cc646
  misc_feature 1..22: note = LF
  misc_feature 23..25: note = Core
  misc_feature 26..50: note = RF
gtttttcttttattttcatacttatgcacctaccttccaacaaaccgatt

SEQ ID NO: 28217 - DNA, 50 bp, unidentified
  source 1..50: mol_type = unassigned DNA; note = target_c8d1433
  misc_feature 1..22: note = LF
  misc_feature 23..25: note = Core
  misc_feature 26..50: note = RF
ctttttgcaccattaggtgctatttttatacctatttacaaggaggttag

SEQ ID NO: 28218 - DNA, 50 bp, unidentified
  source 1..50: mol_type = unassigned DNA; note = target_c8d570f
  misc_feature 1..20: note = LF
  misc_feature 21..25: note = Core
  misc_feature 26..50: note = RF
atcatgatccccaactaccgcaccccccaaggcatcagcctcggcaccga

SEQ ID NO: 28219 - DNA, 50 bp, unidentified
  source 1..50: mol_type = unassigned DNA; note = target_c8dbec3
  misc_feature 1..23: note = LF
  misc_feature 24..25: note = Core
  misc_feature 26..50: note = RF
cgtgcaatcgaggccaagggttctgttgcaatttgctggcatggacacgc

SEQ ID NO: 28220 - DNA, 50 bp, unidentified
  source 1..50: mol_type = unassigned DNA; note = target_c8df7cd
  misc_feature 1..23: note = LF
  misc_feature 24..25: note = Core
  misc_feature 26..50: note = RF
cggggggattaccattgcgcgattggttcgagcccaatggcgacggttcg

SEQ ID NO: 28221 - DNA, 50 bp, unidentified
  source 1..50: mol_type = unassigned DNA; note = target_c8f536b
  misc_feature 1..22: note = LF
  misc_feature 23..25: note = Core
  misc_feature 26..50: note = RF
atgggcagagccttcaactctccttttctaatgtgagtatagcatggctg

SEQ ID NO: 28222 - DNA, 50 bp, unidentified
  source 1..50: mol_type = unassigned DNA; note = target_c8f56b7
  misc_feature 1..22: note = LF
  misc_feature 23..25: note = Core
  misc_feature 26..50: note = RF
tccttcccggaaaaatgcacccgttttgtggaataacttttttgctcaga

SEQ ID NO: 28223 - DNA, 50 bp, unidentified
  source 1..50: mol_type = unassigned DNA; note = target_c8f97cd
  misc_feature 1..23: note = LF
  misc_feature 24..25: note = Core
  misc_feature 26..50: note = RF
cggttgtccgacaacgatttttctggatcccggcaggcgccgctatttgt

SEQ ID NO: 28224 - DNA, 50 bp, unidentified
  source 1..50: mol_type = unassigned DNA; note = target_c8fb896
  misc_feature 1..23: note = LF
  misc_feature 24..25: note = Core
  misc_feature 26..50: note = RF
gggcaaggtaaactatgactcgctcaacgacccaaacgataaaagaaaaa

SEQ ID NO: 28225 - DNA, 50 bp, unidentified
  source 1..50: mol_type = unassigned DNA; note = target_c904e51
  misc_feature 1..23: note = LF
  misc_feature 24..25: note = Core
  misc_feature 26..50: note = RF
gccggacagattcaccactttcgtgtcgtgacgccgagtagacgctcacc

SEQ ID NO: 28226 - DNA, 50 bp, unidentified
  source 1..50: mol_type = unassigned DNA; note = target_c90e048
  misc_feature 1..23: note = LF
  misc_feature 24..25: note = Core
  misc_feature 26..50: note = RF
tctcgcgattcgaagcggaagcgctctagcgggacggatctcagctgatc

SEQ ID NO: 28227 - DNA, 50 bp, unidentified
  source 1..50: mol_type = unassigned DNA; note = target_c920c59
  misc_feature 1..23: note = LF
  misc_feature 24..25: note = Core
  misc_feature 26..50: note = RF
aatgttctaatttccgaaactcattttgtccagagacgtgacagaacgat

SEQ ID NO: 28228 - DNA, 50 bp, unidentified
  source 1..50: mol_type = unassigned DNA; note = target_c929b10
  misc_feature 1..24: note = LF
  misc_feature 25: note = Core
  misc_feature 26..50: note = RF
atctgcgtaattcataaaacctcctcaaaaaaataagcctgtgcagaata

SEQ ID NO: 28229 - DNA, 50 bp, unidentified
  source 1..50: mol_type = unassigned DNA; note = target_c92bc15
  misc_feature 1..23: note = LF
  misc_feature 24..25: note = Core
  misc_feature 26..50: note = RF
ggctccgccgtctccggcggtgcctgtccccctgctcatctcagcactca

SEQ ID NO: 28230 - DNA, 50 bp, unidentified
  source 1..50: mol_type = unassigned DNA; note = target_c93064d
  misc_feature 1..24: note = LF
  misc_feature 25: note = Core
  misc_feature 26..50: note = RF
tacgttaaggctacctcactgacttgacggcttatcgggataaaattttt

SEQ ID NO: 28231 - DNA, 50 bp, unidentified
  source 1..50: mol_type = unassigned DNA; note = target_c931156
  misc_feature 1..23: note = LF
  misc_feature 24..25: note = Core
  misc_feature 26..50: note = RF
gggggtagatgtctcactgttgttgtcacggagggggcgacaagcagcgt

SEQ ID NO: 28232 - DNA, 50 bp, unidentified
  source 1..50: mol_type = unassigned DNA; note = target_c932435
  misc_feature 1..23: note = LF
  misc_feature 24..25: note = Core
  misc_feature 26..50: note = RF
aattccttcatgtcaaatccctccttattttttcctcgcctcgttaaagg

SEQ ID NO: 28233 - DNA, 50 bp, unidentified
  source 1..50: mol_type = unassigned DNA; note = target_c94c352
  misc_feature 1..24: note = LF
  misc_feature 25: note = Core
  misc_feature 26..50: note = RF
gaacgttgcatggcttgtctcctttgttgttcgagaaggggcgcaggtca

SEQ ID NO: 28234 - DNA, 50 bp, unidentified
  source 1..50: mol_type = unassigned DNA; note = target_c951b3e
  misc_feature 1..24: note = LF
  misc_feature 25: note = Core
  misc_feature 26..50: note = RF
acaccaaaggtcggcgtggcgaccctcacctggccgctgcgcggcctgtc

SEQ ID NO: 28235 - DNA, 50 bp, unidentified
  source 1..50: mol_type = unassigned DNA; note = target_c957128
  misc_feature 1..24: note = LF
  misc_feature 25: note = Core
  misc_feature 26..50: note = RF
tgccaccaaacttcttacgccacgtataaaacgtggcttcggagatggcg

SEQ ID NO: 28236 - DNA, 50 bp, unidentified
  source 1..50: mol_type = unassigned DNA; note = target_c95f2de
  misc_feature 1..23: note = LF
  misc_feature 24..25: note = Core
  misc_feature 26..50: note = RF
gtgcttccgtcatgcaatgcctccttttttgtgtgattgaaaagcgcttt

SEQ ID NO: 28237 - DNA, 50 bp, unidentified
  source 1..50: mol_type = unassigned DNA; note = target_c972168
  misc_feature 1..23: note = LF
  misc_feature 24..25: note = Core
  misc_feature 26..50: note = RF
attcccgtgcctgtcacaggaatccagtcggctcgcgtctgcgaggcgaa

SEQ ID NO: 28238 - DNA, 50 bp, unidentified
  source 1..50: mol_type = unassigned DNA; note = target_c9763b1
  misc_feature 1..23: note = LF
  misc_feature 24..25: note = Core
  misc_feature 26..50: note = RF
gatctgccgctgccggggcagccctaggcgccgttgacttcgaggcactg

SEQ ID NO: 28239 - DNA, 50 bp, unidentified
  source 1..50: mol_type = unassigned DNA; note = target_c97c2b2
  misc_feature 1..23: note = LF
  misc_feature 24..25: note = Core
  misc_feature 26..50: note = RF
atgagcgaggatttgtccgccattggtccgaggacaatggacgagcggaa

SEQ ID NO: 28240 - DNA, 50 bp, unidentified
  source 1..50: mol_type = unassigned DNA; note = target_c97d1ef
  misc_feature 1..23: note = LF
  misc_feature 24..25: note = Core
  misc_feature 26..50: note = RF
ttctcacggagatttctcctccgtcgaaatgacaaactttataaataatt

SEQ ID NO: 28241 - DNA, 50 bp, unidentified
  source 1..50: mol_type = unassigned DNA; note = target_c97eda3
  misc_feature 1..24: note = LF
  misc_feature 25: note = Core
  misc_feature 26..50: note = RF
acttggctaggttgataagttaattggtattatatcgacagcacagccaa

SEQ ID NO: 28242 - DNA, 50 bp, unidentified
  source 1..50: mol_type = unassigned DNA; note = target_c9834b9
  misc_feature 1..23: note = LF
  misc_feature 24..25: note = Core
  misc_feature 26..50: note = RF
ggattgcttcgcttcgctcgcaatgacggcgaggggtcggaaactcaaat

SEQ ID NO: 28243 - DNA, 50 bp, unidentified
  source 1..50: mol_type = unassigned DNA; note = target_c99173f
  misc_feature 1..24: note = LF
  misc_feature 25: note = Core
  misc_feature 26..50: note = RF
aagccatatgggcgcgaagccgacttttcgtccaagtggagaatcaccca

SEQ ID NO: 28244 - DNA, 50 bp, unidentified
  source 1..50: mol_type = unassigned DNA; note = target_c999ab8
  misc_feature 1..22: note = LF
  misc_feature 23..25: note = Core
  misc_feature 26..50: note = RF
gcaacaaattcttttcttctctactgttcttacatctctgtttcatctgc

SEQ ID NO: 28245 - DNA, 50 bp, unidentified
  source 1..50: mol_type = unassigned DNA; note = target_c9a0c27
  misc_feature 1..23: note = LF
  misc_feature 24..25: note = Core
  misc_feature 26..50: note = RF
gttcgggccggtcgcctcgtccccttttcccagccacccgtgaccgtcgt

SEQ ID NO: 28246 - DNA, 50 bp, unidentified
  source 1..50: mol_type = unassigned DNA; note = target_c9a2081
  misc_feature 1..22: note = LF
  misc_feature 23..25: note = Core
  misc_feature 26..50: note = RF
tgacatgataaatattgtgtcttttttgtttgtataaaaagtgctttaat

SEQ ID NO: 28247 - DNA, 50 bp, unidentified
  source 1..50: mol_type = unassigned DNA; note = target_c9a8356
  misc_feature 1..24: note = LF
  misc_feature 25: note = Core
  misc_feature 26..50: note = RF
tccaatttcacgtcatagggctgccctatgacgtgaaattggaactgtca

SEQ ID NO: 28248 - DNA, 50 bp, unidentified
  source 1..50: mol_type = unassigned DNA; note = target_c9aa87d
  misc_feature 1..23: note = LF
  misc_feature 24..25: note = Core
  misc_feature 26..50: note = RF
agcgtacgtaaaactcactttcgtgtcgtgaccccggattggcgagttcg

SEQ ID NO: 28249 - DNA, 50 bp, unidentified
  source 1..50: mol_type = unassigned DNA; note = target_c9b05cd
  misc_feature 1..20: note = LF
  misc_feature 21..25: note = Core
  misc_feature 26..50: note = RF
acaggctccgctgcggctcgctcacgggacgtccacctcgatcgcggtgc

SEQ ID NO: 28250 - DNA, 50 bp, unidentified
  source 1..50: mol_type = unassigned DNA; note = target_c9c2aa7
  misc_feature 1..23: note = LF
  misc_feature 24..25: note = Core
  misc_feature 26..50: note = RF
aatgctccatcctactcaggagttggagcctccggcaaacccggcgcggt

SEQ ID NO: 28251 - DNA, 50 bp, unidentified
  source 1..50: mol_type = unassigned DNA; note = target_c9c95f3
  misc_feature 1..23: note = LF
  misc_feature 24..25: note = Core
  misc_feature 26..50: note = RF
ccgatttgactttatgtattctcctaactggacttttaactatataatct

SEQ ID NO: 28252 - DNA, 50 bp, unidentified
  source 1..50: mol_type = unassigned DNA; note = target_c9d2bc8
  misc_feature 1..22: note = LF
  misc_feature 23..25: note = Core
  misc_feature 26..50: note = RF
cggcccatcgcgggacgagcccgctcccacaggacagcgccgcattcgag

SEQ ID NO: 28253 - DNA, 50 bp, unidentified
  source 1..50: mol_type = unassigned DNA; note = target_c9d48d1
  misc_feature 1..24: note = LF
  misc_feature 25: note = Core
  misc_feature 26..50: note = RF
tctgaggcgaagtgtgggcctaacgtttgacgtaaggggcggcttgcggc

SEQ ID NO: 28254 - DNA, 50 bp, unidentified
  source 1..50: mol_type = unassigned DNA; note = target_c9ec8c8
  misc_feature 1..20: note = LF
  misc_feature 21..25: note = Core
  misc_feature 26..50: note = RF
acgcccatgaaggagccggcccccccgcggcgtgcggggcgcgagcagag

SEQ ID NO: 28255 - DNA, 50 bp, unidentified
  source 1..50: mol_type = unassigned DNA; note = target_c9ed431
  misc_feature 1..23: note = LF
  misc_feature 24..25: note = Core
  misc_feature 26..50: note = RF
aagggaagtattcagtataagactatggcagtatttcaccttccgctgtc

SEQ ID NO: 28256 - DNA, 50 bp, unidentified
  source 1..50: mol_type = unassigned DNA; note = target_ca0d84e
  misc_feature 1..23: note = LF
  misc_feature 24..25: note = Core
  misc_feature 26..50: note = RF
ggcgcgatattccagtatatcaatggcttctataatccacgccgacgtca

SEQ ID NO: 28257 - DNA, 50 bp, unidentified
  source 1..50: mol_type = unassigned DNA; note = target_ca133d5
  misc_feature 1..24: note = LF
  misc_feature 25: note = Core
  misc_feature 26..50: note = RF
gactcgaactttctgaaagccggtttcggccacgtggctcacattccatt

SEQ ID NO: 28258 - DNA, 50 bp, unidentified
  source 1..50: mol_type = unassigned DNA; note = target_ca1ae18
  misc_feature 1..23: note = LF
  misc_feature 24..25: note = Core
  misc_feature 26..50: note = RF
atgttgggccggtcgttgttgtaagtccagagccacttcttggcctggtc

SEQ ID NO: 28259 - DNA, 50 bp, unidentified
  source 1..50: mol_type = unassigned DNA; note = target_ca22ea9
  misc_feature 1..24: note = LF
  misc_feature 25: note = Core
  misc_feature 26..50: note = RF
ctccccggagattttcaacacggaccagggctcacaattcacgacgcccc

SEQ ID NO: 28260 - DNA, 50 bp, unidentified
  source 1..50: mol_type = unassigned DNA; note = target_ca44db7
  misc_feature 1..23: note = LF
  misc_feature 24..25: note = Core
  misc_feature 26..50: note = RF
gcgggtgagagtcctgccaacagaggagtccagtcgctgttgtagttata

SEQ ID NO: 28261 - DNA, 50 bp, unidentified
  source 1..50: mol_type = unassigned DNA; note = target_ca58ee9
  misc_feature 1..23: note = LF
  misc_feature 24..25: note = Core
  misc_feature 26..50: note = RF
cctcgggtggcgatgtcggctcctggcacaaatccgaagtgccagaactg

SEQ ID NO: 28262 - DNA, 50 bp, unidentified
  source 1..50: mol_type = unassigned DNA; note = target_ca59c9e
  misc_feature 1..23: note = LF
  misc_feature 24..25: note = Core
  misc_feature 26..50: note = RF
gcgcggttaatttcaccgaaccggaccttcaacagtgtcaacttcggaaa

SEQ ID NO: 28263 - DNA, 50 bp, unidentified
  source 1..50: mol_type = unassigned DNA; note = target_ca5c218
  misc_feature 1..22: note = LF
  misc_feature 23..25: note = Core
  misc_feature 26..50: note = RF
accttattgaagataagcacccgtttagttcagtaagcgatttattcctt

SEQ ID NO: 28264 - DNA, 50 bp, unidentified
  source 1..50: mol_type = unassigned DNA; note = target_ca5c4df
  misc_feature 1..23: note = LF
  misc_feature 24..25: note = Core
  misc_feature 26..50: note = RF
ttattgttcttcatataattctcctttctttttgtagtattagtaaaatt

SEQ ID NO: 28265 - DNA, 50 bp, unidentified
  source 1..50: mol_type = unassigned DNA; note = target_ca5c52a
  misc_feature 1..23: note = LF
  misc_feature 24..25: note = Core
  misc_feature 26..50: note = RF
tagcagagcaggaaccatttttcctttccgttcagataaaaataaaagcc

SEQ ID NO: 28266 - DNA, 50 bp, unidentified
  source 1..50: mol_type = unassigned DNA; note = target_ca60319
  misc_feature 1..24: note = LF
  misc_feature 25: note = Core
  misc_feature 26..50: note = RF
ccgtcaccggatggagcgtagcgacagcccgcgaacgcgagtgcccgcgc

SEQ ID NO: 28267 - DNA, 50 bp, unidentified
  source 1..50: mol_type = unassigned DNA; note = target_ca77d20
  misc_feature 1..23: note = LF
  misc_feature 24..25: note = Core
  misc_feature 26..50: note = RF
atgggccgcgggcgagcacgctcctatcaggtcacaccgcttcgcgccga

SEQ ID NO: 28268 - DNA, 50 bp, unidentified
  source 1..50: mol_type = unassigned DNA; note = target_ca7c54c
  misc_feature 1..23: note = LF
  misc_feature 24..25: note = Core
  misc_feature 26..50: note = RF
tgaaaccgattgaacgcaatccgctctaggccgcctgctccgcgaggtgc

SEQ ID NO: 28269 - DNA, 50 bp, unidentified
  source 1..50: mol_type = unassigned DNA; note = target_ca80f54
  misc_feature 1..23: note = LF
  misc_feature 24..25: note = Core
  misc_feature 26..50: note = RF
gatcaacgtcgaagtagcggcgtagtctagctggtagccggtagctggta

SEQ ID NO: 28270 - DNA, 50 bp, unidentified
  source 1..50: mol_type = unassigned DNA; note = target_ca998a2
  misc_feature 1..23: note = LF
  misc_feature 24..25: note = Core
  misc_feature 26..50: note = RF
agggcaactgggtcaggttgaggtggtccccgcccaccgtgccaatgaga

SEQ ID NO: 28271 - DNA, 50 bp, unidentified
  source 1..50: mol_type = unassigned DNA; note = target_ca9bab5
  misc_feature 1..24: note = LF
  misc_feature 25: note = Core
  misc_feature 26..50: note = RF
ttcacggttcatacggccgcctcgttccctgctgtgcgttctttgaacgc

SEQ ID NO: 28272 - DNA, 50 bp, unidentified
  source 1..50: mol_type = unassigned DNA; note = target_ca9ec14
  misc_feature 1..21: note = LF
  misc_feature 22..25: note = Core
  misc_feature 26..50: note = RF
gcctgagccccgcgggattaaccccccgggctccggtcgatcgcccttcc

SEQ ID NO: 28273 - DNA, 50 bp, unidentified
  source 1..50: mol_type = unassigned DNA; note = target_caa5d28
  misc_feature 1..24: note = LF
  misc_feature 25: note = Core
  misc_feature 26..50: note = RF
gattctgccccagtacatcgtaagcgtctaggcaaatacacctagccatt

SEQ ID NO: 28274 - DNA, 50 bp, unidentified
  source 1..50: mol_type = unassigned DNA; note = target_caa9b6f
  misc_feature 1..24: note = LF
  misc_feature 25: note = Core
  misc_feature 26..50: note = RF
gtgactgatactgatgcccgggtctttgtgtaattgcctgattttgatat

SEQ ID NO: 28275 - DNA, 50 bp, unidentified
  source 1..50: mol_type = unassigned DNA; note = target_caabec7
  misc_feature 1..23: note = LF
  misc_feature 24..25: note = Core
  misc_feature 26..50: note = RF
cgaactcaaaaatggataaaacttgggggcaaggtcagtcggtctggaca

SEQ ID NO: 28276 - DNA, 50 bp, unidentified
  source 1..50: mol_type = unassigned DNA; note = target_cab67a3
  misc_feature 1..23: note = LF
  misc_feature 24..25: note = Core
  misc_feature 26..50: note = RF
atgtccgcttttgacccaaagcagacattcaattagccgcatgctgcacc

SEQ ID NO: 28277 - DNA, 50 bp, unidentified
  source 1..50: mol_type = unassigned DNA; note = target_cac86de
  misc_feature 1..23: note = LF
  misc_feature 24..25: note = Core
  misc_feature 26..50: note = RF
tgattttttccatataagtcatcctttcttattagtcgttaaaaaatagc

SEQ ID NO: 28278 - DNA, 50 bp, unidentified
  source 1..50: mol_type = unassigned DNA; note = target_cacf14c
  misc_feature 1..23: note = LF
  misc_feature 24..25: note = Core
  misc_feature 26..50: note = RF
cagtaaccaccgaccggggatactggattgcccggtcaagccgggcaatg

SEQ ID NO: 28279 - DNA, 50 bp, unidentified
  source 1..50: mol_type = unassigned DNA; note = target_cae7fc0
  misc_feature 1..23: note = LF
  misc_feature 24..25: note = Core
  misc_feature 26..50: note = RF
cttcaaacataattatgatacccctttcaacattttttataattatgtta

SEQ ID NO: 28280 - DNA, 50 bp, unidentified
  source 1..50: mol_type = unassigned DNA; note = target_caea550
  misc_feature 1..23: note = LF
  misc_feature 24..25: note = Core
  misc_feature 26..50: note = RF
gccataaaaggcggatagaaatccgccctacgggtcacgataccgcacca

SEQ ID NO: 28281 - DNA, 50 bp, unidentified
  source 1..50: mol_type = unassigned DNA; note = target_caee69e
  misc_feature 1..23: note = LF
  misc_feature 24..25: note = Core
  misc_feature 26..50: note = RF
tccagcatattaattctccctccctatagattccatagtcccggacacaa

SEQ ID NO: 28282 - DNA, 50 bp, unidentified
  source 1..50: mol_type = unassigned DNA; note = target_caf5859
  misc_feature 1..24: note = LF
  misc_feature 25: note = Core
  misc_feature 26..50: note = RF
gtaccggctatttgcgatgaatcgttgttggcaactgtttcttatccttt

SEQ ID NO: 28283 - DNA, 50 bp, unidentified
  source 1..50: mol_type = unassigned DNA; note = target_cafa773
  misc_feature 1..24: note = LF
  misc_feature 25: note = Core
  misc_feature 26..50: note = RF
cttctataccttgcataaaaatcttctcctttattagtaatggataacat

SEQ ID NO: 28284 - DNA, 50 bp, unidentified
  source 1..50: mol_type = unassigned DNA; note = target_cb0298c
  misc_feature 1..21: note = LF
  misc_feature 22..25: note = Core
  misc_feature 26..50: note = RF
cgccgtcgacggcgggtctggctcatgtcacctcgccctccggcaggcca

SEQ ID NO: 28285 - DNA, 50 bp, unidentified
  source 1..50: mol_type = unassigned DNA; note = target_cb0a1ea
  misc_feature 1..23: note = LF
  misc_feature 24..25: note = Core
  misc_feature 26..50: note = RF
ttgcacatgccgctgatcagtggaggttcgacgtcaggcctctcccctcc

SEQ ID NO: 28286 - DNA, 50 bp, unidentified
  source 1..50: mol_type = unassigned DNA; note = target_cb0b97b
  misc_feature 1..22: note = LF
  misc_feature 23..25: note = Core
  misc_feature 26..50: note = RF
ttagtccgccatcgcgagcaagctcccacagtgaccgcgtcgaacacaaa

SEQ ID NO: 28287 - DNA, 50 bp, unidentified
  source 1..50: mol_type = unassigned DNA; note = target_cb1a52e
  misc_feature 1..22: note = LF
  misc_feature 23..25: note = Core
  misc_feature 26..50: note = RF
atatttcataacgtttctcctttcttaatatttataaaaataaaatgcag

SEQ ID NO: 28288 - DNA, 50 bp, unidentified
  source 1..50: mol_type = unassigned DNA; note = target_cb1c22c
  misc_feature 1..21: note = LF
  misc_feature 22..25: note = Core
  misc_feature 26..50: note = RF
tctctcctcttcgcgcaagcgctcatcagcccagcaccgggaaacgtcgc

SEQ ID NO: 28289 - DNA, 50 bp, unidentified
  source 1..50: mol_type = unassigned DNA; note = target_cb2c168
  misc_feature 1..24: note = LF
  misc_feature 25: note = Core
  misc_feature 26..50: note = RF
taagcccgcggttcgccgcgggttttttttatggcgttgttccgctcgat

SEQ ID NO: 28290 - DNA, 50 bp, unidentified
  source 1..50: mol_type = unassigned DNA; note = target_cb3092f
  misc_feature 1..22: note = LF
  misc_feature 23..25: note = Core
  misc_feature 26..50: note = RF
ttctaattaaactaaagcaccctttagtttaagtgaaaatcttcacaact

SEQ ID NO: 28291 - DNA, 50 bp, unidentified
  source 1..50: mol_type = unassigned DNA; note = target_cb3247b
  misc_feature 1..24: note = LF
  misc_feature 25: note = Core
  misc_feature 26..50: note = RF
cggctgcggccggacgatcaggagagttcgcatcatgatgctgcatgttc

SEQ ID NO: 28292 - DNA, 50 bp, unidentified
  source 1..50: mol_type = unassigned DNA; note = target_cb3ac2d
  misc_feature 1..24: note = LF
  misc_feature 25: note = Core
  misc_feature 26..50: note = RF
tctggattccggcctgcgccggaatgacgagtgcgtaccaccggcttgat

SEQ ID NO: 28293 - DNA, 50 bp, unidentified
  source 1..50: mol_type = unassigned DNA; note = target_cb3c5e6
  misc_feature 1..23: note = LF
  misc_feature 24..25: note = Core
  misc_feature 26..50: note = RF
ccaggagccttgtccaatatgaaatgagtctgaagccggatcgggttccg

SEQ ID NO: 28294 - DNA, 50 bp, unidentified
  source 1..50: mol_type = unassigned DNA; note = target_cb458f6
  misc_feature 1..24: note = LF
  misc_feature 25: note = Core
  misc_feature 26..50: note = RF
tatcttatattcatttttaatccttttattgtaaagtttgtcttctattt

SEQ ID NO: 28295 - DNA, 50 bp, unidentified
  source 1..50: mol_type = unassigned DNA; note = target_cb4b227
  misc_feature 1..23: note = LF
  misc_feature 24..25: note = Core
  misc_feature 26..50: note = RF
cgaagccgatcagcagcgacaggctctagtcccgggtcgcgaggcggcgc

SEQ ID NO: 28296 - DNA, 50 bp, unidentified
  source 1..50: mol_type = unassigned DNA; note = target_cb4b90f
  misc_feature 1..23: note = LF
  misc_feature 24..25: note = Core
  misc_feature 26..50: note = RF
agtggtaaattgccatgtccctcctttccgtggcaggggcagcattcagg

SEQ ID NO: 28297 - DNA, 50 bp, unidentified
  source 1..50: mol_type = unassigned DNA; note = target_cb52e81
  misc_feature 1..23: note = LF
  misc_feature 24..25: note = Core
  misc_feature 26..50: note = RF
aacaggggtccgcggaacaggggtcaggtctttcctgttgctaatgcaac

SEQ ID NO: 28298 - DNA, 50 bp, unidentified
  source 1..50: mol_type = unassigned DNA; note = target_cb60d9f
  misc_feature 1..24: note = LF
  misc_feature 25: note = Core
  misc_feature 26..50: note = RF
tccgccctccttgcccacaccccccttcttcctacctcgcgacataaaat

SEQ ID NO: 28299 - DNA, 50 bp, unidentified
  source 1..50: mol_type = unassigned DNA; note = target_cb62657
  misc_feature 1..23: note = LF
  misc_feature 24..25: note = Core
  misc_feature 26..50: note = RF
tgaggacgcggtagcgtccgctcctgccgcactgcggacgcggtagcgtc

SEQ ID NO: 28300 - DNA, 50 bp, unidentified
  source 1..50: mol_type = unassigned DNA; note = target_cb670d8
  misc_feature 1..23: note = LF
  misc_feature 24..25: note = Core
  misc_feature 26..50: note = RF
attctttcattcatcgaacatacctcctttattatttatattttatcacg

SEQ ID NO: 28301 - DNA, 50 bp, unidentified
  source 1..50: mol_type = unassigned DNA; note = target_cb6909e
  misc_feature 1..24: note = LF
  misc_feature 25: note = Core
  misc_feature 26..50: note = RF
tccctagggctcctgacttttctctttttggacatcgatgcctccattgg

SEQ ID NO: 28302 - DNA, 50 bp, unidentified
  source 1..50: mol_type = unassigned DNA; note = target_cb70d1d
  misc_feature 1..24: note = LF
  misc_feature 25: note = Core
  misc_feature 26..50: note = RF
tcggctcgaaggagcgctcagcggcagatgcgcgtctggtgggccgcaac

SEQ ID NO: 28303 - DNA, 50 bp, unidentified
  source 1..50: mol_type = unassigned DNA; note = target_cb7174e
  misc_feature 1..21: note = LF
  misc_feature 22..25: note = Core
  misc_feature 26..50: note = RF
caggaagtcaggctcggggcgctcatgcggccagcctacgatggtcggtg

SEQ ID NO: 28304 - DNA, 50 bp, unidentified
  source 1..50: mol_type = unassigned DNA; note = target_cb7292c
  misc_feature 1..24: note = LF
  misc_feature 25: note = Core
  misc_feature 26..50: note = RF
gcaacgcggtacgaacgagaacaccaacggcctgctgcgccagtacttgc

SEQ ID NO: 28305 - DNA, 50 bp, unidentified
  source 1..50: mol_type = unassigned DNA; note = target_cb78d32
  misc_feature 1..24: note = LF
  misc_feature 25: note = Core
  misc_feature 26..50: note = RF
gcgagtcgtgtgtccggaaagtgccgttctcggacggtctgcggctggtc

SEQ ID NO: 28306 - DNA, 50 bp, unidentified
  source 1..50: mol_type = unassigned DNA; note = target_cb7cf19
  misc_feature 1..23: note = LF
  misc_feature 24..25: note = Core
  misc_feature 26..50: note = RF
gctcagccgcgaacagcgccccttttacgggtgatgccgtggcgagcgaa

SEQ ID NO: 28307 - DNA, 50 bp, unidentified
  source 1..50: mol_type = unassigned DNA; note = target_cb7d733
  misc_feature 1..24: note = LF
  misc_feature 25: note = Core
  misc_feature 26..50: note = RF
tcagtccggcccgatgcatgtcatcgttctgcacgttcgccggagcaagg

SEQ ID NO: 28308 - DNA, 50 bp, unidentified; identical to SEQ ID NO: 27844
  source 1..50: mol_type = unassigned DNA; note = target_cb88e9a
  misc_feature 1..23: note = LF
  misc_feature 24..25: note = Core
  misc_feature 26..50: note = RF

SEQ ID NO: 28309 - DNA, 50 bp, unidentified
  source 1..50: mol_type = unassigned DNA; note = target_cb8ecf2
  misc_feature 1..22: note = LF
  misc_feature 23..25: note = Core
  misc_feature 26..50: note = RF
ggattgcttcgcttcgctcgcaatgacgatcgcggttcgacccagacgca

SEQ ID NO: 28310 - DNA, 50 bp, unidentified
  source 1..50: mol_type = unassigned DNA; note = target_cb8ef92
  misc_feature 1..23: note = LF
  misc_feature 24..25: note = Core
  misc_feature 26..50: note = RF
tacatttatttatatgttaattttttttacgcttaaaatcaaatttccaa

SEQ ID NO: 28311 - DNA, 50 bp, unidentified
  source 1..50: mol_type = unassigned DNA; note = target_cb97cba
  misc_feature 1..23: note = LF
  misc_feature 24..25: note = Core
  misc_feature 26..50: note = RF
atcaccgggcaccacatgcggagctcgactgatcaaggctggccgtggcc

SEQ ID NO: 28312 - DNA, 50 bp, unidentified
  source 1..50: mol_type = unassigned DNA; note = target_cb99a1c
  misc_feature 1..24: note = LF
  misc_feature 25: note = Core
  misc_feature 26..50: note = RF
cctcgtcggagcccgaaggaccgctttgggtcattctcgtcgtactcgcc

SEQ ID NO: 28313 - DNA, 50 bp, unidentified
  source 1..50: mol_type = unassigned DNA; note = target_cb9d1e5
  misc_feature 1..24: note = LF
  misc_feature 25: note = Core
  misc_feature 26..50: note = RF
gaagctgggaacggagaacggcgtttccggaaagtggcgtgagaatcaat

SEQ ID NO: 28314 - DNA, 50 bp, unidentified
  source 1..50: mol_type = unassigned DNA; note = target_cb9e798
  misc_feature 1..23: note = LF
  misc_feature 24..25: note = Core
  misc_feature 26..50: note = RF
atgaatatcggaatgtccgctattggcacaaactcgaggctcggcgatgt

SEQ ID NO: 28315 - DNA, 50 bp, unidentified
  source 1..50: mol_type = unassigned DNA; note = target_cba687a
  misc_feature 1..24: note = LF
  misc_feature 25: note = Core
  misc_feature 26..50: note = RF
cctgctcggcggcgcgcagtgtcttttttttaaacgacaacccgaggcga

SEQ ID NO: 28316 - DNA, 50 bp, unidentified
  source 1..50: mol_type = unassigned DNA; note = target_cba9bf5
  misc_feature 1..21: note = LF
  misc_feature 22..25: note = Core
  misc_feature 26..50: note = RF
ccccgcgagctgtcgccagcgctcatggcatcagcatccacaaagccgtg

SEQ ID NO: 28317 - DNA, 50 bp, unidentified
  source 1..50: mol_type = unassigned DNA; note = target_cbb38a1
  misc_feature 1..24: note = LF
  misc_feature 25: note = Core
  misc_feature 26..50: note = RF
gcaacttccagagtcgacccaggctgtgtgaaaactcgaaaagttaaccc

SEQ ID NO: 28318 - DNA, 50 bp, unidentified
  source 1..50: mol_type = unassigned DNA; note = target_cbc360e
  misc_feature 1..23: note = LF
  misc_feature 24..25: note = Core
  misc_feature 26..50: note = RF
gtcgctcaccaagataacgtaagcgtacgaagtctcattgctgattgccg

SEQ ID NO: 28319 - DNA, 50 bp, unidentified
  source 1..50: mol_type = unassigned DNA; note = target_cbc674c
  misc_feature 1..24: note = LF
  misc_feature 25: note = Core
  misc_feature 26..50: note = RF
tgcttctatgcacgatgaaagacctgaccccgaacttgttgatactaagg

SEQ ID NO: 28320 - DNA, 50 bp, unidentified
  source 1..50: mol_type = unassigned DNA; note = target_cbcec2f
  misc_feature 1..23: note = LF
  misc_feature 24..25: note = Core
  misc_feature 26..50: note = RF
aattgatccatctctgatccctccttaatctctctatatatacttcatta

SEQ ID NO: 28321 - DNA, 50 bp, unidentified
  source 1..50: mol_type = unassigned DNA; note = target_cbd760f
  misc_feature 1..23: note = LF
  misc_feature 24..25: note = Core
  misc_feature 26..50: note = RF
gatgccgactcgaacgcactcatctgccgcccgtcgtcaagtagcccgat

SEQ ID NO: 28322 - DNA, 50 bp, unidentified
  source 1..50: mol_type = unassigned DNA; note = target_cbe7790
  misc_feature 1..24: note = LF
  misc_feature 25: note = Core
  misc_feature 26..50: note = RF
ttgggtcgtgggttcgaatcccaccacgccctactgaggttggaaatcca

SEQ ID NO: 28323 - DNA, 50 bp, unidentified
  source 1..50: mol_type = unassigned DNA; note = target_cbeaa52
  misc_feature 1..23: note = LF
  misc_feature 24..25: note = Core
  misc_feature 26..50: note = RF
cgctgccggctaaggttacggcatggatcccagggtctgcgcgcgtcgct

SEQ ID NO: 28324 - DNA, 50 bp, unidentified
  source 1..50: mol_type = unassigned DNA; note = target_cbed0e8
  misc_feature 1..23: note = LF
  misc_feature 24..25: note = Core
  misc_feature 26..50: note = RF
gttcatctcttagctgataggggtcaggtcttgctttttgcggttccgaa

SEQ ID NO: 28325 - DNA, 50 bp, unidentified
  source 1..50: mol_type = unassigned DNA; note = target_cbf0447
  misc_feature 1..23: note = LF
  misc_feature 24..25: note = Core
  misc_feature 26..50: note = RF
tgtgccagatcttcgtccagaggtggtcccattccttctgcgcgaaatcc

SEQ ID NO: 28326 - DNA, 50 bp, unidentified
  source 1..50: mol_type = unassigned DNA; note = target_cbf137e
  misc_feature 1..22: note = LF
  misc_feature 23..25: note = Core
  misc_feature 26..50: note = RF
ttagagccgtctcgtccgcttttgacccattaccgccaatgcgcttccgt

SEQ ID NO: 28327 - DNA, 50 bp, unidentified
  source 1..50: mol_type = unassigned DNA; note = target_cbf69cd
  misc_feature 1..24: note = LF
  misc_feature 25: note = Core
  misc_feature 26..50: note = RF
atcggtggtctcactcaaccctgacagacagggggggggcaggtgccggt

SEQ ID NO: 28328 - DNA, 50 bp, unidentified
  source 1..50: mol_type = unassigned DNA; note = target_cc049be
  misc_feature 1..21: note = LF
  misc_feature 22..25: note = Core
  misc_feature 26..50: note = RF
cgcgtcgcgaccatcgtgattagatcttagtgtcccagttagagattatc

SEQ ID NO: 28329 - DNA, 50 bp, unidentified
  source 1..50: mol_type = unassigned DNA; note = target_cc07032
  misc_feature 1..23: note = LF
  misc_feature 24..25: note = Core
  misc_feature 26..50: note = RF
ttacatctaaccaagcgctccagccccgctgatcggcgcataaatttact

SEQ ID NO: 28330 - DNA, 50 bp, unidentified
  source 1..50: mol_type = unassigned DNA; note = target_cc0e566
  misc_feature 1..21: note = LF
  misc_feature 22..25: note = Core
  misc_feature 26..50: note = RF
gatgcgctgcatcgtgctgctccccccgatggtctgcggtcatggacccc

SEQ ID NO: 28331 - DNA, 50 bp, unidentified
  source 1..50: mol_type = unassigned DNA; note = target_cc118b7
  misc_feature 1..21: note = LF
  misc_feature 22..25: note = Core
  misc_feature 26..50: note = RF
tgccgtgcccgcgaaagcctgccccccacacatttcccctttagtctcaa

SEQ ID NO: 28332 - DNA, 50 bp, unidentified
  source 1..50: mol_type = unassigned DNA; note = target_cc15435
  misc_feature 1..21: note = LF
  misc_feature 22..25: note = Core
  misc_feature 26..50: note = RF
taaattaatcactttcattatatcatattttcaattatttatctctttat

SEQ ID NO: 28333 - DNA, 50 bp, unidentified
  source 1..50: mol_type = unassigned DNA; note = target_cc20921
  misc_feature 1..24: note = LF
  misc_feature 25: note = Core
  misc_feature 26..50: note = RF
gcgccatttctccctggtgctaaccggtcacatggtttacaccttgttcc

SEQ ID NO: 28334 - DNA, 50 bp, unidentified
  source 1..50: mol_type = unassigned DNA; note = target_cc240c6
  misc_feature 1..24: note = LF
  misc_feature 25: note = Core
  misc_feature 26..50: note = RF
cagtacgacaccgaggaagacgcttggtatttcggcatctggattcacac

SEQ ID NO: 28335 - DNA, 50 bp, unidentified; identical to SEQ ID NO: 21190
  source 1..50: mol_type = unassigned DNA; note = target_cc27b51
  misc_feature 1..22: note = LF
  misc_feature 23..25: note = Core
  misc_feature 26..50: note = RF

SEQ ID NO: 28336 - DNA, 50 bp, unidentified
  source 1..50: mol_type = unassigned DNA; note = target_cc28161
  misc_feature 1..23: note = LF
  misc_feature 24..25: note = Core
  misc_feature 26..50: note = RF
agaaaagcggcgtgttttcagtgctctagttttggtgcatgattcttgaa

SEQ ID NO: 28337 - DNA, 50 bp, unidentified
  source 1..50: mol_type = unassigned DNA; note = target_cc29426
  misc_feature 1..23: note = LF
  misc_feature 24..25: note = Core
  misc_feature 26..50: note = RF
aaccatctaactaggcgcttcagctaacggccacccgtaccgcgtttacc

SEQ ID NO: 28338 - DNA, 50 bp, unidentified
  source 1..50: mol_type = unassigned DNA; note = target_cc39aba
  misc_feature 1..23: note = LF
  misc_feature 24..25: note = Core
  misc_feature 26..50: note = RF
ccttatttcaagggcttttccgtagggtgggcaaagccaacgggtcgcgc

SEQ ID NO: 28339 - DNA, 50 bp, unidentified
  source 1..50: mol_type = unassigned DNA; note = target_cc4f8b3
  misc_feature 1..23: note = LF
  misc_feature 24..25: note = Core
  misc_feature 26..50: note = RF
tggggctacaggctacataggggtaaacccaacactcgtgtcattagccg

SEQ ID NO: 28340 - DNA, 50 bp, unidentified
  source 1..50: mol_type = unassigned DNA; note = target_cc52644
  misc_feature 1..23: note = LF
  misc_feature 24..25: note = Core
  misc_feature 26..50: note = RF
gtggtcgtcgtcgtgcatggtggtcctcacgcggagcgagtgaccgcacg

SEQ ID NO: 28341 - DNA, 50 bp, unidentified
  source 1..50: mol_type = unassigned DNA; note = target_cc557a7
  misc_feature 1..23: note = LF
  misc_feature 24..25: note = Core
  misc_feature 26..50: note = RF
tgctagacacccatctgagaagggaaagtcatggacaagattactcgtaa

SEQ ID NO: 28342 - DNA, 50 bp, unidentified; identical to SEQ ID NO: 24074
  source 1..50: mol_type = unassigned DNA; note = target_cc5a125
  misc_feature 1..23: note = LF
  misc_feature 24..25: note = Core
  misc_feature 26..50: note = RF

SEQ ID NO: 28343 - DNA, 50 bp, unidentified
  source 1..50: mol_type = unassigned DNA; note = target_cc680aa
  misc_feature 1..23: note = LF
  misc_feature 24..25: note = Core
  misc_feature 26..50: note = RF
acaaaactgcttaatggcccagtcggcccgaagctgatgaggtggaacgg

SEQ ID NO: 28344 - DNA, 50 bp, unidentified
  source 1..50: mol_type = unassigned DNA; note = target_cc6b0ae
  misc_feature 1..22: note = LF
  misc_feature 23..25: note = Core
  misc_feature 26..50: note = RF
ggcgcgggtggttgtcatgggggcctttctgggggggcggagggggttgc

SEQ ID NO: 28345 - DNA, 50 bp, unidentified
  source 1..50: mol_type = unassigned DNA; note = target_cc6dc91
  misc_feature 1..24: note = LF
  misc_feature 25: note = Core
  misc_feature 26..50: note = RF
ttggaatcagagttgaaatggctctgttgcaaaaaaccccaaatttagcc

SEQ ID NO: 28346 - DNA, 50 bp, unidentified
  source 1..50: mol_type = unassigned DNA; note = target_cc6f2d1
  misc_feature 1..23: note = LF
  misc_feature 24..25: note = Core
  misc_feature 26..50: note = RF
ggttccacgggccctgggttgtccttcctggtcgtcggggcagcttggtg

SEQ ID NO: 28347 - DNA, 50 bp, unidentified
  source 1..50: mol_type = unassigned DNA; note = target_cc72094
  misc_feature 1..24: note = LF
  misc_feature 25: note = Core
  misc_feature 26..50: note = RF
tgatcgtggcgacacatatacaaatgttatatttttaaggataaccgatg

SEQ ID NO: 28348 - DNA, 50 bp, unidentified
  source 1..50: mol_type = unassigned DNA; note = target_cc8bd78
  misc_feature 1..24: note = LF
  misc_feature 25: note = Core
  misc_feature 26..50: note = RF
cacctgatccgcgcccatatctgccgatctcgcgcctcgtcgttctgtgc

SEQ ID NO: 28349 - DNA, 50 bp, unidentified
  source 1..50: mol_type = unassigned DNA; note = target_cc8ef41
  misc_feature 1..22: note = LF
  misc_feature 23..25: note = Core
  misc_feature 26..50: note = RF
tgtcggtcataaaatctttcaccttcctttgtactgcatcttaatgctct

SEQ ID NO: 28350 - DNA, 50 bp, unidentified
  source 1..50: mol_type = unassigned DNA; note = target_cc942b6
  misc_feature 1..22: note = LF
  misc_feature 23..25: note = Core
  misc_feature 26..50: note = RF
aatgtcggggtgcgggctaaatagaaatgtcgggtttttagggttttgct

SEQ ID NO: 28351 - DNA, 50 bp, unidentified
  source 1..50: mol_type = unassigned DNA; note = target_cca2ee3
  misc_feature 1..24: note = LF
  misc_feature 25: note = Core
  misc_feature 26..50: note = RF
taatatcctcgctttcgttcaactctttcgtaatctaaaaataatgacta

SEQ ID NO: 28352 - DNA, 50 bp, unidentified
  source 1..50: mol_type = unassigned DNA; note = target_cca3309
  misc_feature 1..23: note = LF
  misc_feature 24..25: note = Core
  misc_feature 26..50: note = RF
gatcatcgcctgacttccgctagtgggatttatcgtctaccggctcagca

SEQ ID NO: 28353 - DNA, 50 bp, unidentified
  source 1..50: mol_type = unassigned DNA; note = target_ccaaaa3
  misc_feature 1..23: note = LF
  misc_feature 24..25: note = Core
  misc_feature 26..50: note = RF
attttcattgaatcaatattctccttttgttattgttgccacactgttgt

SEQ ID NO: 28354 - DNA, 50 bp, unidentified
  source 1..50: mol_type = unassigned DNA; note = target_ccd15c7
  misc_feature 1..22: note = LF
  misc_feature 23..25: note = Core
  misc_feature 26..50: note = RF
cgccttggtacgagctggtgctcgaacctcccagggccaggcagtatttc

SEQ ID NO: 28355 - DNA, 50 bp, unidentified
  source 1..50: mol_type = unassigned DNA; note = target_cce0564
  misc_feature 1..24: note = LF
  misc_feature 25: note = Core
  misc_feature 26..50: note = RF
gttgccaggggcaatcggccacggaggccgattgaggcgagacaaacagg

SEQ ID NO: 28356 - DNA, 50 bp, unidentified
  source 1..50: mol_type = unassigned DNA; note = target_cce1328
  misc_feature 1..24: note = LF
  misc_feature 25: note = Core
  misc_feature 26..50: note = RF
taatacagtacgaaattcgaagaaggctccatggctcgcgccggcctgac

SEQ ID NO: 28357 - DNA, 50 bp, unidentified
  source 1..50: mol_type = unassigned DNA; note = target_cce544b
  misc_feature 1..23: note = LF
  misc_feature 24..25: note = Core
  misc_feature 26..50: note = RF
gccagggttcgcgtcggcagggcctcagtgctgcaggatcttcgaaagaa

SEQ ID NO: 28358 - DNA, 50 bp, unidentified
  source 1..50: mol_type = unassigned DNA; note = target_cce6874
  misc_feature 1..24: note = LF
  misc_feature 25: note = Core
  misc_feature 26..50: note = RF
cctgctcggcggcgcgcagagttttttttgaagctgagcccgtgtcattg

SEQ ID NO: 28359 - DNA, 50 bp, unidentified
  source 1..50: mol_type = unassigned DNA; note = target_ccf1ad3
  misc_feature 1..21: note = LF
  misc_feature 22..25: note = Core
  misc_feature 26..50: note = RF
ccggaaaggcgggaactagctagcggccactctccaggaataacgtcggg

SEQ ID NO: 28360 - DNA, 50 bp, unidentified
  source 1..50: mol_type = unassigned DNA; note = target_ccf4ede
  misc_feature 1..24: note = LF
  misc_feature 25: note = Core
  misc_feature 26..50: note = RF
aaaatttcggctctaccccattaacgggggacgggcattcatactcaccc

SEQ ID NO: 28361 - DNA, 50 bp, unidentified
  source 1..50: mol_type = unassigned DNA; note = target_ccf5cd9
  misc_feature 1..23: note = LF
  misc_feature 24..25: note = Core
  misc_feature 26..50: note = RF
gacgcttcgcgcctttgcccaccctacgagacgcgctttgctctcgctgc

SEQ ID NO: 28362 - DNA, 50 bp, unidentified
  source 1..50: mol_type = unassigned DNA; note = target_cd001ba
  misc_feature 1..23: note = LF
  misc_feature 24..25: note = Core
  misc_feature 26..50: note = RF
cccactcggggctccgacctgacctttcaaggtttgattgaccgactcga

SEQ ID NO: 28363 - DNA, 50 bp, unidentified
  source 1..50: mol_type = unassigned DNA; note = target_cd2ba41
  misc_feature 1..22: note = LF
  misc_feature 23..25: note = Core
  misc_feature 26..50: note = RF
aactatttacattaataataggagagcataaaaatgtgtggggtatttat

SEQ ID NO: 28364 - DNA, 50 bp, unidentified
  source 1..50: mol_type = unassigned DNA; note = target_cd32405
  misc_feature 1..20: note = LF
  misc_feature 21..25: note = Core
  misc_feature 26..50: note = RF
ggcatttggctggaaaccgaccccccggcgcttcggatattgcgaatgtc

SEQ ID NO: 28365 - DNA, 50 bp, unidentified
  source 1..50: mol_type = unassigned DNA; note = target_cd43c82
  misc_feature 1..20: note = LF
  misc_feature 21..25: note = Core
  misc_feature 26..50: note = RF
agaagccacccaccggcaggctcacaggttcgctcaacgggcccgctcac

SEQ ID NO: 28366 - DNA, 50 bp, unidentified
  source 1..50: mol_type = unassigned DNA; note = target_cd4b26a
  misc_feature 1..23: note = LF
  misc_feature 24..25: note = Core
  misc_feature 26..50: note = RF
tatgatttcaaaccttgcagcttcggacactcattcaccacgacacctgg

SEQ ID NO: 28367 - DNA, 50 bp, unidentified
  source 1..50: mol_type = unassigned DNA; note = target_cd4e74c
  misc_feature 1..23: note = LF
  misc_feature 24..25: note = Core
  misc_feature 26..50: note = RF
tgcggttaaaatcataaaagtccctccaagtaaaaaagtttcgatcactg

SEQ ID NO: 28368 - DNA, 50 bp, unidentified
  source 1..50: mol_type = unassigned DNA; note = target_cd66c34
  misc_feature 1..23: note = LF
  misc_feature 24..25: note = Core
  misc_feature 26..50: note = RF
tccggtgtgccctgtcatgctgcgtcctttccccgtggatgccagcagtg

SEQ ID NO: 28369 - DNA, 50 bp, unidentified
  source 1..50: mol_type = unassigned DNA; note = target_cd6a9ec
  misc_feature 1..23: note = LF
  misc_feature 24..25: note = Core
  misc_feature 26..50: note = RF
ttttgttcattgttcatttttacctcccttcttttatcttttttattatt

SEQ ID NO: 28370 - DNA, 50 bp, unidentified; identical to SEQ ID NO: 20776
  source 1..50: mol_type = unassigned DNA; note = target_cd6ad0d
  misc_feature 1..24: note = LF
  misc_feature 25: note = Core
  misc_feature 26..50: note = RF

SEQ ID NO: 28371 - DNA, 50 bp, unidentified
  source 1..50: mol_type = unassigned DNA; note = target_cd6c0b8
  misc_feature 1..24: note = LF
  misc_feature 25: note = Core
  misc_feature 26..50: note = RF
gatgagacagtctgagccaaagtaaaattgagcggcgcgcgcaaaacgct

SEQ ID NO: 28372 - DNA, 50 bp, unidentified
  source 1..50: mol_type = unassigned DNA; note = target_cd71266
  misc_feature 1..24: note = LF
  misc_feature 25: note = Core
  misc_feature 26..50: note = RF
ggcatcgccctggccgaggcgatctttgcggacatcgatcgcaatcgcga

SEQ ID NO: 28373 - DNA, 50 bp, unidentified
  source 1..50: mol_type = unassigned DNA; note = target_cd725fd
  misc_feature 1..22: note = LF
  misc_feature 23..25: note = Core
  misc_feature 26..50: note = RF
gcgtcgcttctgacgcaacgacctaggctgtgtcggtgaccctcgttctc

SEQ ID NO: 28374 - DNA, 50 bp, unidentified
  source 1..50: mol_type = unassigned DNA; note = target_cd7b0f8
  misc_feature 1..22: note = LF
  misc_feature 23..25: note = Core
  misc_feature 26..50: note = RF
ggcattcgccgaggaccgagtctgacccaaaggtgcagctggtacggcaa

SEQ ID NO: 28375 - DNA, 50 bp, unidentified
  source 1..50: mol_type = unassigned DNA; note = target_cd7c4ba
  misc_feature 1..24: note = LF
  misc_feature 25: note = Core
  misc_feature 26..50: note = RF
agatggttaaataatacgctaaacgtacaataattttcgatctccaaact

SEQ ID NO: 28376 - DNA, 50 bp, unidentified
  source 1..50: mol_type = unassigned DNA; note = target_cd7cf59
  misc_feature 1..20: note = LF
  misc_feature 21..25: note = Core
  misc_feature 26..50: note = RF
ctggactcatccatgtcgaactcctttgatttggacggggtgctgccgag

SEQ ID NO: 28377 - DNA, 50 bp, unidentified
  source 1..50: mol_type = unassigned DNA; note = target_cd83820
  misc_feature 1..24: note = LF
  misc_feature 25: note = Core
  misc_feature 26..50: note = RF
tttaatcattgaaatattcataattaatcctccttgattaactgttctat

SEQ ID NO: 28378 - DNA, 50 bp, unidentified
  source 1..50: mol_type = unassigned DNA; note = target_cd8d120
  misc_feature 1..23: note = LF
  misc_feature 24..25: note = Core
  misc_feature 26..50: note = RF
cggcgagcacctcgcccacggcagtcccttcgccatcgttcggtcgaacg

SEQ ID NO: 28379 - DNA, 50 bp, unidentified
  source 1..50: mol_type = unassigned DNA; note = target_cd8f907
  misc_feature 1..23: note = LF
  misc_feature 24..25: note = Core
  misc_feature 26..50: note = RF
gaggtgctgttcatgtgtctctcctgatatcgcgtattgagtaggagtag

SEQ ID NO: 28380 - DNA, 50 bp, unidentified
  source 1..50: mol_type = unassigned DNA; note = target_cd9f274
  misc_feature 1..23: note = LF
  misc_feature 24..25: note = Core
  misc_feature 26..50: note = RF
gcatatgttacgccgcgttagggtatacccctgcaggatagttaggctag

SEQ ID NO: 28381 - DNA, 50 bp, unidentified
  source 1..50: mol_type = unassigned DNA; note = target_cda010f
  misc_feature 1..24: note = LF
  misc_feature 25: note = Core
  misc_feature 26..50: note = RF
aagtggccaaaatttagtcttaacgtacaataattttcgatatccaaact

SEQ ID NO: 28382 - DNA, 50 bp, unidentified
  source 1..50: mol_type = unassigned DNA; note = target_cdb8df5
  misc_feature 1..24: note = LF
  misc_feature 25: note = Core
  misc_feature 26..50: note = RF
gtgaattcaagtaacacagagtttcacagagggcacacagagtcccacag

SEQ ID NO: 28383 - DNA, 50 bp, unidentified
  source 1..50: mol_type = unassigned DNA; note = target_cdc2e2d
  misc_feature 1..23: note = LF
  misc_feature 24..25: note = Core
  misc_feature 26..50: note = RF
gtgcgtcggaaatcacccctgattgcgcgtcgggccgttcatcattgcgc

SEQ ID NO: 28384 - DNA, 50 bp, unidentified
  source 1..50: mol_type = unassigned DNA; note = target_cdc3af6
  misc_feature 1..24: note = LF
  misc_feature 25: note = Core
  misc_feature 26..50: note = RF
gggttcaagcggacctatgtccgctttgggtcaggagcggacgaagggac

SEQ ID NO: 28385 - DNA, 50 bp, unidentified
  source 1..50: mol_type = unassigned DNA; note = target_cdc606d
  misc_feature 1..23: note = LF
  misc_feature 24..25: note = Core
  misc_feature 26..50: note = RF
aattttcataaataaattctcccctttatttatgctttggtttttatcat

SEQ ID NO: 28386 - DNA, 50 bp, unidentified
  source 1..50: mol_type = unassigned DNA; note = target_cdc9086
  misc_feature 1..23: note = LF
  misc_feature 24..25: note = Core
  misc_feature 26..50: note = RF
ttctgccacgcgcttcctcctgttttttgatcatagatcccggtggctaa

SEQ ID NO: 28387 - DNA, 50 bp, unidentified
  source 1..50: mol_type = unassigned DNA; note = target_cdc9a6c
  misc_feature 1..21: note = LF
  misc_feature 22..25: note = Core
  misc_feature 26..50: note = RF
gccctgccgagggtcaggacggtcatcggatgctcacctcggccagccgc

SEQ ID NO: 28388 - DNA, 50 bp, unidentified
  source 1..50: mol_type = unassigned DNA; note = target_cdccef3
  misc_feature 1..21: note = LF
  misc_feature 22..25: note = Core
  misc_feature 26..50: note = RF
cggtctggacgcgcatggagcttccttcgggtgcgggggccggtcggagc

SEQ ID NO: 28389 - DNA, 50 bp, unidentified
  source 1..50: mol_type = unassigned DNA; note = target_cddaf9d
  misc_feature 1..23: note = LF
  misc_feature 24..25: note = Core
  misc_feature 26..50: note = RF
aacgccggcgtcgcccgcaagccctgacgcaccagccgccagctcacccc

SEQ ID NO: 28390 - DNA, 50 bp, unidentified
  source 1..50: mol_type = unassigned DNA; note = target_cde4cf7
  misc_feature 1..23: note = LF
  misc_feature 24..25: note = Core
  misc_feature 26..50: note = RF
cggcggacgtcatttcagggttcctcagagctgcaaccggatcttgcgcg

SEQ ID NO: 28391 - DNA, 50 bp, unidentified
  source 1..50: mol_type = unassigned DNA; note = target_cdef819
  misc_feature 1..24: note = LF
  misc_feature 25: note = Core
  misc_feature 26..50: note = RF
gagcctttcagctcattaacaggtcggacatggggtgatcgaaatcgaaa

SEQ ID NO: 28392 - DNA, 50 bp, unidentified
  source 1..50: mol_type = unassigned DNA; note = target_cdf25cf
  misc_feature 1..23: note = LF
  misc_feature 24..25: note = Core
  misc_feature 26..50: note = RF
ggcctcttgctcggattcctgtcctttctgagcaaagtagagggcaagtg

SEQ ID NO: 28393 - DNA, 50 bp, unidentified
  source 1..50: mol_type = unassigned DNA; note = target_cdf82c1
  misc_feature 1..23: note = LF
  misc_feature 24..25: note = Core
  misc_feature 26..50: note = RF
agcgccagcccggccgccctctcctgccaagcacccgaggcccttaccga

SEQ ID NO: 28394 - DNA, 50 bp, unidentified
  source 1..50: mol_type = unassigned DNA; note = target_cdfb253
  misc_feature 1..22: note = LF
  misc_feature 23..25: note = Core
  misc_feature 26..50: note = RF
ccacacccatgatcgcgcccatgctcctgcgtgggcgcgcagcttgcgag

SEQ ID NO: 28395 - DNA, 50 bp, unidentified
  source 1..50: mol_type = unassigned DNA; note = target_cdfb9f8
  misc_feature 1..24: note = LF
  misc_feature 25: note = Core
  misc_feature 26..50: note = RF
agcgcgctctgcggccgcgacggctttggcgtaatggtgggccttggcac

SEQ ID NO: 28396 - DNA, 50 bp, unidentified
  source 1..50: mol_type = unassigned DNA; note = target_ce13850
  misc_feature 1..24: note = LF
  misc_feature 25: note = Core
  misc_feature 26..50: note = RF
cagcgccacgccctcctggactgaccccgccggacggccctccttgggtt

SEQ ID NO: 28397 - DNA, 50 bp, unidentified
  source 1..50: mol_type = unassigned DNA; note = target_ce1b039
  misc_feature 1..23: note = LF
  misc_feature 24..25: note = Core
  misc_feature 26..50: note = RF
tgtcgctggctcgtcatcctgattgtcgcgctgcaccaaactgcgcgccg

SEQ ID NO: 28398 - DNA, 50 bp, unidentified
  source 1..50: mol_type = unassigned DNA; note = target_ce200e2
  misc_feature 1..22: note = LF
  misc_feature 23..25: note = Core
  misc_feature 26..50: note = RF
tgccgctggtcgagatggaactcgaccttccatgctcccccggccacgta

SEQ ID NO: 28399 - DNA, 50 bp, unidentified
  source 1..50: mol_type = unassigned DNA; note = target_ce21be3
  misc_feature 1..24: note = LF
  misc_feature 25: note = Core
  misc_feature 26..50: note = RF
ggtgagccacagcgtcgttagcggcataagcgtctctccacgcgcggcga

SEQ ID NO: 28400 - DNA, 50 bp, unidentified; identical to SEQ ID NO: 24741
  source 1..50: mol_type = unassigned DNA; note = target_ce22de2
  misc_feature 1..22: note = LF
  misc_feature 23..25: note = Core
  misc_feature 26..50: note = RF

SEQ ID NO: 28401 - DNA, 50 bp, unidentified
  source 1..50: mol_type = unassigned DNA; note = target_ce24a5e
  misc_feature 1..23: note = LF
  misc_feature 24..25: note = Core
  misc_feature 26..50: note = RF
cgattgaactcgccggacaaagctgccgatctaccccgattttaccgctt

SEQ ID NO: 28402 - DNA, 50 bp, unidentified
  source 1..50: mol_type = unassigned DNA; note = target_ce282dc
  misc_feature 1..23: note = LF
  misc_feature 24..25: note = Core
  misc_feature 26..50: note = RF
ctcaattccaatgagacgaaaattgtgccaagatcggtacggatagcggt

SEQ ID NO: 28403 - DNA, 50 bp, unidentified
  source 1..50: mol_type = unassigned DNA; note = target_ce2a95f
  misc_feature 1..23: note = LF
  misc_feature 24..25: note = Core
  misc_feature 26..50: note = RF
attcaataatgcccattttattcctaattataatattttattagttatca

SEQ ID NO: 28404 - DNA, 50 bp, unidentified
  source 1..50: mol_type = unassigned DNA; note = target_ce3718e
  misc_feature 1..23: note = LF
  misc_feature 24..25: note = Core
  misc_feature 26..50: note = RF
cgggttcgccagcaagccggctcctacagggcggcgtactgatcaatcag

SEQ ID NO: 28405 - DNA, 50 bp, unidentified
  source 1..50: mol_type = unassigned DNA; note = target_ce38db9
  misc_feature 1..23: note = LF
  misc_feature 24..25: note = Core
  misc_feature 26..50: note = RF
cgcaccgtcgccaattcggccactgggagtgcgacctgatgatgttccgc

SEQ ID NO: 28406 - DNA, 50 bp, unidentified
  source 1..50: mol_type = unassigned DNA; note = target_ce3bb86
  misc_feature 1..20: note = LF
  misc_feature 21..25: note = Core
  misc_feature 26..50: note = RF
atgatctgtgacatcacaagtcctttcgctgtcggcgtctcgaaaacggc

SEQ ID NO: 28407 - DNA, 50 bp, unidentified
  source 1..50: mol_type = unassigned DNA; note = target_ce3fea4
  misc_feature 1..24: note = LF
  misc_feature 25: note = Core
  misc_feature 26..50: note = RF
caggctggcacgtacgctccgcggcatgagcggatgtccatcgcggtcgc

SEQ ID NO: 28408 - DNA, 50 bp, unidentified
  source 1..50: mol_type = unassigned DNA; note = target_ce43f1c
  misc_feature 1..24: note = LF
  misc_feature 25: note = Core
  misc_feature 26..50: note = RF
caggattcggacctgtcaggtccccaccttttcagggcccgcatgttcac

SEQ ID NO: 28409 - DNA, 50 bp, unidentified
  source 1..50: mol_type = unassigned DNA; note = target_ce473bf
  misc_feature 1..24: note = LF
  misc_feature 25: note = Core
  misc_feature 26..50: note = RF
cgcccgttctcattcggcttccgctcttggcacaaagctgatgcccttcc

SEQ ID NO: 28410 - DNA, 50 bp, unidentified
  source 1..50: mol_type = unassigned DNA; note = target_ce4e972
  misc_feature 1..23: note = LF
  misc_feature 24..25: note = Core
  misc_feature 26..50: note = RF
tactagttctcatgatcttcctcctttgataaaaacattgttttattatt

SEQ ID NO: 28411 - DNA, 50 bp, unidentified
  source 1..50: mol_type = unassigned DNA; note = target_ce5477e
  misc_feature 1..23: note = LF
  misc_feature 24..25: note = Core
  misc_feature 26..50: note = RF
aatgattttcataaaatatcctccttacaagttcttccatgtatgaatca

SEQ ID NO: 28412 - DNA, 50 bp, unidentified
  source 1..50: mol_type = unassigned DNA; note = target_ce54d11
  misc_feature 1..22: note = LF
  misc_feature 23..25: note = Core
  misc_feature 26..50: note = RF
gccgaaggcggagcctcgaaagatggcgccacccgacgggcgtttgagaa

SEQ ID NO: 28413 - DNA, 50 bp, unidentified
  source 1..50: mol_type = unassigned DNA; note = target_ce65ae2
  misc_feature 1..22: note = LF
  misc_feature 23..25: note = Core
  misc_feature 26..50: note = RF
gctggtcgaataataagctttcctttctattattattcagttttttggtt

SEQ ID NO: 28414 - DNA, 50 bp, unidentified
  source 1..50: mol_type = unassigned DNA; note = target_ce67849
  misc_feature 1..23: note = LF
  misc_feature 24..25: note = Core
  misc_feature 26..50: note = RF
cagtgccctaatgcgacgacgaactgtcgcggttcttggggtatcctgcg

SEQ ID NO: 28415 - DNA, 50 bp, unidentified
  source 1..50: mol_type = unassigned DNA; note = target_ce6c8a3
  misc_feature 1..23: note = LF
  misc_feature 24..25: note = Core
  misc_feature 26..50: note = RF
cgcaaggtagcgcgagccaccgacaagtcccggtcacctcagcggcgtgc

SEQ ID NO: 28416 - DNA, 50 bp, unidentified; identical to SEQ ID NO: 25274
  source 1..50: mol_type = unassigned DNA; note = target_ce74977
  misc_feature 1..23: note = LF
  misc_feature 24..25: note = Core
  misc_feature 26..50: note = RF

SEQ ID NO: 28417 - DNA, 50 bp, unidentified
  source 1..50: mol_type = unassigned DNA; note = target_ce80fc6
  misc_feature 1..23: note = LF
  misc_feature 24..25: note = Core
  misc_feature 26..50: note = RF
cgcggtcgtcttgtcatggtcatctcctcgcttgcagcatcatgctgctg

SEQ ID NO: 28418 - DNA, 50 bp, unidentified
  source 1..50: mol_type = unassigned DNA; note = target_ce8d7c3
  misc_feature 1..23: note = LF
  misc_feature 24..25: note = Core
  misc_feature 26..50: note = RF
ctacaaaataagcttagattccttctgaatgacaagttcactgcttaatt

SEQ ID NO: 28419 - DNA, 50 bp, unidentified
  source 1..50: mol_type = unassigned DNA; note = target_ce9006e
  misc_feature 1..22: note = LF
  misc_feature 23..25: note = Core
  misc_feature 26..50: note = RF
tcccaaggctgagcaaatcagattatgggatggcccgcccctctccggag

SEQ ID NO: 28420 - DNA, 50 bp, unidentified
  source 1..50: mol_type = unassigned DNA; note = target_ce9b4c6
  misc_feature 1..23: note = LF
  misc_feature 24..25: note = Core
  misc_feature 26..50: note = RF
agccggtgacacgacgctcggtgctcatcggccctcctccttcgtcgtct

SEQ ID NO: 28421 - DNA, 50 bp, unidentified
  source 1..50: mol_type = unassigned DNA; note = target_ce9ba28
  misc_feature 1..24: note = LF
  misc_feature 25: note = Core
  misc_feature 26..50: note = RF
gcaacgcggcacgaacgagaacaccaacggactgctgcgcgactacttcc

SEQ ID NO: 28422 - DNA, 50 bp, unidentified
  source 1..50: mol_type = unassigned DNA; note = target_ce9c4c3
  misc_feature 1..24: note = LF
  misc_feature 25: note = Core
  misc_feature 26..50: note = RF
tgtaatagcaattgtttatagccattgttgccaccagttattttattccg

SEQ ID NO: 28423 - DNA, 50 bp, unidentified
  source 1..50: mol_type = unassigned DNA; note = target_ceace9f
  misc_feature 1..23: note = LF
  misc_feature 24..25: note = Core
  misc_feature 26..50: note = RF
tatttaagggagtttctcaaggtagttgtcgcttttattgtcactctgcc

SEQ ID NO: 28424 - DNA, 50 bp, unidentified
  source 1..50: mol_type = unassigned DNA; note = target_ceba7c0
  misc_feature 1..23: note = LF
  misc_feature 24..25: note = Core
  misc_feature 26..50: note = RF
tcctcctttgcccctcatgacagcttcgctcattctgggccttgtagcgg

SEQ ID NO: 28425 - DNA, 50 bp, unidentified
  source 1..50: mol_type = unassigned DNA; note = target_cec045d
  misc_feature 1..22: note = LF
  misc_feature 23..25: note = Core
  misc_feature 26..50: note = RF
cgctcgtcgcgcatccggccgttgaagctctcgacaaagccgttctgcat

SEQ ID NO: 28426 - DNA, 50 bp, unidentified
  source 1..50: mol_type = unassigned DNA; note = target_cec3880
  misc_feature 1..21: note = LF
  misc_feature 22..25: note = Core
  misc_feature 26..50: note = RF
gtcaggtcggcgctggagaggctcatcgggcggcccccacgctcgcgaga

SEQ ID NO: 28427 - DNA, 50 bp, unidentified
  source 1..50: mol_type = unassigned DNA; note = target_cecbd9c
  misc_feature 1..23: note = LF
  misc_feature 24..25: note = Core
  misc_feature 26..50: note = RF
tgacggttctcggggtggacgactgggcttggcgcaagggccaccggtac

SEQ ID NO: 28428 - DNA, 50 bp, unidentified
  source 1..50: mol_type = unassigned DNA; note = target_cece387
  misc_feature 1..23: note = LF
  misc_feature 24..25: note = Core
  misc_feature 26..50: note = RF
cgccgatctatgcctctctttcatgttcaggggccattcggtcgtcagac

SEQ ID NO: 28429 - DNA, 50 bp, unidentified
  source 1..50: mol_type = unassigned DNA; note = target_ced0984
  misc_feature 1..23: note = LF
  misc_feature 24..25: note = Core
  misc_feature 26..50: note = RF
aaatccatacccccgatggtggttggattccgggctcgccgctgcgcggc

SEQ ID NO: 28430 - DNA, 50 bp, unidentified
  source 1..50: mol_type = unassigned DNA; note = target_ced3a6f
  misc_feature 1..22: note = LF
  misc_feature 23..25: note = Core
  misc_feature 26..50: note = RF
agatccccgtgtcaagcacgaggatgactactattttttatggtacatac

SEQ ID NO: 28431 - DNA, 50 bp, unidentified
  source 1..50: mol_type = unassigned DNA; note = target_ced4e21
  misc_feature 1..23: note = LF
  misc_feature 24..25: note = Core
  misc_feature 26..50: note = RF
attgaagtgcagagtcttgtaggagcgagctcgctcgcgaatttcacgtt

SEQ ID NO: 28432 - DNA, 50 bp, unidentified
  source 1..50: mol_type = unassigned DNA; note = target_ced61ee
  misc_feature 1..23: note = LF
  misc_feature 24..25: note = Core
  misc_feature 26..50: note = RF
acgtttttcatggtggtgttctcctttgatggagatttccattgactcgt

SEQ ID NO: 28433 - DNA, 50 bp, unidentified
  source 1..50: mol_type = unassigned DNA; note = target_cee041b
  misc_feature 1..24: note = LF
  misc_feature 25: note = Core
  misc_feature 26..50: note = RF
caggttattgctttgctcaagccccatggacgaacaaaaacgacacacca

SEQ ID NO: 28434 - DNA, 50 bp, unidentified
  source 1..50: mol_type = unassigned DNA; note = target_cee58db
  misc_feature 1..24: note = LF
  misc_feature 25: note = Core
  misc_feature 26..50: note = RF
ccttcgcctccctgcgctccgacccacccccccgcctctcgggcctacta

SEQ ID NO: 28435 - DNA, 50 bp, unidentified
  source 1..50: mol_type = unassigned DNA; note = target_cee5c10
  misc_feature 1..24: note = LF
  misc_feature 25: note = Core
  misc_feature 26..50: note = RF
ttttcaaagctaaccgtatcaatctgcatgaaaaggacggttaccccaag

SEQ ID NO: 28436 - DNA, 50 bp, unidentified
  source 1..50: mol_type = unassigned DNA; note = target_cee6a11
  misc_feature 1..23: note = LF
  misc_feature 24..25: note = Core
  misc_feature 26..50: note = RF
aaaaacgcccgagaaatcgggcgttttttgttgcgaaataggtggtcatg

SEQ ID NO: 28437 - DNA, 50 bp, unidentified
  source 1..50: mol_type = unassigned DNA; note = target_cefc545
  misc_feature 1..23: note = LF
  misc_feature 24..25: note = Core
  misc_feature 26..50: note = RF
gccgctcgccaaatgtccgcttctggcacaaagcggacatcctgctgccg

SEQ ID NO: 28438 - DNA, 50 bp, unidentified
  source 1..50: mol_type = unassigned DNA; note = target_cf05416
  misc_feature 1..24: note = LF
  misc_feature 25: note = Core
  misc_feature 26..50: note = RF
ccggcccgtcgcggaactggttacttccggttacggggtgatccaggcaa

SEQ ID NO: 28439 - DNA, 50 bp, unidentified
  source 1..50: mol_type = unassigned DNA; note = target_cf084cc
  misc_feature 1..23: note = LF
  misc_feature 24..25: note = Core
  misc_feature 26..50: note = RF
gcgtagcgatgaactcccgccgtcttattcgatcagctcgtcggccgcga

SEQ ID NO: 28440 - DNA, 50 bp, unidentified
  source 1..50: mol_type = unassigned DNA; note = target_cf0e426
  misc_feature 1..23: note = LF
  misc_feature 24..25: note = Core
  misc_feature 26..50: note = RF
aagtatgcggttctgaaacgagttcaggatgactttaaaagtcacaaaaa

SEQ ID NO: 28441 - DNA, 50 bp, unidentified
  source 1..50: mol_type = unassigned DNA; note = target_cf112c7
  misc_feature 1..24: note = LF
  misc_feature 25: note = Core
  misc_feature 26..50: note = RF
cttacgtaaaaccataaaaaaagacgtagtgctactgccatacgtcatca

SEQ ID NO: 28442 - DNA, 50 bp, unidentified
  source 1..50: mol_type = unassigned DNA; note = target_cf2a979
  misc_feature 1..19: note = LF
  misc_feature 20..25: note = Core
  misc_feature 26..50: note = RF
ctctcccttatgcctcacacagatctcacggaatttttcttttgatgatg

SEQ ID NO: 28443 - DNA, 50 bp, unidentified
  source 1..50: mol_type = unassigned DNA; note = target_cf360e7
  misc_feature 1..24: note = LF
  misc_feature 25: note = Core
  misc_feature 26..50: note = RF
cgggagcgtcggcgtcgaccaaagcgagtactcgtgctgcaaaccgccca

SEQ ID NO: 28444 - DNA, 50 bp, unidentified
  source 1..50: mol_type = unassigned DNA; note = target_cf368de
  misc_feature 1..23: note = LF
  misc_feature 24..25: note = Core
  misc_feature 26..50: note = RF
cgctcgaaaggtctgcattggggtgggaagcggaaattacccggtccagc

SEQ ID NO: 28445 - DNA, 50 bp, unidentified
  source 1..50: mol_type = unassigned DNA; note = target_cf39830
  misc_feature 1..23: note = LF
  misc_feature 24..25: note = Core
  misc_feature 26..50: note = RF
tccatggtgctgaagcatcgcccctacggggctggctcttgaaaacgctc

SEQ ID NO: 28446 - DNA, 50 bp, unidentified
  source 1..50: mol_type = unassigned DNA; note = target_cf40710
  misc_feature 1..21: note = LF
  misc_feature 22..25: note = Core
  misc_feature 26..50: note = RF
attaaataaacctaatctttgtcattccgtaggaatctaaacgctgagat

SEQ ID NO: 28447 - DNA, 50 bp, unidentified
  source 1..50: mol_type = unassigned DNA; note = target_cf43523
  misc_feature 1..23: note = LF
  misc_feature 24..25: note = Core
  misc_feature 26..50: note = RF
ggggaaggcgatccattcgtcgtgcatctcgaagagcacggcggtgacca

SEQ ID NO: 28448 - DNA, 50 bp, unidentified
  source 1..50: mol_type = unassigned DNA; note = target_cf48e45
  misc_feature 1..24: note = LF
  misc_feature 25: note = Core
  misc_feature 26..50: note = RF
tccacctacaaaaacagagtacgacggcggtgcccgccttgagcgggcac

SEQ ID NO: 28449 - DNA, 50 bp, unidentified
  source 1..50: mol_type = unassigned DNA; note = target_cf4ae81
  misc_feature 1..24: note = LF
  misc_feature 25: note = Core
  misc_feature 26..50: note = RF
ttagcaaacatgaagttacattctctttacgaatcagtgggttgttttgt

SEQ ID NO: 28450 - DNA, 50 bp, unidentified
  source 1..50: mol_type = unassigned DNA; note = target_cf5de33
  misc_feature 1..22: note = LF
  misc_feature 23..25: note = Core
  misc_feature 26..50: note = RF
cgacgccttcgcgagcaagcccgctcccacattcagagctccatgcaccg

SEQ ID NO: 28451 - DNA, 50 bp, unidentified
  source 1..50: mol_type = unassigned DNA; note = target_cf83aba
  misc_feature 1..23: note = LF
  misc_feature 24..25: note = Core
  misc_feature 26..50: note = RF
cttaataggggcacccccctcgcctgctcatcattgatgaaataggctat

SEQ ID NO: 28452 - DNA, 50 bp, unidentified
  source 1..50: mol_type = unassigned DNA; note = target_cf85676
  misc_feature 1..23: note = LF
  misc_feature 24..25: note = Core
  misc_feature 26..50: note = RF
gaaatatccctcataggcggctcctttcatcgttcctggtctctctgacg

SEQ ID NO: 28453 - DNA, 50 bp, unidentified
  source 1..50: mol_type = unassigned DNA; note = target_cf8c9a5
  misc_feature 1..24: note = LF
  misc_feature 25: note = Core
  misc_feature 26..50: note = RF
cggcattacttgcgatatggcgatttatcgccagctatttggaattgctc

SEQ ID NO: 28454 - DNA, 50 bp, unidentified; identical to SEQ ID NO: 21190
  source 1..50: mol_type = unassigned DNA; note = target_cf8e1b3
  misc_feature 1..22: note = LF
  misc_feature 23..25: note = Core
  misc_feature 26..50: note = RF

SEQ ID NO: 28455 - DNA, 50 bp, unidentified
  source 1..50: mol_type = unassigned DNA; note = target_cf8e43a
  misc_feature 1..24: note = LF
  misc_feature 25: note = Core
  misc_feature 26..50: note = RF
aaaaaactcttgcaagtcgggggccgtccacacgtgaacccaaagcggtc

SEQ ID NO: 28456 - DNA, 50 bp, unidentified
  source 1..50: mol_type = unassigned DNA; note = target_cf9245c
  misc_feature 1..20: note = LF
  misc_feature 21..25: note = Core
  misc_feature 26..50: note = RF
gcgtcccggttatggggacgcttttttttaccgagtacagtaaggaattt

SEQ ID NO: 28457 - DNA, 50 bp, unidentified
  source 1..50: mol_type = unassigned DNA; note = target_cf94f78
  misc_feature 1..23: note = LF
  misc_feature 24..25: note = Core
  misc_feature 26..50: note = RF
agccgccatcgcgggcaagcccgctcccacagtggttaatgttgttcaca

SEQ ID NO: 28458 - DNA, 50 bp, unidentified
  source 1..50: mol_type = unassigned DNA; note = target_cf96d18
  misc_feature 1..23: note = LF
  misc_feature 24..25: note = Core
  misc_feature 26..50: note = RF
acgcgcacgtcatggccaccggtagtgtctcaatgggttcgttctagcat

SEQ ID NO: 28459 - DNA, 50 bp, unidentified
  source 1..50: mol_type = unassigned DNA; note = target_cf9716f
  misc_feature 1..23: note = LF
  misc_feature 24..25: note = Core
  misc_feature 26..50: note = RF
cgttaagtttgcgcaatctcgaggagatgatggacgagcgtggtatcgcg

SEQ ID NO: 28460 - DNA, 50 bp, unidentified
  source 1..50: mol_type = unassigned DNA; note = target_cf9a08d
  misc_feature 1..22: note = LF
  misc_feature 23..25: note = Core
  misc_feature 26..50: note = RF
gattttctcaactatcctgccctttagcttaacgacagcgccagtctaca

SEQ ID NO: 28461 - DNA, 50 bp, unidentified
  source 1..50: mol_type = unassigned DNA; note = target_cf9b509
  misc_feature 1..24: note = LF
  misc_feature 25: note = Core
  misc_feature 26..50: note = RF
ctgagagttcacgtaacgatgccccacccccccgaaacgccggttacaga

SEQ ID NO: 28462 - DNA, 50 bp, unidentified
  source 1..50: mol_type = unassigned DNA; note = target_cf9dcc2
  misc_feature 1..23: note = LF
  misc_feature 24..25: note = Core
  misc_feature 26..50: note = RF
acggaaatcaatgggtcctgaccctagtcgacgaacatgagcgtcaacat

SEQ ID NO: 28463 - DNA, 50 bp, unidentified
  source 1..50: mol_type = unassigned DNA; note = target_cf9fbf7
  misc_feature 1..21: note = LF
  misc_feature 22..25: note = Core
  misc_feature 26..50: note = RF
atgaagtcggcataggcgctggtcatgacacctccttctgagggcggcct

SEQ ID NO: 28464 - DNA, 50 bp, unidentified
  source 1..50: mol_type = unassigned DNA; note = target_cfa8cf9
  misc_feature 1..23: note = LF
  misc_feature 24..25: note = Core
  misc_feature 26..50: note = RF
gctcccgaccatagccggccgcgctgaggcgaccgtgagacccggctgag

SEQ ID NO: 28465 - DNA, 50 bp, unidentified
  source 1..50: mol_type = unassigned DNA; note = target_cfaacf2
  misc_feature 1..23: note = LF
  misc_feature 24..25: note = Core
  misc_feature 26..50: note = RF
tttaaattcatcttatttcctccctaaaaatttacaaatttatttcatat

SEQ ID NO: 28466 - DNA, 50 bp, unidentified
  source 1..50: mol_type = unassigned DNA; note = target_cfc2006
  misc_feature 1..22: note = LF
  misc_feature 23..25: note = Core
  misc_feature 26..50: note = RF
ttgtcgcatagagtttcgagtcagactcttcatttaatcgctcctgttcg

SEQ ID NO: 28467 - DNA, 50 bp, unidentified
  source 1..50: mol_type = unassigned DNA; note = target_cfcaf0c
  misc_feature 1..23: note = LF
  misc_feature 24..25: note = Core
  misc_feature 26..50: note = RF
cgcaggataaatgggtcctgaccctagtctggcaggacactcaccccgcg

SEQ ID NO: 28468 - DNA, 50 bp, unidentified
  source 1..50: mol_type = unassigned DNA; note = target_cfd9c5e
  misc_feature 1..24: note = LF
  misc_feature 25: note = Core
  misc_feature 26..50: note = RF
gccacaggatttccgtatgtcattctttctctcctttcggaaaatcgtat

SEQ ID NO: 28469 - DNA, 50 bp, unidentified
  source 1..50: mol_type = unassigned DNA; note = target_cfdc72b
  misc_feature 1..23: note = LF
  misc_feature 24..25: note = Core
  misc_feature 26..50: note = RF
ctcccaggcccgccgctgcgggctttttcatcgccgcatcaaccagaccg

SEQ ID NO: 28470 - DNA, 50 bp, unidentified
  source 1..50: mol_type = unassigned DNA; note = target_cfdf6ba
  misc_feature 1..23: note = LF
  misc_feature 24..25: note = Core
  misc_feature 26..50: note = RF
cgaagatggcacatgcccacacccttttctggcgaccagttcggagcact

SEQ ID NO: 28471 - DNA, 50 bp, unidentified
  source 1..50: mol_type = unassigned DNA; note = target_cfe00d9
  misc_feature 1..23: note = LF
  misc_feature 24..25: note = Core
  misc_feature 26..50: note = RF
gttgcggaccggctgaaggggggtgggtagcggttggtctgcttccagcg

SEQ ID NO: 28472 - DNA, 50 bp, unidentified
  source 1..50: mol_type = unassigned DNA; note = target_cfe61cc
  misc_feature 1..24: note = LF
  misc_feature 25: note = Core
  misc_feature 26..50: note = RF
cgcatgttgacttgaagatctaacgccgtggttaaccggcaccggagcac

SEQ ID NO: 28473 - DNA, 50 bp, unidentified
  source 1..50: mol_type = unassigned DNA; note = target_cfe70c4
  misc_feature 1..23: note = LF
  misc_feature 24..25: note = Core
  misc_feature 26..50: note = RF
ggtggtcgttcgtcgcaggatgaacgaacgaccgcttccaagagcagcgg

SEQ ID NO: 28474 - DNA, 50 bp, unidentified
  source 1..50: mol_type = unassigned DNA; note = target_cfe7cb8
  misc_feature 1..23: note = LF
  misc_feature 24..25: note = Core
  misc_feature 26..50: note = RF
ccttacttattacagcttttccactttcaacaagaggatctagaccacaa

SEQ ID NO: 28475 - DNA, 50 bp, unidentified
  source 1..50: mol_type = unassigned DNA; note = target_cfe936f
  misc_feature 1..21: note = LF
  misc_feature 22..25: note = Core
  misc_feature 26..50: note = RF
ggtgctgtcgcgcattgctgcctccctgaaggcaggttgtcgatgggtac

SEQ ID NO: 28476 - DNA, 50 bp, unidentified
  source 1..50: mol_type = unassigned DNA; note = target_cfed46c
  misc_feature 1..24: note = LF
  misc_feature 25: note = Core
  misc_feature 26..50: note = RF
ttgctcgagatgcccattcgtgatttcacttgtgcgcgaatgcgaagcgg

SEQ ID NO: 28477 - DNA, 50 bp, unidentified
  source 1..50: mol_type = unassigned DNA; note = target_cfef1a2
  misc_feature 1..23: note = LF
  misc_feature 24..25: note = Core
  misc_feature 26..50: note = RF
ttggcggctggtgatacgactgttgggtcttggcaggtgccccggaactc

SEQ ID NO: 28478 - DNA, 50 bp, unidentified
  source 1..50: mol_type = unassigned DNA; note = target_cfef84a
  misc_feature 1..23: note = LF
  misc_feature 24..25: note = Core
  misc_feature 26..50: note = RF
ttgccacgtaaccgggacaggcggcgttgatgatgacgttcgtgtcggcc

SEQ ID NO: 28479 - DNA, 50 bp, unidentified
  source 1..50: mol_type = unassigned DNA; note = target_cff330d
  misc_feature 1..22: note = LF
  misc_feature 23..25: note = Core
  misc_feature 26..50: note = RF
atagaacgaatgaccgcagagcggactaagcaccatttcgctgcgggcgc

SEQ ID NO: 28480 - DNA, 50 bp, unidentified
  source 1..50: mol_type = unassigned DNA; note = target_cff8d6c
  misc_feature 1..20: note = LF
  misc_feature 21..25: note = Core
  misc_feature 26..50: note = RF
tctatcccttttcagtatattaatccttcttttttctgcaaaatccaact

SEQ ID NO: 28481 - DNA, 50 bp, unidentified
  source 1..50: mol_type = unassigned DNA; note = target_cffa4a4
  misc_feature 1..21: note = LF
  misc_feature 22..25: note = Core
  misc_feature 26..50: note = RF
cctcgatgatcttctgaaccggtcatgcccgccctgctgccctggtaatg

SEQ ID NO: 28482 - DNA, 50 bp, unidentified
  source 1..50: mol_type = unassigned DNA; note = target_cffd0cb
  misc_feature 1..22: note = LF
  misc_feature 23..25: note = Core
  misc_feature 26..50: note = RF
tatccgctaatcatttttcttcctttcattatcctccatataattacagt

SEQ ID NO: 28483 - DNA, 50 bp, unidentified
  source 1..50: mol_type = unassigned DNA; note = target_d00c77e
  misc_feature 1..23: note = LF
  misc_feature 24..25: note = Core
  misc_feature 26..50: note = RF
agaacttggccctcatgggtaccccccccgtccattggcgtgcaatcagc

SEQ ID NO: 28484 - DNA, 50 bp, unidentified
  source 1..50: mol_type = unassigned DNA; note = target_d00de73
  misc_feature 1..24: note = LF
  misc_feature 25: note = Core
  misc_feature 26..50: note = RF
cggtcaccaactgctcgtaatcggcgttatacgggtgatcgaagatcact

SEQ ID NO: 28485 - DNA, 50 bp, unidentified
  source 1..50: mol_type = unassigned DNA; note = target_d00e0f2
  misc_feature 1..23: note = LF
  misc_feature 24..25: note = Core
  misc_feature 26..50: note = RF
agtggtcctatccttggctttgttgcacaaaactgggcttgaaagtgttt

SEQ ID NO: 28486 - DNA, 50 bp, unidentified
  source 1..50: mol_type = unassigned DNA; note = target_d013fc6
  misc_feature 1..24: note = LF
  misc_feature 25: note = Core
  misc_feature 26..50: note = RF
ggaaaacgctgcgcgtttcccactttcccacagctccggcggcgactgcc

SEQ ID NO: 28487 - DNA, 50 bp, unidentified
  source 1..50: mol_type = unassigned DNA; note = target_d015127
  misc_feature 1..24: note = LF
  misc_feature 25: note = Core
  misc_feature 26..50: note = RF
ggtgcggacccgcatgccgggtggtgtggcaggggcgtagcctgttggct

SEQ ID NO: 28488 - DNA, 50 bp, unidentified
  source 1..50: mol_type = unassigned DNA; note = target_d022462
  misc_feature 1..24: note = LF
  misc_feature 25: note = Core
  misc_feature 26..50: note = RF
gtatcactattatgaaataatgaaaacttatttaggtaataatttatgct

SEQ ID NO: 28489 - DNA, 50 bp, unidentified
  source 1..50: mol_type = unassigned DNA; note = target_d02b345
  misc_feature 1..23: note = LF
  misc_feature 24..25: note = Core
  misc_feature 26..50: note = RF
agaaatgaagaatttaaagtcacagcgatagtgatcagcgataataagga

SEQ ID NO: 28490 - DNA, 50 bp, unidentified
  source 1..50: mol_type = unassigned DNA; note = target_d0367fd
  misc_feature 1..24: note = LF
  misc_feature 25: note = Core
  misc_feature 26..50: note = RF
ccctccccaattactacctgacggcggcccagcaacctggcgcgaggttg

SEQ ID NO: 28491 - DNA, 50 bp, unidentified
  source 1..50: mol_type = unassigned DNA; note = target_d0475b1
  misc_feature 1..22: note = LF
  misc_feature 23..25: note = Core
  misc_feature 26..50: note = RF
tcgtgttgttcataggcgttacctccaaatttttgcaaacaaaaaagacc

SEQ ID NO: 28492 - DNA, 50 bp, unidentified
  source 1..50: mol_type = unassigned DNA; note = target_d04bd58
  misc_feature 1..23: note = LF
  misc_feature 24..25: note = Core
  misc_feature 26..50: note = RF
cactttttcggtatcatatacgtacctcttttcttataaagggcaaatgc

SEQ ID NO: 28493 - DNA, 50 bp, unidentified
  source 1..50: mol_type = unassigned DNA; note = target_d053035
  misc_feature 1..24: note = LF
  misc_feature 25: note = Core
  misc_feature 26..50: note = RF
cacctcgccgcccgccccgactgacctcgggttcgcgtacggcacacggc

SEQ ID NO: 28494 - DNA, 50 bp, unidentified
  source 1..50: mol_type = unassigned DNA; note = target_d05a988
  misc_feature 1..24: note = LF
  misc_feature 25: note = Core
  misc_feature 26..50: note = RF
ccgctcgcggcgagcccgtcgcggcatgagcgcgttcctgggggaaccgt

SEQ ID NO: 28495 - DNA, 50 bp, unidentified
  source 1..50: mol_type = unassigned DNA; note = target_d06740a
  misc_feature 1..24: note = LF
  misc_feature 25: note = Core
  misc_feature 26..50: note = RF
gattaataataaattcgcgtctttcagacgctgagtgatgggtgcgttgg

SEQ ID NO: 28496 - DNA, 50 bp, unidentified
  source 1..50: mol_type = unassigned DNA; note = target_d06a361
  misc_feature 1..23: note = LF
  misc_feature 24..25: note = Core
  misc_feature 26..50: note = RF
tttgatgtagggcagcaaatcgtagcccggatgatcatggttcgagacag

SEQ ID NO: 28497 - DNA, 50 bp, unidentified
  source 1..50: mol_type = unassigned DNA; note = target_d06b5e5
  misc_feature 1..23: note = LF
  misc_feature 24..25: note = Core
  misc_feature 26..50: note = RF
aattgaacccaggcaagttaacttgtcagcaccgtcggaattgctccgtg

SEQ ID NO: 28498 - DNA, 50 bp, unidentified
  source 1..50: mol_type = unassigned DNA; note = target_d06f506
  misc_feature 1..21: note = LF
  misc_feature 22..25: note = Core
  misc_feature 26..50: note = RF
ttgcttcgcctgcggctcgcaatgacggcgtcggggtgggacggcgctta

SEQ ID NO: 28499 - DNA, 50 bp, unidentified
  source 1..50: mol_type = unassigned DNA; note = target_d077086
  misc_feature 1..23: note = LF
  misc_feature 24..25: note = Core
  misc_feature 26..50: note = RF
aattcgaacttcataagattcacctcctttatatatttaaacaatagtca

SEQ ID NO: 28500 - DNA, 50 bp, unidentified
  source 1..50: mol_type = unassigned DNA; note = target_d07f18c
  misc_feature 1..23: note = LF
  misc_feature 24..25: note = Core
  misc_feature 26..50: note = RF
gctattcaagcagggcaaataacagttggctagttccgcttcgctacaca

SEQ ID NO: 28501 - DNA, 50 bp, unidentified
  source 1..50: mol_type = unassigned DNA; note = target_d090a52
  misc_feature 1..23: note = LF
  misc_feature 24..25: note = Core
  misc_feature 26..50: note = RF
gatgccgtgagcgggagccatccacctcatccgcttttccggcagttcgc

SEQ ID NO: 28502 - DNA, 50 bp, unidentified
  source 1..50: mol_type = unassigned DNA; note = target_d09434b
  misc_feature 1..23: note = LF
  misc_feature 24..25: note = Core
  misc_feature 26..50: note = RF
atccaacacgcttgttgtgactctggattcccggtcaggccttcggcctg

SEQ ID NO: 28503 - DNA, 50 bp, unidentified
  source 1..50: mol_type = unassigned DNA; note = target_d094603
  misc_feature 1..23: note = LF
  misc_feature 24..25: note = Core
  misc_feature 26..50: note = RF
aaaactgaatttttcataaattcctcctatatgcatagcggcagctatat

SEQ ID NO: 28504 - DNA, 50 bp, unidentified
  source 1..50: mol_type = unassigned DNA; note = target_d095380
  misc_feature 1..24: note = LF
  misc_feature 25: note = Core
  misc_feature 26..50: note = RF
cttggtttgtaatcatcaaaatcacctcatatcaagaatatcataaattt

SEQ ID NO: 28505 - DNA, 50 bp, unidentified
  source 1..50: mol_type = unassigned DNA; note = target_d09e1bf
  misc_feature 1..23: note = LF
  misc_feature 24..25: note = Core
  misc_feature 26..50: note = RF
atcgcctggctccaggcccccctttccgcccgatgccgagcggtgggcct

SEQ ID NO: 28506 - DNA, 50 bp, unidentified
  source 1..50: mol_type = unassigned DNA; note = target_d09f01d
  misc_feature 1..22: note = LF
  misc_feature 23..25: note = Core
  misc_feature 26..50: note = RF
tttcgatctcataaatacattcctttctagttttctatttcttccgattc

SEQ ID NO: 28507 - DNA, 50 bp, unidentified
  source 1..50: mol_type = unassigned DNA; note = target_d09fb57
  misc_feature 1..23: note = LF
  misc_feature 24..25: note = Core
  misc_feature 26..50: note = RF
ttcaaaaaacacctactgagcttgttctttatcttcggcggtctgcggct

SEQ ID NO: 28508 - DNA, 50 bp, unidentified
  source 1..50: mol_type = unassigned DNA; note = target_d0a0390
  misc_feature 1..24: note = LF
  misc_feature 25: note = Core
  misc_feature 26..50: note = RF
tctgggctacctgccggtgccagcttccggtttgccgacatccatgtaag

SEQ ID NO: 28509 - DNA, 50 bp, unidentified
  source 1..50: mol_type = unassigned DNA; note = target_d0b214b
  misc_feature 1..23: note = LF
  misc_feature 24..25: note = Core
  misc_feature 26..50: note = RF
acggctggagcatcgaatccgcaggtcagctggtcaggatccagattcgg

SEQ ID NO: 28510 - DNA, 50 bp, unidentified
  source 1..50: mol_type = unassigned DNA; note = target_d0b9dc0
  misc_feature 1..24: note = LF
  misc_feature 25: note = Core
  misc_feature 26..50: note = RF
agtcgagtggactaaattttcatctgacccagatggcaccttatgttaga

SEQ ID NO: 28511 - DNA, 50 bp, unidentified
  source 1..50: mol_type = unassigned DNA; note = target_d0cba15
  misc_feature 1..23: note = LF
  misc_feature 24..25: note = Core
  misc_feature 26..50: note = RF
ctgttgcatcatctgttctccttgtctttcaatcaatcatatatttctaa

SEQ ID NO: 28512 - DNA, 50 bp, unidentified
  source 1..50: mol_type = unassigned DNA; note = target_d0d787b
  misc_feature 1..23: note = LF
  misc_feature 24..25: note = Core
  misc_feature 26..50: note = RF
acggggatggctggtggaaagcagaccttcgatgtcgctcgtaagttctc

SEQ ID NO: 28513 - DNA, 50 bp, unidentified
  source 1..50: mol_type = unassigned DNA; note = target_d0da593
  misc_feature 1..24: note = LF
  misc_feature 25: note = Core
  misc_feature 26..50: note = RF
ttttcttcctccctagcggctaacgtttgatgctaatcgtgctcggctgg

SEQ ID NO: 28514 - DNA, 50 bp, unidentified
  source 1..50: mol_type = unassigned DNA; note = target_d0db0cd
  misc_feature 1..23: note = LF
  misc_feature 24..25: note = Core
  misc_feature 26..50: note = RF
agcgaatacttcttctgatcccgctcctcagtgaggatgcggctctcacg

SEQ ID NO: 28515 - DNA, 50 bp, unidentified
  source 1..50: mol_type = unassigned DNA; note = target_d0e04d7
  misc_feature 1..24: note = LF
  misc_feature 25: note = Core
  misc_feature 26..50: note = RF
agtcagaggggactcctatagcggcggaatgacgcacctcatcgcggcag

SEQ ID NO: 28516 - DNA, 50 bp, unidentified
  source 1..50: mol_type = unassigned DNA; note = target_d0e9219
  misc_feature 1..23: note = LF
  misc_feature 24..25: note = Core
  misc_feature 26..50: note = RF
ttcgcgcacttcccggtccgctcaggatgacatctggacggctcgtcgga

SEQ ID NO: 28517 - DNA, 50 bp, unidentified
  source 1..50: mol_type = unassigned DNA; note = target_d0ec7f6
  misc_feature 1..24: note = LF
  misc_feature 25: note = Core
  misc_feature 26..50: note = RF
cgacgtgaaccgcgcggaccgcggcagatgcgcgcgttcgtcggactcat

SEQ ID NO: 28518 - DNA, 50 bp, unidentified
  source 1..50: mol_type = unassigned DNA; note = target_d10683f
  misc_feature 1..22: note = LF
  misc_feature 23..25: note = Core
  misc_feature 26..50: note = RF
acgcgggcaggccatcatgtgaggtgtcatgagcacaccgctgttgcggg

SEQ ID NO: 28519 - DNA, 50 bp, unidentified
  source 1..50: mol_type = unassigned DNA; note = target_d110a81
  misc_feature 1..23: note = LF
  misc_feature 24..25: note = Core
  misc_feature 26..50: note = RF
tttctatatctacctgtttccgcctatctactcattttttctcacgtctg

SEQ ID NO: 28520 - DNA, 50 bp, unidentified
  source 1..50: mol_type = unassigned DNA; note = target_d111e70
  misc_feature 1..22: note = LF
  misc_feature 23..25: note = Core
  misc_feature 26..50: note = RF
ctgcgcggtccggtccccgcgtttcttcacctctccgcggtttcaaccta

SEQ ID NO: 28521 - DNA, 50 bp, unidentified
  source 1..50: mol_type = unassigned DNA; note = target_d117bff
  misc_feature 1..24: note = LF
  misc_feature 25: note = Core
  misc_feature 26..50: note = RF
ggctaactacacgaaaaacggggttttgagtaagttcgatgctcgatgtt

SEQ ID NO: 28522 - DNA, 50 bp, unidentified
  source 1..50: mol_type = unassigned DNA; note = target_d12d443
  misc_feature 1..24: note = LF
  misc_feature 25: note = Core
  misc_feature 26..50: note = RF
gttaagtcaccagctatggtgactttttatttgcaattatgcccttagat

SEQ ID NO: 28523 - DNA, 50 bp, unidentified
  source 1..50: mol_type = unassigned DNA; note = target_d12da00
  misc_feature 1..23: note = LF
  misc_feature 24..25: note = Core
  misc_feature 26..50: note = RF
tccccctatcccgatcaatctggaggcttctgtgaggtcgcgtggcacgg

SEQ ID NO: 28524 - DNA, 50 bp, unidentified
  source 1..50: mol_type = unassigned DNA; note = target_d133af2
  misc_feature 1..21: note = LF
  misc_feature 22..25: note = Core
  misc_feature 26..50: note = RF
tgtgcataatgcccgcagggcttttattccatagggaggttcgcagaact

SEQ ID NO: 28525 - DNA, 50 bp, unidentified
  source 1..50: mol_type = unassigned DNA; note = target_d13698d
  misc_feature 1..23: note = LF
  misc_feature 24..25: note = Core
  misc_feature 26..50: note = RF
gccaaaggcatgcgcggtatctgtaggagcgggcctgcccgcgaagggcc

SEQ ID NO: 28526 - DNA, 50 bp, unidentified
  source 1..50: mol_type = unassigned DNA; note = target_d13b637
  misc_feature 1..24: note = LF
  misc_feature 25: note = Core
  misc_feature 26..50: note = RF
tacctctgtatttagacttccagttgtaaaatgtggcctcagaaatcccc

SEQ ID NO: 28527 - DNA, 50 bp, unidentified
  source 1..50: mol_type = unassigned DNA; note = target_d13b747
  misc_feature 1..20: note = LF
  misc_feature 21..25: note = Core
  misc_feature 26..50: note = RF
cgcggcggtggcgaagcctccccccccccgcgggcgaaccgacaaagtgg

SEQ ID NO: 28528 - DNA, 50 bp, unidentified
  source 1..50: mol_type = unassigned DNA; note = target_d148bb5
  misc_feature 1..23: note = LF
  misc_feature 24..25: note = Core
  misc_feature 26..50: note = RF
tgctgtcattgttcatcttccttgtctttctaactcacgaatttgtttcc

SEQ ID NO: 28529 - DNA, 50 bp, unidentified
  source 1..50: mol_type = unassigned DNA; note = target_d14a7b6
  misc_feature 1..24: note = LF
  misc_feature 25: note = Core
  misc_feature 26..50: note = RF
cacagcgccccgaccttcacgcggcggaatgacgcattcgcgaagtgctc

SEQ ID NO: 28530 - DNA, 50 bp, unidentified
  source 1..50: mol_type = unassigned DNA; note = target_d14c665
  misc_feature 1..20: note = LF
  misc_feature 21..25: note = Core
  misc_feature 26..50: note = RF
tcggccgaccggccccacatccccccagctgcgttcccatgggcataagg

SEQ ID NO: 28531 - DNA, 50 bp, unidentified
  source 1..50: mol_type = unassigned DNA; note = target_d14f88d
  misc_feature 1..24: note = LF
  misc_feature 25: note = Core
  misc_feature 26..50: note = RF
ctgaacgtctgctattgagaaaagcggacattaaagttttcctgccgatc

SEQ ID NO: 28532 - DNA, 50 bp, unidentified
  source 1..50: mol_type = unassigned DNA; note = target_d14ff4b
  misc_feature 1..23: note = LF
  misc_feature 24..25: note = Core
  misc_feature 26..50: note = RF
gctgcggtgcatgagtccgcttttggcccaaggcggagacgtgaagccgc

SEQ ID NO: 28533 - DNA, 50 bp, unidentified
  source 1..50: mol_type = unassigned DNA; note = target_d155eab
  misc_feature 1..23: note = LF
  misc_feature 24..25: note = Core
  misc_feature 26..50: note = RF
gcccaagagactatctcttgggctttttatacctgtaagtacaatatttt

SEQ ID NO: 28534 - DNA, 50 bp, unidentified
  source 1..50: mol_type = unassigned DNA; note = target_d1662dd
  misc_feature 1..24: note = LF
  misc_feature 25: note = Core
  misc_feature 26..50: note = RF
gattgcttcctctggggaactaacgccgcattaaggtgtgagtggcgctt

SEQ ID NO: 28535 - DNA, 50 bp, unidentified
  source 1..50: mol_type = unassigned DNA; note = target_d16a76a
  misc_feature 1..23: note = LF
  misc_feature 24..25: note = Core
  misc_feature 26..50: note = RF
gaaaagagattgcttcgctgtgctcgcaatgacaaaggagcaagctctgc

SEQ ID NO: 28536 - DNA, 50 bp, unidentified
  source 1..50: mol_type = unassigned DNA; note = target_d17877e
  misc_feature 1..22: note = LF
  misc_feature 23..25: note = Core
  misc_feature 26..50: note = RF
atattcttagttagaaagtctacaccccaaatataatatcttattgttat

SEQ ID NO: 28537 - DNA, 50 bp, unidentified
  source 1..50: mol_type = unassigned DNA; note = target_d1792e4
  misc_feature 1..24: note = LF
  misc_feature 25: note = Core
  misc_feature 26..50: note = RF
cccagagcgcgcaaatcctcgatctttttgcggaggatagttggcgtaat

SEQ ID NO: 28538 - DNA, 50 bp, unidentified
  source 1..50: mol_type = unassigned DNA; note = target_d186469
  misc_feature 1..23: note = LF
  misc_feature 24..25: note = Core
  misc_feature 26..50: note = RF
ctgaccgaccgctcggggtggaaagcggtcattcctcagacggtgcattt

SEQ ID NO: 28539 - DNA, 50 bp, unidentified
  source 1..50: mol_type = unassigned DNA; note = target_d187969
  misc_feature 1..23: note = LF
  misc_feature 24..25: note = Core
  misc_feature 26..50: note = RF
attgcttcggcatcggccccccttttccgccagcggcagagcggtgcgct

SEQ ID NO: 28540 - DNA, 50 bp, unidentified
  source 1..50: mol_type = unassigned DNA; note = target_d18cef7
  misc_feature 1..24: note = LF
  misc_feature 25: note = Core
  misc_feature 26..50: note = RF
tgccgagtggtggggcaagagccctttggttactttggggcttttccaaa

SEQ ID NO: 28541 - DNA, 50 bp, unidentified
  source 1..50: mol_type = unassigned DNA; note = target_d18e067
  misc_feature 1..24: note = LF
  misc_feature 25: note = Core
  misc_feature 26..50: note = RF
tcgcccctatccgctatcatgctttttttttgagcagacggttttccagg

SEQ ID NO: 28542 - DNA, 50 bp, unidentified
  source 1..50: mol_type = unassigned DNA; note = target_d1ad5d1
  misc_feature 1..20: note = LF
  misc_feature 21..25: note = Core
  misc_feature 26..50: note = RF
ggacgttcggacgtaaatcacaccccccccgctaatgtccgaaggatcgg

SEQ ID NO: 28543 - DNA, 50 bp, unidentified
  source 1..50: mol_type = unassigned DNA; note = target_d1b5b72
  misc_feature 1..23: note = LF
  misc_feature 24..25: note = Core
  misc_feature 26..50: note = RF
ggtcgccaccttcgcggccttcttgggccaggacacccagatcattccat

SEQ ID NO: 28544 - DNA, 50 bp, unidentified
  source 1..50: mol_type = unassigned DNA; note = target_d1c296f
  misc_feature 1..23: note = LF
  misc_feature 24..25: note = Core
  misc_feature 26..50: note = RF
tgccgccatcgcgagcaagctcgctcccacagggggatacgaccggctca

SEQ ID NO: 28545 - DNA, 50 bp, unidentified
  source 1..50: mol_type = unassigned DNA; note = target_d1d99c4
  misc_feature 1..23: note = LF
  misc_feature 24..25: note = Core
  misc_feature 26..50: note = RF
cgaaaaatgccacaaagggatccctgcggggcaatcgtcagacgagggtg

SEQ ID NO: 28546 - DNA, 50 bp, unidentified
  source 1..50: mol_type = unassigned DNA; note = target_d1dc4d2
  misc_feature 1..22: note = LF
  misc_feature 23..25: note = Core
  misc_feature 26..50: note = RF
atcggcgagacacgccggtctttttttgtgctgatggctagagggaggaa

SEQ ID NO: 28547 - DNA, 50 bp, unidentified
  source 1..50: mol_type = unassigned DNA; note = target_d1dca92
  misc_feature 1..23: note = LF
  misc_feature 24..25: note = Core
  misc_feature 26..50: note = RF
gacaagctgggcttatcaaagcagacggtcggtgcggctgggctagccaa

SEQ ID NO: 28548 - DNA, 50 bp, unidentified
  source 1..50: mol_type = unassigned DNA; note = target_d1e6eb1
  misc_feature 1..22: note = LF
  misc_feature 23..25: note = Core
  misc_feature 26..50: note = RF
ggatataatgatttacctagtgaaacggcggcgacgcacctcgctgcaag

SEQ ID NO: 28549 - DNA, 50 bp, unidentified
  source 1..50: mol_type = unassigned DNA; note = target_d1e7e24
  misc_feature 1..23: note = LF
  misc_feature 24..25: note = Core
  misc_feature 26..50: note = RF
cggcgccgcgctcattggataacctccgtgcttcgcactgcggtgcgagc

SEQ ID NO: 28550 - DNA, 50 bp, unidentified
  source 1..50: mol_type = unassigned DNA; note = target_d1e85fd
  misc_feature 1..24: note = LF
  misc_feature 25: note = Core
  misc_feature 26..50: note = RF
cgcatgccactgcgtcattctgggcgctaggacccgcgtccaagtgggcg

SEQ ID NO: 28551 - DNA, 50 bp, unidentified
  source 1..50: mol_type = unassigned DNA; note = target_d1ea044
  misc_feature 1..24: note = LF
  misc_feature 25: note = Core
  misc_feature 26..50: note = RF
ggcttattccgttcttgcgcccgttaatggaattatccacttctactatt

SEQ ID NO: 28552 - DNA, 50 bp, unidentified
  source 1..50: mol_type = unassigned DNA; note = target_d1ec4eb
  misc_feature 1..23: note = LF
  misc_feature 24..25: note = Core
  misc_feature 26..50: note = RF
ctggcatgcgccgctaacccagcctacaaggtggctgcgtttgccaacca

SEQ ID NO: 28553 - DNA, 50 bp, unidentified
  source 1..50: mol_type = unassigned DNA; note = target_d1f0608
  misc_feature 1..21: note = LF
  misc_feature 22..25: note = Core
  misc_feature 26..50: note = RF
ggggggagttttcgtgcccccccccccccgggctcaaccctttgccttca

SEQ ID NO: 28554 - DNA, 50 bp, unidentified
  source 1..50: mol_type = unassigned DNA; note = target_d1ffc53
  misc_feature 1..24: note = LF
  misc_feature 25: note = Core
  misc_feature 26..50: note = RF
gcggcggcagacgggcttcaccacttttcccagggcttccttcagcaagt

SEQ ID NO: 28555 - DNA, 50 bp, unidentified
  source 1..50: mol_type = unassigned DNA; note = target_d2046f4
  misc_feature 1..23: note = LF
  misc_feature 24..25: note = Core
  misc_feature 26..50: note = RF
ccgcccggccaccttctcccgcgaggggagaaggatattgctgccggcct

SEQ ID NO: 28556 - DNA, 50 bp, unidentified
  source 1..50: mol_type = unassigned DNA; note = target_d209fe7
  misc_feature 1..23: note = LF
  misc_feature 24..25: note = Core
  misc_feature 26..50: note = RF
atcgacggcgacgaggttcaagtagtcgctgaggtcgatccgtgggcatg

SEQ ID NO: 28557 - DNA, 50 bp, unidentified
  source 1..50: mol_type = unassigned DNA; note = target_d20e53f
  misc_feature 1..24: note = LF
  misc_feature 25: note = Core
  misc_feature 26..50: note = RF
caggtagccgaagcgcggaagtgccgtactgggcgggtcgcctgggaatt

SEQ ID NO: 28558 - DNA, 50 bp, unidentified
  source 1..50: mol_type = unassigned DNA; note = target_d20eef8
  misc_feature 1..23: note = LF
  misc_feature 24..25: note = Core
  misc_feature 26..50: note = RF
ctcaacaccaataggcccgaacgtgcgattttggatttgaaagaccagac

SEQ ID NO: 28559 - DNA, 50 bp, unidentified
  source 1..50: mol_type = unassigned DNA; note = target_d2166de
  misc_feature 1..22: note = LF
  misc_feature 23..25: note = Core
  misc_feature 26..50: note = RF
ctgcagtgcagctcatcatagcggaccttcgctatcgaaggacagctcga

SEQ ID NO: 28560 - DNA, 50 bp, unidentified
  source 1..50: mol_type = unassigned DNA; note = target_d225501
  misc_feature 1..24: note = LF
  misc_feature 25: note = Core
  misc_feature 26..50: note = RF
ccacgagggcctagccccagctcccccggtggaggccggtatcggaacgg

SEQ ID NO: 28561 - DNA, 50 bp, unidentified
  source 1..50: mol_type = unassigned DNA; note = target_d225e01
  misc_feature 1..23: note = LF
  misc_feature 24..25: note = Core
  misc_feature 26..50: note = RF
ccgcagcttgctagcggaccccttgcgggttgatcgtggaagatccgaac

SEQ ID NO: 28562 - DNA, 50 bp, unidentified
  source 1..50: mol_type = unassigned DNA; note = target_d229014
  misc_feature 1..23: note = LF
  misc_feature 24..25: note = Core
  misc_feature 26..50: note = RF
ggcttgcatgacagtcggcctaactattaaatcaatcgatcagcccatcc

SEQ ID NO: 28563 - DNA, 50 bp, unidentified
  source 1..50: mol_type = unassigned DNA; note = target_d22a73c
  misc_feature 1..21: note = LF
  misc_feature 22..25: note = Core
  misc_feature 26..50: note = RF
accaggatcgactccatgagtctccttcttccgcgtgtgggtgtctgcgg

SEQ ID NO: 28564 - DNA, 50 bp, unidentified
  source 1..50: mol_type = unassigned DNA; note = target_d22d6b3
  misc_feature 1..23: note = LF
  misc_feature 24..25: note = Core
  misc_feature 26..50: note = RF
tttcatcgctcatttatattctcctttatattttaatttctcaaatttat

SEQ ID NO: 28565 - DNA, 50 bp, unidentified
  source 1..50: mol_type = unassigned DNA; note = target_d22dc1e
  misc_feature 1..23: note = LF
  misc_feature 24..25: note = Core
  misc_feature 26..50: note = RF
atgccgccgcgatcgagcgacccagctgggagagcccgtagaagagcaag

SEQ ID NO: 28566 - DNA, 50 bp, unidentified
  source 1..50: mol_type = unassigned DNA; note = target_d22dfe5
  misc_feature 1..23: note = LF
  misc_feature 24..25: note = Core
  misc_feature 26..50: note = RF
gataagcgcaattccgtttctctaggccgtgtactcataaatacggttct

SEQ ID NO: 28567 - DNA, 50 bp, unidentified
  source 1..50: mol_type = unassigned DNA; note = target_d22f82e
  misc_feature 1..23: note = LF
  misc_feature 24..25: note = Core
  misc_feature 26..50: note = RF
cggacagaaaagcgctgtccgccctacggaataaacatcagccgcgtagg

SEQ ID NO: 28568 - DNA, 50 bp, unidentified
  source 1..50: mol_type = unassigned DNA; note = target_d231b19
  misc_feature 1..23: note = LF
  misc_feature 24..25: note = Core
  misc_feature 26..50: note = RF
ttggattcgcggcgggggcgccgctcccacgggggcttccacagggggtt

SEQ ID NO: 28569 - DNA, 50 bp, unidentified
  source 1..50: mol_type = unassigned DNA; note = target_d259649
  misc_feature 1..23: note = LF
  misc_feature 24..25: note = Core
  misc_feature 26..50: note = RF
tctttcctgacgtaaacgtcaggctacgaaatcaacgtagtcaggctact

SEQ ID NO: 28570 - DNA, 50 bp, unidentified
  source 1..50: mol_type = unassigned DNA; note = target_d25e521
  misc_feature 1..24: note = LF
  misc_feature 25: note = Core
  misc_feature 26..50: note = RF
aacacttaatttggttaatcaaagcagactttcaagtgctcagttgctcc

SEQ ID NO: 28571 - DNA, 50 bp, unidentified
  source 1..50: mol_type = unassigned DNA; note = target_d2616de
  misc_feature 1..23: note = LF
  misc_feature 24..25: note = Core
  misc_feature 26..50: note = RF
acaccaatccccctcggtgtaggaggcgttttaacgccgaacatgtagct

SEQ ID NO: 28572 - DNA, 50 bp, unidentified
  source 1..50: mol_type = unassigned DNA; note = target_d27276b
  misc_feature 1..24: note = LF
  misc_feature 25: note = Core
  misc_feature 26..50: note = RF
atcagacgaactcgctgtcatcggcagatgcggtcgcttcggtggtcaaa

SEQ ID NO: 28573 - DNA, 50 bp, unidentified
  source 1..50: mol_type = unassigned DNA; note = target_d273fdb
  misc_feature 1..23: note = LF
  misc_feature 24..25: note = Core
  misc_feature 26..50: note = RF
ctcggtaccaccttcgtggccacctaacgcttaagctcagttgcgagcgc

SEQ ID NO: 28574 - DNA, 50 bp, unidentified
  source 1..50: mol_type = unassigned DNA; note = target_d2773ca
  misc_feature 1..24: note = LF
  misc_feature 25: note = Core
  misc_feature 26..50: note = RF
ctgattagctatgagctatatacgttgttacaagctggcctttctccatt

SEQ ID NO: 28575 - DNA, 50 bp, unidentified; identical to SEQ ID NO: 21190
  source 1..50: mol_type = unassigned DNA; note = target_d27eac3
  misc_feature 1..22: note = LF
  misc_feature 23..25: note = Core
  misc_feature 26..50: note = RF

SEQ ID NO: 28576 - DNA, 50 bp, unidentified
  source 1..50: mol_type = unassigned DNA; note = target_d282130
  misc_feature 1..23: note = LF
  misc_feature 24..25: note = Core
  misc_feature 26..50: note = RF
gaccttaggctcgcttgactatgctgtatcgctcgacggaccgcccctgt

SEQ ID NO: 28577 - DNA, 50 bp, unidentified
  source 1..50: mol_type = unassigned DNA; note = target_d288c9c
  misc_feature 1..23: note = LF
  misc_feature 24..25: note = Core
  misc_feature 26..50: note = RF
gttaatcacatgcgtattccctccttaatccacctctccaggaggtattt

SEQ ID NO: 28578 - DNA, 50 bp, unidentified
  source 1..50: mol_type = unassigned DNA; note = target_d2a72b5
  misc_feature 1..23: note = LF
  misc_feature 24..25: note = Core
  misc_feature 26..50: note = RF
tgaaacggcgccacccacggctctgtttcacaaagcgcgtgagggattca

SEQ ID NO: 28579 - DNA, 50 bp, unidentified
  source 1..50: mol_type = unassigned DNA; note = target_d2ac1a6
  misc_feature 1..23: note = LF
  misc_feature 24..25: note = Core
  misc_feature 26..50: note = RF
agcgccccgcgcgtcagacccgtagcccggatgaagcgcaagcgtaatcc

SEQ ID NO: 28580 - DNA, 50 bp, unidentified
  source 1..50: mol_type = unassigned DNA; note = target_d2b6c7d
  misc_feature 1..22: note = LF
  misc_feature 23..25: note = Core
  misc_feature 26..50: note = RF
agctgctgaccaaaagttaccgtgacatcaccgtttgagcagcttgctgc

SEQ ID NO: 28581 - DNA, 50 bp, unidentified
  source 1..50: mol_type = unassigned DNA; note = target_d2bddbc
  misc_feature 1..24: note = LF
  misc_feature 25: note = Core
  misc_feature 26..50: note = RF
ggccgtggccggcatcagaggcgccgatcggtgcgcggtggcggcaaccg

SEQ ID NO: 28582 - DNA, 50 bp, unidentified
  source 1..50: mol_type = unassigned DNA; note = target_d2c9cfb
  misc_feature 1..21: note = LF
  misc_feature 22..25: note = Core
  misc_feature 26..50: note = RF
atccggttgtggatgatctcgctcatggcgtcagggggtgcgttgcaggt

SEQ ID NO: 28583 - DNA, 50 bp, unidentified
  source 1..50: mol_type = unassigned DNA; note = target_d2ca2f9
  misc_feature 1..23: note = LF
  misc_feature 24..25: note = Core
  misc_feature 26..50: note = RF
ttcctttttcaaattcttacctcctatttctttacatttggcggaaaacc

SEQ ID NO: 28584 - DNA, 50 bp, unidentified; identical to SEQ ID NO: 22229
  source 1..50: mol_type = unassigned DNA; note = target_d2ca7f7
  misc_feature 1..23: note = LF
  misc_feature 24..25: note = Core
  misc_feature 26..50: note = RF

SEQ ID NO: 28585 - DNA, 50 bp, unidentified
  source 1..50: mol_type = unassigned DNA; note = target_d2ca942
  misc_feature 1..24: note = LF
  misc_feature 25: note = Core
  misc_feature 26..50: note = RF
cgggagccgagatggggcgtaccccactcccccgcgtttagctcgctgta

SEQ ID NO: 28586 - DNA, 50 bp, unidentified
  source 1..50: mol_type = unassigned DNA; note = target_d2cecf5
  misc_feature 1..23: note = LF
  misc_feature 24..25: note = Core
  misc_feature 26..50: note = RF
tctcgctggcggcgaagtcgaagctcgagacgctcgaaaaggagcatccc

SEQ ID NO: 28587 - DNA, 50 bp, unidentified
  source 1..50: mol_type = unassigned DNA; note = target_d2d1b49
  misc_feature 1..23: note = LF
  misc_feature 24..25: note = Core
  misc_feature 26..50: note = RF
cctacctcggaggctgtagccatctaacgcaatagctcagctgccggcac

SEQ ID NO: 28588 - DNA, 50 bp, unidentified
  source 1..50: mol_type = unassigned DNA; note = target_d2da9ed
  misc_feature 1..23: note = LF
  misc_feature 24..25: note = Core
  misc_feature 26..50: note = RF
ggacagcggtgccgggtcgggttctttcagttcgatgaagatgctgtggg

SEQ ID NO: 28589 - DNA, 50 bp, unidentified
  source 1..50: mol_type = unassigned DNA; note = target_d2dc662
  misc_feature 1..24: note = LF
  misc_feature 25: note = Core
  misc_feature 26..50: note = RF
gggcagtgctgcaagtaaaacagagaagcgtagcgtatcagagcggatcg

SEQ ID NO: 28590 - DNA, 50 bp, unidentified
  source 1..50: mol_type = unassigned DNA; note = target_d2e137e
  misc_feature 1..24: note = LF
  misc_feature 25: note = Core
  misc_feature 26..50: note = RF
cagcgagcggagcgagtgatttgaacaattgttatgctgcgcacgatgcc

SEQ ID NO: 28591 - DNA, 50 bp, unidentified
  source 1..50: mol_type = unassigned DNA; note = target_d2e3bbc
  misc_feature 1..23: note = LF
  misc_feature 24..25: note = Core
  misc_feature 26..50: note = RF
tatacgaaagttcagatttgtatctttgccatgccatatcagagttttgc

SEQ ID NO: 28592 - DNA, 50 bp, unidentified
  source 1..50: mol_type = unassigned DNA; note = target_d2e6c6a
  misc_feature 1..24: note = LF
  misc_feature 25: note = Core
  misc_feature 26..50: note = RF
cggcgctgatgaagttggagttgacccgcttcggtggacaggctagcgct

SEQ ID NO: 28593 - DNA, 50 bp, unidentified
  source 1..50: mol_type = unassigned DNA; note = target_d2eb8fd
  misc_feature 1..24: note = LF
  misc_feature 25: note = Core
  misc_feature 26..50: note = RF
gttgtaaatcgcaccgacaacaagtgccctctgagcgtggtatgaagaac

SEQ ID NO: 28594 - DNA, 50 bp, unidentified
  source 1..50: mol_type = unassigned DNA; note = target_d2f0016
  misc_feature 1..23: note = LF
  misc_feature 24..25: note = Core
  misc_feature 26..50: note = RF
cagtttcgaaatcttaacaacaaaggcaggacggaaatgccgatttcagt

SEQ ID NO: 28595 - DNA, 50 bp, unidentified
  source 1..50: mol_type = unassigned DNA; note = target_d2faf9e
  misc_feature 1..21: note = LF
  misc_feature 22..25: note = Core
  misc_feature 26..50: note = RF
agctcgaagagcagcggctcgctcacgccagcacctcgaggaagcgttcg

SEQ ID NO: 28596 - DNA, 50 bp, unidentified
  source 1..50: mol_type = unassigned DNA; note = target_d2fef68
  misc_feature 1..23: note = LF
  misc_feature 24..25: note = Core
  misc_feature 26..50: note = RF
gcctgtaaaagtggtcgttccagtgcccatgcgggatcggagaccggcac

SEQ ID NO: 28597 - DNA, 50 bp, unidentified
  source 1..50: mol_type = unassigned DNA; note = target_d303463
  misc_feature 1..22: note = LF
  misc_feature 23..25: note = Core
  misc_feature 26..50: note = RF
aggcgattttatacttcgacaagctcagtacatcgccacggctaactata

SEQ ID NO: 28598 - DNA, 50 bp, unidentified
  source 1..50: mol_type = unassigned DNA; note = target_d31b8c6
  misc_feature 1..24: note = LF
  misc_feature 25: note = Core
  misc_feature 26..50: note = RF
gtcactgccacaacctctctgcggcatgagcgtaaatcagtcgagctccg

SEQ ID NO: 28599 - DNA, 50 bp, unidentified
  source 1..50: mol_type = unassigned DNA; note = target_d32384e
  misc_feature 1..23: note = LF
  misc_feature 24..25: note = Core
  misc_feature 26..50: note = RF
ttttctactcatcaaaatcactccttcataaatttaatagacttcaccat

SEQ ID NO: 28600 - DNA, 50 bp, unidentified
  source 1..50: mol_type = unassigned DNA; note = target_d326399
  misc_feature 1..23: note = LF
  misc_feature 24..25: note = Core
  misc_feature 26..50: note = RF
cggaaatatacttatttcctctcctttctgtttttttctataaatctata

SEQ ID NO: 28601 - DNA, 50 bp, unidentified
  source 1..50: mol_type = unassigned DNA; note = target_d32a399
  misc_feature 1..23: note = LF
  misc_feature 24..25: note = Core
  misc_feature 26..50: note = RF
acgccacaacgatcggcaggcccctatggggacacgccctgtggctcggt

SEQ ID NO: 28602 - DNA, 50 bp, unidentified
  source 1..50: mol_type = unassigned DNA; note = target_d33b2e8
  misc_feature 1..24: note = LF
  misc_feature 25: note = Core
  misc_feature 26..50: note = RF
cagttttttccaatgaactcgtccttctaagtgtttcgggtagcagtgaa

SEQ ID NO: 28603 - DNA, 50 bp, unidentified
  source 1..50: mol_type = unassigned DNA; note = target_d33c7ae
  misc_feature 1..23: note = LF
  misc_feature 24..25: note = Core
  misc_feature 26..50: note = RF
ctgcaacaagctaagccaagggttgggtcccggcttcagccctcaacctt

SEQ ID NO: 28604 - DNA, 50 bp, unidentified
  source 1..50: mol_type = unassigned DNA; note = target_d340a5d
  misc_feature 1..22: note = LF
  misc_feature 23..25: note = Core
  misc_feature 26..50: note = RF
tttcctccatgattacgccccctttctctaaataatatgtacggactggt

SEQ ID NO: 28605 - DNA, 50 bp, unidentified
  source 1..50: mol_type = unassigned DNA; note = target_d350b1a
  misc_feature 1..22: note = LF
  misc_feature 23..25: note = Core
  misc_feature 26..50: note = RF
gtgactgtctgtttctcatatgtatatctccaatcataatcattatttct

SEQ ID NO: 28606 - DNA, 50 bp, unidentified
  source 1..50: mol_type = unassigned DNA; note = target_d353c5b
  misc_feature 1..24: note = LF
  misc_feature 25: note = Core
  misc_feature 26..50: note = RF
gcaagatccggactgaagcgtaagcgtccggccatcccactcttgaatct

SEQ ID NO: 28607 - DNA, 50 bp, unidentified
  source 1..50: mol_type = unassigned DNA; note = target_d35748c
  misc_feature 1..23: note = LF
  misc_feature 24..25: note = Core
  misc_feature 26..50: note = RF
ccggtacgagggcttccctccgccttgcgagccaccacgctgatccccgc

SEQ ID NO: 28608 - DNA, 50 bp, unidentified
  source 1..50: mol_type = unassigned DNA; note = target_d368059
  misc_feature 1..23: note = LF
  misc_feature 24..25: note = Core
  misc_feature 26..50: note = RF
caaaacgttccccctccttcatcctccccctcgtcgcggggggaggaaag

SEQ ID NO: 28609 - DNA, 50 bp, unidentified
  source 1..50: mol_type = unassigned DNA; note = target_d368f10
  misc_feature 1..23: note = LF
  misc_feature 24..25: note = Core
  misc_feature 26..50: note = RF
ggaaaaggtacgcaatgcataccctactttatttttcaggtaacggctga

SEQ ID NO: 28610 - DNA, 50 bp, unidentified
  source 1..50: mol_type = unassigned DNA; note = target_d36d837
  misc_feature 1..23: note = LF
  misc_feature 24..25: note = Core
  misc_feature 26..50: note = RF
ctgatgcgctacgcttatcaggcctacgcgtcccctgcaatattttgaat

SEQ ID NO: 28611 - DNA, 50 bp, unidentified
  source 1..50: mol_type = unassigned DNA; note = target_d36e7ae
  misc_feature 1..24: note = LF
  misc_feature 25: note = Core
  misc_feature 26..50: note = RF
gacgaagcagagatttcctgaaagcggacatcgacgccggtaggggctcg

SEQ ID NO: 28612 - DNA, 50 bp, unidentified
  source 1..50: mol_type = unassigned DNA; note = target_d3714f8
  misc_feature 1..24: note = LF
  misc_feature 25: note = Core
  misc_feature 26..50: note = RF
cgctgcgcagtaaatagccaaaagcggacatttcaatctagccgctacaa

SEQ ID NO: 28613 - DNA, 50 bp, unidentified
  source 1..50: mol_type = unassigned DNA; note = target_d383257
  misc_feature 1..23: note = LF
  misc_feature 24..25: note = Core
  misc_feature 26..50: note = RF
gacagcgaccgcaatctccgtttttttatatcctccgccagttcgagggc

SEQ ID NO: 28614 - DNA, 50 bp, unidentified
  source 1..50: mol_type = unassigned DNA; note = target_d3868d5
  misc_feature 1..23: note = LF
  misc_feature 24..25: note = Core
  misc_feature 26..50: note = RF
tttgcggctcatgttttctcctcctttaccagccgaattttccattgacc

SEQ ID NO: 28615 - DNA, 50 bp, unidentified
  source 1..50: mol_type = unassigned DNA; note = target_d38f0c2
  misc_feature 1..24: note = LF
  misc_feature 25: note = Core
  misc_feature 26..50: note = RF
cgcgttgctcggcatccctctcttccgcaagcgggaaagagggacgagaa

SEQ ID NO: 28616 - DNA, 50 bp, unidentified
  source 1..50: mol_type = unassigned DNA; note = target_d391fa4
  misc_feature 1..24: note = LF
  misc_feature 25: note = Core
  misc_feature 26..50: note = RF
agcgctaactggtgagatggggatttatcaacagttacattctgctgaga

SEQ ID NO: 28617 - DNA, 50 bp, unidentified
  source 1..50: mol_type = unassigned DNA; note = target_d39568d
  misc_feature 1..22: note = LF
  misc_feature 23..25: note = Core
  misc_feature 26..50: note = RF
gcagcccatcgccggcaagccggctcccacatgaactgcgtaggcttcaa

SEQ ID NO: 28618 - DNA, 50 bp, unidentified
  source 1..50: mol_type = unassigned DNA; note = target_d397af1
  misc_feature 1..24: note = LF
  misc_feature 25: note = Core
  misc_feature 26..50: note = RF
ttttgctgcggtgcgttagtccgcttttggcacaaagcggacataccaac

SEQ ID NO: 28619 - DNA, 50 bp, unidentified
  source 1..50: mol_type = unassigned DNA; note = target_d398bc5
  misc_feature 1..24: note = LF
  misc_feature 25: note = Core
  misc_feature 26..50: note = RF
gtctttgtgggcgccctgacgcggcgaatagacgcaggggccgtagaccg

SEQ ID NO: 28620 - DNA, 50 bp, unidentified
  source 1..50: mol_type = unassigned DNA; note = target_d3a114f
  misc_feature 1..24: note = LF
  misc_feature 25: note = Core
  misc_feature 26..50: note = RF
atgaccgaacgggcgtcatcgcggcagatgaacgcgcttcgacgcgcacg

SEQ ID NO: 28621 - DNA, 50 bp, unidentified
  source 1..50: mol_type = unassigned DNA; note = target_d3b2771
  misc_feature 1..23: note = LF
  misc_feature 24..25: note = Core
  misc_feature 26..50: note = RF
atcagtgatggagctgaaaacgctcactgagcggtgtgcaccttcacgat

SEQ ID NO: 28622 - DNA, 50 bp, unidentified
  source 1..50: mol_type = unassigned DNA; note = target_d3b3e38
  misc_feature 1..24: note = LF
  misc_feature 25: note = Core
  misc_feature 26..50: note = RF
tgaagggctgctttcggccataagcggacattaagagtgacccccgattt

SEQ ID NO: 28623 - DNA, 50 bp, unidentified
  source 1..50: mol_type = unassigned DNA; note = target_d3b89cf
  misc_feature 1..23: note = LF
  misc_feature 24..25: note = Core
  misc_feature 26..50: note = RF
ggctgctgtgacggttagggtcgagatgcacgtgctcgtcggcatcctca

SEQ ID NO: 28624 - DNA, 50 bp, unidentified
  source 1..50: mol_type = unassigned DNA; note = target_d3c4cae
  misc_feature 1..24: note = LF
  misc_feature 25: note = Core
  misc_feature 26..50: note = RF
gaaaacgaagatttaagtttactctgaccccagttattgccaaaccttga

SEQ ID NO: 28625 - DNA, 50 bp, unidentified
  source 1..50: mol_type = unassigned DNA; note = target_d3c5a14
  misc_feature 1..23: note = LF
  misc_feature 24..25: note = Core
  misc_feature 26..50: note = RF
ctttctcctgctcatatcgtttcctttcttattcagcttactgcagtttc

SEQ ID NO: 28626 - DNA, 50 bp, unidentified
  source 1..50: mol_type = unassigned DNA; note = target_d3ccea1
  misc_feature 1..23: note = LF
  misc_feature 24..25: note = Core
  misc_feature 26..50: note = RF
ttaatcagcattttcatcgcttcctttccttatgcatctggcaaacggac

SEQ ID NO: 28627 - DNA, 50 bp, unidentified
  source 1..50: mol_type = unassigned DNA; note = target_d3d883e
  misc_feature 1..21: note = LF
  misc_feature 22..25: note = Core
  misc_feature 26..50: note = RF
ttcgcggcggctgttatgcggctcatgcgagaagcggttcgggcaccgtc

SEQ ID NO: 28628 - DNA, 50 bp, unidentified
  source 1..50: mol_type = unassigned DNA; note = target_d3e0fb0
  misc_feature 1..23: note = LF
  misc_feature 24..25: note = Core
  misc_feature 26..50: note = RF
agcggtagtggatgacatccatcctgacgccagcgcccagaaaggccctt

SEQ ID NO: 28629 - DNA, 50 bp, unidentified
  source 1..50: mol_type = unassigned DNA; note = target_d3ed602
  misc_feature 1..23: note = LF
  misc_feature 24..25: note = Core
  misc_feature 26..50: note = RF
gccaccggccccggcccaacacccttttccaagtcttttgagtgttcgga

SEQ ID NO: 28630 - DNA, 50 bp, unidentified
  source 1..50: mol_type = unassigned DNA; note = target_d3efe78
  misc_feature 1..24: note = LF
  misc_feature 25: note = Core
  misc_feature 26..50: note = RF
ctcacatccgctttgagtcgaaagcggacgttagaaattacgacttttgc

SEQ ID NO: 28631 - DNA, 50 bp, unidentified
  source 1..50: mol_type = unassigned DNA; note = target_d3f05cb
  misc_feature 1..23: note = LF
  misc_feature 24..25: note = Core
  misc_feature 26..50: note = RF
atttcataaaaatgcacttcctttcgttataccggcttcaccatagtatc

SEQ ID NO: 28632 - DNA, 50 bp, unidentified
  source 1..50: mol_type = unassigned DNA; note = target_d3f1d1f
  misc_feature 1..23: note = LF
  misc_feature 24..25: note = Core
  misc_feature 26..50: note = RF
agggtaaaaacaactttcagttaattcctaaccatgaaccatttcggata

SEQ ID NO: 28633 - DNA, 50 bp, unidentified
  source 1..50: mol_type = unassigned DNA; note = target_d3f5808
  misc_feature 1..23: note = LF
  misc_feature 24..25: note = Core
  misc_feature 26..50: note = RF
atctgacccctttgtcgcttggcagttaaacgtaagaatgcgccggttct

SEQ ID NO: 28634 - DNA, 50 bp, unidentified
  source 1..50: mol_type = unassigned DNA; note = target_d3f991c
  misc_feature 1..23: note = LF
  misc_feature 24..25: note = Core
  misc_feature 26..50: note = RF
gcgccatccccgaaagcgaacggctcagaacctgtgaatgaatccgacgc

SEQ ID NO: 28635 - DNA, 50 bp, unidentified
  source 1..50: mol_type = unassigned DNA; note = target_d3fe464
  misc_feature 1..23: note = LF
  misc_feature 24..25: note = Core
  misc_feature 26..50: note = RF
tggttcgccgagcacctgacgccctagttcgccgggcgcttaggagtcct

SEQ ID NO: 28636 - DNA, 50 bp, unidentified
  source 1..50: mol_type = unassigned DNA; note = target_d40940d
  misc_feature 1..23: note = LF
  misc_feature 24..25: note = Core
  misc_feature 26..50: note = RF
tggacagaaaaacgctgtccaccctacaggatctgctgctcagtcgagct

SEQ ID NO: 28637 - DNA, 50 bp, unidentified
  source 1..50: mol_type = unassigned DNA; note = target_d40c2c7
  misc_feature 1..24: note = LF
  misc_feature 25: note = Core
  misc_feature 26..50: note = RF
gagatttgtcctgtgacagttggctaatcgtcatcaaccggacccgataa

SEQ ID NO: 28638 - DNA, 50 bp, unidentified
  source 1..50: mol_type = unassigned DNA; note = target_d4124eb
  misc_feature 1..24: note = LF
  misc_feature 25: note = Core
  misc_feature 26..50: note = RF
attgcaatttcatctcatctctcctgcttatatgtgctctcacaagtaga

SEQ ID NO: 28639 - DNA, 50 bp, unidentified
  source 1..50: mol_type = unassigned DNA; note = target_d4133d3
  misc_feature 1..23: note = LF
  misc_feature 24..25: note = Core
  misc_feature 26..50: note = RF
tcaacgtacctcagagggtacgcctcggcccttcactcgctgcggccttg

SEQ ID NO: 28640 - DNA, 50 bp, unidentified
  source 1..50: mol_type = unassigned DNA; note = target_d416370
  misc_feature 1..24: note = LF
  misc_feature 25: note = Core
  misc_feature 26..50: note = RF
cttgcacaaagcctgactcaggagagacataaatggacacattcatgcaa

SEQ ID NO: 28641 - DNA, 50 bp, unidentified
  source 1..50: mol_type = unassigned DNA; note = target_d41b4cf
  misc_feature 1..22: note = LF
  misc_feature 23..25: note = Core
  misc_feature 26..50: note = RF
gtcataataacgtttaaaccgcctttcatgatacgtttgttcatactcac

SEQ ID NO: 28642 - DNA, 50 bp, unidentified
  source 1..50: mol_type = unassigned DNA; note = target_d422812
  misc_feature 1..21: note = LF
  misc_feature 22..25: note = Core
  misc_feature 26..50: note = RF
taaataaaccttcttcatttttcacctcattttaattatatgaaataaaa

SEQ ID NO: 28643 - DNA, 50 bp, unidentified
  source 1..50: mol_type = unassigned DNA; note = target_d42bf61
  misc_feature 1..23: note = LF
  misc_feature 24..25: note = Core
  misc_feature 26..50: note = RF
cgcagcacggtacaaaagcatgtgatgcctctggtgggggacgggggttt

SEQ ID NO: 28644 - DNA, 50 bp, unidentified
  source 1..50: mol_type = unassigned DNA; note = target_d451c4c
  misc_feature 1..22: note = LF
  misc_feature 23..25: note = Core
  misc_feature 26..50: note = RF
actgtgaaatttaacatacaagtctcctttcggattagatatttcatcat

SEQ ID NO: 28645 - DNA, 50 bp, unidentified
  source 1..50: mol_type = unassigned DNA; note = target_d451d30
  misc_feature 1..24: note = LF
  misc_feature 25: note = Core
  misc_feature 26..50: note = RF
ggatcaagactgcgcaactcgcggcgaagtgacgcaagctatgcagggaa

SEQ ID NO: 28646 - DNA, 50 bp, unidentified
  source 1..50: mol_type = unassigned DNA; note = target_d461da6
  misc_feature 1..23: note = LF
  misc_feature 24..25: note = Core
  misc_feature 26..50: note = RF
cctgactccgtggctgggctgagaggattcgaacctccagatggcgtttt

SEQ ID NO: 28647 - DNA, 50 bp, unidentified
  source 1..50: mol_type = unassigned DNA; note = target_d4644ea
  misc_feature 1..23: note = LF
  misc_feature 24..25: note = Core
  misc_feature 26..50: note = RF
ttcgccaaaccactccctgtggctgggtcccggatctgcgcttcgcttgt

SEQ ID NO: 28648 - DNA, 50 bp, unidentified
  source 1..50: mol_type = unassigned DNA; note = target_d468f00
  misc_feature 1..23: note = LF
  misc_feature 24..25: note = Core
  misc_feature 26..50: note = RF
cgatgatcgagaacagcgataactggtctgtcctcacacggcaaacgagg

SEQ ID NO: 28649 - DNA, 50 bp, unidentified
  source 1..50: mol_type = unassigned DNA; note = target_d46f21b
  misc_feature 1..23: note = LF
  misc_feature 24..25: note = Core
  misc_feature 26..50: note = RF
gtcgctacgcgcctttgcccaccctacaagaacaattcctgggagagaaa

SEQ ID NO: 28650 - DNA, 50 bp, unidentified
  source 1..50: mol_type = unassigned DNA; note = target_d46f78a
  misc_feature 1..24: note = LF
  misc_feature 25: note = Core
  misc_feature 26..50: note = RF
ctccggaatgcccaattcaagacctgagcccagccttgttgtgaaccgtc

SEQ ID NO: 28651 - DNA, 50 bp, unidentified
  source 1..50: mol_type = unassigned DNA; note = target_d4773fc
  misc_feature 1..22: note = LF
  misc_feature 23..25: note = Core
  misc_feature 26..50: note = RF
agatgcagccctattactttgctttacagcggtgcgtttttggaatgaaa

SEQ ID NO: 28652 - DNA, 50 bp, unidentified
  source 1..50: mol_type = unassigned DNA; note = target_d4843b4
  misc_feature 1..23: note = LF
  misc_feature 24..25: note = Core
  misc_feature 26..50: note = RF
cgcgtgggcacaggtgcccaccctactcgactgatttgatggcgatggtc

SEQ ID NO: 28653 - DNA, 50 bp, unidentified
  source 1..50: mol_type = unassigned DNA; note = target_d485c6e
  misc_feature 1..23: note = LF
  misc_feature 24..25: note = Core
  misc_feature 26..50: note = RF
actttagtccttgaaacgcgcaactaatcttatagaaaaccgttatgtgc

SEQ ID NO: 28654 - DNA, 50 bp, unidentified
  source 1..50: mol_type = unassigned DNA; note = target_d487a0d
  misc_feature 1..23: note = LF
  misc_feature 24..25: note = Core
  misc_feature 26..50: note = RF
gatcgccgcccggaccaagcccgctcccacattggaatgcatttcaaatg

SEQ ID NO: 28655 - DNA, 50 bp, unidentified
  source 1..50: mol_type = unassigned DNA; note = target_d488d05
  misc_feature 1..23: note = LF
  misc_feature 24..25: note = Core
  misc_feature 26..50: note = RF
ctgctttggtcattttatcatctctttcataaacggtcagcgttggcgac

SEQ ID NO: 28656 - DNA, 50 bp, unidentified
  source 1..50: mol_type = unassigned DNA; note = target_d48a236
  misc_feature 1..23: note = LF
  misc_feature 24..25: note = Core
  misc_feature 26..50: note = RF
gaagtcgaagcaacggcccggggtcagaccttcaatcttcggctcatcca

SEQ ID NO: 28657 - DNA, 50 bp, unidentified
  source 1..50: mol_type = unassigned DNA; note = target_d498aaa
  misc_feature 1..23: note = LF
  misc_feature 24..25: note = Core
  misc_feature 26..50: note = RF
attttaatcatttgtataacctcctttgttttatgccgtcgtgctgccga

SEQ ID NO: 28658 - DNA, 50 bp, unidentified
  source 1..50: mol_type = unassigned DNA; note = target_d4a47c8
  misc_feature 1..23: note = LF
  misc_feature 24..25: note = Core
  misc_feature 26..50: note = RF
taaaatcatggcattgcatccagaggttggatatcaggcccacctcctcc

SEQ ID NO: 28659 - DNA, 50 bp, unidentified
  source 1..50: mol_type = unassigned DNA; note = target_d4ab020
  misc_feature 1..23: note = LF
  misc_feature 24..25: note = Core
  misc_feature 26..50: note = RF
ccgttcggatgaccgaaactgggtgggaagcggtcgtttagtcaatcgac

SEQ ID NO: 28660 - DNA, 50 bp, unidentified
  source 1..50: mol_type = unassigned DNA; note = target_d4af53a
  misc_feature 1..24: note = LF
  misc_feature 25: note = Core
  misc_feature 26..50: note = RF
ggacccctgccgcactgtcatcggcagatccggtcggcgcgtcaccggca

SEQ ID NO: 28661 - DNA, 50 bp, unidentified
  source 1..50: mol_type = unassigned DNA; note = target_d4b3cf9
  misc_feature 1..24: note = LF
  misc_feature 25: note = Core
  misc_feature 26..50: note = RF
aactagtaccattccatatcctccttttatttctcgttttttaatctttc

SEQ ID NO: 28662 - DNA, 50 bp, unidentified
  source 1..50: mol_type = unassigned DNA; note = target_d4b5a54
  misc_feature 1..21: note = LF
  misc_feature 22..25: note = Core
  misc_feature 26..50: note = RF
ataggttttcgcatcattctctcacctccgctcagtctttgattccggcg

SEQ ID NO: 28663 - DNA, 50 bp, unidentified
  source 1..50: mol_type = unassigned DNA; note = target_d4bc75f
  misc_feature 1..23: note = LF
  misc_feature 24..25: note = Core
  misc_feature 26..50: note = RF
cgaatccgattaggggcgacacgctctaggcgtcgtcttcatttggggga

SEQ ID NO: 28664 - DNA, 50 bp, unidentified
  source 1..50: mol_type = unassigned DNA; note = target_d4bcdbd
  misc_feature 1..23: note = LF
  misc_feature 24..25: note = Core
  misc_feature 26..50: note = RF
gaccatccacctagagttcaacgagcgcttcatctcgtccgaactttaca

SEQ ID NO: 28665 - DNA, 50 bp, unidentified
  source 1..50: mol_type = unassigned DNA; note = target_d4c0efe
  misc_feature 1..24: note = LF
  misc_feature 25: note = Core
  misc_feature 26..50: note = RF
ccctccactaggagaggctctatttttatgttctgaaatccagtggacac

SEQ ID NO: 28666 - DNA, 50 bp, unidentified
  source 1..50: mol_type = unassigned DNA; note = target_d4c3533
  misc_feature 1..24: note = LF
  misc_feature 25: note = Core
  misc_feature 26..50: note = RF
gcaacgcggcagtaacgagaacaccaacgggctgctgcgccaatactttg

SEQ ID NO: 28667 - DNA, 50 bp, unidentified
  source 1..50: mol_type = unassigned DNA; note = target_d4e92fb
  misc_feature 1..24: note = LF
  misc_feature 25: note = Core
  misc_feature 26..50: note = RF
caggcataccagagccagcgttgattttcttgttccccccaaacgaccat

SEQ ID NO: 28668 - DNA, 50 bp, unidentified
  source 1..50: mol_type = unassigned DNA; note = target_d50722e
  misc_feature 1..21: note = LF
  misc_feature 22..25: note = Core
  misc_feature 26..50: note = RF
cgctgacgcggcctgcccgggatgacagttgaggggaggggagaacgccg

SEQ ID NO: 28669 - DNA, 50 bp, unidentified
  source 1..50: mol_type = unassigned DNA; note = target_d508af7
  misc_feature 1..23: note = LF
  misc_feature 24..25: note = Core
  misc_feature 26..50: note = RF
agaagctcgcagaaccgcaatactgggacaaggcgagcgaccgtctgatg

SEQ ID NO: 28670 - DNA, 50 bp, unidentified
  source 1..50: mol_type = unassigned DNA; note = target_d510288
  misc_feature 1..24: note = LF
  misc_feature 25: note = Core
  misc_feature 26..50: note = RF
cacgaggccgggccgcgtccgccccacccccaggatcacccggctcctgc

SEQ ID NO: 28671 - DNA, 50 bp, unidentified
  source 1..50: mol_type = unassigned DNA; note = target_d51cd95
  misc_feature 1..24: note = LF
  misc_feature 25: note = Core
  misc_feature 26..50: note = RF
ttttgctgcggcgcataagtctcttgttggcaccttgctggattgccggt

SEQ ID NO: 28672 - DNA, 50 bp, unidentified
  source 1..50: mol_type = unassigned DNA; note = target_d524864
  misc_feature 1..23: note = LF
  misc_feature 24..25: note = Core
  misc_feature 26..50: note = RF
aagcagacaaagcctcatcatatttccgctatgctcagactccgacgcgg

SEQ ID NO: 28673 - DNA, 50 bp, unidentified
  source 1..50: mol_type = unassigned DNA; note = target_d526b78
  misc_feature 1..21: note = LF
  misc_feature 22..25: note = Core
  misc_feature 26..50: note = RF
ctccatcatcggggggcctcgccccccagcagcaccacgcacgacaccca

SEQ ID NO: 28674 - DNA, 50 bp, unidentified
  source 1..50: mol_type = unassigned DNA; note = target_d52e48d
  misc_feature 1..23: note = LF
  misc_feature 24..25: note = Core
  misc_feature 26..50: note = RF
ccgtggtaagcatttcattacacctcctgattttaatttttcttgccgaa

SEQ ID NO: 28675 - DNA, 50 bp, unidentified
  source 1..50: mol_type = unassigned DNA; note = target_d5312e9
  misc_feature 1..23: note = LF
  misc_feature 24..25: note = Core
  misc_feature 26..50: note = RF
gtgacgacaacgccgcgatcaacctcgcacgcgtcgagccggacccggcg

SEQ ID NO: 28676 - DNA, 50 bp, unidentified
  source 1..50: mol_type = unassigned DNA; note = target_d53244e
  misc_feature 1..23: note = LF
  misc_feature 24..25: note = Core
  misc_feature 26..50: note = RF
atcggcatcggcagctccatatcagtcagcatggacgcactgagccgaac

SEQ ID NO: 28677 - DNA, 50 bp, unidentified
  source 1..50: mol_type = unassigned DNA; note = target_d543779
  misc_feature 1..23: note = LF
  misc_feature 24..25: note = Core
  misc_feature 26..50: note = RF
tacatccgccgcggcgtatgggtccggcctgcgccgggacgacggcttgt

SEQ ID NO: 28678 - DNA, 50 bp, unidentified
  source 1..50: mol_type = unassigned DNA; note = target_d544a66
  misc_feature 1..23: note = LF
  misc_feature 24..25: note = Core
  misc_feature 26..50: note = RF
gaaataggcttagcgtaggatatttccgttttctgagacgaccccagaag

SEQ ID NO: 28679 - DNA, 50 bp, unidentified
  source 1..50: mol_type = unassigned DNA; note = target_d546cbf
  misc_feature 1..23: note = LF
  misc_feature 24..25: note = Core
  misc_feature 26..50: note = RF
ccgttcgagggctgcctgtgacgtgctccccaaaaatcgaggccatttaa

SEQ ID NO: 28680 - DNA, 50 bp, unidentified
  source 1..50: mol_type = unassigned DNA; note = target_d54b98e
  misc_feature 1..23: note = LF
  misc_feature 24..25: note = Core
  misc_feature 26..50: note = RF
ggcgctatgcgcctttgcccaccctacgaagctgcccgcttcttccttgc

SEQ ID NO: 28681 - DNA, 50 bp, unidentified
  source 1..50: mol_type = unassigned DNA; note = target_d558dae
  misc_feature 1..23: note = LF
  misc_feature 24..25: note = Core
  misc_feature 26..50: note = RF
ttgatcctgaatgagtccggttttggcacatctgcgacatcagcaatgga

SEQ ID NO: 28682 - DNA, 50 bp, unidentified
  source 1..50: mol_type = unassigned DNA; note = target_d561c05
  misc_feature 1..19: note = LF
  misc_feature 20..25: note = Core
  misc_feature 26..50: note = RF
attttaacgttctatatgggctttttttgtatcgaaaaagtttcgcaatc

SEQ ID NO: 28683 - DNA, 50 bp, unidentified
  source 1..50: mol_type = unassigned DNA; note = target_d5659e4
  misc_feature 1..24: note = LF
  misc_feature 25: note = Core
  misc_feature 26..50: note = RF
acacaattctgactcgtgcagaggtttcctaagaaatccacttatatgaa

SEQ ID NO: 28684 - DNA, 50 bp, unidentified
  source 1..50: mol_type = unassigned DNA; note = target_d569451
  misc_feature 1..23: note = LF
  misc_feature 24..25: note = Core
  misc_feature 26..50: note = RF
acggcatcgaaattcgtggctatctaacgccgaagttgacctgcgagcga

SEQ ID NO: 28685 - DNA, 50 bp, unidentified
  source 1..50: mol_type = unassigned DNA; note = target_d56c257
  misc_feature 1..24: note = LF
  misc_feature 25: note = Core
  misc_feature 26..50: note = RF
cgagaggcgcgacgcgacccaaagcggactttcaacgttcaatcgcaccg

SEQ ID NO: 28686 - DNA, 50 bp, unidentified
  source 1..50: mol_type = unassigned DNA; note = target_d572118
  misc_feature 1..23: note = LF
  misc_feature 24..25: note = Core
  misc_feature 26..50: note = RF
taccctgccgggccggcggccctctggacattggcgacaacaattcccca

SEQ ID NO: 28687 - DNA, 50 bp, unidentified
  source 1..50: mol_type = unassigned DNA; note = target_d574801
  misc_feature 1..23: note = LF
  misc_feature 24..25: note = Core
  misc_feature 26..50: note = RF
actcggactgagttccattcaagtgatctactattctgagaagttattta

SEQ ID NO: 28688 - DNA, 50 bp, unidentified
  source 1..50: mol_type = unassigned DNA; note = target_d578bc0
  misc_feature 1..23: note = LF
  misc_feature 24..25: note = Core
  misc_feature 26..50: note = RF
gtattcgtcgctttcggcgccaccttctcctttcggagcaaggttaacac

SEQ ID NO: 28689 - DNA, 50 bp, unidentified
  source 1..50: mol_type = unassigned DNA; note = target_d57a8ff
  misc_feature 1..24: note = LF
  misc_feature 25: note = Core
  misc_feature 26..50: note = RF
ccctcgggcacatccctgaagtgccgcattgggtcggtctgggctcagcc

SEQ ID NO: 28690 - DNA, 50 bp, unidentified
  source 1..50: mol_type = unassigned DNA; note = target_d5a6709
  misc_feature 1..24: note = LF
  misc_feature 25: note = Core
  misc_feature 26..50: note = RF
tgattgatgcccggaggcgttgattttgcatgggctggttgttgtccaga

SEQ ID NO: 28691 - DNA, 50 bp, unidentified
  source 1..50: mol_type = unassigned DNA; note = target_d5ac63d
  misc_feature 1..24: note = LF
  misc_feature 25: note = Core
  misc_feature 26..50: note = RF
cctccacgtttcccaaaacaccgttttgcgggcgtttgaacgcgctgccg

SEQ ID NO: 28692 - DNA, 50 bp, unidentified
  source 1..50: mol_type = unassigned DNA; note = target_d5afd73
  misc_feature 1..24: note = LF
  misc_feature 25: note = Core
  misc_feature 26..50: note = RF
aaacgtacagttacgcacagcccccaccccccaatacccccttgatttaa

SEQ ID NO: 28693 - DNA, 50 bp, unidentified
  source 1..50: mol_type = unassigned DNA; note = target_d5b1927
  misc_feature 1..22: note = LF
  misc_feature 23..25: note = Core
  misc_feature 26..50: note = RF
ctgttcaggcggcgctttgctaaacctcctgcggctgccctcttaaccgg

SEQ ID NO: 28694 - DNA, 50 bp, unidentified
  source 1..50: mol_type = unassigned DNA; note = target_d5bf094
  misc_feature 1..24: note = LF
  misc_feature 25: note = Core
  misc_feature 26..50: note = RF
tcgcctcagcgcgggccgggccactttttgaagccacgtcctgcaggatc

SEQ ID NO: 28695 - DNA, 50 bp, unidentified
  source 1..50: mol_type = unassigned DNA; note = target_d5d296c
  misc_feature 1..23: note = LF
  misc_feature 24..25: note = Core
  misc_feature 26..50: note = RF
ctgaagcctcccaagcgggaggctttttatgcataaatgcccgtcatact

SEQ ID NO: 28696 - DNA, 50 bp, unidentified
  source 1..50: mol_type = unassigned DNA; note = target_d5d778e
  misc_feature 1..24: note = LF
  misc_feature 25: note = Core
  misc_feature 26..50: note = RF
taattgttccatttaagcgcccgataacagtaaaaagcaaaaaacagccc

SEQ ID NO: 28697 - DNA, 50 bp, unidentified
  source 1..50: mol_type = unassigned DNA; note = target_d5dd374
  misc_feature 1..23: note = LF
  misc_feature 24..25: note = Core
  misc_feature 26..50: note = RF
cagctcttgggcatctgtaaccttgttgcatggaggcttttcgaggcgtg

SEQ ID NO: 28698 - DNA, 50 bp, unidentified
  source 1..50: mol_type = unassigned DNA; note = target_d5de197
  misc_feature 1..21: note = LF
  misc_feature 22..25: note = Core
  misc_feature 26..50: note = RF
aagcgctggcgttgtatcacaccaaacggctggcctccccggggcagcga

SEQ ID NO: 28699 - DNA, 50 bp, unidentified
  source 1..50: mol_type = unassigned DNA; note = target_d5f781e
  misc_feature 1..22: note = LF
  misc_feature 23..25: note = Core
  misc_feature 26..50: note = RF
gctgtgaaccggcatgcaattttgacccccgcattgcctcatcgagaatg

SEQ ID NO: 28700 - DNA, 50 bp, unidentified
  source 1..50: mol_type = unassigned DNA; note = target_d605496
  misc_feature 1..24: note = LF
  misc_feature 25: note = Core
  misc_feature 26..50: note = RF
gacagtccgcatctggacccggagcggccgtaccgggcggtccatggccg

SEQ ID NO: 28701 - DNA, 50 bp, unidentified
  source 1..50: mol_type = unassigned DNA; note = target_d607358
  misc_feature 1..23: note = LF
  misc_feature 24..25: note = Core
  misc_feature 26..50: note = RF
gacagtacgcgccctaacccaccctacgattaatgtccgcttgaatgccg

SEQ ID NO: 28702 - DNA, 50 bp, unidentified
  source 1..50: mol_type = unassigned DNA; note = target_d60840f
  misc_feature 1..21: note = LF
  misc_feature 22..25: note = Core
  misc_feature 26..50: note = RF
ctccgcgagatccgccgatgcctcaagcgatacctagcccgacagatcta

SEQ ID NO: 28703 - DNA, 50 bp, unidentified
  source 1..50: mol_type = unassigned DNA; note = target_d613fab
  misc_feature 1..24: note = LF
  misc_feature 25: note = Core
  misc_feature 26..50: note = RF
gaaagacgtaaaatccgtcatccatgacacgctcggccagcgcaattacg

SEQ ID NO: 28704 - DNA, 50 bp, unidentified
  source 1..50: mol_type = unassigned DNA; note = target_d61b1df
  misc_feature 1..24: note = LF
  misc_feature 25: note = Core
  misc_feature 26..50: note = RF
gctgcaccaggatcgccgtcgcggcgaagtgacgcttgtcgcggaacgac

SEQ ID NO: 28705 - DNA, 50 bp, unidentified
  source 1..50: mol_type = unassigned DNA; note = target_d61f085
  misc_feature 1..23: note = LF
  misc_feature 24..25: note = Core
  misc_feature 26..50: note = RF
cagcctcgcgggctcggcagctgctacaaaaaagtgtcgcggctgaaatt

SEQ ID NO: 28706 - DNA, 50 bp, unidentified
  source 1..50: mol_type = unassigned DNA; note = target_d629fb7
  misc_feature 1..23: note = LF
  misc_feature 24..25: note = Core
  misc_feature 26..50: note = RF
ttgtcctttgtccggctcatgcggcctcctcgtcccgccggacgtgcttg

SEQ ID NO: 28707 - DNA, 50 bp, unidentified
  source 1..50: mol_type = unassigned DNA; note = target_d62c74d
  misc_feature 1..24: note = LF
  misc_feature 25: note = Core
  misc_feature 26..50: note = RF
gcgcttccgaccaggcctcatagctttcggcggatcacgtcctgcagcat

SEQ ID NO: 28708 - DNA, 50 bp, unidentified
  source 1..50: mol_type = unassigned DNA; note = target_d62f203
  misc_feature 1..22: note = LF
  misc_feature 23..25: note = Core
  misc_feature 26..50: note = RF
tccaatcgggatctaaatcgtgagaggacggtcctcctgataaccacata

SEQ ID NO: 28709 - DNA, 50 bp, unidentified
  source 1..50: mol_type = unassigned DNA; note = target_d632b63
  misc_feature 1..23: note = LF
  misc_feature 24..25: note = Core
  misc_feature 26..50: note = RF
cgccgtcttcgcgagcaagctcgctcccacagtttgtctggggctaggca

SEQ ID NO: 28710 - DNA, 50 bp, unidentified
  source 1..50: mol_type = unassigned DNA; note = target_d63bb23
  misc_feature 1..24: note = LF
  misc_feature 25: note = Core
  misc_feature 26..50: note = RF
gttgttaacttcgccagactcgcgtttactctcggattttgggcagcaat

SEQ ID NO: 28711 - DNA, 50 bp, unidentified
  source 1..50: mol_type = unassigned DNA; note = target_d63c97f
  misc_feature 1..21: note = LF
  misc_feature 22..25: note = Core
  misc_feature 26..50: note = RF
ctcgacgagcggcgccttcggccccccaggtcaaagtgcagcatgtccca

SEQ ID NO: 28712 - DNA, 50 bp, unidentified
  source 1..50: mol_type = unassigned DNA; note = target_d64493f
  misc_feature 1..22: note = LF
  misc_feature 23..25: note = Core
  misc_feature 26..50: note = RF
ttgagccgctttcttttgcctacttttctttgcggctgcaaagaaaagta

SEQ ID NO: 28713 - DNA, 50 bp, unidentified
  source 1..50: mol_type = unassigned DNA; note = target_d644985
  misc_feature 1..24: note = LF
  misc_feature 25: note = Core
  misc_feature 26..50: note = RF
ttacgaatttcaaattaggaattacgaatgtttgcctacggcattaggta

SEQ ID NO: 28714 - DNA, 50 bp, unidentified
  source 1..50: mol_type = unassigned DNA; note = target_d6507dd
  misc_feature 1..22: note = LF
  misc_feature 23..25: note = Core
  misc_feature 26..50: note = RF
aagccgttcgttaagcggcagaagaacgatgccgccgacgcggaagcgat

SEQ ID NO: 28715 - DNA, 50 bp, unidentified
  source 1..50: mol_type = unassigned DNA; note = target_d65ee61
  misc_feature 1..21: note = LF
  misc_feature 22..25: note = Core
  misc_feature 26..50: note = RF
atctcactgtcgaacggtgtggtcatcgcgggtccttccggccttggtgg

SEQ ID NO: 28716 - DNA, 50 bp, unidentified
  source 1..50: mol_type = unassigned DNA; note = target_d662f1f
  misc_feature 1..24: note = LF
  misc_feature 25: note = Core
  misc_feature 26..50: note = RF
cgaacttccgctttcggccagaagcggacatgcgtgatgaaatcaagggg

SEQ ID NO: 28717 - DNA, 50 bp, unidentified
  source 1..50: mol_type = unassigned DNA; note = target_d665eb2
  misc_feature 1..23: note = LF
  misc_feature 24..25: note = Core
  misc_feature 26..50: note = RF
cacgaagacgcaaagcattgcgtctctacaggttataaattgtttaaata

SEQ ID NO: 28718 - DNA, 50 bp, unidentified
  source 1..50: mol_type = unassigned DNA; note = target_d66b60e
  misc_feature 1..24: note = LF
  misc_feature 25: note = Core
  misc_feature 26..50: note = RF
taaacttccgcgagttaaagtaacgccctgttaaagggtgagcgacgcaa

SEQ ID NO: 28719 - DNA, 50 bp, unidentified
  source 1..50: mol_type = unassigned DNA; note = target_d675079
  misc_feature 1..23: note = LF
  misc_feature 24..25: note = Core
  misc_feature 26..50: note = RF
atccctgtgctcgtcacaggaatccagccagcccaagtctttgggatgaa

SEQ ID NO: 28720 - DNA, 50 bp, unidentified
  source 1..50: mol_type = unassigned DNA; note = target_d677e14
  misc_feature 1..23: note = LF
  misc_feature 24..25: note = Core
  misc_feature 26..50: note = RF
cgcggcccaatggcggctaagcggactgcttctgacaatgcttcaatcac

SEQ ID NO: 28721 - DNA, 50 bp, unidentified
  source 1..50: mol_type = unassigned DNA; note = target_d6792c0
  misc_feature 1..23: note = LF
  misc_feature 24..25: note = Core
  misc_feature 26..50: note = RF
gaaaacggcccacagggccgtggctacaaggactgacctcgcttcagcct

SEQ ID NO: 28722 - DNA, 50 bp, unidentified
  source 1..50: mol_type = unassigned DNA; note = target_d67d97e
  misc_feature 1..23: note = LF
  misc_feature 24..25: note = Core
  misc_feature 26..50: note = RF
acctgagtacgggtactcagcttgttctttaaggtctgactgtgatgggg

SEQ ID NO: 28723 - DNA, 50 bp, unidentified
  source 1..50: mol_type = unassigned DNA; note = target_d68aacf
  misc_feature 1..23: note = LF
  misc_feature 24..25: note = Core
  misc_feature 26..50: note = RF
cacgtgaggaggcggctgagcttgtcttttatggtctgattcgccttgaa

SEQ ID NO: 28724 - DNA, 50 bp, unidentified
  source 1..50: mol_type = unassigned DNA; note = target_d692b12
  misc_feature 1..23: note = LF
  misc_feature 24..25: note = Core
  misc_feature 26..50: note = RF
ttctgccgatggcgcaacgatatttctgttttaaggagagcggatgcttt

SEQ ID NO: 28725 - DNA, 50 bp, unidentified
  source 1..50: mol_type = unassigned DNA; note = target_d698a88
  misc_feature 1..23: note = LF
  misc_feature 24..25: note = Core
  misc_feature 26..50: note = RF
ggccatggcgacgagttcgcaccagatctggttctggtcaaagccctgca

SEQ ID NO: 28726 - DNA, 50 bp, unidentified
  source 1..50: mol_type = unassigned DNA; note = target_d6a3c31
  misc_feature 1..23: note = LF
  misc_feature 24..25: note = Core
  misc_feature 26..50: note = RF
cgttcagcatattgatgttcctccatttcataatatgtggttcttcgacc

SEQ ID NO: 28727 - DNA, 50 bp, unidentified
  source 1..50: mol_type = unassigned DNA; note = target_d6ab413
  misc_feature 1..22: note = LF
  misc_feature 23..25: note = Core
  misc_feature 26..50: note = RF
atgggccaattttctcatacacagaagatcggacactctccagtttcccc

SEQ ID NO: 28728 - DNA, 50 bp, unidentified
  source 1..50: mol_type = unassigned DNA; note = target_d6ad3bb
  misc_feature 1..23: note = LF
  misc_feature 24..25: note = Core
  misc_feature 26..50: note = RF
gcccgcgtgctgcaaaacaagtgtgcgagaaatgggcgcttacacaaaat

SEQ ID NO: 28729 - DNA, 50 bp, unidentified
  source 1..50: mol_type = unassigned DNA; note = target_d6b007e
  misc_feature 1..24: note = LF
  misc_feature 25: note = Core
  misc_feature 26..50: note = RF
agcggcactgaaaaccgtttccccccggagaatctcaatgatcgtgtcaa

SEQ ID NO: 28730 - DNA, 50 bp, unidentified
  source 1..50: mol_type = unassigned DNA; note = target_d6b061c
  misc_feature 1..23: note = LF
  misc_feature 24..25: note = Core
  misc_feature 26..50: note = RF
cacatttcatagttaactgcctccttaactagcttattggcataattgta

SEQ ID NO: 28731 - DNA, 50 bp, unidentified
  source 1..50: mol_type = unassigned DNA; note = target_d6c2a3c
  misc_feature 1..23: note = LF
  misc_feature 24..25: note = Core
  misc_feature 26..50: note = RF
atgatagcataccctttttcttcctttctgtaaaggaagatccaaaagaa

SEQ ID NO: 28732 - DNA, 50 bp, unidentified
  source 1..50: mol_type = unassigned DNA; note = target_d6c5b66
  misc_feature 1..23: note = LF
  misc_feature 24..25: note = Core
  misc_feature 26..50: note = RF
tcgggatccttcgcctgcggctcaggatgacagacttaaaacaccaatga

SEQ ID NO: 28733 - DNA, 50 bp, unidentified
  source 1..50: mol_type = unassigned DNA; note = target_d6c9b77
  misc_feature 1..23: note = LF
  misc_feature 24..25: note = Core
  misc_feature 26..50: note = RF
tttcgtcatgatgaccccatcctctcaagaaacggggcctccgggaaacc

SEQ ID NO: 28734 - DNA, 50 bp, unidentified
  source 1..50: mol_type = unassigned DNA; note = target_d6ce14d
  misc_feature 1..23: note = LF
  misc_feature 24..25: note = Core
  misc_feature 26..50: note = RF
tgtgcatcatcacagacccaccttggcacatagatgccggcgggggcggt

SEQ ID NO: 28735 - DNA, 50 bp, unidentified
  source 1..50: mol_type = unassigned DNA; note = target_d6d0437
  misc_feature 1..21: note = LF
  misc_feature 22..25: note = Core
  misc_feature 26..50: note = RF
gggacccagcatgacggaacggtcatgttccgtcccatcggttgcggtcg

SEQ ID NO: 28736 - DNA, 50 bp, unidentified
  source 1..50: mol_type = unassigned DNA; note = target_d6e03be
  misc_feature 1..23: note = LF
  misc_feature 24..25: note = Core
  misc_feature 26..50: note = RF
ttctttgcatattctcatattgtctcctttaaaatactttctgtaagtat

SEQ ID NO: 28737 - DNA, 50 bp, unidentified
  source 1..50: mol_type = unassigned DNA; note = target_d6e26b4
  misc_feature 1..22: note = LF
  misc_feature 23..25: note = Core
  misc_feature 26..50: note = RF
agacgcgaatggcgcggccaagagcggccgatagtgaacgtctgcttcgc

SEQ ID NO: 28738 - DNA, 50 bp, unidentified
  source 1..50: mol_type = unassigned DNA; note = target_d6e2861
  misc_feature 1..23: note = LF
  misc_feature 24..25: note = Core
  misc_feature 26..50: note = RF
aaccctgcagctcgagttgccctagcccgcatgttgcacgaaggcagcca

SEQ ID NO: 28739 - DNA, 50 bp, unidentified
  source 1..50: mol_type = unassigned DNA; note = target_d6e95dd
  misc_feature 1..23: note = LF
  misc_feature 24..25: note = Core
  misc_feature 26..50: note = RF
tttgccgcgaagtgtaggaagcagactttcgctgttcagtcgagctagat

SEQ ID NO: 28740 - DNA, 50 bp, unidentified
  source 1..50: mol_type = unassigned DNA; note = target_d6ed952
  misc_feature 1..23: note = LF
  misc_feature 24..25: note = Core
  misc_feature 26..50: note = RF
gggctcaagcttcttcgaacgacctagtcccaccacaggtcgtggtgcac

SEQ ID NO: 28741 - DNA, 50 bp, unidentified
  source 1..50: mol_type = unassigned DNA; note = target_d6f1f45
  misc_feature 1..22: note = LF
  misc_feature 23..25: note = Core
  misc_feature 26..50: note = RF
gccggcccgccacgtcgcagtttgacccgcagcggactttggcctggccg

SEQ ID NO: 28742 - DNA, 50 bp, unidentified
  source 1..50: mol_type = unassigned DNA; note = target_d705a7a
  misc_feature 1..24: note = LF
  misc_feature 25: note = Core
  misc_feature 26..50: note = RF
gcgttcgaggtgaactcgctgccattgtcgctgacgatcatcctcgggcg

SEQ ID NO: 28743 - DNA, 50 bp, unidentified
  source 1..50: mol_type = unassigned DNA; note = target_d706540
  misc_feature 1..22: note = LF
  misc_feature 23..25: note = Core
  misc_feature 26..50: note = RF
ggggccgttccacatatgcgccagagcccaaaaggttcggtgctgattca

SEQ ID NO: 28744 - DNA, 50 bp, unidentified
  source 1..50: mol_type = unassigned DNA; note = target_d709275
  misc_feature 1..23: note = LF
  misc_feature 24..25: note = Core
  misc_feature 26..50: note = RF
ccgttcgtctcgcttcttcaaagctctaacgttcaagctcaccgggcacg

SEQ ID NO: 28745 - DNA, 50 bp, unidentified
  source 1..50: mol_type = unassigned DNA; note = target_d709292
  misc_feature 1..23: note = LF
  misc_feature 24..25: note = Core
  misc_feature 26..50: note = RF
ctgcattcggcgcgggggcgcgcctcccacggtgatgcgttgaactctgc

SEQ ID NO: 28746 - DNA, 50 bp, unidentified
  source 1..50: mol_type = unassigned DNA; note = target_d7094aa
  misc_feature 1..23: note = LF
  misc_feature 24..25: note = Core
  misc_feature 26..50: note = RF
taggttgtgtcgcgaagttggtagaaatttgaaggtggcgtaatctccgg

SEQ ID NO: 28747 - DNA, 50 bp, unidentified
  source 1..50: mol_type = unassigned DNA; note = target_d70c878
  misc_feature 1..23: note = LF
  misc_feature 24..25: note = Core
  misc_feature 26..50: note = RF
gtggacgaaggatggtcatgtcgtcccttccttctcaactgatcgccgag

SEQ ID NO: 28748 - DNA, 50 bp, unidentified
  source 1..50: mol_type = unassigned DNA; note = target_d7143e7
  misc_feature 1..23: note = LF
  misc_feature 24..25: note = Core
  misc_feature 26..50: note = RF
ataggtcaacattttatcagctcctttcgtttccttctgcctgtctatct

SEQ ID NO: 28749 - DNA, 50 bp, unidentified
  source 1..50: mol_type = unassigned DNA; note = target_d715f46
  misc_feature 1..23: note = LF
  misc_feature 24..25: note = Core
  misc_feature 26..50: note = RF
aagcgaggttccttctatgtctaaatcttaacacagaacttatgaatgcg

SEQ ID NO: 28750 - DNA, 50 bp, unidentified
  source 1..50: mol_type = unassigned DNA; note = target_d71f61c
  misc_feature 1..21: note = LF
  misc_feature 22..25: note = Core
  misc_feature 26..50: note = RF
cgcctatgaccccacaccccgctcatttccgaagagcccgataggcgccg

SEQ ID NO: 28751 - DNA, 50 bp, unidentified
  source 1..50: mol_type = unassigned DNA; note = target_d7219a4
  misc_feature 1..22: note = LF
  misc_feature 23..25: note = Core
  misc_feature 26..50: note = RF
acgagccatagtttcttttcccctttcagaacatggctaaagttgctgaa

SEQ ID NO: 28752 - DNA, 50 bp, unidentified
  source 1..50: mol_type = unassigned DNA; note = target_d722943
  misc_feature 1..23: note = LF
  misc_feature 24..25: note = Core
  misc_feature 26..50: note = RF
cgtgagcgatcgtggacatggctgccccttccgtactgttgccgcgtccg

SEQ ID NO: 28753 - DNA, 50 bp, unidentified
  source 1..50: mol_type = unassigned DNA; note = target_d72386d
  misc_feature 1..23: note = LF
  misc_feature 24..25: note = Core
  misc_feature 26..50: note = RF
ggtttactgttagaagaactttcctatcaaatcggatagaggctaataat

SEQ ID NO: 28754 - DNA, 50 bp, unidentified
  source 1..50: mol_type = unassigned DNA; note = target_d727d51
  misc_feature 1..23: note = LF
  misc_feature 24..25: note = Core
  misc_feature 26..50: note = RF
tcaccccgctacggggtcaattttgcatgccggttcacacaagtgcgctc

SEQ ID NO: 28755 - DNA, 50 bp, unidentified
  source 1..50: mol_type = unassigned DNA; note = target_d72d906
  misc_feature 1..21: note = LF
  misc_feature 22..25: note = Core
  misc_feature 26..50: note = RF
cgacctggatgagcgcctctccccccgcggcgaggccagtcgagctcacg

SEQ ID NO: 28756 - DNA, 50 bp, unidentified
  source 1..50: mol_type = unassigned DNA; note = target_d73d429
  misc_feature 1..24: note = LF
  misc_feature 25: note = Core
  misc_feature 26..50: note = RF
cgcaggtcagctaacggccaggagcggacaaggtgctccgcggtacgagc

SEQ ID NO: 28757 - DNA, 50 bp, unidentified
  source 1..50: mol_type = unassigned DNA; note = target_d744c29
  misc_feature 1..23: note = LF
  misc_feature 24..25: note = Core
  misc_feature 26..50: note = RF
cccagtcttaaacccaagcaccctttagcttaagtacaattctacacaaa

SEQ ID NO: 28758 - DNA, 50 bp, unidentified
  source 1..50: mol_type = unassigned DNA; note = target_d746b46
  misc_feature 1..21: note = LF
  misc_feature 22..25: note = Core
  misc_feature 26..50: note = RF
atgtatatacgtctgcattgcttgcaccgactatgcgtcctttcaggctg

SEQ ID NO: 28759 - DNA, 50 bp, unidentified
  source 1..50: mol_type = unassigned DNA; note = target_d74ea5d
  misc_feature 1..22: note = LF
  misc_feature 23..25: note = Core
  misc_feature 26..50: note = RF
atcttcctaaaatctttttacttctttctattacgcttttcaattataaa

SEQ ID NO: 28760 - DNA, 50 bp, unidentified
  source 1..50: mol_type = unassigned DNA; note = target_d7526fc
  misc_feature 1..24: note = LF
  misc_feature 25: note = Core
  misc_feature 26..50: note = RF
aaaaaatggaatgcgtctcatacccaccccccaccagctcgacgattttc

SEQ ID NO: 28761 - DNA, 50 bp, unidentified
  source 1..50: mol_type = unassigned DNA; note = target_d75ee77
  misc_feature 1..23: note = LF
  misc_feature 24..25: note = Core
  misc_feature 26..50: note = RF
ttgctcttgcatatatttatttcctttctggtatgtacttccgccatttt

SEQ ID NO: 28762 - DNA, 50 bp, unidentified
  source 1..50: mol_type = unassigned DNA; note = target_d766546
  misc_feature 1..24: note = LF
  misc_feature 25: note = Core
  misc_feature 26..50: note = RF
tatagttttccttattcatataacgccctgttaaggtgtgagcaacgcaa

SEQ ID NO: 28763 - DNA, 50 bp, unidentified
  source 1..50: mol_type = unassigned DNA; note = target_d7684cd
  misc_feature 1..22: note = LF
  misc_feature 23..25: note = Core
  misc_feature 26..50: note = RF
aggaaaatctcatactcaattcctccaaaataaacaagggacaaaattta

SEQ ID NO: 28764 - DNA, 50 bp, unidentified
  source 1..50: mol_type = unassigned DNA; note = target_d7696ad
  misc_feature 1..23: note = LF
  misc_feature 24..25: note = Core
  misc_feature 26..50: note = RF
ttcgttctaagccttaccggttttgaccctagttgtgtgaaaacgcactg

SEQ ID NO: 28765 - DNA, 50 bp, unidentified
  source 1..50: mol_type = unassigned DNA; note = target_d76bbbb
  misc_feature 1..22: note = LF
  misc_feature 23..25: note = Core
  misc_feature 26..50: note = RF
ttttgagatttctcctttttgtcatttcgaccaacgggagaaatcttcct

SEQ ID NO: 28766 - DNA, 50 bp, unidentified
  source 1..50: mol_type = unassigned DNA; note = target_d76bc45
  misc_feature 1..23: note = LF
  misc_feature 24..25: note = Core
  misc_feature 26..50: note = RF
atatgttgtttgacatcatgttcctttcaataattccaacaattaatctt

SEQ ID NO: 28767 - DNA, 50 bp, unidentified
  source 1..50: mol_type = unassigned DNA; note = target_d76ca57
  misc_feature 1..23: note = LF
  misc_feature 24..25: note = Core
  misc_feature 26..50: note = RF
cgcgtcagcggccatttgagtttagccgtggatttcaatccacggtccga

SEQ ID NO: 28768 - DNA, 50 bp, unidentified
  source 1..50: mol_type = unassigned DNA; note = target_d76dd83
  misc_feature 1..22: note = LF
  misc_feature 23..25: note = Core
  misc_feature 26..50: note = RF
gggctcacccgcaaggcccacccccccccatagcgggtgtctcggtgcag

SEQ ID NO: 28769 - DNA, 50 bp, unidentified
  source 1..50: mol_type = unassigned DNA; note = target_d76e52e
  misc_feature 1..23: note = LF
  misc_feature 24..25: note = Core
  misc_feature 26..50: note = RF
cgtcgtctccgagctcctaagcggacagactggaatcccccccttacccg

SEQ ID NO: 28770 - DNA, 50 bp, unidentified
  source 1..50: mol_type = unassigned DNA; note = target_d779e9e
  misc_feature 1..21: note = LF
  misc_feature 22..25: note = Core
  misc_feature 26..50: note = RF
ctgccgcaaccgccattgtcccaagtgccagggcacggtggcgaaggatt

SEQ ID NO: 28771 - DNA, 50 bp, unidentified
  source 1..50: mol_type = unassigned DNA; note = target_d77ad87
  misc_feature 1..24: note = LF
  misc_feature 25: note = Core
  misc_feature 26..50: note = RF
ccctcttcgaaaggccggtccccttttttatgaacccgaccaaagcgttg

SEQ ID NO: 28772 - DNA, 50 bp, unidentified
  source 1..50: mol_type = unassigned DNA; note = target_d77bf82
  misc_feature 1..24: note = LF
  misc_feature 25: note = Core
  misc_feature 26..50: note = RF
gcagcggtaccctctccgccttaccgaccaaagtgaagcagagtatggga

SEQ ID NO: 28773 - DNA, 50 bp, unidentified
  source 1..50: mol_type = unassigned DNA; note = target_d7880ef
  misc_feature 1..23: note = LF
  misc_feature 24..25: note = Core
  misc_feature 26..50: note = RF
atagaggcgcaaaggtttacatcctttgcgctttttaatttatagtcacg

SEQ ID NO: 28774 - DNA, 50 bp, unidentified
  source 1..50: mol_type = unassigned DNA; note = target_d78a93f
  misc_feature 1..24: note = LF
  misc_feature 25: note = Core
  misc_feature 26..50: note = RF
tgccggtaccctcattcgctttaccgaccaaagtgaagggaatcatggga

SEQ ID NO: 28775 - DNA, 50 bp, unidentified
  source 1..50: mol_type = unassigned DNA; note = target_d7a8aa9
  misc_feature 1..22: note = LF
  misc_feature 23..25: note = Core
  misc_feature 26..50: note = RF
gcccatcctggctcctctacccgctcccacaaagtccgctgtgaggcgca

SEQ ID NO: 28776 - DNA, 50 bp, unidentified
  source 1..50: mol_type = unassigned DNA; note = target_d7b13cb
  misc_feature 1..23: note = LF
  misc_feature 24..25: note = Core
  misc_feature 26..50: note = RF
gcacgcgttcagaacgcccggatctgccgcgacccactcgcggatcctgc

SEQ ID NO: 28777 - DNA, 50 bp, unidentified
  source 1..50: mol_type = unassigned DNA; note = target_d7b2342
  misc_feature 1..24: note = LF
  misc_feature 25: note = Core
  misc_feature 26..50: note = RF
gcacgtgagtgcggtaacaggcggcggtgtgacgcgggtcaggcgcaacc

SEQ ID NO: 28778 - DNA, 50 bp, unidentified
  source 1..50: mol_type = unassigned DNA; note = target_d7b6826
  misc_feature 1..24: note = LF
  misc_feature 25: note = Core
  misc_feature 26..50: note = RF
ctctcgcgtctccgtttttgaaacttccgtatggccgactttacttcccc

SEQ ID NO: 28779 - DNA, 50 bp, unidentified
  source 1..50: mol_type = unassigned DNA; note = target_d7b7329
  misc_feature 1..24: note = LF
  misc_feature 25: note = Core
  misc_feature 26..50: note = RF
atcatccccccgcgcccacagcggcatgaccggatattgctgggtgagtc

SEQ ID NO: 28780 - DNA, 50 bp, unidentified
  source 1..50: mol_type = unassigned DNA; note = target_d7b79e9
  misc_feature 1..24: note = LF
  misc_feature 25: note = Core
  misc_feature 26..50: note = RF
agacggtgaacaacgtcatcacctcttccatgttccacaatagtcttggc

SEQ ID NO: 28781 - DNA, 50 bp, unidentified
  source 1..50: mol_type = unassigned DNA; note = target_d7c3bf5
  misc_feature 1..23: note = LF
  misc_feature 24..25: note = Core
  misc_feature 26..50: note = RF
gttttaacggtttccttcgcgctcttcccggtgatcgggctttgttgtca

SEQ ID NO: 28782 - DNA, 50 bp, unidentified
  source 1..50: mol_type = unassigned DNA; note = target_d7c5001
  misc_feature 1..23: note = LF
  misc_feature 24..25: note = Core
  misc_feature 26..50: note = RF
gctgcagtgcatgagtccggaaatggcccatctctgccgcgccgacctcg

SEQ ID NO: 28783 - DNA, 50 bp, unidentified
  source 1..50: mol_type = unassigned DNA; note = target_d7ca775
  misc_feature 1..24: note = LF
  misc_feature 25: note = Core
  misc_feature 26..50: note = RF
tcgccgtcacgttcgtcgcaaggagcaagccatgctgtttcatgtggaaa

SEQ ID NO: 28784 - DNA, 50 bp, unidentified
  source 1..50: mol_type = unassigned DNA; note = target_d7dc669
  misc_feature 1..23: note = LF
  misc_feature 24..25: note = Core
  misc_feature 26..50: note = RF
ccctgtgggagcgagcaagctcgctcccacaatgtgacggtggttctgtt

SEQ ID NO: 28785 - DNA, 50 bp, unidentified
  source 1..50: mol_type = unassigned DNA; note = target_d7dfead
  misc_feature 1..22: note = LF
  misc_feature 23..25: note = Core
  misc_feature 26..50: note = RF
aactcttgagcatattgtcctcctttcgtttataattactttctcggttc

SEQ ID NO: 28786 - DNA, 50 bp, unidentified
  source 1..50: mol_type = unassigned DNA; note = target_d7e62a9
  misc_feature 1..22: note = LF
  misc_feature 23..25: note = Core
  misc_feature 26..50: note = RF
agttcgtcgcgcaagctgccattgaagctttcgatgaaggcgttctgctg

SEQ ID NO: 28787 - DNA, 50 bp, unidentified
  source 1..50: mol_type = unassigned DNA; note = target_d7e7f4f
  misc_feature 1..23: note = LF
  misc_feature 24..25: note = Core
  misc_feature 26..50: note = RF
ttttgcttttttgccatataattctccccacattatctgtcatgctgcaa

SEQ ID NO: 28788 - DNA, 50 bp, unidentified
  source 1..50: mol_type = unassigned DNA; note = target_d7ebbbe
  misc_feature 1..24: note = LF
  misc_feature 25: note = Core
  misc_feature 26..50: note = RF
gtcttgatctgactcgatccgggttttccaacagtaatcttgcaacggtt

SEQ ID NO: 28789 - DNA, 50 bp, unidentified
  source 1..50: mol_type = unassigned DNA; note = target_d7ebceb
  misc_feature 1..23: note = LF
  misc_feature 24..25: note = Core
  misc_feature 26..50: note = RF
cgcatcatcgtcatcttccggcttgaccggaagatccgtaacagcacaaa

SEQ ID NO: 28790 - DNA, 50 bp, unidentified
  source 1..50: mol_type = unassigned DNA; note = target_d7fe734
  misc_feature 1..23: note = LF
  misc_feature 24..25: note = Core
  misc_feature 26..50: note = RF
cagggcagtattcgccgttaatgtgacatccccgtgttcaacaatgtcga

SEQ ID NO: 28791 - DNA, 50 bp, unidentified
  source 1..50: mol_type = unassigned DNA; note = target_d8032d5
  misc_feature 1..22: note = LF
  misc_feature 23..25: note = Core
  misc_feature 26..50: note = RF
cctggtcgagccgctgttgcggccccccatcacaccggcgccctgtttga

SEQ ID NO: 28792 - DNA, 50 bp, unidentified
  source 1..50: mol_type = unassigned DNA; note = target_d808722
  misc_feature 1..24: note = LF
  misc_feature 25: note = Core
  misc_feature 26..50: note = RF
cctcgtggccctgcagctgtccccccccccggatccgggacctcggcaag

SEQ ID NO: 28793 - DNA, 50 bp, unidentified
  source 1..50: mol_type = unassigned DNA; note = target_d812913
  misc_feature 1..22: note = LF
  misc_feature 23..25: note = Core
  misc_feature 26..50: note = RF
gtttctaaatcaataaacatattaatatcctccataatcgaatgtatatc

SEQ ID NO: 28794 - DNA, 50 bp, unidentified
  source 1..50: mol_type = unassigned DNA; note = target_d821327
  misc_feature 1..22: note = LF
  misc_feature 23..25: note = Core
  misc_feature 26..50: note = RF
ggcgtcaggtagcaggccgaacagaagactgcacccgaccaatacgccaa

SEQ ID NO: 28795 - DNA, 50 bp, unidentified; identical to SEQ ID NO: 21190
  source 1..50: mol_type = unassigned DNA; note = target_d8213dc
  misc_feature 1..22: note = LF
  misc_feature 23..25: note = Core
  misc_feature 26..50: note = RF

SEQ ID NO: 28796 - DNA, 50 bp, unidentified
  source 1..50: mol_type = unassigned DNA; note = target_d824e29
  misc_feature 1..23: note = LF
  misc_feature 24..25: note = Core
  misc_feature 26..50: note = RF
gatcacagacatctctttacctccttaaaccaagagccaattttaagata

SEQ ID NO: 28797 - DNA, 50 bp, unidentified
  source 1..50: mol_type = unassigned DNA; note = target_d830a39
  misc_feature 1..24: note = LF
  misc_feature 25: note = Core
  misc_feature 26..50: note = RF
accggacgggtggtgttgctgccccgttaccttctcctccgatctgaaac

SEQ ID NO: 28798 - DNA, 50 bp, unidentified
  source 1..50: mol_type = unassigned DNA; note = target_d8310c6
  misc_feature 1..23: note = LF
  misc_feature 24..25: note = Core
  misc_feature 26..50: note = RF
ggacaccacgccttggcgataaatggcatctggatgaaatggttgttacg

SEQ ID NO: 28799 - DNA, 50 bp, unidentified
  source 1..50: mol_type = unassigned DNA; note = target_d83ae5f
  misc_feature 1..23: note = LF
  misc_feature 24..25: note = Core
  misc_feature 26..50: note = RF
caccgctatcgcgaacaagctcgctcccacattggttttgtggcgaccct

SEQ ID NO: 28800 - DNA, 50 bp, unidentified
  source 1..50: mol_type = unassigned DNA; note = target_d84295d
  misc_feature 1..23: note = LF
  misc_feature 24..25: note = Core
  misc_feature 26..50: note = RF
aagtcccgtcgcggctgaagccgctcctgcggctcctgcgcatgactgcg

SEQ ID NO: 28801 - DNA, 50 bp, unidentified
  source 1..50: mol_type = unassigned DNA; note = target_d8444a7
  misc_feature 1..23: note = LF
  misc_feature 24..25: note = Core
  misc_feature 26..50: note = RF
gaaaagccgtggcgctgcgtcggctcagagctgagcgggcgccggctgca

SEQ ID NO: 28802 - DNA, 50 bp, unidentified
  source 1..50: mol_type = unassigned DNA; note = target_d854556
  misc_feature 1..23: note = LF
  misc_feature 24..25: note = Core
  misc_feature 26..50: note = RF
cacggacagcagccgagcatgggctcggctctacagcagccccggcaccg

SEQ ID NO: 28803 - DNA, 50 bp, unidentified
  source 1..50: mol_type = unassigned DNA; note = target_d855e7f
  misc_feature 1..23: note = LF
  misc_feature 24..25: note = Core
  misc_feature 26..50: note = RF
cacggcaatcagccgtcagctacaccactccatgggacacgatctcttga

SEQ ID NO: 28804 - DNA, 50 bp, unidentified
  source 1..50: mol_type = unassigned DNA; note = target_d861d18
  misc_feature 1..21: note = LF
  misc_feature 22..25: note = Core
  misc_feature 26..50: note = RF
taattttgaaattcgcttttctttgactacagcatcccaaaaattgaaca

SEQ ID NO: 28805 - DNA, 50 bp, unidentified
  source 1..50: mol_type = unassigned DNA; note = target_d86962b
  misc_feature 1..22: note = LF
  misc_feature 23..25: note = Core
  misc_feature 26..50: note = RF
gagggataattctatttttctttttccgacgataaattaacgcaacccat

SEQ ID NO: 28806 - DNA, 50 bp, unidentified
  source 1..50: mol_type = unassigned DNA; note = target_d869ad1
  misc_feature 1..24: note = LF
  misc_feature 25: note = Core
  misc_feature 26..50: note = RF
gaaaggcatgaccatcagccaccccacccccccgtttctcgaagtcgggc

SEQ ID NO: 28807 - DNA, 50 bp, unidentified
  source 1..50: mol_type = unassigned DNA; note = target_d872f49
  misc_feature 1..20: note = LF
  misc_feature 21..25: note = Core
  misc_feature 26..50: note = RF
gacgaaaaccatagggacacccccccggtaggtgaacctgatgagcgaac

SEQ ID NO: 28808 - DNA, 50 bp, unidentified
  source 1..50: mol_type = unassigned DNA; note = target_d883015
  misc_feature 1..23: note = LF
  misc_feature 24..25: note = Core
  misc_feature 26..50: note = RF
ccgactatcaggccgttcacgactggttcgacgccagcaaggcgcatctg

SEQ ID NO: 28809 - DNA, 50 bp, unidentified
  source 1..50: mol_type = unassigned DNA; note = target_d888c17
  misc_feature 1..23: note = LF
  misc_feature 24..25: note = Core
  misc_feature 26..50: note = RF
aaatcccgaatctggtcgacacgctttaggtcgctcgttagcaaggccag

SEQ ID NO: 28810 - DNA, 50 bp, unidentified
  source 1..50: mol_type = unassigned DNA; note = target_d889734
  misc_feature 1..23: note = LF
  misc_feature 24..25: note = Core
  misc_feature 26..50: note = RF
ctatttgctgccgtcgctgccgtagggtgggcacccccacgctaatgccc

SEQ ID NO: 28811 - DNA, 50 bp, unidentified
  source 1..50: mol_type = unassigned DNA; note = target_d88cdd9
  misc_feature 1..23: note = LF
  misc_feature 24..25: note = Core
  misc_feature 26..50: note = RF
gggcacgcttcgctttgcccaccctacggattcgcgctgctactccggaa

SEQ ID NO: 28812 - DNA, 50 bp, unidentified
  source 1..50: mol_type = unassigned DNA; note = target_d8968b9
  misc_feature 1..23: note = LF
  misc_feature 24..25: note = Core
  misc_feature 26..50: note = RF
aaaaccgcgtctgtctttttgggtggaaagcggaccctcgaccttggcgg

SEQ ID NO: 28813 - DNA, 50 bp, unidentified
  source 1..50: mol_type = unassigned DNA; note = target_d8992b6
  misc_feature 1..23: note = LF
  misc_feature 24..25: note = Core
  misc_feature 26..50: note = RF
gaggccgcctctgtttgcggttctggtgcaaataggaaagcctgttgaga

SEQ ID NO: 28814 - DNA, 50 bp, unidentified
  source 1..50: mol_type = unassigned DNA; note = target_d89d225
  misc_feature 1..21: note = LF
  misc_feature 22..25: note = Core
  misc_feature 26..50: note = RF
acagtattccgtacataaaattcacctcatattaaaggatatgcccttaa

SEQ ID NO: 28815 - DNA, 50 bp, unidentified
  source 1..50: mol_type = unassigned DNA; note = target_d8a0764
  misc_feature 1..23: note = LF
  misc_feature 24..25: note = Core
  misc_feature 26..50: note = RF
gaaagccgctccctggagcggctttttacgagttcttcgcggattccaga

SEQ ID NO: 28816 - DNA, 50 bp, unidentified
  source 1..50: mol_type = unassigned DNA; note = target_d8bf733
  misc_feature 1..23: note = LF
  misc_feature 24..25: note = Core
  misc_feature 26..50: note = RF
gcacccccaccgcacgcactcatctgccgccgagcgggtggacgtgtcag

SEQ ID NO: 28817 - DNA, 50 bp, unidentified
  source 1..50: mol_type = unassigned DNA; note = target_d8c51bc
  misc_feature 1..23: note = LF
  misc_feature 24..25: note = Core
  misc_feature 26..50: note = RF
gctaccaggagcgtgccttccccctcgacgggagaggaatgaggtgaggg

SEQ ID NO: 28818 - DNA, 50 bp, unidentified
  source 1..50: mol_type = unassigned DNA; note = target_d8cfa64
  misc_feature 1..23: note = LF
  misc_feature 24..25: note = Core
  misc_feature 26..50: note = RF
gcagtatctggcacgcatcctccctaacgtcctgctggccagcgacggcc

SEQ ID NO: 28819 - DNA, 50 bp, unidentified
  source 1..50: mol_type = unassigned DNA; note = target_d8d2fde
  misc_feature 1..23: note = LF
  misc_feature 24..25: note = Core
  misc_feature 26..50: note = RF
acgtctctaccgcgtagcggtttagttcttctatagcatctcagcagtga

SEQ ID NO: 28820 - DNA, 50 bp, unidentified
  source 1..50: mol_type = unassigned DNA; note = target_d8d6c9c
  misc_feature 1..23: note = LF
  misc_feature 24..25: note = Core
  misc_feature 26..50: note = RF
tatccgatgtgcgggacagagcagacattcgccaagcgacctcaaacgtc

SEQ ID NO: 28821 - DNA, 50 bp, unidentified
  source 1..50: mol_type = unassigned DNA; note = target_d8d8df3
  misc_feature 1..23: note = LF
  misc_feature 24..25: note = Core
  misc_feature 26..50: note = RF
tgtgtgattgggtgcatgtgacgtggacctacaacgaccacatcattgca

SEQ ID NO: 28822 - DNA, 50 bp, unidentified
  source 1..50: mol_type = unassigned DNA; note = target_d8dd484
  misc_feature 1..22: note = LF
  misc_feature 23..25: note = Core
  misc_feature 26..50: note = RF
accaaattactgctaactttagatttagcggggagcttgtcctgatgcaa

SEQ ID NO: 28823 - DNA, 50 bp, unidentified
  source 1..50: mol_type = unassigned DNA; note = target_d8e08ae
  misc_feature 1..23: note = LF
  misc_feature 24..25: note = Core
  misc_feature 26..50: note = RF
gcggcccttgtggctgccaaggttgtccatgatcaccgtatcgccctcgc

SEQ ID NO: 28824 - DNA, 50 bp, unidentified
  source 1..50: mol_type = unassigned DNA; note = target_d8f59ab
  misc_feature 1..23: note = LF
  misc_feature 24..25: note = Core
  misc_feature 26..50: note = RF
ggagttggagcctccggcaaatccggggcggttcagagcccgaaggcccg

SEQ ID NO: 28825 - DNA, 50 bp, unidentified
  source 1..50: mol_type = unassigned DNA; note = target_d911f90
  misc_feature 1..23: note = LF
  misc_feature 24..25: note = Core
  misc_feature 26..50: note = RF
gaaagtacgaatcggcgagtgggctaggtctggtccaggccccgagatcg

SEQ ID NO: 28826 - DNA, 50 bp, unidentified
  source 1..50: mol_type = unassigned DNA; note = target_d912877
  misc_feature 1..23: note = LF
  misc_feature 24..25: note = Core
  misc_feature 26..50: note = RF
agagcctctttcggagtcccccttttgcgcccgccgcatgatgatgggcg

SEQ ID NO: 28827 - DNA, 50 bp, unidentified
  source 1..50: mol_type = unassigned DNA; note = target_d919660
  misc_feature 1..23: note = LF
  misc_feature 24..25: note = Core
  misc_feature 26..50: note = RF
ggtttaaacatgattgaaacctcctttctactaagaaatagaggggagca

SEQ ID NO: 28828 - DNA, 50 bp, unidentified
  source 1..50: mol_type = unassigned DNA; note = target_d91dee8
  misc_feature 1..21: note = LF
  misc_feature 22..25: note = Core
  misc_feature 26..50: note = RF
cctgccgggttcgcggcggcggtcatgcggtttcctcctgctgccgggtc

SEQ ID NO: 28829 - DNA, 50 bp, unidentified
  source 1..50: mol_type = unassigned DNA; note = target_d942771
  misc_feature 1..23: note = LF
  misc_feature 24..25: note = Core
  misc_feature 26..50: note = RF
caacagcgatccggccaacacccctcaaccgtctcggcgctgcgcgccga

SEQ ID NO: 28830 - DNA, 50 bp, unidentified
  source 1..50: mol_type = unassigned DNA; note = target_d956f7a
  misc_feature 1..24: note = LF
  misc_feature 25: note = Core
  misc_feature 26..50: note = RF
cctgcccgcctactatgtagtggtcaggcggggttgctgatttgccgacc

SEQ ID NO: 28831 - DNA, 50 bp, unidentified
  source 1..50: mol_type = unassigned DNA; note = target_d95d191
  misc_feature 1..24: note = LF
  misc_feature 25: note = Core
  misc_feature 26..50: note = RF
tgttcttttgtcatcttcaatcctttttgtttttataataatatcttatt

SEQ ID NO: 28832 - DNA, 50 bp, unidentified
  source 1..50: mol_type = unassigned DNA; note = target_d9630b3
  misc_feature 1..23: note = LF
  misc_feature 24..25: note = Core
  misc_feature 26..50: note = RF
gcctcaccgaagtacataacacccttgttttgatcgacatccgcgcggcc

SEQ ID NO: 28833 - DNA, 50 bp, unidentified
  source 1..50: mol_type = unassigned DNA; note = target_d9634be
  misc_feature 1..24: note = LF
  misc_feature 25: note = Core
  misc_feature 26..50: note = RF
acaggattcggacccgtcagatcccacctttttcagggcccgcatgttca

SEQ ID NO: 28834 - DNA, 50 bp, unidentified
  source 1..50: mol_type = unassigned DNA; note = target_d96d2de
  misc_feature 1..23: note = LF
  misc_feature 24..25: note = Core
  misc_feature 26..50: note = RF
agctgagttcggtggttatgggtccggccttcgccgggacgacgagagat

SEQ ID NO: 28835 - DNA, 50 bp, unidentified
  source 1..50: mol_type = unassigned DNA; note = target_d977bd8
  misc_feature 1..23: note = LF
  misc_feature 24..25: note = Core
  misc_feature 26..50: note = RF
ttctccctgatcgccctaaccccctgacccacccccaccacgccacgcga

SEQ ID NO: 28836 - DNA, 50 bp, unidentified
  source 1..50: mol_type = unassigned DNA; note = target_d97f2dd
  misc_feature 1..23: note = LF
  misc_feature 24..25: note = Core
  misc_feature 26..50: note = RF
cgcgtaggcaagcgtcgtccaccctacgaacggccgctatcgccactttg

SEQ ID NO: 28837 - DNA, 50 bp, unidentified
  source 1..50: mol_type = unassigned DNA; note = target_d987d15
  misc_feature 1..23: note = LF
  misc_feature 24..25: note = Core
  misc_feature 26..50: note = RF
tgaattttctcatattaaacaccctttcaagtaaactctgatcatggtat

SEQ ID NO: 28838 - DNA, 50 bp, unidentified
  source 1..50: mol_type = unassigned DNA; note = target_d990c89
  misc_feature 1..23: note = LF
  misc_feature 24..25: note = Core
  misc_feature 26..50: note = RF
tcgcctcaacatgttattcggcgtggggtcccgacgccgatcggcgagcc

SEQ ID NO: 28839 - DNA, 50 bp, unidentified
  source 1..50: mol_type = unassigned DNA; note = target_d991035
  misc_feature 1..23: note = LF
  misc_feature 24..25: note = Core
  misc_feature 26..50: note = RF
aatgctagatttttcgaaactcattttgtccaattccgtgtcagagaatt

SEQ ID NO: 28840 - DNA, 50 bp, unidentified
  source 1..50: mol_type = unassigned DNA; note = target_d9990c5
  misc_feature 1..23: note = LF
  misc_feature 24..25: note = Core
  misc_feature 26..50: note = RF
gcttgcccccaaatgtctgtgattggcacgtcgctgccgtgcccgctctt

SEQ ID NO: 28841 - DNA, 50 bp, unidentified
  source 1..50: mol_type = unassigned DNA; note = target_d99a6a2
  misc_feature 1..22: note = LF
  misc_feature 23..25: note = Core
  misc_feature 26..50: note = RF
tcgaaccgaagcctgaccgatgtgcaacctctattcgatcacgacaaacc

SEQ ID NO: 28842 - DNA, 50 bp, unidentified
  source 1..50: mol_type = unassigned DNA; note = target_d99b599
  misc_feature 1..23: note = LF
  misc_feature 24..25: note = Core
  misc_feature 26..50: note = RF
atttttatttaacaatcgtacccttttagttgatcgaatctagtgcccat

SEQ ID NO: 28843 - DNA, 50 bp, unidentified
  source 1..50: mol_type = unassigned DNA; note = target_d99ea48
  misc_feature 1..24: note = LF
  misc_feature 25: note = Core
  misc_feature 26..50: note = RF
cggcgtcgcttccgctaatgcgactttcggtatctatggagatccccgag

SEQ ID NO: 28844 - DNA, 50 bp, unidentified
  source 1..50: mol_type = unassigned DNA; note = target_d9a061e
  misc_feature 1..23: note = LF
  misc_feature 24..25: note = Core
  misc_feature 26..50: note = RF
tttcactgagtgtcggtccacaaagttgaatgtctggctgctcgacaaat

SEQ ID NO: 28845 - DNA, 50 bp, unidentified
  source 1..50: mol_type = unassigned DNA; note = target_d9a141d
  misc_feature 1..22: note = LF
  misc_feature 23..25: note = Core
  misc_feature 26..50: note = RF
catatacattttaactttcctcactttcttccttggattttcccaagaaa

SEQ ID NO: 28846 - DNA, 50 bp, unidentified
  source 1..50: mol_type = unassigned DNA; note = target_d9ad4ed
  misc_feature 1..23: note = LF
  misc_feature 24..25: note = Core
  misc_feature 26..50: note = RF
ttaataaaatacagtctcacttcctttcactaaagatatattcactacaa

SEQ ID NO: 28847 - DNA, 50 bp, unidentified
  source 1..50: mol_type = unassigned DNA; note = target_d9b0e8d
  misc_feature 1..23: note = LF
  misc_feature 24..25: note = Core
  misc_feature 26..50: note = RF
caccgcattcgcgagcaagcccgctcccacattttggatttgcgtcaggc

SEQ ID NO: 28848 - DNA, 50 bp, unidentified
  source 1..50: mol_type = unassigned DNA; note = target_d9b4ca6
  misc_feature 1..24: note = LF
  misc_feature 25: note = Core
  misc_feature 26..50: note = RF
atagccgggagcgaccttcttaacttcaggtttgctcatcatccactaag

SEQ ID NO: 28849 - DNA, 50 bp, unidentified
  source 1..50: mol_type = unassigned DNA; note = target_d9bc340
  misc_feature 1..23: note = LF
  misc_feature 24..25: note = Core
  misc_feature 26..50: note = RF
gccgtccgcttttgcgggcggcgttttttcgtccgcggattactgccggg

SEQ ID NO: 28850 - DNA, 50 bp, unidentified
  source 1..50: mol_type = unassigned DNA; note = target_d9c0647
  misc_feature 1..23: note = LF
  misc_feature 24..25: note = Core
  misc_feature 26..50: note = RF
gcggcgcggatcgtccccgtcacctgaccctcgccctcgaccggcggggg

SEQ ID NO: 28851 - DNA, 50 bp, unidentified
  source 1..50: mol_type = unassigned DNA; note = target_d9c1473
  misc_feature 1..23: note = LF
  misc_feature 24..25: note = Core
  misc_feature 26..50: note = RF
atcgcacgcccgacaaggagaggctcaacgccgcctctccttgacctctg

SEQ ID NO: 28852 - DNA, 50 bp, unidentified
  source 1..50: mol_type = unassigned DNA; note = target_d9c5b18
  misc_feature 1..24: note = LF
  misc_feature 25: note = Core
  misc_feature 26..50: note = RF
gacttcgccttcgcggcgcgaaacttccgtattgcgggtgcgttgccggc

SEQ ID NO: 28853 - DNA, 50 bp, unidentified
  source 1..50: mol_type = unassigned DNA; note = target_d9c62e1
  misc_feature 1..21: note = LF
  misc_feature 22..25: note = Core
  misc_feature 26..50: note = RF
gtcctggtgctcatctgtcgtctcctgctcgtgcggttggtgggtcccgt

SEQ ID NO: 28854 - DNA, 50 bp, unidentified
  source 1..50: mol_type = unassigned DNA; note = target_d9c6dbe
  misc_feature 1..23: note = LF
  misc_feature 24..25: note = Core
  misc_feature 26..50: note = RF
gctaacggcagctaatggcacaaagcggacatcgaagagctaccggcgaa

SEQ ID NO: 28855 - DNA, 50 bp, unidentified
  source 1..50: mol_type = unassigned DNA; note = target_d9ca7cb
  misc_feature 1..24: note = LF
  misc_feature 25: note = Core
  misc_feature 26..50: note = RF
actcacccctagagcactccaccccacccccctaaccaggtacccgctaa

SEQ ID NO: 28856 - DNA, 50 bp, unidentified
  source 1..50: mol_type = unassigned DNA; note = target_d9d43bb
  misc_feature 1..24: note = LF
  misc_feature 25: note = Core
  misc_feature 26..50: note = RF
ccgaggaagggatagctcctgacctgccccttggaaactggaccgtttga

SEQ ID NO: 28857 - DNA, 50 bp, unidentified
  source 1..50: mol_type = unassigned DNA; note = target_d9d4658
  misc_feature 1..23: note = LF
  misc_feature 24..25: note = Core
  misc_feature 26..50: note = RF
aaaacaggcttaacgtaggatatttccgttttccaagcggccccctttta

SEQ ID NO: 28858 - DNA, 50 bp, unidentified
  source 1..50: mol_type = unassigned DNA; note = target_d9e0cd1
  misc_feature 1..24: note = LF
  misc_feature 25: note = Core
  misc_feature 26..50: note = RF
gttgcagcggccgcaccgaactgccgatctcgcgctacgacgctcgccag

SEQ ID NO: 28859 - DNA, 50 bp, unidentified
  source 1..50: mol_type = unassigned DNA; note = target_d9eced7
  misc_feature 1..23: note = LF
  misc_feature 24..25: note = Core
  misc_feature 26..50: note = RF
aaatttcagcatcattccttcacctctttccatgttttcgtgcttgtgac

SEQ ID NO: 28860 - DNA, 50 bp, unidentified
  source 1..50: mol_type = unassigned DNA; note = target_d9f2213
  misc_feature 1..22: note = LF
  misc_feature 23..25: note = Core
  misc_feature 26..50: note = RF
cggccttgcgcctggggctctttttttgttccgcagcttcatgcggttca

SEQ ID NO: 28861 - DNA, 50 bp, unidentified
  source 1..50: mol_type = unassigned DNA; note = target_d9f8e57
  misc_feature 1..24: note = LF
  misc_feature 25: note = Core
  misc_feature 26..50: note = RF
caaatgtgggagggagcttgctccctcccacatttgtctcgcggcgcatc

SEQ ID NO: 28862 - DNA, 50 bp, unidentified
  source 1..50: mol_type = unassigned DNA; note = target_d9f981e
  misc_feature 1..23: note = LF
  misc_feature 24..25: note = Core
  misc_feature 26..50: note = RF
aaaatgttttggccatagtcgccctcgattctatcacggaagcccttgtt

SEQ ID NO: 28863 - DNA, 50 bp, unidentified
  source 1..50: mol_type = unassigned DNA; note = target_da0717a
  misc_feature 1..23: note = LF
  misc_feature 24..25: note = Core
  misc_feature 26..50: note = RF
gatggtaggcataggtttccctcctttctgtatggggatgggttatacta

SEQ ID NO: 28864 - DNA, 50 bp, unidentified
  source 1..50: mol_type = unassigned DNA; note = target_da07195
  misc_feature 1..22: note = LF
  misc_feature 23..25: note = Core
  misc_feature 26..50: note = RF
gccattcccgctttcggctacaagaaccatgccgccatcgaccgccggca

SEQ ID NO: 28865 - DNA, 50 bp, unidentified
  source 1..50: mol_type = unassigned DNA; note = target_da0ae40
  misc_feature 1..23: note = LF
  misc_feature 24..25: note = Core
  misc_feature 26..50: note = RF
cgacgccatcgctggcaagccagctcccacagtttttgtgcccgaaccac

SEQ ID NO: 28866 - DNA, 50 bp, unidentified
  source 1..50: mol_type = unassigned DNA; note = target_da0e9fe
  misc_feature 1..22: note = LF
  misc_feature 23..25: note = Core
  misc_feature 26..50: note = RF
atgggtaccatctgtttgggtcagaccactagcactctcaagacctgaac

SEQ ID NO: 28867 - DNA, 50 bp, unidentified
  source 1..50: mol_type = unassigned DNA; note = target_da1c28d
  misc_feature 1..22: note = LF
  misc_feature 23..25: note = Core
  misc_feature 26..50: note = RF
ctttgccataatcattttctccctttctatggacatgtcttttaatgcag

SEQ ID NO: 28868 - DNA, 50 bp, unidentified
  source 1..50: mol_type = unassigned DNA; note = target_da2a550
  misc_feature 1..23: note = LF
  misc_feature 24..25: note = Core
  misc_feature 26..50: note = RF
caacatttaacataacacaactcctttattatattcttagtaacattata

SEQ ID NO: 28869 - DNA, 50 bp, unidentified
  source 1..50: mol_type = unassigned DNA; note = target_da44df9
  misc_feature 1..21: note = LF
  misc_feature 22..25: note = Core
  misc_feature 26..50: note = RF
tcgcggctgctccgccctagaatgacgatcgcgatgggcgtttcggctaa

SEQ ID NO: 28870 - DNA, 50 bp, unidentified
  source 1..50: mol_type = unassigned DNA; note = target_da488ac
  misc_feature 1..22: note = LF
  misc_feature 23..25: note = Core
  misc_feature 26..50: note = RF
atgtacttaaactaacgggtgcgtttagttgaattacagggtccgagggt

SEQ ID NO: 28871 - DNA, 50 bp, unidentified
  source 1..50: mol_type = unassigned DNA; note = target_da48cbe
  misc_feature 1..23: note = LF
  misc_feature 24..25: note = Core
  misc_feature 26..50: note = RF
gcagggcgacccgccggtcgcccctacatccgtgattcgcgccctcgtgg

SEQ ID NO: 28872 - DNA, 50 bp, unidentified
  source 1..50: mol_type = unassigned DNA; note = target_da4af12
  misc_feature 1..23: note = LF
  misc_feature 24..25: note = Core
  misc_feature 26..50: note = RF
gaagagcatcggcgctcgaaatcctatcggtcaggccaccctactccgag

SEQ ID NO: 28873 - DNA, 50 bp, unidentified
  source 1..50: mol_type = unassigned DNA; note = target_da51f71
  misc_feature 1..23: note = LF
  misc_feature 24..25: note = Core
  misc_feature 26..50: note = RF
ttccagacccatccgacttcgttagtcggagcgcctcatgccagctacca

SEQ ID NO: 28874 - DNA, 50 bp, unidentified
  source 1..50: mol_type = unassigned DNA; note = target_da5923d
  misc_feature 1..24: note = LF
  misc_feature 25: note = Core
  misc_feature 26..50: note = RF
cagcttgctcagcttggagtcgttcagaatgagggggatgattttttgga

SEQ ID NO: 28875 - DNA, 50 bp, unidentified
  source 1..50: mol_type = unassigned DNA; note = target_da5a485
  misc_feature 1..23: note = LF
  misc_feature 24..25: note = Core
  misc_feature 26..50: note = RF
catcggttccatgggtcagtgtcctttcagacggagcccggcgcccggag

SEQ ID NO: 28876 - DNA, 50 bp, unidentified
  source 1..50: mol_type = unassigned DNA; note = target_da5b45a
  misc_feature 1..23: note = LF
  misc_feature 24..25: note = Core
  misc_feature 26..50: note = RF
gaagggcggccttgcggccgcccttttccatgggtgcgcgtcgtcgcgcc

SEQ ID NO: 28877 - DNA, 50 bp, unidentified
  source 1..50: mol_type = unassigned DNA; note = target_da60a3e
  misc_feature 1..23: note = LF
  misc_feature 24..25: note = Core
  misc_feature 26..50: note = RF
taattatacattttccatacctcctaaatgatactttactattatattcc

SEQ ID NO: 28878 - DNA, 50 bp, unidentified
  source 1..50: mol_type = unassigned DNA; note = target_da65e0c
  misc_feature 1..23: note = LF
  misc_feature 24..25: note = Core
  misc_feature 26..50: note = RF
cctgcaatatattcattatatatctccttactgtttcattatcgtcacta

SEQ ID NO: 28879 - DNA, 50 bp, unidentified
  source 1..50: mol_type = unassigned DNA; note = target_da675e0
  misc_feature 1..23: note = LF
  misc_feature 24..25: note = Core
  misc_feature 26..50: note = RF
gcgtctggctcgaagcagaggtgctctaaagcgtccgacttttaacctga

SEQ ID NO: 28880 - DNA, 50 bp, unidentified
  source 1..50: mol_type = unassigned DNA; note = target_da681fb
  misc_feature 1..22: note = LF
  misc_feature 23..25: note = Core
  misc_feature 26..50: note = RF
accttctaagagaaacgcctccgttttgttgaagtacatcaattcacaat

SEQ ID NO: 28881 - DNA, 50 bp, unidentified
  source 1..50: mol_type = unassigned DNA; note = target_da6e654
  misc_feature 1..21: note = LF
  misc_feature 22..25: note = Core
  misc_feature 26..50: note = RF
accagacgtgaaacaggtcttttttatttcataaataagttttgcgttat

SEQ ID NO: 28882 - DNA, 50 bp, unidentified
  source 1..50: mol_type = unassigned DNA; note = target_da70a9a
  misc_feature 1..24: note = LF
  misc_feature 25: note = Core
  misc_feature 26..50: note = RF
gtcaaccgggtgtcctgcaagtgccgttcggggatgctggcgttcgcgag

SEQ ID NO: 28883 - DNA, 50 bp, unidentified
  source 1..50: mol_type = unassigned DNA; note = target_da7183a
  misc_feature 1..22: note = LF
  misc_feature 23..25: note = Core
  misc_feature 26..50: note = RF
aagggtgggccgacgtgcacaatctccgactggaggttgaactcgtggaa

SEQ ID NO: 28884 - DNA, 50 bp, unidentified
  source 1..50: mol_type = unassigned DNA; note = target_da72ed3
  misc_feature 1..24: note = LF
  misc_feature 25: note = Core
  misc_feature 26..50: note = RF
gacaagaacggaaatacaggagaaaacacaccaccgattgctcaggcgat

SEQ ID NO: 28885 - DNA, 50 bp, unidentified
  source 1..50: mol_type = unassigned DNA; note = target_da7e9dc
  misc_feature 1..23: note = LF
  misc_feature 24..25: note = Core
  misc_feature 26..50: note = RF
agggccggcgcgcgcttactctcctcactccccgggcgtgcggcacgcct

SEQ ID NO: 28886 - DNA, 50 bp, unidentified
  source 1..50: mol_type = unassigned DNA; note = target_da7ebdc
  misc_feature 1..23: note = LF
  misc_feature 24..25: note = Core
  misc_feature 26..50: note = RF
cgggcgcccaccccggcccctccctgtcaggctgccgtgagacacccggg

SEQ ID NO: 28887 - DNA, 50 bp, unidentified
  source 1..50: mol_type = unassigned DNA; note = target_da84bf5
  misc_feature 1..24: note = LF
  misc_feature 25: note = Core
  misc_feature 26..50: note = RF
aagaactgcttgcatgaacgggggcatccattcatgacccgggctttgag

SEQ ID NO: 28888 - DNA, 50 bp, unidentified
  source 1..50: mol_type = unassigned DNA; note = target_da88f47
  misc_feature 1..22: note = LF
  misc_feature 23..25: note = Core
  misc_feature 26..50: note = RF
tggcctcttcgcgagcaagcccgctcccacattcgaccgcattccaaggg

SEQ ID NO: 28889 - DNA, 50 bp, unidentified
  source 1..50: mol_type = unassigned DNA; note = target_da9767d
  misc_feature 1..23: note = LF
  misc_feature 24..25: note = Core
  misc_feature 26..50: note = RF
ggacgggtgaagcgtcgtccaccctacgcctaggcgccaagactgtagga

SEQ ID NO: 28890 - DNA, 50 bp, unidentified
  source 1..50: mol_type = unassigned DNA; note = target_da9c8c9
  misc_feature 1..23: note = LF
  misc_feature 24..25: note = Core
  misc_feature 26..50: note = RF
ctttagggcagcttttggcccttagcggacatgctctcgcgcttctgcga

SEQ ID NO: 28891 - DNA, 50 bp, unidentified
  source 1..50: mol_type = unassigned DNA; note = target_daa6b70
  misc_feature 1..22: note = LF
  misc_feature 23..25: note = Core
  misc_feature 26..50: note = RF
ggatggcacaaggccgtagttcctaaacgctgagcgccacgcctaaaggc

SEQ ID NO: 28892 - DNA, 50 bp, unidentified
  source 1..50: mol_type = unassigned DNA; note = target_daae8fd
  misc_feature 1..23: note = LF
  misc_feature 24..25: note = Core
  misc_feature 26..50: note = RF
tataggattcggcggtttgggggtggattgcggaagggcggcttgcatga

SEQ ID NO: 28893 - DNA, 50 bp, unidentified
  source 1..50: mol_type = unassigned DNA; note = target_dab0509
  misc_feature 1..24: note = LF
  misc_feature 25: note = Core
  misc_feature 26..50: note = RF
ccttatcgcggcgaacacccgaagccgacgttcgttattgacaaaattcg

SEQ ID NO: 28894 - DNA, 50 bp, unidentified
  source 1..50: mol_type = unassigned DNA; note = target_dab142a
  misc_feature 1..23: note = LF
  misc_feature 24..25: note = Core
  misc_feature 26..50: note = RF
gatacgcgacgggtcgttacgggtctgacataacaatcttatcagtcttc

SEQ ID NO: 28895 - DNA, 50 bp, unidentified
  source 1..50: mol_type = unassigned DNA; note = target_dab24a9
  misc_feature 1..23: note = LF
  misc_feature 24..25: note = Core
  misc_feature 26..50: note = RF
tcattcagtaattccatatttctctcctgctccaggtcatcgagcttatt

SEQ ID NO: 28896 - DNA, 50 bp, unidentified
  source 1..50: mol_type = unassigned DNA; note = target_dab66eb
  misc_feature 1..23: note = LF
  misc_feature 24..25: note = Core
  misc_feature 26..50: note = RF
ctgatgttttcagcccccatcatctgttgagtttcgggagccgcggtttt

SEQ ID NO: 28897 - DNA, 50 bp, unidentified
  source 1..50: mol_type = unassigned DNA; note = target_dad1664
  misc_feature 1..23: note = LF
  misc_feature 24..25: note = Core
  misc_feature 26..50: note = RF
gggttatcgcgatctggagatcgctcctacggcggaatgcgttgtgtcgc

SEQ ID NO: 28898 - DNA, 50 bp, unidentified
  source 1..50: mol_type = unassigned DNA; note = target_dad1f56
  misc_feature 1..23: note = LF
  misc_feature 24..25: note = Core
  misc_feature 26..50: note = RF
ttccggtcagcgaacgcactctcctgccgcgatgaagcaacaggagcgtc

SEQ ID NO: 28899 - DNA, 50 bp, unidentified
  source 1..50: mol_type = unassigned DNA; note = target_dad3a18
  misc_feature 1..23: note = LF
  misc_feature 24..25: note = Core
  misc_feature 26..50: note = RF
aggattattgggtttttgtgcaaataacgaattaaatgaaatatcggtga

SEQ ID NO: 28900 - DNA, 50 bp, unidentified
  source 1..50: mol_type = unassigned DNA; note = target_dad4a6c
  misc_feature 1..22: note = LF
  misc_feature 23..25: note = Core
  misc_feature 26..50: note = RF
acataacgaatacaagctcatctgatcaaataaaaattaggtcaattcag

SEQ ID NO: 28901 - DNA, 50 bp, unidentified
  source 1..50: mol_type = unassigned DNA; note = target_dad8d11
  misc_feature 1..23: note = LF
  misc_feature 24..25: note = Core
  misc_feature 26..50: note = RF
aatcaaacgccttgcctgcagggatgcaggtacttttgtttagtctggaa

SEQ ID NO: 28902 - DNA, 50 bp, unidentified
  source 1..50: mol_type = unassigned DNA; note = target_dadf0c0
  misc_feature 1..23: note = LF
  misc_feature 24..25: note = Core
  misc_feature 26..50: note = RF
tgaatcgtgtcaaacgcgacacgctttaggccgccaacacgggcaaagtt

SEQ ID NO: 28903 - DNA, 50 bp, unidentified
  source 1..50: mol_type = unassigned DNA; note = target_dafd44e
  misc_feature 1..23: note = LF
  misc_feature 24..25: note = Core
  misc_feature 26..50: note = RF
agtaaaatcaatgggtcctgaccctagattgagcggcagcaatgggccgg

SEQ ID NO: 28904 - DNA, 50 bp, unidentified
  source 1..50: mol_type = unassigned DNA; note = target_dafef18
  misc_feature 1..22: note = LF
  misc_feature 23..25: note = Core
  misc_feature 26..50: note = RF
acccgaaattgcctcaagtgtgagaaatccgcgtcgaggttgatttttcc

SEQ ID NO: 28905 - DNA, 50 bp, unidentified
  source 1..50: mol_type = unassigned DNA; note = target_db13065
  misc_feature 1..21: note = LF
  misc_feature 22..25: note = Core
  misc_feature 26..50: note = RF
atatctttatccttcatattttcacctcactgcgcttcataaagtttcat

SEQ ID NO: 28906 - DNA, 50 bp, unidentified
  source 1..50: mol_type = unassigned DNA; note = target_db23f22
  misc_feature 1..23: note = LF
  misc_feature 24..25: note = Core
  misc_feature 26..50: note = RF
aaaatccgcgttcatccgcattgtccgcgtctaaagaatccccctcaacc

SEQ ID NO: 28907 - DNA, 50 bp, unidentified
  source 1..50: mol_type = unassigned DNA; note = target_db375af
  misc_feature 1..23: note = LF
  misc_feature 24..25: note = Core
  misc_feature 26..50: note = RF
tattaccgaaagggcggattccagactttcgctgctggtgcgaaagccga

SEQ ID NO: 28908 - DNA, 50 bp, unidentified
  source 1..50: mol_type = unassigned DNA; note = target_db398ab
  misc_feature 1..23: note = LF
  misc_feature 24..25: note = Core
  misc_feature 26..50: note = RF
cctcctgacgtttctgtgggttcctttcatgatcgtccggggagtggtgg

SEQ ID NO: 28909 - DNA, 50 bp, unidentified
  source 1..50: mol_type = unassigned DNA; note = target_db4407c
  misc_feature 1..23: note = LF
  misc_feature 24..25: note = Core
  misc_feature 26..50: note = RF
ccgggcccctcgaacgtccggatctgccgcgcagaggcaatgtcgcaacc

SEQ ID NO: 28910 - DNA, 50 bp, unidentified
  source 1..50: mol_type = unassigned DNA; note = target_db45a01
  misc_feature 1..22: note = LF
  misc_feature 23..25: note = Core
  misc_feature 26..50: note = RF
atcactcaggcgaagagataagccccccaagaattacggagttagagtaa

SEQ ID NO: 28911 - DNA, 50 bp, unidentified
  source 1..50: mol_type = unassigned DNA; note = target_db46a02
  misc_feature 1..24: note = LF
  misc_feature 25: note = Core
  misc_feature 26..50: note = RF
gtaatgctgctccataacgattctcttatttcgtgtgtaatgtgaaataa

SEQ ID NO: 28912 - DNA, 50 bp, unidentified
  source 1..50: mol_type = unassigned DNA; note = target_db48903
  misc_feature 1..21: note = LF
  misc_feature 22..25: note = Core
  misc_feature 26..50: note = RF
gttcggagaaatccgggccttttttattgcattcgctttcaaacacacta

SEQ ID NO: 28913 - DNA, 50 bp, unidentified
  source 1..50: mol_type = unassigned DNA; note = target_db4a8cc
  misc_feature 1..22: note = LF
  misc_feature 23..25: note = Core
  misc_feature 26..50: note = RF
atgttatacaactaaagggtgcgtttagcttcactaaaattgactcgcca

SEQ ID NO: 28914 - DNA, 50 bp, unidentified
  source 1..50: mol_type = unassigned DNA; note = target_db501d9
  misc_feature 1..24: note = LF
  misc_feature 25: note = Core
  misc_feature 26..50: note = RF
cgaaggacgcgttacggccagaagcggccactcgtgctccctagagttcg

SEQ ID NO: 28915 - DNA, 50 bp, unidentified
  source 1..50: mol_type = unassigned DNA; note = target_db51134
  misc_feature 1..22: note = LF
  misc_feature 23..25: note = Core
  misc_feature 26..50: note = RF
ccggtgcatcatgccgagcatgtgcaacctctacaatctcaccaccgcgc

SEQ ID NO: 28916 - DNA, 50 bp, unidentified
  source 1..50: mol_type = unassigned DNA; note = target_db536de
  misc_feature 1..22: note = LF
  misc_feature 23..25: note = Core
  misc_feature 26..50: note = RF
cggggtcacacgcaccaacggagttcaggtcttgcatcaccggcctcccg

SEQ ID NO: 28917 - DNA, 50 bp, unidentified
  source 1..50: mol_type = unassigned DNA; note = target_db5a70c
  misc_feature 1..24: note = LF
  misc_feature 25: note = Core
  misc_feature 26..50: note = RF
ttgattgtagctaatgacaagacctgaccctgtatttgtatttgtatgac

SEQ ID NO: 28918 - DNA, 50 bp, unidentified
  source 1..50: mol_type = unassigned DNA; note = target_db5d6eb
  misc_feature 1..23: note = LF
  misc_feature 24..25: note = Core
  misc_feature 26..50: note = RF
ccgcttggctgtccgctttggggtgggaagcagttcattcccctctcccg

SEQ ID NO: 28919 - DNA, 50 bp, unidentified
  source 1..50: mol_type = unassigned DNA; note = target_db5ecd8
  misc_feature 1..24: note = LF
  misc_feature 25: note = Core
  misc_feature 26..50: note = RF
ccttggccgcaggcgtcagaacttttcttgcggcgaggtccttcagcacg

SEQ ID NO: 28920 - DNA, 50 bp, unidentified
  source 1..50: mol_type = unassigned DNA; note = target_db5fbec
  misc_feature 1..21: note = LF
  misc_feature 22..25: note = Core
  misc_feature 26..50: note = RF
cggttattatataatgggttgtcatttcgaccagcgggagaaatcttgtt

SEQ ID NO: 28921 - DNA, 50 bp, unidentified
  source 1..50: mol_type = unassigned DNA; note = target_db624f8
  misc_feature 1..23: note = LF
  misc_feature 24..25: note = Core
  misc_feature 26..50: note = RF
cctaagtcaacggtattgccgctagccgttcttatgcacgagaggaatgg

SEQ ID NO: 28922 - DNA, 50 bp, unidentified
  source 1..50: mol_type = unassigned DNA; note = target_db64b5d
  misc_feature 1..23: note = LF
  misc_feature 24..25: note = Core
  misc_feature 26..50: note = RF
gatcgggttgagatcggggctgtagggcggcaggaacaacatccatgcac

SEQ ID NO: 28923 - DNA, 50 bp, unidentified
  source 1..50: mol_type = unassigned DNA; note = target_db86798
  misc_feature 1..23: note = LF
  misc_feature 24..25: note = Core
  misc_feature 26..50: note = RF
tgtatcttttatacatatctcttcttctgtgtttggtgattgtttcatac

SEQ ID NO: 28924 - DNA, 50 bp, unidentified
  source 1..50: mol_type = unassigned DNA; note = target_db94466
  misc_feature 1..24: note = LF
  misc_feature 25: note = Core
  misc_feature 26..50: note = RF
atgacaggcacttgcggacagcggcaagagagtgcgtcgccctcgacaac

SEQ ID NO: 28925 - DNA, 50 bp, unidentified
  source 1..50: mol_type = unassigned DNA; note = target_db963b0
  misc_feature 1..22: note = LF
  misc_feature 23..25: note = Core
  misc_feature 26..50: note = RF
gtagggaagcatgatggttttcctttctgaagaagagagattgcggtctc

SEQ ID NO: 28926 - DNA, 50 bp, unidentified
  source 1..50: mol_type = unassigned DNA; note = target_db9a146
  misc_feature 1..24: note = LF
  misc_feature 25: note = Core
  misc_feature 26..50: note = RF
tctattcctattctcataattacttctccttattcatttcttttttaaca

SEQ ID NO: 28927 - DNA, 50 bp, unidentified
  source 1..50: mol_type = unassigned DNA; note = target_db9f47a
  misc_feature 1..23: note = LF
  misc_feature 24..25: note = Core
  misc_feature 26..50: note = RF
tccttgcatttacggcgtggaggatgtcaaagaggtgatgacaacaatcg

SEQ ID NO: 28928 - DNA, 50 bp, unidentified
  source 1..50: mol_type = unassigned DNA; note = target_dbab248
  misc_feature 1..23: note = LF
  misc_feature 24..25: note = Core
  misc_feature 26..50: note = RF
cggccaggtgcacgtgcaaagcagacgcgacgcggcgacgctcagatcgg

SEQ ID NO: 28929 - DNA, 50 bp, unidentified
  source 1..50: mol_type = unassigned DNA; note = target_dbaf7b6
  misc_feature 1..24: note = LF
  misc_feature 25: note = Core
  misc_feature 26..50: note = RF
aggcggggatgacgaataaatcagagcgtccccttaaagggcgtattttt

SEQ ID NO: 28930 - DNA, 50 bp, unidentified
  source 1..50: mol_type = unassigned DNA; note = target_dbb2771
  misc_feature 1..22: note = LF
  misc_feature 23..25: note = Core
  misc_feature 26..50: note = RF
tctgcgtcttagcgtctggctctttactaattgatgtattcgattgttgc

SEQ ID NO: 28931 - DNA, 50 bp, unidentified
  source 1..50: mol_type = unassigned DNA; note = target_dbb55f3
  misc_feature 1..23: note = LF
  misc_feature 24..25: note = Core
  misc_feature 26..50: note = RF
atattggccgcaatgtccgctggtgggtcggtagatgtcgatcccgtgat

SEQ ID NO: 28932 - DNA, 50 bp, unidentified
  source 1..50: mol_type = unassigned DNA; note = target_dbb980d
  misc_feature 1..23: note = LF
  misc_feature 24..25: note = Core
  misc_feature 26..50: note = RF
gtgctgtccagcatcagggcttcctttcgaagtgaggcgcagttgtgccc

SEQ ID NO: 28933 - DNA, 50 bp, unidentified
  source 1..50: mol_type = unassigned DNA; note = target_dbc6093
  misc_feature 1..23: note = LF
  misc_feature 24..25: note = Core
  misc_feature 26..50: note = RF
cattttcggctttttgtcaatacctttttgcaaaaatttacattatatac

SEQ ID NO: 28934 - DNA, 50 bp, unidentified
  source 1..50: mol_type = unassigned DNA; note = target_dbc9d86
  misc_feature 1..23: note = LF
  misc_feature 24..25: note = Core
  misc_feature 26..50: note = RF
gccgaacgatgacgaaggcatagagcaggtcgaagccgatagtcggaaca

SEQ ID NO: 28935 - DNA, 50 bp, unidentified
  source 1..50: mol_type = unassigned DNA; note = target_dbcf0b3
  misc_feature 1..24: note = LF
  misc_feature 25: note = Core
  misc_feature 26..50: note = RF
ccgtggacatcacggcttgtccactttggcacaaatccctcgccgcttag

SEQ ID NO: 28936 - DNA, 50 bp, unidentified
  source 1..50: mol_type = unassigned DNA; note = target_dbcf746
  misc_feature 1..23: note = LF
  misc_feature 24..25: note = Core
  misc_feature 26..50: note = RF
tatgaatattgcataagtagctcctttcaaaattagtcgttgatgtggta

SEQ ID NO: 28937 - DNA, 50 bp, unidentified
  source 1..50: mol_type = unassigned DNA; note = target_dbd7bdc
  misc_feature 1..23: note = LF
  misc_feature 24..25: note = Core
  misc_feature 26..50: note = RF
ggcacgcagtccaggggtccggtagcaaccgaaccgaaagtgcgtttcag

SEQ ID NO: 28938 - DNA, 50 bp, unidentified
  source 1..50: mol_type = unassigned DNA; note = target_dbddacf
  misc_feature 1..23: note = LF
  misc_feature 24..25: note = Core
  misc_feature 26..50: note = RF
gatcgccgttctgttccccgtactggcacaaggacaccagccggtgtcca

SEQ ID NO: 28939 - DNA, 50 bp, unidentified
  source 1..50: mol_type = unassigned DNA; note = target_dbe8f28
  misc_feature 1..23: note = LF
  misc_feature 24..25: note = Core
  misc_feature 26..50: note = RF
gcttctatgtctgcgcctagttctggaactagaaccttccatatgatcga

SEQ ID NO: 28940 - DNA, 50 bp, unidentified
  source 1..50: mol_type = unassigned DNA; note = target_dbea7d4
  misc_feature 1..24: note = LF
  misc_feature 25: note = Core
  misc_feature 26..50: note = RF
aagtagacgttgcagcgcgtaggttgggttaagccgcgtacgcggcgaac

SEQ ID NO: 28941 - DNA, 50 bp, unidentified
  source 1..50: mol_type = unassigned DNA; note = target_dbea998
  misc_feature 1..22: note = LF
  misc_feature 23..25: note = Core
  misc_feature 26..50: note = RF
ccgaggttggcaaaaacactgcggacattaaccgactgctggatcggctg

SEQ ID NO: 28942 - DNA, 50 bp, unidentified
  source 1..50: mol_type = unassigned DNA; note = target_dbeebb8
  misc_feature 1..21: note = LF
  misc_feature 22..25: note = Core
  misc_feature 26..50: note = RF
acagtggagaggctcacgacggtcatggccggtcccccagacgatctgag

SEQ ID NO: 28943 - DNA, 50 bp, unidentified
  source 1..50: mol_type = unassigned DNA; note = target_dbf8011
  misc_feature 1..23: note = LF
  misc_feature 24..25: note = Core
  misc_feature 26..50: note = RF
ctcggcccgcgtgcgcagctgcgctcagtcctccagcagcgagcgcagca

SEQ ID NO: 28944 - DNA, 50 bp, unidentified
  source 1..50: mol_type = unassigned DNA; note = target_dbfa3a5
  misc_feature 1..24: note = LF
  misc_feature 25: note = Core
  misc_feature 26..50: note = RF
cagaaaaaaaggttttttcatttatatacctcctgttacaattctccaat

SEQ ID NO: 28945 - DNA, 50 bp, unidentified
  source 1..50: mol_type = unassigned DNA; note = target_dbfacbf
  misc_feature 1..23: note = LF
  misc_feature 24..25: note = Core
  misc_feature 26..50: note = RF
ctgctccggagactcaggctcctctagacccgatcgcagacgaccaggcc

SEQ ID NO: 28946 - DNA, 50 bp, unidentified
  source 1..50: mol_type = unassigned DNA; note = target_dc03ed0
  misc_feature 1..23: note = LF
  misc_feature 24..25: note = Core
  misc_feature 26..50: note = RF
ccgtgagccagtcgcactgcctcctggtggttgatccgccagcgcaattc

SEQ ID NO: 28947 - DNA, 50 bp, unidentified
  source 1..50: mol_type = unassigned DNA; note = target_dc045b5
  misc_feature 1..23: note = LF
  misc_feature 24..25: note = Core
  misc_feature 26..50: note = RF
ttcccttatatttcatttcttctctccttatctcttgatctcaatggtat

SEQ ID NO: 28948 - DNA, 50 bp, unidentified
  source 1..50: mol_type = unassigned DNA; note = target_dc0bddf
  misc_feature 1..23: note = LF
  misc_feature 24..25: note = Core
  misc_feature 26..50: note = RF
acgatgctggaaggtcgacatgaacgaatggcaaaagttcggaagcgggg

SEQ ID NO: 28949 - DNA, 50 bp, unidentified
  source 1..50: mol_type = unassigned DNA; note = target_dc0c76a
  misc_feature 1..23: note = LF
  misc_feature 24..25: note = Core
  misc_feature 26..50: note = RF
cgaagtgaactagccgatatcgtagcccggatgagcgcagcgacatccgg

SEQ ID NO: 28950 - DNA, 50 bp, unidentified
  source 1..50: mol_type = unassigned DNA; note = target_dc199ea
  misc_feature 1..22: note = LF
  misc_feature 23..25: note = Core
  misc_feature 26..50: note = RF
cattcactatttcttcttgtctcatattcaataatatttattatactctt

SEQ ID NO: 28951 - DNA, 50 bp, unidentified
  source 1..50: mol_type = unassigned DNA; note = target_dc1a206
  misc_feature 1..24: note = LF
  misc_feature 25: note = Core
  misc_feature 26..50: note = RF
attagagtaaatgaagtatacaccttgttggtaacagtattgcattattc

SEQ ID NO: 28952 - DNA, 50 bp, unidentified
  source 1..50: mol_type = unassigned DNA; note = target_dc1ec2a
  misc_feature 1..23: note = LF
  misc_feature 24..25: note = Core
  misc_feature 26..50: note = RF
gagtgggggcggttaccacgctcctatgaagtcacaccggtcggtccgat

SEQ ID NO: 28953 - DNA, 50 bp, unidentified
  source 1..50: mol_type = unassigned DNA; note = target_dc36af7
  misc_feature 1..23: note = LF
  misc_feature 24..25: note = Core
  misc_feature 26..50: note = RF
ctccgcgaagatgccgatcgctttttaggacgtcgcgctccatgcgcgtc

SEQ ID NO: 28954 - DNA, 50 bp, unidentified
  source 1..50: mol_type = unassigned DNA; note = target_dc397ae
  misc_feature 1..23: note = LF
  misc_feature 24..25: note = Core
  misc_feature 26..50: note = RF
cgaggcaatccgagcaatccgacctctccccgcaagcggggagaggtaag

SEQ ID NO: 28955 - DNA, 50 bp, unidentified
  source 1..50: mol_type = unassigned DNA; note = target_dc3af94
  misc_feature 1..23: note = LF
  misc_feature 24..25: note = Core
  misc_feature 26..50: note = RF
tagtgcggtgggcggagcccaccctacgggatacaaaataatttgtcttg

SEQ ID NO: 28956 - DNA, 50 bp, unidentified
  source 1..50: mol_type = unassigned DNA; note = target_dc53461
  misc_feature 1..23: note = LF
  misc_feature 24..25: note = Core
  misc_feature 26..50: note = RF
tcaatgatcaggcggggctttgttgcgcaaaggctgggtgagggattcat

SEQ ID NO: 28957 - DNA, 50 bp, unidentified
  source 1..50: mol_type = unassigned DNA; note = target_dc5e148
  misc_feature 1..23: note = LF
  misc_feature 24..25: note = Core
  misc_feature 26..50: note = RF
ttgtcttcaggtctgattctttcctcctctaaatagtaaagaaaattgta

SEQ ID NO: 28958 - DNA, 50 bp, unidentified
  source 1..50: mol_type = unassigned DNA; note = target_dc63494
  misc_feature 1..23: note = LF
  misc_feature 24..25: note = Core
  misc_feature 26..50: note = RF
atttcgaaactgactttcgaaactgactcttaggatcgaagagcgcggct

SEQ ID NO: 28959 - DNA, 50 bp, unidentified
  source 1..50: mol_type = unassigned DNA; note = target_dc663f7
  misc_feature 1..14: note = LF
  misc_feature 15..25: note = Core
  misc_feature 26..50: note = RF
atcatggctgtcacctcctattatcctgttcgttttatttctaacgatat

SEQ ID NO: 28960 - DNA, 50 bp, unidentified
  source 1..50: mol_type = unassigned DNA; note = target_dc6675f
  misc_feature 1..23: note = LF
  misc_feature 24..25: note = Core
  misc_feature 26..50: note = RF
gtgggccatgtcgaacgggaaaccttcgctgcagccactctcgtggcgcg

SEQ ID NO: 28961 - DNA, 50 bp, unidentified
  source 1..50: mol_type = unassigned DNA; note = target_dc6f28a
  misc_feature 1..23: note = LF
  misc_feature 24..25: note = Core
  misc_feature 26..50: note = RF
ctcacgatccattgccacagctcctttccagcaaacgatcaaccttattc

SEQ ID NO: 28962 - DNA, 50 bp, unidentified
  source 1..50: mol_type = unassigned DNA; note = target_dc790d4
  misc_feature 1..23: note = LF
  misc_feature 24..25: note = Core
  misc_feature 26..50: note = RF
attacccaaagctgttgtagttgctgttagcggtaatgataattttttta

SEQ ID NO: 28963 - DNA, 50 bp, unidentified
  source 1..50: mol_type = unassigned DNA; note = target_dc7c344
  misc_feature 1..23: note = LF
  misc_feature 24..25: note = Core
  misc_feature 26..50: note = RF
cttcccctatcatatagttcctcctcgtttccagaatttccagatcataa

SEQ ID NO: 28964 - DNA, 50 bp, unidentified
  source 1..50: mol_type = unassigned DNA; note = target_dc7d0f9
  misc_feature 1..22: note = LF
  misc_feature 23..25: note = Core
  misc_feature 26..50: note = RF
tggcctcttcgcgagcaagcccgctcccaccctaatgtgggagcgggctt

SEQ ID NO: 28965 - DNA, 50 bp, unidentified
  source 1..50: mol_type = unassigned DNA; note = target_dc801cd
  misc_feature 1..23: note = LF
  misc_feature 24..25: note = Core
  misc_feature 26..50: note = RF
gtcgccgacgcggtgcgtcgctcagccgacggtgagggcgctgaagacgt

SEQ ID NO: 28966 - DNA, 50 bp, unidentified
  source 1..50: mol_type = unassigned DNA; note = target_dc84032
  misc_feature 1..24: note = LF
  misc_feature 25: note = Core
  misc_feature 26..50: note = RF
cagttcaactaccccgctcatcggcacgagcggacgtcggagctggcact

SEQ ID NO: 28967 - DNA, 50 bp, unidentified
  source 1..50: mol_type = unassigned DNA; note = target_dc8cbab
  misc_feature 1..23: note = LF
  misc_feature 24..25: note = Core
  misc_feature 26..50: note = RF
gggtcaaaaaaaccgcttgatcaagatggttgtcgtgatctgagtggtca

SEQ ID NO: 28968 - DNA, 50 bp, unidentified
  source 1..50: mol_type = unassigned DNA; note = target_dc8f0b6
  misc_feature 1..24: note = LF
  misc_feature 25: note = Core
  misc_feature 26..50: note = RF
aatttaatcacattgtatcactactgtcccgttaagaactaaataagtag

SEQ ID NO: 28969 - DNA, 50 bp, unidentified
  source 1..50: mol_type = unassigned DNA; note = target_dc8fcb4
  misc_feature 1..23: note = LF
  misc_feature 24..25: note = Core
  misc_feature 26..50: note = RF
taaaaatttcatataaattattcctccttagttaaataaagagcttctaa

SEQ ID NO: 28970 - DNA, 50 bp, unidentified
  source 1..50: mol_type = unassigned DNA; note = target_dc92bc8
  misc_feature 1..24: note = LF
  misc_feature 25: note = Core
  misc_feature 26..50: note = RF
gggacgcactgaaatgacttatagtggaccccaattttcagacagcgaat

SEQ ID NO: 28971 - DNA, 50 bp, unidentified
  source 1..50: mol_type = unassigned DNA; note = target_dc9d4f8
  misc_feature 1..21: note = LF
  misc_feature 22..25: note = Core
  misc_feature 26..50: note = RF
agctcccggtcggccgggtcggtcatgggcactcctcatctggttgtcaa

SEQ ID NO: 28972 - DNA, 50 bp, unidentified
  source 1..50: mol_type = unassigned DNA; note = target_dc9eee4
  misc_feature 1..21: note = LF
  misc_feature 22..25: note = Core
  misc_feature 26..50: note = RF
cttgccgaacagcaggtcgccttcccagtggccggggacggcccggtcag

SEQ ID NO: 28973 - DNA, 50 bp, unidentified
  source 1..50: mol_type = unassigned DNA; note = target_dca3204
  misc_feature 1..23: note = LF
  misc_feature 24..25: note = Core
  misc_feature 26..50: note = RF
ccccttccctgcttcccgttagctgccatccgttcacattagcgtcgtgg

SEQ ID NO: 28974 - DNA, 50 bp, unidentified
  source 1..50: mol_type = unassigned DNA; note = target_dca96ce
  misc_feature 1..23: note = LF
  misc_feature 24..25: note = Core
  misc_feature 26..50: note = RF
tttaagagttctctcccaatagctatcgggatggctaatgccttctggct

SEQ ID NO: 28975 - DNA, 50 bp, unidentified
  source 1..50: mol_type = unassigned DNA; note = target_dcb39ee
  misc_feature 1..22: note = LF
  misc_feature 23..25: note = Core
  misc_feature 26..50: note = RF
tttttggccctgtcgatgtcgaatggcaatacggtgacacgcccgtattt

SEQ ID NO: 28976 - DNA, 50 bp, unidentified
  source 1..50: mol_type = unassigned DNA; note = target_dcba8b7
  misc_feature 1..23: note = LF
  misc_feature 24..25: note = Core
  misc_feature 26..50: note = RF
aactgcattcggctgcctcctttcttttgataaaatacttttatctgtag

SEQ ID NO: 28977 - DNA, 50 bp, unidentified
  source 1..50: mol_type = unassigned DNA; note = target_dcbcbbb
  misc_feature 1..23: note = LF
  misc_feature 24..25: note = Core
  misc_feature 26..50: note = RF
tgactgtcgaccgtcgcgtaattccccaggggtttccgtcacggaattcc

SEQ ID NO: 28978 - DNA, 50 bp, unidentified
  source 1..50: mol_type = unassigned DNA; note = target_dccaeb5
  misc_feature 1..23: note = LF
  misc_feature 24..25: note = Core
  misc_feature 26..50: note = RF
gtagagcgtttcgatcgcccccttttttcggcgaaggccggatcgacccg

SEQ ID NO: 28979 - DNA, 50 bp, unidentified
  source 1..50: mol_type = unassigned DNA; note = target_dcd294e
  misc_feature 1..24: note = LF
  misc_feature 25: note = Core
  misc_feature 26..50: note = RF
cgttgttgctgttaatccctccacttccgcacagactctacgttgccaac

SEQ ID NO: 28980 - DNA, 50 bp, unidentified
  source 1..50: mol_type = unassigned DNA; note = target_dcd62dc
  misc_feature 1..23: note = LF
  misc_feature 24..25: note = Core
  misc_feature 26..50: note = RF
cggtgccatggcgcgcggcgtcgctcacagccgcacctcggacccgcgct

SEQ ID NO: 28981 - DNA, 50 bp, unidentified
  source 1..50: mol_type = unassigned DNA; note = target_dd00e55
  misc_feature 1..23: note = LF
  misc_feature 24..25: note = Core
  misc_feature 26..50: note = RF
ttgggcgacaagccattttcttctgacaatgcccccgtcaccacatccat

SEQ ID NO: 28982 - DNA, 50 bp, unidentified
  source 1..50: mol_type = unassigned DNA; note = target_dd1615e
  misc_feature 1..24: note = LF
  misc_feature 25: note = Core
  misc_feature 26..50: note = RF
aagtgactaattcattatttcaattggtattaattgttatacagtatatt

SEQ ID NO: 28983 - DNA, 50 bp, unidentified
  source 1..50: mol_type = unassigned DNA; note = target_dd17a09
  misc_feature 1..21: note = LF
  misc_feature 22..25: note = Core
  misc_feature 26..50: note = RF
gtgtgggtcggtcatggtgtgctccctcgctttggagtgggatgggtgat

SEQ ID NO: 28984 - DNA, 50 bp, unidentified
  source 1..50: mol_type = unassigned DNA; note = target_dd229b8
  misc_feature 1..23: note = LF
  misc_feature 24..25: note = Core
  misc_feature 26..50: note = RF
cgagcggatggtcgtgcaggctctggtgcaaattttccatgagagcacaa

SEQ ID NO: 28985 - DNA, 50 bp, unidentified
  source 1..50: mol_type = unassigned DNA; note = target_dd25e7d
  misc_feature 1..24: note = LF
  misc_feature 25: note = Core
  misc_feature 26..50: note = RF
agtcctgaagggccgctactgacccaaagcggacggttttttgcgatgaa

SEQ ID NO: 28986 - DNA, 50 bp, unidentified
  source 1..50: mol_type = unassigned DNA; note = target_dd320ba
  misc_feature 1..24: note = LF
  misc_feature 25: note = Core
  misc_feature 26..50: note = RF
gctttggcgatgaactccgggccattgtccgaacgaatatgggtggggat

SEQ ID NO: 28987 - DNA, 50 bp, unidentified
  source 1..50: mol_type = unassigned DNA; note = target_dd3766d
  misc_feature 1..23: note = LF
  misc_feature 24..25: note = Core
  misc_feature 26..50: note = RF
gccgaaactgttcattctttcttagtactatactttaaacgcagctttat

SEQ ID NO: 28988 - DNA, 50 bp, unidentified
  source 1..50: mol_type = unassigned DNA; note = target_dd3d237
  misc_feature 1..23: note = LF
  misc_feature 24..25: note = Core
  misc_feature 26..50: note = RF
tctcgccatggcgagggtttttcagcagactgctagttggctgattcagt

SEQ ID NO: 28989 - DNA, 50 bp, unidentified
  source 1..50: mol_type = unassigned DNA; note = target_dd47c95
  misc_feature 1..23: note = LF
  misc_feature 24..25: note = Core
  misc_feature 26..50: note = RF
aactgtgagccaatcacagttttttttaatgcaaatttttatttagtttc

SEQ ID NO: 28990 - DNA, 50 bp, unidentified
  source 1..50: mol_type = unassigned DNA; note = target_dd4826a
  misc_feature 1..23: note = LF
  misc_feature 24..25: note = Core
  misc_feature 26..50: note = RF
taatttccataataaaaaacctcctttctatttctcttttttatagtatt

SEQ ID NO: 28991 - DNA, 50 bp, unidentified
  source 1..50: mol_type = unassigned DNA; note = target_dd4b66a
  misc_feature 1..23: note = LF
  misc_feature 24..25: note = Core
  misc_feature 26..50: note = RF
ccgccccgcaggggcgccgatgactgtcacgatcaggtgagacatccggc

SEQ ID NO: 28992 - DNA, 50 bp, unidentified
  source 1..50: mol_type = unassigned DNA; note = target_dd52d80
  misc_feature 1..24: note = LF
  misc_feature 25: note = Core
  misc_feature 26..50: note = RF
ctgcacacccgataaccgcaggagagtgctcatggagaaaccgaaggccc

SEQ ID NO: 28993 - DNA, 50 bp, unidentified
  source 1..50: mol_type = unassigned DNA; note = target_dd556c7
  misc_feature 1..22: note = LF
  misc_feature 23..25: note = Core
  misc_feature 26..50: note = RF
tgcgatataacggttcataggacacctcactgcagattgatatccttttc

SEQ ID NO: 28994 - DNA, 50 bp, unidentified; identical to SEQ ID NO: 21103
  source 1..50: mol_type = unassigned DNA; note = target_dd6282e
  misc_feature 1..23: note = LF
  misc_feature 24..25: note = Core
  misc_feature 26..50: note = RF

SEQ ID NO: 28995 - DNA, 50 bp, unidentified
  source 1..50: mol_type = unassigned DNA; note = target_dd6c200
  misc_feature 1..23: note = LF
  misc_feature 24..25: note = Core
  misc_feature 26..50: note = RF
gaagtcgccttcgtcggtgaagcctcagaccacgtcggcgtccgcgactc

SEQ ID NO: 28996 - DNA, 50 bp, unidentified
  source 1..50: mol_type = unassigned DNA; note = target_dd83b5c
  misc_feature 1..23: note = LF
  misc_feature 24..25: note = Core
  misc_feature 26..50: note = RF
tgctcaccggagctgctcatgccgcgacctcctgccgctctcgctgcttg

SEQ ID NO: 28997 - DNA, 50 bp, unidentified
  source 1..50: mol_type = unassigned DNA; note = target_dd9090a
  misc_feature 1..24: note = LF
  misc_feature 25: note = Core
  misc_feature 26..50: note = RF
gcaggcgcgacgtccgctcatcggcagatccgagcgcggacagcggcatg

SEQ ID NO: 28998 - DNA, 50 bp, unidentified
  source 1..50: mol_type = unassigned DNA; note = target_dd91dc0
  misc_feature 1..23: note = LF
  misc_feature 24..25: note = Core
  misc_feature 26..50: note = RF
cggccttttcgcggacaagtccgctcccacacttcagtgggttacaggtt

SEQ ID NO: 28999 - DNA, 50 bp, unidentified
  source 1..50: mol_type = unassigned DNA; note = target_dd96de3
  misc_feature 1..23: note = LF
  misc_feature 24..25: note = Core
  misc_feature 26..50: note = RF
cgcctcaatcccgctgccgtcggctaggcgcacgtccatcaccaccacgt

SEQ ID NO: 29000 - DNA, 50 bp, unidentified
  source 1..50: mol_type = unassigned DNA; note = target_dd99d6d
  misc_feature 1..24: note = LF
  misc_feature 25: note = Core
  misc_feature 26..50: note = RF
ctgctaggaatggtcattttctctctgttttaggatctacgatatttctt

SEQ ID NO: 29001 - DNA, 50 bp, unidentified
  source 1..50: mol_type = unassigned DNA; note = target_dd9f202
  misc_feature 1..23: note = LF
  misc_feature 24..25: note = Core
  misc_feature 26..50: note = RF
gcagcgcatcaatttgatgaaggagcagctatgtcggaaaccattcagcc

SEQ ID NO: 29002 - DNA, 50 bp, unidentified
  source 1..50: mol_type = unassigned DNA; note = target_dda75f4
  misc_feature 1..21: note = LF
  misc_feature 22..25: note = Core
  misc_feature 26..50: note = RF
ttcgtcgctatggtcatggctctccttctctggtcatgccgcgcacggca

SEQ ID NO: 29003 - DNA, 50 bp, unidentified
  source 1..50: mol_type = unassigned DNA; note = target_dda9b6b
  misc_feature 1..24: note = LF
  misc_feature 25: note = Core
  misc_feature 26..50: note = RF
ttgaactttgcccgcaagcggacatttgaacttggcgttgacactctcac

SEQ ID NO: 29004 - DNA, 50 bp, unidentified
  source 1..50: mol_type = unassigned DNA; note = target_ddbd507
  misc_feature 1..23: note = LF
  misc_feature 24..25: note = Core
  misc_feature 26..50: note = RF
gcctcgtctcggaggatcagcatagcgacggccaacggccgggatccggg

SEQ ID NO: 29005 - DNA, 50 bp, unidentified
  source 1..50: mol_type = unassigned DNA; note = target_ddbd524
  misc_feature 1..20: note = LF
  misc_feature 21..25: note = Core
  misc_feature 26..50: note = RF
gcaacggctggctcacctcgctcatgctccgccgagcagccgcgccgtgt

SEQ ID NO: 29006 - DNA, 50 bp, unidentified
  source 1..50: mol_type = unassigned DNA; note = target_ddc1989
  misc_feature 1..23: note = LF
  misc_feature 24..25: note = Core
  misc_feature 26..50: note = RF
gagagacggcgcgcgccgtccggctcagtcgtcgtcgtgcagcgattgcg

SEQ ID NO: 29007 - DNA, 50 bp, unidentified
  source 1..50: mol_type = unassigned DNA; note = target_ddc8a6a
  misc_feature 1..22: note = LF
  misc_feature 23..25: note = Core
  misc_feature 26..50: note = RF
gaagatattctgcacttcgagtgctcagtgcccgtatataagtgaatgag

SEQ ID NO: 29008 - DNA, 50 bp, unidentified
  source 1..50: mol_type = unassigned DNA; note = target_ddcf338
  misc_feature 1..22: note = LF
  misc_feature 23..25: note = Core
  misc_feature 26..50: note = RF
ctgcatgtaagtcagctctgcgggacaaagctgccgttcgctaaatttcg

SEQ ID NO: 29009 - DNA, 50 bp, unidentified
  source 1..50: mol_type = unassigned DNA; note = target_ddd3523
  misc_feature 1..23: note = LF
  misc_feature 24..25: note = Core
  misc_feature 26..50: note = RF
ttcgggccggtggcagaccccctttttcgccggcacgctcgcgctgtcga

SEQ ID NO: 29010 - DNA, 50 bp, unidentified
  source 1..50: mol_type = unassigned DNA; note = target_ddd4b32
  misc_feature 1..23: note = LF
  misc_feature 24..25: note = Core
  misc_feature 26..50: note = RF
cttcgggcagtgtcggttgcggcaggagttataggcgtggcgaacgaagc

SEQ ID NO: 29011 - DNA, 50 bp, unidentified
  source 1..50: mol_type = unassigned DNA; note = target_ddd98a8
  misc_feature 1..23: note = LF
  misc_feature 24..25: note = Core
  misc_feature 26..50: note = RF
acacttaaaaagaagctttaaagtacgatatacgtgtatctagaaaattt

SEQ ID NO: 29012 - DNA, 50 bp, unidentified
  source 1..50: mol_type = unassigned DNA; note = target_dddc85d
  misc_feature 1..24: note = LF
  misc_feature 25: note = Core
  misc_feature 26..50: note = RF
atccaccgtaattgcatttatacttgttaggtatagttattctatttcat

SEQ ID NO: 29013 - DNA, 50 bp, unidentified
  source 1..50: mol_type = unassigned DNA; note = target_ddf3bd5
  misc_feature 1..23: note = LF
  misc_feature 24..25: note = Core
  misc_feature 26..50: note = RF
cctctcaccccgctggaacacccctcatccgacctcgcttcgcgaggcca

SEQ ID NO: 29014 - DNA, 50 bp, unidentified
  source 1..50: mol_type = unassigned DNA; note = target_ddf83e6
  misc_feature 1..21: note = LF
  misc_feature 22..25: note = Core
  misc_feature 26..50: note = RF
tacagtgccgtcatcctcgggcttgacccgaggatccatggttgcgcggg

SEQ ID NO: 29015 - DNA, 50 bp, unidentified
  source 1..50: mol_type = unassigned DNA; note = target_ddf8e83
  misc_feature 1..24: note = LF
  misc_feature 25: note = Core
  misc_feature 26..50: note = RF
ttttaatgcagtcataccatgtaacttaatgtaagcgtttaaccccaatt

SEQ ID NO: 29016 - DNA, 50 bp, unidentified
  source 1..50: mol_type = unassigned DNA; note = target_ddfd43e
  misc_feature 1..24: note = LF
  misc_feature 25: note = Core
  misc_feature 26..50: note = RF
tggagcagtcccaatgtccgctcctggcgccgaccgcgaattcagacgcc

SEQ ID NO: 29017 - DNA, 50 bp, unidentified
  source 1..50: mol_type = unassigned DNA; note = target_de018ba
  misc_feature 1..23: note = LF
  misc_feature 24..25: note = Core
  misc_feature 26..50: note = RF
tcggctcgcccgcgattcagacggccggggcagccgcgaaactcccggac

SEQ ID NO: 29018 - DNA, 50 bp, unidentified
  source 1..50: mol_type = unassigned DNA; note = target_de11ad3
  misc_feature 1..23: note = LF
  misc_feature 24..25: note = Core
  misc_feature 26..50: note = RF
gctcgcttctgtggtgtgggtgtttttattaggctctcttacttcagcgt

SEQ ID NO: 29019 - DNA, 50 bp, unidentified
  source 1..50: mol_type = unassigned DNA; note = target_de219a2
  misc_feature 1..23: note = LF
  misc_feature 24..25: note = Core
  misc_feature 26..50: note = RF
tggcttctggatcccggcaatccctgccggaatgacgatggaccgattag

SEQ ID NO: 29020 - DNA, 50 bp, unidentified
  source 1..50: mol_type = unassigned DNA; note = target_de32267
  misc_feature 1..23: note = LF
  misc_feature 24..25: note = Core
  misc_feature 26..50: note = RF
ccctcgaaattctcccttaatccctccttacaaaggagagaaaagtgttt

SEQ ID NO: 29021 - DNA, 50 bp, unidentified
  source 1..50: mol_type = unassigned DNA; note = target_de448ad
  misc_feature 1..22: note = LF
  misc_feature 23..25: note = Core
  misc_feature 26..50: note = RF
cactcggctctgaacttgccattgaagctctcgatgtagctgttatctgt

SEQ ID NO: 29022 - DNA, 50 bp, unidentified
  source 1..50: mol_type = unassigned DNA; note = target_de4e197
  misc_feature 1..23: note = LF
  misc_feature 24..25: note = Core
  misc_feature 26..50: note = RF
ttcggcggcgagcaagcaggcatagcccggatgagcgaagcgacgtacgg

SEQ ID NO: 29023 - DNA, 50 bp, unidentified
  source 1..50: mol_type = unassigned DNA; note = target_de5da10
  misc_feature 1..23: note = LF
  misc_feature 24..25: note = Core
  misc_feature 26..50: note = RF
cgaactgcgcagcatcgccggcaaggcggaatggcgcatcgtccggcgtc

SEQ ID NO: 29024 - DNA, 50 bp, unidentified
  source 1..50: mol_type = unassigned DNA; note = target_de65188
  misc_feature 1..23: note = LF
  misc_feature 24..25: note = Core
  misc_feature 26..50: note = RF
ctcgaagcgcagccgactgcgccctctcagtgcatcgaccagaccctgaa

SEQ ID NO: 29025 - DNA, 50 bp, unidentified
  source 1..50: mol_type = unassigned DNA; note = target_de67184
  misc_feature 1..23: note = LF
  misc_feature 24..25: note = Core
  misc_feature 26..50: note = RF
ccctgtaaaaccgtcggcttagcctacgttggttcgaacccaacacctgc

SEQ ID NO: 29026 - DNA, 50 bp, unidentified
  source 1..50: mol_type = unassigned DNA; note = target_de671ca
  misc_feature 1..23: note = LF
  misc_feature 24..25: note = Core
  misc_feature 26..50: note = RF
ccgcaatcgacaatctccgaagctgatattcgctgcaaggtgcatcctag

SEQ ID NO: 29027 - DNA, 50 bp, unidentified
  source 1..50: mol_type = unassigned DNA; note = target_de706e2
  misc_feature 1..24: note = LF
  misc_feature 25: note = Core
  misc_feature 26..50: note = RF
cgtgagtcggcgccccctacgcggcggagtgacgcgccctgcagacacca

SEQ ID NO: 29028 - DNA, 50 bp, unidentified
  source 1..50: mol_type = unassigned DNA; note = target_de75dec
  misc_feature 1..18: note = LF
  misc_feature 19..25: note = Core
  misc_feature 26..50: note = RF
tagttcgcaccggaaaagccccccggcctgtccgggtcatactcgtaacc

SEQ ID NO: 29029 - DNA, 50 bp, unidentified
  source 1..50: mol_type = unassigned DNA; note = target_de7b7f7
  misc_feature 1..23: note = LF
  misc_feature 24..25: note = Core
  misc_feature 26..50: note = RF
tacttgcggggatccctcgttcctcgggatgacatactgtgtgaaaacac

SEQ ID NO: 29030 - DNA, 50 bp, unidentified
  source 1..50: mol_type = unassigned DNA; note = target_de81ccb
  misc_feature 1..23: note = LF
  misc_feature 24..25: note = Core
  misc_feature 26..50: note = RF
tccgtgtcctccatgttatcctcctctctcccgcagcagctcgttggcaa

SEQ ID NO: 29031 - DNA, 50 bp, unidentified
  source 1..50: mol_type = unassigned DNA; note = target_de82eae
  misc_feature 1..22: note = LF
  misc_feature 23..25: note = Core
  misc_feature 26..50: note = RF
tatatctcctttacaaattcaaatttgtaaatatcattttacatttttat

SEQ ID NO: 29032 - DNA, 50 bp, unidentified
  source 1..50: mol_type = unassigned DNA; note = target_de83e8d
  misc_feature 1..24: note = LF
  misc_feature 25: note = Core
  misc_feature 26..50: note = RF
ctgccgcgagcgccccagattcggcgttctgcggccgacgccgggggcgc

SEQ ID NO: 29033 - DNA, 50 bp, unidentified
  source 1..50: mol_type = unassigned DNA; note = target_de87e14
  misc_feature 1..23: note = LF
  misc_feature 24..25: note = Core
  misc_feature 26..50: note = RF
cagaagcctctccattgatacacctctggtaatggcatatccatttggga

SEQ ID NO: 29034 - DNA, 50 bp, unidentified
  source 1..50: mol_type = unassigned DNA; note = target_de9178e
  misc_feature 1..23: note = LF
  misc_feature 24..25: note = Core
  misc_feature 26..50: note = RF
cacgttccaatcgttcaatgagcctgcccttagacttatcgaagggtcaa

SEQ ID NO: 29035 - DNA, 50 bp, unidentified
  source 1..50: mol_type = unassigned DNA; note = target_de99482
  misc_feature 1..22: note = LF
  misc_feature 23..25: note = Core
  misc_feature 26..50: note = RF
cagggtcaaggtggggtcaaggtgacacgtgcataattccctttactcgt

SEQ ID NO: 29036 - DNA, 50 bp, unidentified
  source 1..50: mol_type = unassigned DNA; note = target_deb09e5
  misc_feature 1..24: note = LF
  misc_feature 25: note = Core
  misc_feature 26..50: note = RF
aatcccgcccgagctcacggagaaagcgaccatgtcgcacaccaaatccc

SEQ ID NO: 29037 - DNA, 50 bp, unidentified
  source 1..50: mol_type = unassigned DNA; note = target_debbe4b
  misc_feature 1..24: note = LF
  misc_feature 25: note = Core
  misc_feature 26..50: note = RF
cgacggcgtgatccatcactccgaccagggatgtcagtacacgtcgattg

SEQ ID NO: 29038 - DNA, 50 bp, unidentified
  source 1..50: mol_type = unassigned DNA; note = target_debe787
  misc_feature 1..23: note = LF
  misc_feature 24..25: note = Core
  misc_feature 26..50: note = RF
ggcggctgacaaaagaggcataaaaaaaagcgagtgttcttaacagcctt

SEQ ID NO: 29039 - DNA, 50 bp, unidentified
  source 1..50: mol_type = unassigned DNA; note = target_dec1331
  misc_feature 1..23: note = LF
  misc_feature 24..25: note = Core
  misc_feature 26..50: note = RF
cgctcattgttcgctttgccaccctacttcattggcatgcaatatcccat

SEQ ID NO: 29040 - DNA, 50 bp, unidentified
  source 1..50: mol_type = unassigned DNA; note = target_dec4eee
  misc_feature 1..24: note = LF
  misc_feature 25: note = Core
  misc_feature 26..50: note = RF
cgtgcgccatggtccgcacggcggcagatgcgcgcactcaacgcccaatg

SEQ ID NO: 29041 - DNA, 50 bp, unidentified
  source 1..50: mol_type = unassigned DNA; note = target_dec66c9
  misc_feature 1..23: note = LF
  misc_feature 24..25: note = Core
  misc_feature 26..50: note = RF
catctttaattgtcctcacctcccttcagcgtcaaacctccactagcttt

SEQ ID NO: 29042 - DNA, 50 bp, unidentified
  source 1..50: mol_type = unassigned DNA; note = target_decaff4
  misc_feature 1..24: note = LF
  misc_feature 25: note = Core
  misc_feature 26..50: note = RF
tgatggcacccggataccatccgccgcatggcccgacgagcacgcgggcg

SEQ ID NO: 29043 - DNA, 50 bp, unidentified
  source 1..50: mol_type = unassigned DNA; note = target_deccc27
  misc_feature 1..21: note = LF
  misc_feature 22..25: note = Core
  misc_feature 26..50: note = RF
aatgacgtacgacatggtggcctcccgtgggacggtgcacgggatcgccc

SEQ ID NO: 29044 - DNA, 50 bp, unidentified
  source 1..50: mol_type = unassigned DNA; note = target_decd46b
  misc_feature 1..23: note = LF
  misc_feature 24..25: note = Core
  misc_feature 26..50: note = RF
aagcgaccagcacgtcgtatatgtgggcttatagcgcccaacaattccat

SEQ ID NO: 29045 - DNA, 50 bp, unidentified
  source 1..50: mol_type = unassigned DNA; note = target_decfd27
  misc_feature 1..23: note = LF
  misc_feature 24..25: note = Core
  misc_feature 26..50: note = RF
gggcctcatcgcgagcaggctcgctcccacactgggatttgttttagaca

SEQ ID NO: 29046 - DNA, 50 bp, unidentified
  source 1..50: mol_type = unassigned DNA; note = target_ded1906
  misc_feature 1..23: note = LF
  misc_feature 24..25: note = Core
  misc_feature 26..50: note = RF
atatcagggtagatgcccactatagtgcggagagtgcagtgaccacgaaa

SEQ ID NO: 29047 - DNA, 50 bp, unidentified
  source 1..50: mol_type = unassigned DNA; note = target_ded28c5
  misc_feature 1..22: note = LF
  misc_feature 23..25: note = Core
  misc_feature 26..50: note = RF
tcttttctcaaatcttttctctcttttaacttaaaacctttgtcaatatc

SEQ ID NO: 29048 - DNA, 50 bp, unidentified
  source 1..50: mol_type = unassigned DNA; note = target_ded61a7
  misc_feature 1..23: note = LF
  misc_feature 24..25: note = Core
  misc_feature 26..50: note = RF
cggcgtgtctcttatgggtcacaagcgaccgatttcgggtgttcgcacga

SEQ ID NO: 29049 - DNA, 50 bp, unidentified
  source 1..50: mol_type = unassigned DNA; note = target_deeafc8
  misc_feature 1..24: note = LF
  misc_feature 25: note = Core
  misc_feature 26..50: note = RF
gtgtcggcgacggtccaatactgaccctgtagcgccgccaagtgatcagg

SEQ ID NO: 29050 - DNA, 50 bp, unidentified
  source 1..50: mol_type = unassigned DNA; note = target_deed161
  misc_feature 1..23: note = LF
  misc_feature 24..25: note = Core
  misc_feature 26..50: note = RF
tcgatcgtgtcccattgcgttctctaatcgccaccgtcaacagctgaact

SEQ ID NO: 29051 - DNA, 50 bp, unidentified
  source 1..50: mol_type = unassigned DNA; note = target_def459e
  misc_feature 1..22: note = LF
  misc_feature 23..25: note = Core
  misc_feature 26..50: note = RF
gcttcggggatcattccgatcttgacgacgataaagaagacaagcgcgaa

SEQ ID NO: 29052 - DNA, 50 bp, unidentified
  source 1..50: mol_type = unassigned DNA; note = target_def7f6c
  misc_feature 1..24: note = LF
  misc_feature 25: note = Core
  misc_feature 26..50: note = RF
gaaccgcaggtcctgggccgaaagcgccagttcgttccgtcgccatcaac

SEQ ID NO: 29053 - DNA, 50 bp, unidentified
  source 1..50: mol_type = unassigned DNA; note = target_def8b95
  misc_feature 1..22: note = LF
  misc_feature 23..25: note = Core
  misc_feature 26..50: note = RF
ggtccgatgccccggcaaggccgctcccacagggggagcgctggccaggc

SEQ ID NO: 29054 - DNA, 50 bp, unidentified
  source 1..50: mol_type = unassigned DNA; note = target_defa24d
  misc_feature 1..24: note = LF
  misc_feature 25: note = Core
  misc_feature 26..50: note = RF
aagcgctagccgctcccctcccttcaaggggaggggcaggggtggggtct

SEQ ID NO: 29055 - DNA, 50 bp, unidentified
  source 1..50: mol_type = unassigned DNA; note = target_defbb3c
  misc_feature 1..24: note = LF
  misc_feature 25: note = Core
  misc_feature 26..50: note = RF
gaacgagaaactggatagcgtcaaaactacgatggccgcctgcgcgacaa

SEQ ID NO: 29056 - DNA, 50 bp, unidentified
  source 1..50: mol_type = unassigned DNA; note = target_df01c77
  misc_feature 1..23: note = LF
  misc_feature 24..25: note = Core
  misc_feature 26..50: note = RF
agtttgcgaggctgggcggttattttttttgcgtttttaccgagttcata

SEQ ID NO: 29057 - DNA, 50 bp, unidentified
  source 1..50: mol_type = unassigned DNA; note = target_df062fa
  misc_feature 1..23: note = LF
  misc_feature 24..25: note = Core
  misc_feature 26..50: note = RF
aaatccgtccatccttcgacaagctcaggacgaacggacttactttgagc

SEQ ID NO: 29058 - DNA, 50 bp, unidentified
  source 1..50: mol_type = unassigned DNA; note = target_df0fedc
  misc_feature 1..24: note = LF
  misc_feature 25: note = Core
  misc_feature 26..50: note = RF
gaaaaaagcttgcattcatcggggcatccacacaggcgtcccttgcctgt

SEQ ID NO: 29059 - DNA, 50 bp, unidentified
  source 1..50: mol_type = unassigned DNA; note = target_df10517
  misc_feature 1..24: note = LF
  misc_feature 25: note = Core
  misc_feature 26..50: note = RF
cggttccctttgttcgccgcatcctacgcgggctcggcaggttcgcgaac

SEQ ID NO: 29060 - DNA, 50 bp, unidentified
  source 1..50: mol_type = unassigned DNA; note = target_df11857
  misc_feature 1..22: note = LF
  misc_feature 23..25: note = Core
  misc_feature 26..50: note = RF
cattgctcgtacaaaaggctcacttcctggcgtgctagctgccgtcccgg

SEQ ID NO: 29061 - DNA, 50 bp, unidentified
  source 1..50: mol_type = unassigned DNA; note = target_df12df8
  misc_feature 1..24: note = LF
  misc_feature 25: note = Core
  misc_feature 26..50: note = RF
gaaagttctcaagcgcatagtcggcgttatgcacccaagggctgggctca

SEQ ID NO: 29062 - DNA, 50 bp, unidentified
  source 1..50: mol_type = unassigned DNA; note = target_df176d1
  misc_feature 1..23: note = LF
  misc_feature 24..25: note = Core
  misc_feature 26..50: note = RF
gcagttatttgtgtggcaactttttttattgtacaaaaattatataaaaa

SEQ ID NO: 29063 - DNA, 50 bp, unidentified
  source 1..50: mol_type = unassigned DNA; note = target_df2b3ae
  misc_feature 1..23: note = LF
  misc_feature 24..25: note = Core
  misc_feature 26..50: note = RF
ttagtgtccgcttattttaagtagacacttattatggctaaaggcaaggt

SEQ ID NO: 29064 - DNA, 50 bp, unidentified
  source 1..50: mol_type = unassigned DNA; note = target_df3635d
  misc_feature 1..24: note = LF
  misc_feature 25: note = Core
  misc_feature 26..50: note = RF
gggtggtcattcctttgaccggaccccggttgttggtccatccgctatga

SEQ ID NO: 29065 - DNA, 50 bp, unidentified
  source 1..50: mol_type = unassigned DNA; note = target_df3b170
  misc_feature 1..24: note = LF
  misc_feature 25: note = Core
  misc_feature 26..50: note = RF
tctttgcacagtgcggcgtctaacgtaatgtagaccgtcacctagggcgg

SEQ ID NO: 29066 - DNA, 50 bp, unidentified
  source 1..50: mol_type = unassigned DNA; note = target_df3c9a9
  misc_feature 1..21: note = LF
  misc_feature 22..25: note = Core
  misc_feature 26..50: note = RF
ttgaaggcgatgaggtactcggtcatggcacgatatgaggatgcgccctc

SEQ ID NO: 29067 - DNA, 50 bp, unidentified
  source 1..50: mol_type = unassigned DNA; note = target_df3c9b3
  misc_feature 1..23: note = LF
  misc_feature 24..25: note = Core
  misc_feature 26..50: note = RF
tttaaaaacatacaattatcctcctttaaaaaatataatttattagcaat

SEQ ID NO: 29068 - DNA, 50 bp, unidentified
  source 1..50: mol_type = unassigned DNA; note = target_df49d67
  misc_feature 1..24: note = LF
  misc_feature 25: note = Core
  misc_feature 26..50: note = RF
ctatatcgcactatggccctgacgtcacgacgtctttattcctcctcttc

SEQ ID NO: 29069 - DNA, 50 bp, unidentified
  source 1..50: mol_type = unassigned DNA; note = target_df4dab8
  misc_feature 1..23: note = LF
  misc_feature 24..25: note = Core
  misc_feature 26..50: note = RF
tgcgaggacggacaccggaggcgctcatcgctggtccaccccgaccgcgg

SEQ ID NO: 29070 - DNA, 50 bp, unidentified
  source 1..50: mol_type = unassigned DNA; note = target_df5153f
  misc_feature 1..23: note = LF
  misc_feature 24..25: note = Core
  misc_feature 26..50: note = RF
gagcttggcgtgcagcgccagattgtcgcgggattcccatcttgattgac

SEQ ID NO: 29071 - DNA, 50 bp, unidentified
  source 1..50: mol_type = unassigned DNA; note = target_df56791
  misc_feature 1..23: note = LF
  misc_feature 24..25: note = Core
  misc_feature 26..50: note = RF
cgttagatcacgcggtatgggtccctgctttcgcagggacgacagctact

SEQ ID NO: 29072 - DNA, 50 bp, unidentified
  source 1..50: mol_type = unassigned DNA; note = target_df5f6ea
  misc_feature 1..23: note = LF
  misc_feature 24..25: note = Core
  misc_feature 26..50: note = RF
gcgtcgggatagtagacttcctcctttccgggcgcgtggatggcgcgata

SEQ ID NO: 29073 - DNA, 50 bp, unidentified
  source 1..50: mol_type = unassigned DNA; note = target_df676d1
  misc_feature 1..23: note = LF
  misc_feature 24..25: note = Core
  misc_feature 26..50: note = RF
ccagcacttgatttcatcaaaagtgagtcagagccagattatcatgctga

SEQ ID NO: 29074 - DNA, 50 bp, unidentified
  source 1..50: mol_type = unassigned DNA; note = target_df6efdf
  misc_feature 1..23: note = LF
  misc_feature 24..25: note = Core
  misc_feature 26..50: note = RF
agattcccattggcgttgatttctgattcagagtccgcgctggtgaagga

SEQ ID NO: 29075 - DNA, 50 bp, unidentified
  source 1..50: mol_type = unassigned DNA; note = target_df70ebb
  misc_feature 1..23: note = LF
  misc_feature 24..25: note = Core
  misc_feature 26..50: note = RF
tttgcgcccttccggcgggttacttggtcttggccaaagtaaccaaagcc

SEQ ID NO: 29076 - DNA, 50 bp, unidentified
  source 1..50: mol_type = unassigned DNA; note = target_df9027b
  misc_feature 1..23: note = LF
  misc_feature 24..25: note = Core
  misc_feature 26..50: note = RF
gaggccgccgggtcctcgccgcactagccgaggcgttcgccgctcagatc

SEQ ID NO: 29077 - DNA, 50 bp, unidentified
  source 1..50: mol_type = unassigned DNA; note = target_df9709d
  misc_feature 1..24: note = LF
  misc_feature 25: note = Core
  misc_feature 26..50: note = RF
agattgttactcaatttggatcactactgtggacacaaaccagttctcca

SEQ ID NO: 29078 - DNA, 50 bp, unidentified
  source 1..50: mol_type = unassigned DNA; note = target_dfa2b84
  misc_feature 1..20: note = LF
  misc_feature 21..25: note = Core
  misc_feature 26..50: note = RF
atgatctgagacatgggtgttcctttcctcagatggcggtgtaggtgctg

SEQ ID NO: 29079 - DNA, 50 bp, unidentified
  source 1..50: mol_type = unassigned DNA; note = target_dfa7832
  misc_feature 1..18: note = LF
  misc_feature 19..25: note = Core
  misc_feature 26..50: note = RF
ggggacgttgtgagcggagtcgagccgttacggcgtttggtaaaacgccg

SEQ ID NO: 29080 - DNA, 50 bp, unidentified
  source 1..50: mol_type = unassigned DNA; note = target_dfae9c2
  misc_feature 1..23: note = LF
  misc_feature 24..25: note = Core
  misc_feature 26..50: note = RF
acattacccccctgagtcagaatagttgtcacccctaaattttaatcgtt

SEQ ID NO: 29081 - DNA, 50 bp, unidentified
  source 1..50: mol_type = unassigned DNA; note = target_dfaf877
  misc_feature 1..23: note = LF
  misc_feature 24..25: note = Core
  misc_feature 26..50: note = RF
gttacgccttcggctaacccaccctacgtagcccaatatctccgcgggcg

SEQ ID NO: 29082 - DNA, 50 bp, unidentified
  source 1..50: mol_type = unassigned DNA; note = target_dfb0df6
  misc_feature 1..23: note = LF
  misc_feature 24..25: note = Core
  misc_feature 26..50: note = RF
gttgcagcgcatgagttcgctattggcccaaatgcgaagtgccgcgacgt

SEQ ID NO: 29083 - DNA, 50 bp, unidentified
  source 1..50: mol_type = unassigned DNA; note = target_dfb6164
  misc_feature 1..24: note = LF
  misc_feature 25: note = Core
  misc_feature 26..50: note = RF
gcttgacgaagaacataggggcaccacccccctggcacaccgtcatccac

SEQ ID NO: 29084 - DNA, 50 bp, unidentified
  source 1..50: mol_type = unassigned DNA; note = target_dfb80e7
  misc_feature 1..24: note = LF
  misc_feature 25: note = Core
  misc_feature 26..50: note = RF
tgacgccgcaaccccccggacgctctctcacttaatgcgggaaaagcgga

SEQ ID NO: 29085 - DNA, 50 bp, unidentified
  source 1..50: mol_type = unassigned DNA; note = target_dfc10f1
  misc_feature 1..23: note = LF
  misc_feature 24..25: note = Core
  misc_feature 26..50: note = RF
acataaatccttgccacatactcctttcctacaaattacatttttattgg

SEQ ID NO: 29086 - DNA, 50 bp, unidentified
  source 1..50: mol_type = unassigned DNA; note = target_dfd223a
  misc_feature 1..23: note = LF
  misc_feature 24..25: note = Core
  misc_feature 26..50: note = RF
cttagaaccctggctaggtgtttagtcccggcatttgctggagcgggtca

SEQ ID NO: 29087 - DNA, 50 bp, unidentified
  source 1..50: mol_type = unassigned DNA; note = target_dfe7767
  misc_feature 1..24: note = LF
  misc_feature 25: note = Core
  misc_feature 26..50: note = RF
agtaactaaatgagtcaaatagtttggggcttttttggggccttcgttga

SEQ ID NO: 29088 - DNA, 50 bp, unidentified
  source 1..50: mol_type = unassigned DNA; note = target_dfe9a91
  misc_feature 1..24: note = LF
  misc_feature 25: note = Core
  misc_feature 26..50: note = RF
ccgtgcgcataaagttgccgaggtttgtaggccagggcatggagctgaag

SEQ ID NO: 29089 - DNA, 50 bp, unidentified
  source 1..50: mol_type = unassigned DNA; note = target_dfeb33d
  misc_feature 1..24: note = LF
  misc_feature 25: note = Core
  misc_feature 26..50: note = RF
tgaggctgtttcaaacctccgccgggtctgtccgctgcttttgagtggac

SEQ ID NO: 29090 - DNA, 50 bp, unidentified
  source 1..50: mol_type = unassigned DNA; note = target_dff0621
  misc_feature 1..23: note = LF
  misc_feature 24..25: note = Core
  misc_feature 26..50: note = RF
gcttcattttaattcagcccaccctacgcgctaatgtaggatgtgctgaa

SEQ ID NO: 29091 - DNA, 50 bp, unidentified
  source 1..50: mol_type = unassigned DNA; note = target_dffda3c
  misc_feature 1..24: note = LF
  misc_feature 25: note = Core
  misc_feature 26..50: note = RF
catctttagtgctggattgttggtttccacgcggaactgagccggtgggg

SEQ ID NO: 29092 - DNA, 50 bp, unidentified
  source 1..50: mol_type = unassigned DNA; note = target_e002188
  misc_feature 1..23: note = LF
  misc_feature 24..25: note = Core
  misc_feature 26..50: note = RF
cggcgcggcagtcaatgacccaaagcggacattcggcgccttattcgatc

SEQ ID NO: 29093 - DNA, 50 bp, unidentified
  source 1..50: mol_type = unassigned DNA; note = target_e0050ce
  misc_feature 1..22: note = LF
  misc_feature 23..25: note = Core
  misc_feature 26..50: note = RF
ccgttcttcaacaaaagcacccgtttactttaagtacataacttcacaaa

SEQ ID NO: 29094 - DNA, 50 bp, unidentified
  source 1..50: mol_type = unassigned DNA; note = target_e005e5b
  misc_feature 1..24: note = LF
  misc_feature 25: note = Core
  misc_feature 26..50: note = RF
tcctgtgttcgtcacaggaatcctgccagaccaagtccttgggaagaaaa

SEQ ID NO: 29095 - DNA, 50 bp, unidentified
  source 1..50: mol_type = unassigned DNA; note = target_e00690a
  misc_feature 1..23: note = LF
  misc_feature 24..25: note = Core
  misc_feature 26..50: note = RF
ttcaatttcagcatcttcctgtcctttctcattaatattcgtccgcaaac

SEQ ID NO: 29096 - DNA, 50 bp, unidentified
  source 1..50: mol_type = unassigned DNA; note = target_e008fa7
  misc_feature 1..23: note = LF
  misc_feature 24..25: note = Core
  misc_feature 26..50: note = RF
ttggacagtggcgatgtctgcctagtaccagctttcgctgaagcgtgatt

SEQ ID NO: 29097 - DNA, 50 bp, unidentified
  source 1..50: mol_type = unassigned DNA; note = target_e00977d
  misc_feature 1..23: note = LF
  misc_feature 24..25: note = Core
  misc_feature 26..50: note = RF
atataatcaatatgttaatttggaggttggatatcaggcccactccctcc

SEQ ID NO: 29098 - DNA, 50 bp, unidentified; identical to SEQ ID NO: 23967
  source 1..50: mol_type = unassigned DNA; note = target_e00c656
  misc_feature 1..23: note = LF
  misc_feature 24..25: note = Core
  misc_feature 26..50: note = RF

SEQ ID NO: 29099 - DNA, 50 bp, unidentified
  source 1..50: mol_type = unassigned DNA; note = target_e010221
  misc_feature 1..23: note = LF
  misc_feature 24..25: note = Core
  misc_feature 26..50: note = RF
ccgcccgtcaggccaccccagccctaccaagttcgaagagccggcatagc

SEQ ID NO: 29100 - DNA, 50 bp, unidentified
  source 1..50: mol_type = unassigned DNA; note = target_e0139a3
  misc_feature 1..24: note = LF
  misc_feature 25: note = Core
  misc_feature 26..50: note = RF
gccttcagcgtcgcctcgaagttttttataggcgtcgacgatctcgccgt

SEQ ID NO: 29101 - DNA, 50 bp, unidentified
  source 1..50: mol_type = unassigned DNA; note = target_e015e41
  misc_feature 1..24: note = LF
  misc_feature 25: note = Core
  misc_feature 26..50: note = RF
cgtcaactgttgtaccatcgcgatttcactcaaaatcccccaattgggcc

SEQ ID NO: 29102 - DNA, 50 bp, unidentified
  source 1..50: mol_type = unassigned DNA; note = target_e01d42c
  misc_feature 1..23: note = LF
  misc_feature 24..25: note = Core
  misc_feature 26..50: note = RF
gcaaaacaacaaaagcctgtggttgggtcccggctcgcgcttcgcttggc

SEQ ID NO: 29103 - DNA, 50 bp, unidentified
  source 1..50: mol_type = unassigned DNA; note = target_e01d9f3
  misc_feature 1..24: note = LF
  misc_feature 25: note = Core
  misc_feature 26..50: note = RF
gcccacagccgcgttggcgccgaccgaaaattgaccaaggtgagagaccc

SEQ ID NO: 29104 - DNA, 50 bp, unidentified
  source 1..50: mol_type = unassigned DNA; note = target_e025e14
  misc_feature 1..24: note = LF
  misc_feature 25: note = Core
  misc_feature 26..50: note = RF
ggggccgatggagggcgccgcgtgctaccgaaggcagtgcgggggcagtc

SEQ ID NO: 29105 - DNA, 50 bp, unidentified
  source 1..50: mol_type = unassigned DNA; note = target_e028faf
  misc_feature 1..23: note = LF
  misc_feature 24..25: note = Core
  misc_feature 26..50: note = RF
tatttttccgtaaagttatgtacctttgtcggcaaataaagatattctcg

SEQ ID NO: 29106 - DNA, 50 bp, unidentified
  source 1..50: mol_type = unassigned DNA; note = target_e03d94f
  misc_feature 1..23: note = LF
  misc_feature 24..25: note = Core
  misc_feature 26..50: note = RF
catggtgccgtctcgttccgcccctacggggcgggtaaatttggttgggg

SEQ ID NO: 29107 - DNA, 50 bp, unidentified
  source 1..50: mol_type = unassigned DNA; note = target_e040fde
  misc_feature 1..23: note = LF
  misc_feature 24..25: note = Core
  misc_feature 26..50: note = RF
ccgcgatagacgctcttgtgaggtggtcccgccttcttggacagtttggc

SEQ ID NO: 29108 - DNA, 50 bp, unidentified
  source 1..50: mol_type = unassigned DNA; note = target_e04ab21
  misc_feature 1..23: note = LF
  misc_feature 24..25: note = Core
  misc_feature 26..50: note = RF
gaggacaaaggtttgaaccaatcaggtggaatcacctgagtgttgatttt

SEQ ID NO: 29109 - DNA, 50 bp, unidentified
  source 1..50: mol_type = unassigned DNA; note = target_e04bebb
  misc_feature 1..21: note = LF
  misc_feature 22..25: note = Core
  misc_feature 26..50: note = RF
cagtgtgtgcgtcggcgctcgctcatgtgtacgcgctctgtaacggacct

SEQ ID NO: 29110 - DNA, 50 bp, unidentified
  source 1..50: mol_type = unassigned DNA; note = target_e04bf4c
  misc_feature 1..24: note = LF
  misc_feature 25: note = Core
  misc_feature 26..50: note = RF
ccattctgattcgttgcggcagcccaccccccaagtgcgggccacgtgtg

SEQ ID NO: 29111 - DNA, 50 bp, unidentified
  source 1..50: mol_type = unassigned DNA; note = target_e05192e
  misc_feature 1..24: note = LF
  misc_feature 25: note = Core
  misc_feature 26..50: note = RF
cgatgagtgatcgccgacggcggctttgggtcagactcggccgcgccgac

SEQ ID NO: 29112 - DNA, 50 bp, unidentified
  source 1..50: mol_type = unassigned DNA; note = target_e0621ad
  misc_feature 1..24: note = LF
  misc_feature 25: note = Core
  misc_feature 26..50: note = RF
tcagcggtcactttcggccacaagcggccgtcgaatagtctgaaaactct

SEQ ID NO: 29113 - DNA, 50 bp, unidentified
  source 1..50: mol_type = unassigned DNA; note = target_e068131
  misc_feature 1..23: note = LF
  misc_feature 24..25: note = Core
  misc_feature 26..50: note = RF
gcacaatgcgaatgaattcgcacctacaattcccttatttattccatgca

SEQ ID NO: 29114 - DNA, 50 bp, unidentified
  source 1..50: mol_type = unassigned DNA; note = target_e06c9c4
  misc_feature 1..23: note = LF
  misc_feature 24..25: note = Core
  misc_feature 26..50: note = RF
gcatttttattcatataattctcctttttgtcgcctagcgttctaccacc

SEQ ID NO: 29115 - DNA, 50 bp, unidentified
  source 1..50: mol_type = unassigned DNA; note = target_e072046
  misc_feature 1..22: note = LF
  misc_feature 23..25: note = Core
  misc_feature 26..50: note = RF
cttgccgcacccttctccttccactaaccccaaaacagatggctgccagg

SEQ ID NO: 29116 - DNA, 50 bp, unidentified
  source 1..50: mol_type = unassigned DNA; note = target_e07f105
  misc_feature 1..23: note = LF
  misc_feature 24..25: note = Core
  misc_feature 26..50: note = RF
tggcaccaggctgaactcaccgggaggcccggcatcatgcgcatgatgat

SEQ ID NO: 29117 - DNA, 50 bp, unidentified
  source 1..50: mol_type = unassigned DNA; note = target_e085336
  misc_feature 1..23: note = LF
  misc_feature 24..25: note = Core
  misc_feature 26..50: note = RF
aagtaaggtctaaggattccatccttaactggctctgtttctttttatct

SEQ ID NO: 29118 - DNA, 50 bp, unidentified
  source 1..50: mol_type = unassigned DNA; note = target_e0865d9
  misc_feature 1..23: note = LF
  misc_feature 24..25: note = Core
  misc_feature 26..50: note = RF
cactactaaataatcaaattttttctccttcaattattgatatttccctt

SEQ ID NO: 29119 - DNA, 50 bp, unidentified
  source 1..50: mol_type = unassigned DNA; note = target_e095c79
  misc_feature 1..21: note = LF
  misc_feature 22..25: note = Core
  misc_feature 26..50: note = RF
actcgctggctgttccattctttcacactatctgtccttattgtactacg

SEQ ID NO: 29120 - DNA, 50 bp, unidentified
  source 1..50: mol_type = unassigned DNA; note = target_e09ce09
  misc_feature 1..22: note = LF
  misc_feature 23..25: note = Core
  misc_feature 26..50: note = RF
aaacccatattaatctttcctcctttcatattgttataagttacataatt

SEQ ID NO: 29121 - DNA, 50 bp, unidentified
  source 1..50: mol_type = unassigned DNA; note = target_e0a72cb
  misc_feature 1..24: note = LF
  misc_feature 25: note = Core
  misc_feature 26..50: note = RF
cttaccagcaattttttatatacgttgttgtgcgtcgtttttcctttccg

SEQ ID NO: 29122 - DNA, 50 bp, unidentified
  source 1..50: mol_type = unassigned DNA; note = target_e0a7886
  misc_feature 1..23: note = LF
  misc_feature 24..25: note = Core
  misc_feature 26..50: note = RF
gttcctgttttccgtcgctcacgcttccggctcgtaataccaaacgacag

SEQ ID NO: 29123 - DNA, 50 bp, unidentified
  source 1..50: mol_type = unassigned DNA; note = target_e0ab6db
  misc_feature 1..23: note = LF
  misc_feature 24..25: note = Core
  misc_feature 26..50: note = RF
cctccttcaattaattcacctcccttcgatttgaaaccttacggttcatt

SEQ ID NO: 29124 - DNA, 50 bp, unidentified
  source 1..50: mol_type = unassigned DNA; note = target_e0b5764
  misc_feature 1..24: note = LF
  misc_feature 25: note = Core
  misc_feature 26..50: note = RF
ttcagtaaaacgcgctcacatcggcatgagagttaacggttcctggcaga

SEQ ID NO: 29125 - DNA, 50 bp, unidentified
  source 1..50: mol_type = unassigned DNA; note = target_e0c1107
  misc_feature 1..23: note = LF
  misc_feature 24..25: note = Core
  misc_feature 26..50: note = RF
tccccgttactttattcgtaccccttttgatttgttaaaacaccttgcgg

SEQ ID NO: 29126 - DNA, 50 bp, unidentified
  source 1..50: mol_type = unassigned DNA; note = target_e0cabf5
  misc_feature 1..23: note = LF
  misc_feature 24..25: note = Core
  misc_feature 26..50: note = RF
taccgcattcgcgagcaagcccgctcccacagtttttattcggtttcgcc

SEQ ID NO: 29127 - DNA, 50 bp, unidentified
  source 1..50: mol_type = unassigned DNA; note = target_e0caf22
  misc_feature 1..24: note = LF
  misc_feature 25: note = Core
  misc_feature 26..50: note = RF
tttgttaaatccattctttatccttttttttaacttattttatcactatt

SEQ ID NO: 29128 - DNA, 50 bp, unidentified
  source 1..50: mol_type = unassigned DNA; note = target_e0d03bc
  misc_feature 1..24: note = LF
  misc_feature 25: note = Core
  misc_feature 26..50: note = RF
atttcgggcctatccccgacgtgccggtagggggcacctgatatttcccc

SEQ ID NO: 29129 - DNA, 50 bp, unidentified
  source 1..50: mol_type = unassigned DNA; note = target_e0d216d
  misc_feature 1..23: note = LF
  misc_feature 24..25: note = Core
  misc_feature 26..50: note = RF
cagttcactagaaaaagagacctctggggtagcttgttctcaacaagcta

SEQ ID NO: 29130 - DNA, 50 bp, unidentified
  source 1..50: mol_type = unassigned DNA; note = target_e0d4df0
  misc_feature 1..23: note = LF
  misc_feature 24..25: note = Core
  misc_feature 26..50: note = RF
taagctgtggaaggcttaagggctttttgtgacgttttagggcctagtag

SEQ ID NO: 29131 - DNA, 50 bp, unidentified
  source 1..50: mol_type = unassigned DNA; note = target_e0d72ce
  misc_feature 1..23: note = LF
  misc_feature 24..25: note = Core
  misc_feature 26..50: note = RF
acaaaattctttcagaatttcactcgaattgacgtcatgtttatcatcaa

SEQ ID NO: 29132 - DNA, 50 bp, unidentified
  source 1..50: mol_type = unassigned DNA; note = target_e0d9c0f
  misc_feature 1..24: note = LF
  misc_feature 25: note = Core
  misc_feature 26..50: note = RF
cagcggctactacggcctctgctaacttctcgctccggctcagcgccgtc

SEQ ID NO: 29133 - DNA, 50 bp, unidentified
  source 1..50: mol_type = unassigned DNA; note = target_e0efdac
  misc_feature 1..23: note = LF
  misc_feature 24..25: note = Core
  misc_feature 26..50: note = RF
aggagcgagccgttgtccgccattggtccgagcgacaatggcaagcgcca

SEQ ID NO: 29134 - DNA, 50 bp, unidentified
  source 1..50: mol_type = unassigned DNA; note = target_e0f1304
  misc_feature 1..23: note = LF
  misc_feature 24..25: note = Core
  misc_feature 26..50: note = RF
attttacctatgtccatattttgctccttatttatacttatatcatacat

SEQ ID NO: 29135 - DNA, 50 bp, unidentified
  source 1..50: mol_type = unassigned DNA; note = target_e0f4042
  misc_feature 1..23: note = LF
  misc_feature 24..25: note = Core
  misc_feature 26..50: note = RF
ttagacctcgttcggccagaagctgccattcggacgaagcaagggcatgt

SEQ ID NO: 29136 - DNA, 50 bp, unidentified
  source 1..50: mol_type = unassigned DNA; note = target_e0f826f
  misc_feature 1..22: note = LF
  misc_feature 23..25: note = Core
  misc_feature 26..50: note = RF
ctctgccagtcgctcatggtggctcccaggggttcggtgatggtcagccg

SEQ ID NO: 29137 - DNA, 50 bp, unidentified
  source 1..50: mol_type = unassigned DNA; note = target_e0febc3
  misc_feature 1..23: note = LF
  misc_feature 24..25: note = Core
  misc_feature 26..50: note = RF
aagttactttgcatcacacccacctgtaaaggtggggtcacagacgtgaa

SEQ ID NO: 29138 - DNA, 50 bp, unidentified
  source 1..50: mol_type = unassigned DNA; note = target_e100017
  misc_feature 1..23: note = LF
  misc_feature 24..25: note = Core
  misc_feature 26..50: note = RF
ttgatttaaggttggctatgggactttccgaccttttgtttaagtttgtt

SEQ ID NO: 29139 - DNA, 50 bp, unidentified
  source 1..50: mol_type = unassigned DNA; note = target_e101e6f
  misc_feature 1..21: note = LF
  misc_feature 22..25: note = Core
  misc_feature 26..50: note = RF
ctccaaccggacccggtcctgctcatcggcgctgccgtaacccatcccgc

SEQ ID NO: 29140 - DNA, 50 bp, unidentified
  source 1..50: mol_type = unassigned DNA; note = target_e102003
  misc_feature 1..24: note = LF
  misc_feature 25: note = Core
  misc_feature 26..50: note = RF
gataggctcgcgcgccgtatccgccgatctgggcgctctgcggaaggtcg

SEQ ID NO: 29141 - DNA, 50 bp, unidentified
  source 1..50: mol_type = unassigned DNA; note = target_e110bec
  misc_feature 1..23: note = LF
  misc_feature 24..25: note = Core
  misc_feature 26..50: note = RF
gtgcctgcggcaccgctgcaagcccccccatcgagtacgagaccatcatg

SEQ ID NO: 29142 - DNA, 50 bp, unidentified
  source 1..50: mol_type = unassigned DNA; note = target_e113b64
  misc_feature 1..23: note = LF
  misc_feature 24..25: note = Core
  misc_feature 26..50: note = RF
aactaaaaaatccatatatcctccttaaacgtcaatttagaatcttatat

SEQ ID NO: 29143 - DNA, 50 bp, unidentified
  source 1..50: mol_type = unassigned DNA; note = target_e117762
  misc_feature 1..23: note = LF
  misc_feature 24..25: note = Core
  misc_feature 26..50: note = RF
ttgcagcagcataacaattcatcctttctttacagttattatttattttt

SEQ ID NO: 29144 - DNA, 50 bp, unidentified
  source 1..50: mol_type = unassigned DNA; note = target_e119a66
  misc_feature 1..24: note = LF
  misc_feature 25: note = Core
  misc_feature 26..50: note = RF
cgttcaagtttccgctaaccccgttttcggggaggttcgacgatggtgtg

SEQ ID NO: 29145 - DNA, 50 bp, unidentified
  source 1..50: mol_type = unassigned DNA; note = target_e11a2ff
  misc_feature 1..24: note = LF
  misc_feature 25: note = Core
  misc_feature 26..50: note = RF
gaatcagtatctaactaattgcggcagaagagtgcggagccaccgacgcg

SEQ ID NO: 29146 - DNA, 50 bp, unidentified
  source 1..50: mol_type = unassigned DNA; note = target_e11c40c
  misc_feature 1..24: note = LF
  misc_feature 25: note = Core
  misc_feature 26..50: note = RF
agcggtcatgtccgcaccacaaagcggacataggcccacctatccgcctc

SEQ ID NO: 29147 - DNA, 50 bp, unidentified
  source 1..50: mol_type = unassigned DNA; note = target_e11d59e
  misc_feature 1..24: note = LF
  misc_feature 25: note = Core
  misc_feature 26..50: note = RF
gccctgttctgatgttcttggtactgacaaattaactggccgatattgct

SEQ ID NO: 29148 - DNA, 50 bp, unidentified
  source 1..50: mol_type = unassigned DNA; note = target_e122c73
  misc_feature 1..24: note = LF
  misc_feature 25: note = Core
  misc_feature 26..50: note = RF
ttaaaccgctattttttatatacgttgttgtaagctggcgtttcattccg

SEQ ID NO: 29149 - DNA, 50 bp, unidentified
  source 1..50: mol_type = unassigned DNA; note = target_e126368
  misc_feature 1..22: note = LF
  misc_feature 23..25: note = Core
  misc_feature 26..50: note = RF
gcgatatcattcgcggggtctttttttgtgcagaataagcacaaactgca

SEQ ID NO: 29150 - DNA, 50 bp, unidentified
  source 1..50: mol_type = unassigned DNA; note = target_e12cd0b
  misc_feature 1..22: note = LF
  misc_feature 23..25: note = Core
  misc_feature 26..50: note = RF
agttcatcgcgcagtcggccgttgaagctctcgatgaagccattctgcat

SEQ ID NO: 29151 - DNA, 50 bp, unidentified
  source 1..50: mol_type = unassigned DNA; note = target_e12f685
  misc_feature 1..23: note = LF
  misc_feature 24..25: note = Core
  misc_feature 26..50: note = RF
ttgaggttgaggtggattgggtcccgggaataaatcccgggatgacatca

SEQ ID NO: 29152 - DNA, 50 bp, unidentified
  source 1..50: mol_type = unassigned DNA; note = target_e131050
  misc_feature 1..22: note = LF
  misc_feature 23..25: note = Core
  misc_feature 26..50: note = RF
aggtaccaccggcaccgggtctccccccgccagaggtaggccaggtgcgc

SEQ ID NO: 29153 - DNA, 50 bp, unidentified
  source 1..50: mol_type = unassigned DNA; note = target_e1311c4
  misc_feature 1..23: note = LF
  misc_feature 24..25: note = Core
  misc_feature 26..50: note = RF
cagcccgctgcgcggccagccacctcccccgtcctctgcgggacgggtga

SEQ ID NO: 29154 - DNA, 50 bp, unidentified
  source 1..50: mol_type = unassigned DNA; note = target_e131ee8
  misc_feature 1..23: note = LF
  misc_feature 24..25: note = Core
  misc_feature 26..50: note = RF
ggccacccgctgttcggcgcgcttgggtcgccaggacaaggccaggacaa

SEQ ID NO: 29155 - DNA, 50 bp, unidentified
  source 1..50: mol_type = unassigned DNA; note = target_e1393b4
  misc_feature 1..23: note = LF
  misc_feature 24..25: note = Core
  misc_feature 26..50: note = RF
tccattgccggccttccgaaagctgccgctcgtgcagtcggccggtggaa

SEQ ID NO: 29156 - DNA, 50 bp, unidentified
  source 1..50: mol_type = unassigned DNA; note = target_e150f8e
  misc_feature 1..23: note = LF
  misc_feature 24..25: note = Core
  misc_feature 26..50: note = RF
tacttcatcagtgtgaggttcgcctagcctggcggggccggatactggcc

SEQ ID NO: 29157 - DNA, 50 bp, unidentified
  source 1..50: mol_type = unassigned DNA; note = target_e155439
  misc_feature 1..24: note = LF
  misc_feature 25: note = Core
  misc_feature 26..50: note = RF
tgctccagtgcatgcgcggacttttttttgtatgtgatgccgcgctttgc

SEQ ID NO: 29158 - DNA, 50 bp, unidentified
  source 1..50: mol_type = unassigned DNA; note = target_e157cbf
  misc_feature 1..23: note = LF
  misc_feature 24..25: note = Core
  misc_feature 26..50: note = RF
ccatcctcattcacttccgcttttggcacttttcggaagtggtccgactg

SEQ ID NO: 29159 - DNA, 50 bp, unidentified
  source 1..50: mol_type = unassigned DNA; note = target_e15840e
  misc_feature 1..22: note = LF
  misc_feature 23..25: note = Core
  misc_feature 26..50: note = RF
cgcaccccgccggcgtcacccgatcagtgatggagctgaaaacgctccct

SEQ ID NO: 29160 - DNA, 50 bp, unidentified
  source 1..50: mol_type = unassigned DNA; note = target_e15e00d
  misc_feature 1..23: note = LF
  misc_feature 24..25: note = Core
  misc_feature 26..50: note = RF
gggcatgtccgcttctggcccatagcagacatctgtagttgcaccgcaca

SEQ ID NO: 29161 - DNA, 50 bp, unidentified
  source 1..50: mol_type = unassigned DNA; note = target_e1619de
  misc_feature 1..22: note = LF
  misc_feature 23..25: note = Core
  misc_feature 26..50: note = RF
tttttggttgctgctaacggtttgcagctacccgaagagcgggattttta

SEQ ID NO: 29162 - DNA, 50 bp, unidentified
  source 1..50: mol_type = unassigned DNA; note = target_e17420e
  misc_feature 1..23: note = LF
  misc_feature 24..25: note = Core
  misc_feature 26..50: note = RF
tgctcggcggcgtgagctgtcttttttgtaggtgagatcgcgtgcgtcga

SEQ ID NO: 29163 - DNA, 50 bp, unidentified
  source 1..50: mol_type = unassigned DNA; note = target_e178af8
  misc_feature 1..24: note = LF
  misc_feature 25: note = Core
  misc_feature 26..50: note = RF
gcaagcttgaggaatcctgccctttagcttcaatgtaacgggcaatttgc

SEQ ID NO: 29164 - DNA, 50 bp, unidentified
  source 1..50: mol_type = unassigned DNA; note = target_e17b547
  misc_feature 1..24: note = LF
  misc_feature 25: note = Core
  misc_feature 26..50: note = RF
cagcccggcgcggactatatgcggcatgagagcgcaactgtcaccggcgg

SEQ ID NO: 29165 - DNA, 50 bp, unidentified
  source 1..50: mol_type = unassigned DNA; note = target_e1912de
  misc_feature 1..18: note = LF
  misc_feature 19..25: note = Core
  misc_feature 26..50: note = RF
gcgaccggtgaacatgggagtcctttcgggaggaggtcgagatgaggagt

SEQ ID NO: 29166 - DNA, 50 bp, unidentified
  source 1..50: mol_type = unassigned DNA; note = target_e19570a
  misc_feature 1..23: note = LF
  misc_feature 24..25: note = Core
  misc_feature 26..50: note = RF
ttccaattattcaggtaaacgtccttcgcagaggtttacacaaaatttgg

SEQ ID NO: 29167 - DNA, 50 bp, unidentified
  source 1..50: mol_type = unassigned DNA; note = target_e1a47f7
  misc_feature 1..23: note = LF
  misc_feature 24..25: note = Core
  misc_feature 26..50: note = RF
tcataaaaaaataattcaatatcaacaacttaaggctgaacgtcgctgga

SEQ ID NO: 29168 - DNA, 50 bp, unidentified
  source 1..50: mol_type = unassigned DNA; note = target_e1a4978
  misc_feature 1..24: note = LF
  misc_feature 25: note = Core
  misc_feature 26..50: note = RF
caccatgtgtagatgaaacgtaagcgtccagcaaacccacctatgcgtcg

SEQ ID NO: 29169 - DNA, 50 bp, unidentified
  source 1..50: mol_type = unassigned DNA; note = target_e1a5446
  misc_feature 1..24: note = LF
  misc_feature 25: note = Core
  misc_feature 26..50: note = RF
caaggagcctcgcttcggcggggcttttcgtttgggagcggccgccgcgg

SEQ ID NO: 29170 - DNA, 50 bp, unidentified
  source 1..50: mol_type = unassigned DNA; note = target_e1aaef5
  misc_feature 1..24: note = LF
  misc_feature 25: note = Core
  misc_feature 26..50: note = RF
ccaacgaccttgacctttttcagcgtgccaaaggatgatgcgagttcatc

SEQ ID NO: 29171 - DNA, 50 bp, unidentified
  source 1..50: mol_type = unassigned DNA; note = target_e1b2dbe
  misc_feature 1..23: note = LF
  misc_feature 24..25: note = Core
  misc_feature 26..50: note = RF
cattggaggatcttggcttcatcttcgttccttcgtcactacgacgaagc

SEQ ID NO: 29172 - DNA, 50 bp, unidentified
  source 1..50: mol_type = unassigned DNA; note = target_e1b9b3b
  misc_feature 1..21: note = LF
  misc_feature 22..25: note = Core
  misc_feature 26..50: note = RF
catcaacgacacgggatgaatctccaggccatcgccgatcctgacggtga

SEQ ID NO: 29173 - DNA, 50 bp, unidentified
  source 1..50: mol_type = unassigned DNA; note = target_e1c0676
  misc_feature 1..24: note = LF
  misc_feature 25: note = Core
  misc_feature 26..50: note = RF
atttttagacaaaccgccagattttgcacgaaaaggacgattaccccgaa

SEQ ID NO: 29174 - DNA, 50 bp, unidentified
  source 1..50: mol_type = unassigned DNA; note = target_e1c3cfa
  misc_feature 1..23: note = LF
  misc_feature 24..25: note = Core
  misc_feature 26..50: note = RF
caaccgcgagcgcggagccatgttgggtctcgcatccaggagcccttgtc

SEQ ID NO: 29175 - DNA, 50 bp, unidentified
  source 1..50: mol_type = unassigned DNA; note = target_e1c510a
  misc_feature 1..23: note = LF
  misc_feature 24..25: note = Core
  misc_feature 26..50: note = RF
attttcgcttagaatcgccaggcctggtcattttttctcacaaattagtt

SEQ ID NO: 29176 - DNA, 50 bp, unidentified
  source 1..50: mol_type = unassigned DNA; note = target_e1c5203
  misc_feature 1..23: note = LF
  misc_feature 24..25: note = Core
  misc_feature 26..50: note = RF
ggtacagggcgtagaccgagtcgctcactcgaaccgctccttcgcctcgc

SEQ ID NO: 29177 - DNA, 50 bp, unidentified
  source 1..50: mol_type = unassigned DNA; note = target_e1ca850
  misc_feature 1..22: note = LF
  misc_feature 23..25: note = Core
  misc_feature 26..50: note = RF
caattttgggaagattctgcgatgacccccgattgacggcggaaagattt

SEQ ID NO: 29178 - DNA, 50 bp, unidentified
  source 1..50: mol_type = unassigned DNA; note = target_e1cd43e
  misc_feature 1..24: note = LF
  misc_feature 25: note = Core
  misc_feature 26..50: note = RF
caatttgcagtagcaaaacgccggttgggtcaatcgccaccttgccggtc

SEQ ID NO: 29179 - DNA, 50 bp, unidentified
  source 1..50: mol_type = unassigned DNA; note = target_e1e1814
  misc_feature 1..22: note = LF
  misc_feature 23..25: note = Core
  misc_feature 26..50: note = RF
acgttggaagacgcttttacagctagcttcccgatggtcctgccgcaacg

SEQ ID NO: 29180 - DNA, 50 bp, unidentified
  source 1..50: mol_type = unassigned DNA; note = target_e1e44c2
  misc_feature 1..22: note = LF
  misc_feature 23..25: note = Core
  misc_feature 26..50: note = RF
ccttgcggcggttgggcgggctttttttgttttcagccggctaagcccct

SEQ ID NO: 29181 - DNA, 50 bp, unidentified
  source 1..50: mol_type = unassigned DNA; note = target_e1e48be
  misc_feature 1..24: note = LF
  misc_feature 25: note = Core
  misc_feature 26..50: note = RF
tctccgccggccttgcggcagagctttgcgcaggtcctccgaagatcgtg

SEQ ID NO: 29182 - DNA, 50 bp, unidentified
  source 1..50: mol_type = unassigned DNA; note = target_e1ee260
  misc_feature 1..24: note = LF
  misc_feature 25: note = Core
  misc_feature 26..50: note = RF
cccgccagcccaatcggatgtaagcgtccggccagcaccctctcgacgcg

SEQ ID NO: 29183 - DNA, 50 bp, unidentified
  source 1..50: mol_type = unassigned DNA; note = target_e200d6f
  misc_feature 1..23: note = LF
  misc_feature 24..25: note = Core
  misc_feature 26..50: note = RF
aggttttctcgcactgacgcaccctacagtttcaatattttttatctgga

SEQ ID NO: 29184 - DNA, 50 bp, unidentified
  source 1..50: mol_type = unassigned DNA; note = target_e210e6f
  misc_feature 1..23: note = LF
  misc_feature 24..25: note = Core
  misc_feature 26..50: note = RF
tgaaagaccgggatggtatgaagtggtcaactaaaactggccacggcttt

SEQ ID NO: 29185 - DNA, 50 bp, unidentified
  source 1..50: mol_type = unassigned DNA; note = target_e215672
  misc_feature 1..22: note = LF
  misc_feature 23..25: note = Core
  misc_feature 26..50: note = RF
cgatgtctttgcttatttctttcatatcttattcttattattattgtcgt

SEQ ID NO: 29186 - DNA, 50 bp, unidentified
  source 1..50: mol_type = unassigned DNA; note = target_e216fb1
  misc_feature 1..23: note = LF
  misc_feature 24..25: note = Core
  misc_feature 26..50: note = RF
aagaccccaatgatcaaggcttttctcctacgaattgactgactggttga

SEQ ID NO: 29187 - DNA, 50 bp, unidentified
  source 1..50: mol_type = unassigned DNA; note = target_e219712
  misc_feature 1..23: note = LF
  misc_feature 24..25: note = Core
  misc_feature 26..50: note = RF
gaaggccgggtggtaatcgcatcctataatgatcatgttcggctcctttt

SEQ ID NO: 29188 - DNA, 50 bp, unidentified
  source 1..50: mol_type = unassigned DNA; note = target_e21c707
  misc_feature 1..23: note = LF
  misc_feature 24..25: note = Core
  misc_feature 26..50: note = RF
cccaacagcgcggcagctaatggctccaagcagcggatagaagtttttgc

SEQ ID NO: 29189 - DNA, 50 bp, unidentified
  source 1..50: mol_type = unassigned DNA; note = target_e21d7cf
  misc_feature 1..22: note = LF
  misc_feature 23..25: note = Core
  misc_feature 26..50: note = RF
tgcgtaggagatacttcgacaagctcaggatgacgtaatggaaaccaaga

SEQ ID NO: 29190 - DNA, 50 bp, unidentified
  source 1..50: mol_type = unassigned DNA; note = target_e221db1
  misc_feature 1..22: note = LF
  misc_feature 23..25: note = Core
  misc_feature 26..50: note = RF
caaaacaaattcatacttatccctctacttttgataatttatactataaa

SEQ ID NO: 29191 - DNA, 50 bp, unidentified
  source 1..50: mol_type = unassigned DNA; note = target_e227609
  misc_feature 1..21: note = LF
  misc_feature 22..25: note = Core
  misc_feature 26..50: note = RF
cgctccttgctccgccctagaatgacgaaggcatgctgcgaaacacgccc

SEQ ID NO: 29192 - DNA, 50 bp, unidentified
  source 1..50: mol_type = unassigned DNA; note = target_e22962d
  misc_feature 1..22: note = LF
  misc_feature 23..25: note = Core
  misc_feature 26..50: note = RF
gacacaccagggtctgctgtgcggacaaaacggacctcaacaagtctatt

SEQ ID NO: 29193 - DNA, 50 bp, unidentified
  source 1..50: mol_type = unassigned DNA; note = target_e236ad9
  misc_feature 1..21: note = LF
  misc_feature 22..25: note = Core
  misc_feature 26..50: note = RF
gcggggccggctggctgcgcggtcatgcggcagcctcctgtgccttcttc

SEQ ID NO: 29194 - DNA, 50 bp, unidentified
  source 1..50: mol_type = unassigned DNA; note = target_e2377e2
  misc_feature 1..22: note = LF
  misc_feature 23..25: note = Core
  misc_feature 26..50: note = RF
cgggggagttttcgtgccccccccccccgggctcaaccctttgccttcac

SEQ ID NO: 29195 - DNA, 50 bp, unidentified
  source 1..50: mol_type = unassigned DNA; note = target_e23d31b
  misc_feature 1..23: note = LF
  misc_feature 24..25: note = Core
  misc_feature 26..50: note = RF
tgggcttcgtgcctcagcccaacctacggctatgaggctcagcccacctt

SEQ ID NO: 29196 - DNA, 50 bp, unidentified
  source 1..50: mol_type = unassigned DNA; note = target_e25778b
  misc_feature 1..23: note = LF
  misc_feature 24..25: note = Core
  misc_feature 26..50: note = RF
ggattgaggccttcgggcctctttttttattgtaagaagaaaacccccag

SEQ ID NO: 29197 - DNA, 50 bp, unidentified
  source 1..50: mol_type = unassigned DNA; note = target_e257cb2
  misc_feature 1..20: note = LF
  misc_feature 21..25: note = Core
  misc_feature 26..50: note = RF
aaacatcatggaatggagttatagggaggaattttagaagatggaagaat

SEQ ID NO: 29198 - DNA, 50 bp, unidentified
  source 1..50: mol_type = unassigned DNA; note = target_e25c676
  misc_feature 1..22: note = LF
  misc_feature 23..25: note = Core
  misc_feature 26..50: note = RF
agtgacagttgtgacaattaaaaaattatgactcgaaattttggggttag

SEQ ID NO: 29199 - DNA, 50 bp, unidentified
  source 1..50: mol_type = unassigned DNA; note = target_e263b10
  misc_feature 1..24: note = LF
  misc_feature 25: note = Core
  misc_feature 26..50: note = RF
aatgggcacctcgacccgcaggagggaaccatgaaaattacagcctcagt

SEQ ID NO: 29200 - DNA, 50 bp, unidentified
  source 1..50: mol_type = unassigned DNA; note = target_e265955
  misc_feature 1..24: note = LF
  misc_feature 25: note = Core
  misc_feature 26..50: note = RF
cagatttttttcatttcatttcctctaaattgatataagattttgcgaac

SEQ ID NO: 29201 - DNA, 50 bp, unidentified
  source 1..50: mol_type = unassigned DNA; note = target_e2683f5
  misc_feature 1..23: note = LF
  misc_feature 24..25: note = Core
  misc_feature 26..50: note = RF
agattccggtcagcgtgaaaatgctctaggcggacggtgtggcagaacaa

SEQ ID NO: 29202 - DNA, 50 bp, unidentified
  source 1..50: mol_type = unassigned DNA; note = target_e2700d4
  misc_feature 1..24: note = LF
  misc_feature 25: note = Core
  misc_feature 26..50: note = RF
attgacgctgagtctcaccttgattatgtcgccgcgcacgcgtccgacca

SEQ ID NO: 29203 - DNA, 50 bp, unidentified
  source 1..50: mol_type = unassigned DNA; note = target_e278d9e
  misc_feature 1..24: note = LF
  misc_feature 25: note = Core
  misc_feature 26..50: note = RF
gaccggcaaatttcttcttccagttataaaaagtggcctcagaaatcccc

SEQ ID NO: 29204 - DNA, 50 bp, unidentified
  source 1..50: mol_type = unassigned DNA; note = target_e28397c
  misc_feature 1..23: note = LF
  misc_feature 24..25: note = Core
  misc_feature 26..50: note = RF
tctgggtataacaaaatttggagaatcaatatgtcagatctatgctgata

SEQ ID NO: 29205 - DNA, 50 bp, unidentified
  source 1..50: mol_type = unassigned DNA; note = target_e28e0a7
  misc_feature 1..22: note = LF
  misc_feature 23..25: note = Core
  misc_feature 26..50: note = RF
ctaatcttgaacataagcacccgttttgtttaagtacattccttcacatt

SEQ ID NO: 29206 - DNA, 50 bp, unidentified
  source 1..50: mol_type = unassigned DNA; note = target_e29608c
  misc_feature 1..23: note = LF
  misc_feature 24..25: note = Core
  misc_feature 26..50: note = RF
cggtgaaggtcgttgtcttccagtgcccgtgcggtacgccggcccggcaa

SEQ ID NO: 29207 - DNA, 50 bp, unidentified
  source 1..50: mol_type = unassigned DNA; note = target_e296e2f
  misc_feature 1..23: note = LF
  misc_feature 24..25: note = Core
  misc_feature 26..50: note = RF
cccattatcgctccaacgcttccagcgattgtagagcgtcttggccggtc

SEQ ID NO: 29208 - DNA, 50 bp, unidentified
  source 1..50: mol_type = unassigned DNA; note = target_e2a00e8
  misc_feature 1..24: note = LF
  misc_feature 25: note = Core
  misc_feature 26..50: note = RF
gatagggcggtagtcgtactctttgtttacagcggtgcatttttagaaca

SEQ ID NO: 29209 - DNA, 50 bp, unidentified
  source 1..50: mol_type = unassigned DNA; note = target_e2a38f7
  misc_feature 1..23: note = LF
  misc_feature 24..25: note = Core
  misc_feature 26..50: note = RF
cgcagaagtaaggcgcggcatgtaggatgggttgagctcttaagggcgta

SEQ ID NO: 29210 - DNA, 50 bp, unidentified
  source 1..50: mol_type = unassigned DNA; note = target_e2a48d9
  misc_feature 1..24: note = LF
  misc_feature 25: note = Core
  misc_feature 26..50: note = RF
agtgttcccctcgaaatggctaacgtagagctaaccggcgctgcgcggct

SEQ ID NO: 29211 - DNA, 50 bp, unidentified
  source 1..50: mol_type = unassigned DNA; note = target_e2a849b
  misc_feature 1..23: note = LF
  misc_feature 24..25: note = Core
  misc_feature 26..50: note = RF
ctaatttttataaaacagcaaactatgagaacccctatttcctactatgg

SEQ ID NO: 29212 - DNA, 50 bp, unidentified
  source 1..50: mol_type = unassigned DNA; note = target_e2ae596
  misc_feature 1..22: note = LF
  misc_feature 23..25: note = Core
  misc_feature 26..50: note = RF
atcattggggctggtcgagggaaacgccacaaagcatccgatataaaaac

SEQ ID NO: 29213 - DNA, 50 bp, unidentified
  source 1..50: mol_type = unassigned DNA; note = target_e2aec8a
  misc_feature 1..23: note = LF
  misc_feature 24..25: note = Core
  misc_feature 26..50: note = RF
ctcggcggcgtgcagatcccctttttgcgggtgatgccgtggcgccgaaa

SEQ ID NO: 29214 - DNA, 50 bp, unidentified
  source 1..50: mol_type = unassigned DNA; note = target_e2b3f38
  misc_feature 1..23: note = LF
  misc_feature 24..25: note = Core
  misc_feature 26..50: note = RF
ggtaaggggatctggtcaggctcctatcaggccatacccgccggcacgtg

SEQ ID NO: 29215 - DNA, 50 bp, unidentified
  source 1..50: mol_type = unassigned DNA; note = target_e2b4eab
  misc_feature 1..24: note = LF
  misc_feature 25: note = Core
  misc_feature 26..50: note = RF
tcggtcatgtgtgggtatccccccccccccgatggggtgaggtgcacccc

SEQ ID NO: 29216 - DNA, 50 bp, unidentified
  source 1..50: mol_type = unassigned DNA; note = target_e2b96c8
  misc_feature 1..24: note = LF
  misc_feature 25: note = Core
  misc_feature 26..50: note = RF
tcgacgtccgttcttggccgactcctgctatacgccgcgactggagttgt

SEQ ID NO: 29217 - DNA, 50 bp, unidentified
  source 1..50: mol_type = unassigned DNA; note = target_e2bbe5b
  misc_feature 1..23: note = LF
  misc_feature 24..25: note = Core
  misc_feature 26..50: note = RF
aggatgcgctgtccccaatggggtggtttcctgcccgaccggaacgggaa

SEQ ID NO: 29218 - DNA, 50 bp, unidentified
  source 1..50: mol_type = unassigned DNA; note = target_e2c7056
  misc_feature 1..24: note = LF
  misc_feature 25: note = Core
  misc_feature 26..50: note = RF
gtcagtataaaaaaacatctttacgtacaataattttcgatatccaaact

SEQ ID NO: 29219 - DNA, 50 bp, unidentified
  source 1..50: mol_type = unassigned DNA; note = target_e2c9d17
  misc_feature 1..23: note = LF
  misc_feature 24..25: note = Core
  misc_feature 26..50: note = RF
gcttcaaatggcaagttccagcgagttataataatggtgtgcccgggaag

SEQ ID NO: 29220 - DNA, 50 bp, unidentified
  source 1..50: mol_type = unassigned DNA; note = target_e2cefff
  misc_feature 1..24: note = LF
  misc_feature 25: note = Core
  misc_feature 26..50: note = RF
tgtatagacgaatgcactgcttgcctacaacaatgcgttccttttgggtc

SEQ ID NO: 29221 - DNA, 50 bp, unidentified
  source 1..50: mol_type = unassigned DNA; note = target_e2d4d5b
  misc_feature 1..23: note = LF
  misc_feature 24..25: note = Core
  misc_feature 26..50: note = RF
ctcaagatcacgccacacaatggctctggacttacaacaacgaccgcccg

SEQ ID NO: 29222 - DNA, 50 bp, unidentified
  source 1..50: mol_type = unassigned DNA; note = target_e2db69c
  misc_feature 1..23: note = LF
  misc_feature 24..25: note = Core
  misc_feature 26..50: note = RF
ggggttcctttgtcacccgcaacctacaaaatcatcaacagccctgttac

SEQ ID NO: 29223 - DNA, 50 bp, unidentified
  source 1..50: mol_type = unassigned DNA; note = target_e2e383c
  misc_feature 1..22: note = LF
  misc_feature 23..25: note = Core
  misc_feature 26..50: note = RF
caccgacaaggcataaaaaaaaagtcaatgttatgaaaaagagaacagaa

SEQ ID NO: 29224 - DNA, 50 bp, unidentified
  source 1..50: mol_type = unassigned DNA; note = target_e2ea519
  misc_feature 1..22: note = LF
  misc_feature 23..25: note = Core
  misc_feature 26..50: note = RF
attgatcaaccgggacattgtctgacagtgcctggatgaattgtgaaaat

SEQ ID NO: 29225 - DNA, 50 bp, unidentified
  source 1..50: mol_type = unassigned DNA; note = target_e2fa167
  misc_feature 1..23: note = LF
  misc_feature 24..25: note = Core
  misc_feature 26..50: note = RF
cgccatctaacccctcgctgcagctaaccactgggcgatttacttataga

SEQ ID NO: 29226 - DNA, 50 bp, unidentified
  source 1..50: mol_type = unassigned DNA; note = target_e2fa4ac
  misc_feature 1..24: note = LF
  misc_feature 25: note = Core
  misc_feature 26..50: note = RF
gtattttgctgacgtggttaaccccaccccccgttacgttttttaccgac

SEQ ID NO: 29227 - DNA, 50 bp, unidentified
  source 1..50: mol_type = unassigned DNA; note = target_e30ddc5
  misc_feature 1..23: note = LF
  misc_feature 24..25: note = Core
  misc_feature 26..50: note = RF
ctggtcgtgagaacctccaatgtagtctccatggagaaactcccgttgct

SEQ ID NO: 29228 - DNA, 50 bp, unidentified
  source 1..50: mol_type = unassigned DNA; note = target_e312e1d
  misc_feature 1..23: note = LF
  misc_feature 24..25: note = Core
  misc_feature 26..50: note = RF
ttccaactgccatttctgccttcctttctgccacacacaatactcgaagc

SEQ ID NO: 29229 - DNA, 50 bp, unidentified
  source 1..50: mol_type = unassigned DNA; note = target_e3262c7
  misc_feature 1..23: note = LF
  misc_feature 24..25: note = Core
  misc_feature 26..50: note = RF
agacgcgcggcgttgccgcgctcctcaccatgagggtcctccttacttcc

SEQ ID NO: 29230 - DNA, 50 bp, unidentified
  source 1..50: mol_type = unassigned DNA; note = target_e32e67f
  misc_feature 1..24: note = LF
  misc_feature 25: note = Core
  misc_feature 26..50: note = RF
tgggagcattcgaccgcccataacttctggtcagcgctcgggaacggcat

SEQ ID NO: 29231 - DNA, 50 bp, unidentified
  source 1..50: mol_type = unassigned DNA; note = target_e330018
  misc_feature 1..22: note = LF
  misc_feature 23..25: note = Core
  misc_feature 26..50: note = RF
agttcatcccgcagccggccgttgaagctctcgatgaaggcattctgcat

SEQ ID NO: 29232 - DNA, 50 bp, unidentified
  source 1..50: mol_type = unassigned DNA; note = target_e331ed7
  misc_feature 1..22: note = LF
  misc_feature 23..25: note = Core
  misc_feature 26..50: note = RF
caccgccttcgcgggcaagcccgctcccacattgaaccgttgttcaccat

SEQ ID NO: 29233 - DNA, 50 bp, unidentified
  source 1..50: mol_type = unassigned DNA; note = target_e3327b1
  misc_feature 1..24: note = LF
  misc_feature 25: note = Core
  misc_feature 26..50: note = RF
gagccagcggccatagggccataggctggggtgagcgccagcgaacccca

SEQ ID NO: 29234 - DNA, 50 bp, unidentified
  source 1..50: mol_type = unassigned DNA; note = target_e341d90
  misc_feature 1..23: note = LF
  misc_feature 24..25: note = Core
  misc_feature 26..50: note = RF
tcgtgaccgtgattgtgacccgacttggctcacgatcatggttcctttcc

SEQ ID NO: 29235 - DNA, 50 bp, unidentified
  source 1..50: mol_type = unassigned DNA; note = target_e3454ac
  misc_feature 1..22: note = LF
  misc_feature 23..25: note = Core
  misc_feature 26..50: note = RF
gtcaaaagacactgggttcccgctttcgcagggatgacgagagttggaag

SEQ ID NO: 29236 - DNA, 50 bp, unidentified
  source 1..50: mol_type = unassigned DNA; note = target_e345631
  misc_feature 1..23: note = LF
  misc_feature 24..25: note = Core
  misc_feature 26..50: note = RF
ttctatttcatcggcatcaccaccttccaaaatttgtcgaaaaaaaattt

SEQ ID NO: 29237 - DNA, 50 bp, unidentified
  source 1..50: mol_type = unassigned DNA; note = target_e34c116
  misc_feature 1..23: note = LF
  misc_feature 24..25: note = Core
  misc_feature 26..50: note = RF
cttgtcctgtccgctatccagtcgacccatcatgacgattcactcccgtc

SEQ ID NO: 29238 - DNA, 50 bp, unidentified
  source 1..50: mol_type = unassigned DNA; note = target_e351581
  misc_feature 1..22: note = LF
  misc_feature 23..25: note = Core
  misc_feature 26..50: note = RF
gaggactatgtgtcaggttgtgagacgtcattggcgtaatcaaggatttc

SEQ ID NO: 29239 - DNA, 50 bp, unidentified
  source 1..50: mol_type = unassigned DNA; note = target_e35ea05
  misc_feature 1..20: note = LF
  misc_feature 21..25: note = Core
  misc_feature 26..50: note = RF
attgcatcggccaagggtctccccccggtgctggctgcggactggtcata

SEQ ID NO: 29240 - DNA, 50 bp, unidentified
  source 1..50: mol_type = unassigned DNA; note = target_e360b3c
  misc_feature 1..23: note = LF
  misc_feature 24..25: note = Core
  misc_feature 26..50: note = RF
atgcaacgatgagtatcggtggttgggccccggcggttcgccggggcgac

SEQ ID NO: 29241 - DNA, 50 bp, unidentified
  source 1..50: mol_type = unassigned DNA; note = target_e363231
  misc_feature 1..23: note = LF
  misc_feature 24..25: note = Core
  misc_feature 26..50: note = RF
ggtcacgccatgcggagcttcttttttgaaaaggattgaaacttcggccg

SEQ ID NO: 29242 - DNA, 50 bp, unidentified
  source 1..50: mol_type = unassigned DNA; note = target_e363fbd
  misc_feature 1..24: note = LF
  misc_feature 25: note = Core
  misc_feature 26..50: note = RF
ggtttcctcgaagggcgggatatccaccccccgtatttctggacgttgcc

SEQ ID NO: 29243 - DNA, 50 bp, unidentified
  source 1..50: mol_type = unassigned DNA; note = target_e369444
  misc_feature 1..24: note = LF
  misc_feature 25: note = Core
  misc_feature 26..50: note = RF
tagagagctgaactcctgtgggagagcgccttcaggcgcgaatgcagtgt

SEQ ID NO: 29244 - DNA, 50 bp, unidentified
  source 1..50: mol_type = unassigned DNA; note = target_e36a434
  misc_feature 1..23: note = LF
  misc_feature 24..25: note = Core
  misc_feature 26..50: note = RF
tcttgaccacatgtaaagaaactcctcacaacatgcttcgggcggcttcc

SEQ ID NO: 29245 - DNA, 50 bp, unidentified
  source 1..50: mol_type = unassigned DNA; note = target_e36b6d3
  misc_feature 1..23: note = LF
  misc_feature 24..25: note = Core
  misc_feature 26..50: note = RF
tcaaatgctgccattttctgctcctttcaaaacaaatataaacctgtaaa

SEQ ID NO: 29246 - DNA, 50 bp, unidentified
  source 1..50: mol_type = unassigned DNA; note = target_e37128e
  misc_feature 1..22: note = LF
  misc_feature 23..25: note = Core
  misc_feature 26..50: note = RF
gtctgtattcctgttccatttgtataaaacctcctttagttttttcctca

SEQ ID NO: 29247 - DNA, 50 bp, unidentified
  source 1..50: mol_type = unassigned DNA; note = target_e378723
  misc_feature 1..23: note = LF
  misc_feature 24..25: note = Core
  misc_feature 26..50: note = RF
ggaactgaaagtgattcgactgcctaacgccaaagctcagctgcgggcgg

SEQ ID NO: 29248 - DNA, 50 bp, unidentified
  source 1..50: mol_type = unassigned DNA; note = target_e37c3bf
  misc_feature 1..23: note = LF
  misc_feature 24..25: note = Core
  misc_feature 26..50: note = RF
cgccgccttcgcgggcgagcccgctcccacaggatttatctggcataccc

SEQ ID NO: 29249 - DNA, 50 bp, unidentified
  source 1..50: mol_type = unassigned DNA; note = target_e37f2e9
  misc_feature 1..23: note = LF
  misc_feature 24..25: note = Core
  misc_feature 26..50: note = RF
ggtggccggcccggctttccccgagcttctccaggtgctgaagcgcggcg

SEQ ID NO: 29250 - DNA, 50 bp, unidentified
  source 1..50: mol_type = unassigned DNA; note = target_e381e03
  misc_feature 1..23: note = LF
  misc_feature 24..25: note = Core
  misc_feature 26..50: note = RF
aactcggagcgcacgcatctccgtcgttctgcgtccgcgaggtaggcgat

SEQ ID NO: 29251 - DNA, 50 bp, unidentified
  source 1..50: mol_type = unassigned DNA; note = target_e38420e
  misc_feature 1..24: note = LF
  misc_feature 25: note = Core
  misc_feature 26..50: note = RF
tcgtgttcggacggccgcaccgttttttttgacggtcacatccaggtcct

SEQ ID NO: 29252 - DNA, 50 bp, unidentified
  source 1..50: mol_type = unassigned DNA; note = target_e393d0d
  misc_feature 1..24: note = LF
  misc_feature 25: note = Core
  misc_feature 26..50: note = RF
aaattattgagctaaactgcccgttagcttaatgaaatttctagtttaat

SEQ ID NO: 29253 - DNA, 50 bp, unidentified
  source 1..50: mol_type = unassigned DNA; note = target_e398b0c
  misc_feature 1..23: note = LF
  misc_feature 24..25: note = Core
  misc_feature 26..50: note = RF
tgggtttcgttcctcaacccaacctacagaacttaaggtttttatggcta

SEQ ID NO: 29254 - DNA, 50 bp, unidentified
  source 1..50: mol_type = unassigned DNA; note = target_e398c2c
  misc_feature 1..23: note = LF
  misc_feature 24..25: note = Core
  misc_feature 26..50: note = RF
gcatgtttcccctcacccttaccctctcccagagggagagggaacagatc

SEQ ID NO: 29255 - DNA, 50 bp, unidentified
  source 1..50: mol_type = unassigned DNA; note = target_e39b0e2
  misc_feature 1..22: note = LF
  misc_feature 23..25: note = Core
  misc_feature 26..50: note = RF
gatcgaaacgggcggtgggttttgaccctcgtagctaggccctcacgagg

SEQ ID NO: 29256 - DNA, 50 bp, unidentified
  source 1..50: mol_type = unassigned DNA; note = target_e39b825
  misc_feature 1..22: note = LF
  misc_feature 23..25: note = Core
  misc_feature 26..50: note = RF
acttcgttcatctgcagccctcctttcaacttttttatatagaaaagagc

SEQ ID NO: 29257 - DNA, 50 bp, unidentified
  source 1..50: mol_type = unassigned DNA; note = target_e3e76a8
  misc_feature 1..23: note = LF
  misc_feature 24..25: note = Core
  misc_feature 26..50: note = RF
atgctcatgggtgccactctagtagcccggatgagcgaagcgatatccgg

SEQ ID NO: 29258 - DNA, 50 bp, unidentified
  source 1..50: mol_type = unassigned DNA; note = target_e3e8376
  misc_feature 1..24: note = LF
  misc_feature 25: note = Core
  misc_feature 26..50: note = RF
gcgtgggtgaagtactcatttcggcagatccggtcgacttcggggaccgg

SEQ ID NO: 29259 - DNA, 50 bp, unidentified
  source 1..50: mol_type = unassigned DNA; note = target_e3e9c23
  misc_feature 1..23: note = LF
  misc_feature 24..25: note = Core
  misc_feature 26..50: note = RF
gacgacttgcccactcctacggatcagaagattgatcctccccactctcc

SEQ ID NO: 29260 - DNA, 50 bp, unidentified
  source 1..50: mol_type = unassigned DNA; note = target_e3ec5e1
  misc_feature 1..22: note = LF
  misc_feature 23..25: note = Core
  misc_feature 26..50: note = RF
cggagacaagttgtcgttggactgacagcacccgaccggcccaacccgcc

SEQ ID NO: 29261 - DNA, 50 bp, unidentified
  source 1..50: mol_type = unassigned DNA; note = target_e3ed8b3
  misc_feature 1..23: note = LF
  misc_feature 24..25: note = Core
  misc_feature 26..50: note = RF
cattttaatcctgaaaggtcaacaggccctagtaacaaatcggctatcta

SEQ ID NO: 29262 - DNA, 50 bp, unidentified
  source 1..50: mol_type = unassigned DNA; note = target_e401896
  misc_feature 1..23: note = LF
  misc_feature 24..25: note = Core
  misc_feature 26..50: note = RF
gaattcgccaccagtgtcactgttgagtctgtggcgcaacagttgggcgg

SEQ ID NO: 29263 - DNA, 50 bp, unidentified
  source 1..50: mol_type = unassigned DNA; note = target_e4020d4
  misc_feature 1..24: note = LF
  misc_feature 25: note = Core
  misc_feature 26..50: note = RF
ccgcagccgtgggcctggacatggccgactggtgggaacctacggcggcg

SEQ ID NO: 29264 - DNA, 50 bp, unidentified
  source 1..50: mol_type = unassigned DNA; note = target_e402d67
  misc_feature 1..23: note = LF
  misc_feature 24..25: note = Core
  misc_feature 26..50: note = RF
tcgtttcatttttgtattctgtcctccttttcatatcattatcagtcgaa

SEQ ID NO: 29265 - DNA, 50 bp, unidentified
  source 1..50: mol_type = unassigned DNA; note = target_e4057d2
  misc_feature 1..23: note = LF
  misc_feature 24..25: note = Core
  misc_feature 26..50: note = RF
cccttgttgaactatcctgcccctttagttgcataaagaaaaagtcgcct

SEQ ID NO: 29266 - DNA, 50 bp, unidentified
  source 1..50: mol_type = unassigned DNA; note = target_e40bb4a
  misc_feature 1..23: note = LF
  misc_feature 24..25: note = Core
  misc_feature 26..50: note = RF
ccgcatggatgcggcgaccaagcctacatggacgtatttacggcgtcccc

SEQ ID NO: 29267 - DNA, 50 bp, unidentified
  source 1..50: mol_type = unassigned DNA; note = target_e40caf6
  misc_feature 1..22: note = LF
  misc_feature 23..25: note = Core
  misc_feature 26..50: note = RF
aagtttaggtgcttgggcttattatgttgaattactggcatgcaatcttc

SEQ ID NO: 29268 - DNA, 50 bp, unidentified
  source 1..50: mol_type = unassigned DNA; note = target_e411f56
  misc_feature 1..21: note = LF
  misc_feature 22..25: note = Core
  misc_feature 26..50: note = RF
gtgccggtcttggacggggtgctcatgccgaggcctcctctccgccgccg

SEQ ID NO: 29269 - DNA, 50 bp, unidentified
  source 1..50: mol_type = unassigned DNA; note = target_e4130f6
  misc_feature 1..22: note = LF
  misc_feature 23..25: note = Core
  misc_feature 26..50: note = RF
cctggacgacaacgaaatccccccccgagccttcccgtgctcccgagcat

SEQ ID NO: 29270 - DNA, 50 bp, unidentified
  source 1..50: mol_type = unassigned DNA; note = target_e422c4d
  misc_feature 1..23: note = LF
  misc_feature 24..25: note = Core
  misc_feature 26..50: note = RF
tgcgcgtctcgatcacggggttcctttcgcggtcgcggaagcctggtcag

SEQ ID NO: 29271 - DNA, 50 bp, unidentified
  source 1..50: mol_type = unassigned DNA; note = target_e428330
  misc_feature 1..23: note = LF
  misc_feature 24..25: note = Core
  misc_feature 26..50: note = RF
cgagagcacgggcacggagatgaacgaatgtctgaaatcggaaccgacga

SEQ ID NO: 29272 - DNA, 50 bp, unidentified
  source 1..50: mol_type = unassigned DNA; note = target_e429fae
  misc_feature 1..23: note = LF
  misc_feature 24..25: note = Core
  misc_feature 26..50: note = RF
ccgccccgcctttcgcccgcgtcctgcgggctatcctggcagactcactc

SEQ ID NO: 29273 - DNA, 50 bp, unidentified
  source 1..50: mol_type = unassigned DNA; note = target_e42aeb5
  misc_feature 1..23: note = LF
  misc_feature 24..25: note = Core
  misc_feature 26..50: note = RF
gcgcaagcgcgcctttgcccaccctacgatatcggactcgcggagagggc

SEQ ID NO: 29274 - DNA, 50 bp, unidentified
  source 1..50: mol_type = unassigned DNA; note = target_e42ce26
  misc_feature 1..23: note = LF
  misc_feature 24..25: note = Core
  misc_feature 26..50: note = RF
gatttttttcatcgtgtcatctcctttcacttatatataatttatatttt

SEQ ID NO: 29275 - DNA, 50 bp, unidentified
  source 1..50: mol_type = unassigned DNA; note = target_e42ec2c
  misc_feature 1..23: note = LF
  misc_feature 24..25: note = Core
  misc_feature 26..50: note = RF
agtcattccgatgtgatcagtggtcgtaggcgatcagtgagcgtaggacg

SEQ ID NO: 29276 - DNA, 50 bp, unidentified
  source 1..50: mol_type = unassigned DNA; note = target_e432eb4
  misc_feature 1..22: note = LF
  misc_feature 23..25: note = Core
  misc_feature 26..50: note = RF
aattatttatatccttcatttttcctaacaattgtttgcctttatttggt

SEQ ID NO: 29277 - DNA, 50 bp, unidentified
  source 1..50: mol_type = unassigned DNA; note = target_e43a538
  misc_feature 1..21: note = LF
  misc_feature 22..25: note = Core
  misc_feature 26..50: note = RF
ggccagcaccgaaattacaccacattgacggacgtgaccggatcgggcgg

SEQ ID NO: 29278 - DNA, 50 bp, unidentified
  source 1..50: mol_type = unassigned DNA; note = target_e43b727
  misc_feature 1..23: note = LF
  misc_feature 24..25: note = Core
  misc_feature 26..50: note = RF
agaactaactatggctcggcagtctcacgcggaggtgcggagaacgcgga

SEQ ID NO: 29279 - DNA, 50 bp, unidentified
  source 1..50: mol_type = unassigned DNA; note = target_e43e2ba
  misc_feature 1..23: note = LF
  misc_feature 24..25: note = Core
  misc_feature 26..50: note = RF
ctgatgctggagcgctgcccaccctacgaccgcaccgtccccgcgcccgc

SEQ ID NO: 29280 - DNA, 50 bp, unidentified
  source 1..50: mol_type = unassigned DNA; note = target_e43fe83
  misc_feature 1..24: note = LF
  misc_feature 25: note = Core
  misc_feature 26..50: note = RF
atctccgcgaagatgccgatggcttttttttagtacgtcgcgctccatgc

SEQ ID NO: 29281 - DNA, 50 bp, unidentified
  source 1..50: mol_type = unassigned DNA; note = target_e444671
  misc_feature 1..23: note = LF
  misc_feature 24..25: note = Core
  misc_feature 26..50: note = RF
ggatacgctgcgcttaatccaccctacggtcgggtgcgaagccgggtagg

SEQ ID NO: 29282 - DNA, 50 bp, unidentified
  source 1..50: mol_type = unassigned DNA; note = target_e44d8aa
  misc_feature 1..24: note = LF
  misc_feature 25: note = Core
  misc_feature 26..50: note = RF
atggccttggcccgcgcccccctttttgcgccaccggcgctgcggtgggt

SEQ ID NO: 29283 - DNA, 50 bp, unidentified
  source 1..50: mol_type = unassigned DNA; note = target_e456802
  misc_feature 1..23: note = LF
  misc_feature 24..25: note = Core
  misc_feature 26..50: note = RF
acctcggagcgccgtctacctgcctgtgagaacacgcagacaggtctccc

SEQ ID NO: 29284 - DNA, 50 bp, unidentified
  source 1..50: mol_type = unassigned DNA; note = target_e457148
  misc_feature 1..22: note = LF
  misc_feature 23..25: note = Core
  misc_feature 26..50: note = RF
acaaacagtgtagtagctttatagaaatgtcgtgttctgctctgggtatg

SEQ ID NO: 29285 - DNA, 50 bp, unidentified
  source 1..50: mol_type = unassigned DNA; note = target_e4604bf
  misc_feature 1..24: note = LF
  misc_feature 25: note = Core
  misc_feature 26..50: note = RF
atcggctcactcgaacccaggagaacacgatgacgaacacgttgctgaca

SEQ ID NO: 29286 - DNA, 50 bp, unidentified
  source 1..50: mol_type = unassigned DNA; note = target_e46cb8b
  misc_feature 1..20: note = LF
  misc_feature 21..25: note = Core
  misc_feature 26..50: note = RF
atgccgcagcagactccgccccccccgacgaactcctcaacgctcttcgc

SEQ ID NO: 29287 - DNA, 50 bp, unidentified
  source 1..50: mol_type = unassigned DNA; note = target_e474780
  misc_feature 1..23: note = LF
  misc_feature 24..25: note = Core
  misc_feature 26..50: note = RF
tcttgaccatccgctgaaacacgttttggacaaaaacgtgttatgtactt

SEQ ID NO: 29288 - DNA, 50 bp, unidentified
  source 1..50: mol_type = unassigned DNA; note = target_e476a25
  misc_feature 1..24: note = LF
  misc_feature 25: note = Core
  misc_feature 26..50: note = RF
acgacgccttggggccgcgacaggttcgggtcattcgcgtcgtttcgagc

SEQ ID NO: 29289 - DNA, 50 bp, unidentified
  source 1..50: mol_type = unassigned DNA; note = target_e476a59
  misc_feature 1..24: note = LF
  misc_feature 25: note = Core
  misc_feature 26..50: note = RF
cgcggacattgggggcatacgcggcgaaaggacgcacacgccccgcgctc

SEQ ID NO: 29290 - DNA, 50 bp, unidentified
  source 1..50: mol_type = unassigned DNA; note = target_e477358
  misc_feature 1..23: note = LF
  misc_feature 24..25: note = Core
  misc_feature 26..50: note = RF
ataagtggcatgatacttcactccttttcttattatgtttgtacgaaaat

SEQ ID NO: 29291 - DNA, 50 bp, unidentified
  source 1..50: mol_type = unassigned DNA; note = target_e47b1b0
  misc_feature 1..21: note = LF
  misc_feature 22..25: note = Core
  misc_feature 26..50: note = RF
ttctggatgtggacatggggtctcctgttgcgtgtgaggggtaggagagg

SEQ ID NO: 29292 - DNA, 50 bp, unidentified
  source 1..50: mol_type = unassigned DNA; note = target_e47be09
  misc_feature 1..23: note = LF
  misc_feature 24..25: note = Core
  misc_feature 26..50: note = RF
gatttgttgttatcgcttcacgcctcaccctttactcctcacgtcatcga

SEQ ID NO: 29293 - DNA, 50 bp, unidentified
  source 1..50: mol_type = unassigned DNA; note = target_e47e7fc
  misc_feature 1..23: note = LF
  misc_feature 24..25: note = Core
  misc_feature 26..50: note = RF
ggttttgcttcgcgctacccaacctaccgatctgcgatcgcgctcctggt

SEQ ID NO: 29294 - DNA, 50 bp, unidentified
  source 1..50: mol_type = unassigned DNA; note = target_e4811c2
  misc_feature 1..24: note = LF
  misc_feature 25: note = Core
  misc_feature 26..50: note = RF
tgactgctaacgtactttaaattccgttttctacagcgaccccttaatcg

SEQ ID NO: 29295 - DNA, 50 bp, unidentified
  source 1..50: mol_type = unassigned DNA; note = target_e486d92
  misc_feature 1..21: note = LF
  misc_feature 22..25: note = Core
  misc_feature 26..50: note = RF
tttgatgttacattaaaggtgtcattcccgagttctccgcccatcgctgt

SEQ ID NO: 29296 - DNA, 50 bp, unidentified
  source 1..50: mol_type = unassigned DNA; note = target_e4896c5
  misc_feature 1..23: note = LF
  misc_feature 24..25: note = Core
  misc_feature 26..50: note = RF
ggaactccgaaagatgggcatgaaaaaaagccgcttactcttgctgaaaa

SEQ ID NO: 29297 - DNA, 50 bp, unidentified
  source 1..50: mol_type = unassigned DNA; note = target_e4899e3
  misc_feature 1..21: note = LF
  misc_feature 22..25: note = Core
  misc_feature 26..50: note = RF
ggtgcaccggagcgcagctcgctcatccgccgtagacccgcaattcgacc

SEQ ID NO: 29298 - DNA, 50 bp, unidentified; identical to SEQ ID NO: 24004
  source 1..50: mol_type = unassigned DNA; note = target_e490a32
  misc_feature 1..24: note = LF
  misc_feature 25: note = Core
  misc_feature 26..50: note = RF

SEQ ID NO: 29299 - DNA, 50 bp, unidentified
  source 1..50: mol_type = unassigned DNA; note = target_e4a9a3a
  misc_feature 1..23: note = LF
  misc_feature 24..25: note = Core
  misc_feature 26..50: note = RF
gtgtggacacctccgggaacgcaagcgatttctttcactttggcgatgag

SEQ ID NO: 29300 - DNA, 50 bp, unidentified
  source 1..50: mol_type = unassigned DNA; note = target_e4ac96a
  misc_feature 1..23: note = LF
  misc_feature 24..25: note = Core
  misc_feature 26..50: note = RF
tagccgatctggagggttttcacacagcctcggtcggaagcggccatcgc

SEQ ID NO: 29301 - DNA, 50 bp, unidentified
  source 1..50: mol_type = unassigned DNA; note = target_e4b0599
  misc_feature 1..24: note = LF
  misc_feature 25: note = Core
  misc_feature 26..50: note = RF
tcctgttcggcggctctcaggctctttttgtgcgtcaggccgactcgccg

SEQ ID NO: 29302 - DNA, 50 bp, unidentified
  source 1..50: mol_type = unassigned DNA; note = target_e4bb1f9
  misc_feature 1..21: note = LF
  misc_feature 22..25: note = Core
  misc_feature 26..50: note = RF
gccagcgagaggaccggcacgctcacgcgtacgcccccggaagcatgtgc

SEQ ID NO: 29303 - DNA, 50 bp, unidentified
  source 1..50: mol_type = unassigned DNA; note = target_e4be37b
  misc_feature 1..21: note = LF
  misc_feature 22..25: note = Core
  misc_feature 26..50: note = RF
tatcaacctcatattaattatatcataaattatcgttctaatctttgata

SEQ ID NO: 29304 - DNA, 50 bp, unidentified
  source 1..50: mol_type = unassigned DNA; note = target_e4cc053
  misc_feature 1..22: note = LF
  misc_feature 23..25: note = Core
  misc_feature 26..50: note = RF
tccatcagaatcattatgagtcagactctaagagcctttccgcgctccat

SEQ ID NO: 29305 - DNA, 50 bp, unidentified
  source 1..50: mol_type = unassigned DNA; note = target_e4d1ee0
  misc_feature 1..24: note = LF
  misc_feature 25: note = Core
  misc_feature 26..50: note = RF
ggttcacagggggcgcatatgtgccgatatgggcggtagtacggtgtccg

SEQ ID NO: 29306 - DNA, 50 bp, unidentified
  source 1..50: mol_type = unassigned DNA; note = target_e4d4342
  misc_feature 1..20: note = LF
  misc_feature 21..25: note = Core
  misc_feature 26..50: note = RF
ttgacaaccacatagggacaccccccgcgcctcccgcgcgtcaccggtcg

SEQ ID NO: 29307 - DNA, 50 bp, unidentified
  source 1..50: mol_type = unassigned DNA; note = target_e4d5358
  misc_feature 1..23: note = LF
  misc_feature 24..25: note = Core
  misc_feature 26..50: note = RF
cgacgccatcgcgagcaagctcgctcccacagggacatttcaccagccgt

SEQ ID NO: 29308 - DNA, 50 bp, unidentified
  source 1..50: mol_type = unassigned DNA; note = target_e4d5649
  misc_feature 1..23: note = LF
  misc_feature 24..25: note = Core
  misc_feature 26..50: note = RF
acggtttatcgagaaattttgttagccgctcttagtcttttcctgatctc

SEQ ID NO: 29309 - DNA, 50 bp, unidentified
  source 1..50: mol_type = unassigned DNA; note = target_e4e55d6
  misc_feature 1..22: note = LF
  misc_feature 23..25: note = Core
  misc_feature 26..50: note = RF
ccaagtggttcaagacggatcgtgaatcatgccctcgtaccccgctccgg

SEQ ID NO: 29310 - DNA, 50 bp, unidentified
  source 1..50: mol_type = unassigned DNA; note = target_e4f367d
  misc_feature 1..23: note = LF
  misc_feature 24..25: note = Core
  misc_feature 26..50: note = RF
ggtttatgtcgtcgccggtcacaagggcaatcccgccgccgtcgaaaaaa

SEQ ID NO: 29311 - DNA, 50 bp, unidentified; identical to SEQ ID NO: 26009
  source 1..50: mol_type = unassigned DNA; note = target_e4f7ac7
  misc_feature 1..22: note = LF
  misc_feature 23..25: note = Core
  misc_feature 26..50: note = RF

SEQ ID NO: 29312 - DNA, 50 bp, unidentified
  source 1..50: mol_type = unassigned DNA; note = target_e4ffc66
  misc_feature 1..22: note = LF
  misc_feature 23..25: note = Core
  misc_feature 26..50: note = RF
ggaagaggagatgtgggtcgtgtgcaatttatataatctgaccagcaacc

SEQ ID NO: 29313 - DNA, 50 bp, unidentified
  source 1..50: mol_type = unassigned DNA; note = target_e50d749
  misc_feature 1..23: note = LF
  misc_feature 24..25: note = Core
  misc_feature 26..50: note = RF
ttctttgccatcgtctatcactccttctaaaaaatctctgttaccagttc

SEQ ID NO: 29314 - DNA, 50 bp, unidentified
  source 1..50: mol_type = unassigned DNA; note = target_e514a45
  misc_feature 1..23: note = LF
  misc_feature 24..25: note = Core
  misc_feature 26..50: note = RF
ccgtctccaccgcggtcttcatgttgtcgtagatgccgcgacggcagacc

SEQ ID NO: 29315 - DNA, 50 bp, unidentified
  source 1..50: mol_type = unassigned DNA; note = target_e516c8e
  misc_feature 1..24: note = LF
  misc_feature 25: note = Core
  misc_feature 26..50: note = RF
cgcgagcgcgcggccgctccggagcgagcggcccagccccctcggggggc

SEQ ID NO: 29316 - DNA, 50 bp, unidentified
  source 1..50: mol_type = unassigned DNA; note = target_e5203d5
  misc_feature 1..22: note = LF
  misc_feature 23..25: note = Core
  misc_feature 26..50: note = RF
tttagaaagttcataaatcctcctttctatactatcttaaatatttcatt

SEQ ID NO: 29317 - DNA, 50 bp, unidentified
  source 1..50: mol_type = unassigned DNA; note = target_e522617
  misc_feature 1..24: note = LF
  misc_feature 25: note = Core
  misc_feature 26..50: note = RF
ggcattattttttccacagacggtcgaactccgccttcgcaaaataagca

SEQ ID NO: 29318 - DNA, 50 bp, unidentified
  source 1..50: mol_type = unassigned DNA; note = target_e525180
  misc_feature 1..23: note = LF
  misc_feature 24..25: note = Core
  misc_feature 26..50: note = RF
ccgtggccaattttagttgaccactacaaccacctgcatggcaaagtcgt

SEQ ID NO: 29319 - DNA, 50 bp, unidentified
  source 1..50: mol_type = unassigned DNA; note = target_e526e82
  misc_feature 1..24: note = LF
  misc_feature 25: note = Core
  misc_feature 26..50: note = RF
accgtgaggatcgctatttttaccttttcgaggggatgggcataaatagc

SEQ ID NO: 29320 - DNA, 50 bp, unidentified
  source 1..50: mol_type = unassigned DNA; note = target_e52ca73
  misc_feature 1..23: note = LF
  misc_feature 24..25: note = Core
  misc_feature 26..50: note = RF
catgttttcatattgaaaacctcctttcgttttctggatttattataata

SEQ ID NO: 29321 - DNA, 50 bp, unidentified
  source 1..50: mol_type = unassigned DNA; note = target_e53b93d
  misc_feature 1..23: note = LF
  misc_feature 24..25: note = Core
  misc_feature 26..50: note = RF
cgggccgtcggggcggcaggctcctatgaggtcacggttctcgcgtgctc

SEQ ID NO: 29322 - DNA, 50 bp, unidentified
  source 1..50: mol_type = unassigned DNA; note = target_e5408f9
  misc_feature 1..24: note = LF
  misc_feature 25: note = Core
  misc_feature 26..50: note = RF
catgagcgtcatgcccccctagaaagcctgttatgaactaaggaacctct

SEQ ID NO: 29323 - DNA, 50 bp, unidentified
  source 1..50: mol_type = unassigned DNA; note = target_e548371
  misc_feature 1..24: note = LF
  misc_feature 25: note = Core
  misc_feature 26..50: note = RF
tgaactactggagttggccagaagcggacgctcgtgctatcggacgccac

SEQ ID NO: 29324 - DNA, 50 bp, unidentified
  source 1..50: mol_type = unassigned DNA; note = target_e553c78
  misc_feature 1..23: note = LF
  misc_feature 24..25: note = Core
  misc_feature 26..50: note = RF
gattatataacatatcaaatctcctttatatattagtataagtaaagcct

SEQ ID NO: 29325 - DNA, 50 bp, unidentified
  source 1..50: mol_type = unassigned DNA; note = target_e5565ec
  misc_feature 1..24: note = LF
  misc_feature 25: note = Core
  misc_feature 26..50: note = RF
ttcgatgcacattttatatttcctcttgatttttggttcctgctctgtta

SEQ ID NO: 29326 - DNA, 50 bp, unidentified
  source 1..50: mol_type = unassigned DNA; note = target_e557059
  misc_feature 1..23: note = LF
  misc_feature 24..25: note = Core
  misc_feature 26..50: note = RF
agtatatatatgataaatattaccatgctatttataataaaattaaaaat

SEQ ID NO: 29327 - DNA, 50 bp, unidentified
  source 1..50: mol_type = unassigned DNA; note = target_e5605a2
  misc_feature 1..23: note = LF
  misc_feature 24..25: note = Core
  misc_feature 26..50: note = RF
atcctcccgttcagccggtagcccggacaggtgcgcagcaccgcctccgg

SEQ ID NO: 29328 - DNA, 50 bp, unidentified
  source 1..50: mol_type = unassigned DNA; note = target_e57367d
  misc_feature 1..23: note = LF
  misc_feature 24..25: note = Core
  misc_feature 26..50: note = RF
gcagaatcaaactgagaatgccaagcgttgtgaacacctcttaaattgct

SEQ ID NO: 29329 - DNA, 50 bp, unidentified
  source 1..50: mol_type = unassigned DNA; note = target_e581a9f
  misc_feature 1..22: note = LF
  misc_feature 23..25: note = Core
  misc_feature 26..50: note = RF
aagattgttgcacagtggcgcgagtctgtatccaagcccctaccgtctcc

SEQ ID NO: 29330 - DNA, 50 bp, unidentified
  source 1..50: mol_type = unassigned DNA; note = target_e58fe3f
  misc_feature 1..23: note = LF
  misc_feature 24..25: note = Core
  misc_feature 26..50: note = RF
ggacttccgctttaccctaagcagactcaagtcggacatcgcggcatgtc

SEQ ID NO: 29331 - DNA, 50 bp, unidentified
  source 1..50: mol_type = unassigned DNA; note = target_e590412
  misc_feature 1..21: note = LF
  misc_feature 22..25: note = Core
  misc_feature 26..50: note = RF
gtataaacaatatcataattatcacctagttttatggtaacataaaaaat

SEQ ID NO: 29332 - DNA, 50 bp, unidentified
  source 1..50: mol_type = unassigned DNA; note = target_e594217
  misc_feature 1..23: note = LF
  misc_feature 24..25: note = Core
  misc_feature 26..50: note = RF
ccatgctgctccttcctcttcgcctgtcgggcgcttcgccagtccggccg

SEQ ID NO: 29333 - DNA, 50 bp, unidentified
  source 1..50: mol_type = unassigned DNA; note = target_e594d6c
  misc_feature 1..23: note = LF
  misc_feature 24..25: note = Core
  misc_feature 26..50: note = RF
cagttagcaggaacttccgctcgtggcccgaagtcgaagtgccgaaacgc

SEQ ID NO: 29334 - DNA, 50 bp, unidentified
  source 1..50: mol_type = unassigned DNA; note = target_e595d04
  misc_feature 1..24: note = LF
  misc_feature 25: note = Core
  misc_feature 26..50: note = RF
tcaaccacccctaacccctcctctctaaggagggggaatttatgtctctt

SEQ ID NO: 29335 - DNA, 50 bp, unidentified
  source 1..50: mol_type = unassigned DNA; note = target_e59841e
  misc_feature 1..22: note = LF
  misc_feature 23..25: note = Core
  misc_feature 26..50: note = RF
agtaggatgcagagccctcttccataactttttaaatttgtaaataattt

SEQ ID NO: 29336 - DNA, 50 bp, unidentified
  source 1..50: mol_type = unassigned DNA; note = target_e59a96f
  misc_feature 1..23: note = LF
  misc_feature 24..25: note = Core
  misc_feature 26..50: note = RF
ataggggccgtgatgaccggttatggcccatcacgtcggattcgctactt

SEQ ID NO: 29337 - DNA, 50 bp, unidentified
  source 1..50: mol_type = unassigned DNA; note = target_e59c04b
  misc_feature 1..23: note = LF
  misc_feature 24..25: note = Core
  misc_feature 26..50: note = RF
gttttaacggtttccttcgtgctctccccggtgatcgggctttcttgtca

SEQ ID NO: 29338 - DNA, 50 bp, unidentified
  source 1..50: mol_type = unassigned DNA; note = target_e5a200d
  misc_feature 1..23: note = LF
  misc_feature 24..25: note = Core
  misc_feature 26..50: note = RF
gtggtcggtatcgaagcaaagcagacatcgcgaacgatcatgagtacgtg

SEQ ID NO: 29339 - DNA, 50 bp, unidentified
  source 1..50: mol_type = unassigned DNA; note = target_e5a5417
  misc_feature 1..24: note = LF
  misc_feature 25: note = Core
  misc_feature 26..50: note = RF
agaagcacagctcagagccacaagcggagaggaaccggtcatgaaggaaa

SEQ ID NO: 29340 - DNA, 50 bp, unidentified
  source 1..50: mol_type = unassigned DNA; note = target_e5b5d24
  misc_feature 1..22: note = LF
  misc_feature 23..25: note = Core
  misc_feature 26..50: note = RF
agatcccctcgccgctatagcggctcctacagaaacaggccgctagtcgt

SEQ ID NO: 29341 - DNA, 50 bp, unidentified
  source 1..50: mol_type = unassigned DNA; note = target_e5ba69b
  misc_feature 1..22: note = LF
  misc_feature 23..25: note = Core
  misc_feature 26..50: note = RF
gcctccaatccagacagcatcttgaatcacaaacacccttctttgggaat

SEQ ID NO: 29342 - DNA, 50 bp, unidentified
  source 1..50: mol_type = unassigned DNA; note = target_e5bde1e
  misc_feature 1..22: note = LF
  misc_feature 23..25: note = Core
  misc_feature 26..50: note = RF
tgtcgtctgattttgccccaagagaagcagacatcgttgctgcgtgccgg

SEQ ID NO: 29343 - DNA, 50 bp, unidentified
  source 1..50: mol_type = unassigned DNA; note = target_e5c7fa2
  misc_feature 1..19: note = LF
  misc_feature 20..25: note = Core
  misc_feature 26..50: note = RF
cgcttgcgcgacatggcaggtcctttcattacagggaggcgatggcggca

SEQ ID NO: 29344 - DNA, 50 bp, unidentified
  source 1..50: mol_type = unassigned DNA; note = target_e5d889c
  misc_feature 1..23: note = LF
  misc_feature 24..25: note = Core
  misc_feature 26..50: note = RF
tcggacgtctggaaagggtggaaagctgccattcacttgccatccgagtg

SEQ ID NO: 29345 - DNA, 50 bp, unidentified
  source 1..50: mol_type = unassigned DNA; note = target_e5d9379
  misc_feature 1..23: note = LF
  misc_feature 24..25: note = Core
  misc_feature 26..50: note = RF
aaatgtaatcatatttatatctccttcctataatttcaagccctaaatca

SEQ ID NO: 29346 - DNA, 50 bp, unidentified
  source 1..50: mol_type = unassigned DNA; note = target_e5df65e
  misc_feature 1..22: note = LF
  misc_feature 23..25: note = Core
  misc_feature 26..50: note = RF
gcattccgggacaggcggtctttttttttgcgcttcacccgcttccccca

SEQ ID NO: 29347 - DNA, 50 bp, unidentified
  source 1..50: mol_type = unassigned DNA; note = target_e5e6d6a
  misc_feature 1..22: note = LF
  misc_feature 23..25: note = Core
  misc_feature 26..50: note = RF
caatgcctcccatgcctttctcctttcatcagacaaagtgtttctttcaa

SEQ ID NO: 29348 - DNA, 50 bp, unidentified
  source 1..50: mol_type = unassigned DNA; note = target_e5ead70
  misc_feature 1..22: note = LF
  misc_feature 23..25: note = Core
  misc_feature 26..50: note = RF
acgactgtagatccatatttgtcacctcttagctttatatcaaccgccat

SEQ ID NO: 29349 - DNA, 50 bp, unidentified
  source 1..50: mol_type = unassigned DNA; note = target_e5ee6bf
  misc_feature 1..23: note = LF
  misc_feature 24..25: note = Core
  misc_feature 26..50: note = RF
tttggagaatgagtaggtcaagcctttcttttatagctagcaaatctttt

SEQ ID NO: 29350 - DNA, 50 bp, unidentified
  source 1..50: mol_type = unassigned DNA; note = target_e5f29a3
  misc_feature 1..24: note = LF
  misc_feature 25: note = Core
  misc_feature 26..50: note = RF
caaatgttgaacctgcctgccggccaggcaggtttataattgtcatagca

SEQ ID NO: 29351 - DNA, 50 bp, unidentified
  source 1..50: mol_type = unassigned DNA; note = target_e5f5ecb
  misc_feature 1..24: note = LF
  misc_feature 25: note = Core
  misc_feature 26..50: note = RF
gggagccagtccgcgcgtaagccccaccccccccggtttatatctgcgga

SEQ ID NO: 29352 - DNA, 50 bp, unidentified
  source 1..50: mol_type = unassigned DNA; note = target_e600280
  misc_feature 1..23: note = LF
  misc_feature 24..25: note = Core
  misc_feature 26..50: note = RF
cagcgcgaccggcgcatgctcttctgccgcgatccgctcgctacctagcg

SEQ ID NO: 29353 - DNA, 50 bp, unidentified
  source 1..50: mol_type = unassigned DNA; note = target_e60a315
  misc_feature 1..23: note = LF
  misc_feature 24..25: note = Core
  misc_feature 26..50: note = RF
acacgcggccattcggcgagacgctccaatgatactgcacgcctcttcca

SEQ ID NO: 29354 - DNA, 50 bp, unidentified
  source 1..50: mol_type = unassigned DNA; note = target_e613b30
  misc_feature 1..23: note = LF
  misc_feature 24..25: note = Core
  misc_feature 26..50: note = RF
aaattttaaattagcaaaagaagatggaatattgggagttattcataaag

SEQ ID NO: 29355 - DNA, 50 bp, unidentified
  source 1..50: mol_type = unassigned DNA; note = target_e619e25
  misc_feature 1..21: note = LF
  misc_feature 22..25: note = Core
  misc_feature 26..50: note = RF
acggtgaacgaagccgggtcggtcatcgggtcaccgccacgccgatccgc

SEQ ID NO: 29356 - DNA, 50 bp, unidentified
  source 1..50: mol_type = unassigned DNA; note = target_e61afa0
  misc_feature 1..23: note = LF
  misc_feature 24..25: note = Core
  misc_feature 26..50: note = RF
gcccgttctccctcaccccaaccctcccccttcactcctcactgaatttt

SEQ ID NO: 29357 - DNA, 50 bp, unidentified
  source 1..50: mol_type = unassigned DNA; note = target_e620a9f
  misc_feature 1..23: note = LF
  misc_feature 24..25: note = Core
  misc_feature 26..50: note = RF
tgggcaatgcttttctgcccaccctacataactatgattttattatttct

SEQ ID NO: 29358 - DNA, 50 bp, unidentified
  source 1..50: mol_type = unassigned DNA; note = target_e625e30
  misc_feature 1..20: note = LF
  misc_feature 21..25: note = Core
  misc_feature 26..50: note = RF
cttttaattttttgagtataaggaattatatcataaaaaatgtggataac

SEQ ID NO: 29359 - DNA, 50 bp, unidentified
  source 1..50: mol_type = unassigned DNA; note = target_e6295c9
  misc_feature 1..24: note = LF
  misc_feature 25: note = Core
  misc_feature 26..50: note = RF
tgccgccgaacttcgctttccagttgtagtacgaagcctcagagatcccg

SEQ ID NO: 29360 - DNA, 50 bp, unidentified
  source 1..50: mol_type = unassigned DNA; note = target_e63e1cc
  misc_feature 1..24: note = LF
  misc_feature 25: note = Core
  misc_feature 26..50: note = RF
cacgatggaactggaagccaaaaacggacagctggacggctacgccaaac

SEQ ID NO: 29361 - DNA, 50 bp, unidentified
  source 1..50: mol_type = unassigned DNA; note = target_e64ae98
  misc_feature 1..23: note = LF
  misc_feature 24..25: note = Core
  misc_feature 26..50: note = RF
agaaacccaaagtaacgcaccatcttgaaatgtcgtgccgggatgtggct

SEQ ID NO: 29362 - DNA, 50 bp, unidentified
  source 1..50: mol_type = unassigned DNA; note = target_e64c3da
  misc_feature 1..23: note = LF
  misc_feature 24..25: note = Core
  misc_feature 26..50: note = RF
taagaacccaccgcttggtgggttttttatggcttagctacagaataaat

SEQ ID NO: 29363 - DNA, 50 bp, unidentified
  source 1..50: mol_type = unassigned DNA; note = target_e64dfe0
  misc_feature 1..22: note = LF
  misc_feature 23..25: note = Core
  misc_feature 26..50: note = RF
tgcttattcaacaaaagcacccgtttactttaagtacatttcttcacaat

SEQ ID NO: 29364 - DNA, 50 bp, unidentified
  source 1..50: mol_type = unassigned DNA; note = target_e64fb9b
  misc_feature 1..23: note = LF
  misc_feature 24..25: note = Core
  misc_feature 26..50: note = RF
gcatgttttgcactgactgtgattggattccggacttgccgcttcgcggc

SEQ ID NO: 29365 - DNA, 50 bp, unidentified
  source 1..50: mol_type = unassigned DNA; note = target_e6514a5
  misc_feature 1..22: note = LF
  misc_feature 23..25: note = Core
  misc_feature 26..50: note = RF
cggagacaagttcgcgttggactgacagcaccggatcgtcatcaggctag

SEQ ID NO: 29366 - DNA, 50 bp, unidentified
  source 1..50: mol_type = unassigned DNA; note = target_e658f5f
  misc_feature 1..23: note = LF
  misc_feature 24..25: note = Core
  misc_feature 26..50: note = RF
tctatattatttcttgtaaaataaaaaagatgctaacatttatgctagct

SEQ ID NO: 29367 - DNA, 50 bp, unidentified
  source 1..50: mol_type = unassigned DNA; note = target_e65bc3c
  misc_feature 1..21: note = LF
  misc_feature 22..25: note = Core
  misc_feature 26..50: note = RF
gtgacggcggagacgaggccgctcatcggcggtccgacagctcgtggacg

SEQ ID NO: 29368 - DNA, 50 bp, unidentified; identical to SEQ ID NO: 20578
  source 1..50: mol_type = unassigned DNA; note = target_e65cd97
  misc_feature 1..23: note = LF
  misc_feature 24..25: note = Core
  misc_feature 26..50: note = RF

SEQ ID NO: 29369 - DNA, 50 bp, unidentified
  source 1..50: mol_type = unassigned DNA; note = target_e661598
  misc_feature 1..23: note = LF
  misc_feature 24..25: note = Core
  misc_feature 26..50: note = RF
ccgccagccccgcattgcggggcttggctttgtgggccaacggccaaagt

SEQ ID NO: 29370 - DNA, 50 bp, unidentified
  source 1..50: mol_type = unassigned DNA; note = target_e663e9d
  misc_feature 1..24: note = LF
  misc_feature 25: note = Core
  misc_feature 26..50: note = RF
tcggtcttcacctcgtgctcggccttttcgtagatggccagatcggtgat

SEQ ID NO: 29371 - DNA, 50 bp, unidentified
  source 1..50: mol_type = unassigned DNA; note = target_e67d7d9
  misc_feature 1..24: note = LF
  misc_feature 25: note = Core
  misc_feature 26..50: note = RF
ggttcaagtgtccgagaagccgacttcgcggtaaagagtgcgcgaaggta

SEQ ID NO: 29372 - DNA, 50 bp, unidentified
  source 1..50: mol_type = unassigned DNA; note = target_e67e164
  misc_feature 1..23: note = LF
  misc_feature 24..25: note = Core
  misc_feature 26..50: note = RF
atgacgacgcgcacgtcggaaggctaggcgagcgcctcgtccgctggcag

SEQ ID NO: 29373 - DNA, 50 bp, unidentified
  source 1..50: mol_type = unassigned DNA; note = target_e67e225
  misc_feature 1..24: note = LF
  misc_feature 25: note = Core
  misc_feature 26..50: note = RF
tcaagaacggttcttgtcgtagggcggcctgtggccgccgccgcgcggca

SEQ ID NO: 29374 - DNA, 50 bp, unidentified; identical to SEQ ID NO: 22146
  source 1..50: mol_type = unassigned DNA; note = target_e67f2db
  misc_feature 1..24: note = LF
  misc_feature 25: note = Core
  misc_feature 26..50: note = RF

SEQ ID NO: 29375 - DNA, 50 bp, unidentified
  source 1..50: mol_type = unassigned DNA; note = target_e681f01
  misc_feature 1..23: note = LF
  misc_feature 24..25: note = Core
  misc_feature 26..50: note = RF
gccaaaaaattccccccccggcttgtcccgggagtccacgtcttagacta

SEQ ID NO: 29376 - DNA, 50 bp, unidentified
  source 1..50: mol_type = unassigned DNA; note = target_e682f6f
  misc_feature 1..23: note = LF
  misc_feature 24..25: note = Core
  misc_feature 26..50: note = RF
ctgcacctgctcacggcagctattggcccatactgattccacactggggc

SEQ ID NO: 29377 - DNA, 50 bp, unidentified
  source 1..50: mol_type = unassigned DNA; note = target_e692c8f
  misc_feature 1..23: note = LF
  misc_feature 24..25: note = Core
  misc_feature 26..50: note = RF
catcccgatcatgcttcgacaagctcagcacgaacggcttaagtggcaag

SEQ ID NO: 29378 - DNA, 50 bp, unidentified
  source 1..50: mol_type = unassigned DNA; note = target_e695362
  misc_feature 1..23: note = LF
  misc_feature 24..25: note = Core
  misc_feature 26..50: note = RF
ataacggcgctcactgagcgccgttttttatctatcaggcagcgggcgtc

SEQ ID NO: 29379 - DNA, 50 bp, unidentified
  source 1..50: mol_type = unassigned DNA; note = target_e6a1ff8
  misc_feature 1..23: note = LF
  misc_feature 24..25: note = Core
  misc_feature 26..50: note = RF
ggccaagcgcctcccgctcggccctcagccctcggcgccgaggcgggcca

SEQ ID NO: 29380 - DNA, 50 bp, unidentified
  source 1..50: mol_type = unassigned DNA; note = target_e6a2386
  misc_feature 1..23: note = LF
  misc_feature 24..25: note = Core
  misc_feature 26..50: note = RF
aaacatgttagacttcgacaggctcagcctgacacctctaaaagaaagat

SEQ ID NO: 29381 - DNA, 50 bp, unidentified
  source 1..50: mol_type = unassigned DNA; note = target_e6a9778
  misc_feature 1..22: note = LF
  misc_feature 23..25: note = Core
  misc_feature 26..50: note = RF
tttttttatgccaaaaagagagaaaaaaacatggatcatattgaagaatt

SEQ ID NO: 29382 - DNA, 50 bp, unidentified
  source 1..50: mol_type = unassigned DNA; note = target_e6ab8bf
  misc_feature 1..23: note = LF
  misc_feature 24..25: note = Core
  misc_feature 26..50: note = RF
ctgaatgggatcctgaaccaagttcgggatgacgtatttattcattattt

SEQ ID NO: 29383 - DNA, 50 bp, unidentified
  source 1..50: mol_type = unassigned DNA; note = target_e6addf0
  misc_feature 1..24: note = LF
  misc_feature 25: note = Core
  misc_feature 26..50: note = RF
cgccgggttcgtctgccggggccccaccttttgcggggccccggccgcat

SEQ ID NO: 29384 - DNA, 50 bp, unidentified
  source 1..50: mol_type = unassigned DNA; note = target_e6af5db
  misc_feature 1..23: note = LF
  misc_feature 24..25: note = Core
  misc_feature 26..50: note = RF
gaaaagctgcgacgagtcattcagcgccctgactctccgtgcttaggcgc

SEQ ID NO: 29385 - DNA, 50 bp, unidentified
  source 1..50: mol_type = unassigned DNA; note = target_e6b27a0
  misc_feature 1..23: note = LF
  misc_feature 24..25: note = Core
  misc_feature 26..50: note = RF
aaaaatctgtaacagcccgggattgcactcccgctgatcgtcgcaccagt

SEQ ID NO: 29386 - DNA, 50 bp, unidentified
  source 1..50: mol_type = unassigned DNA; note = target_e6ba37f
  misc_feature 1..23: note = LF
  misc_feature 24..25: note = Core
  misc_feature 26..50: note = RF
ggttgagaccaccacccaaagcagacattctgcgctgcagcaaaaatctc

SEQ ID NO: 29387 - DNA, 50 bp, unidentified
  source 1..50: mol_type = unassigned DNA; note = target_e6c16e2
  misc_feature 1..24: note = LF
  misc_feature 25: note = Core
  misc_feature 26..50: note = RF
tcccttttaggggcgatttctgatttcagagtccgtgctgagaaggaggc

SEQ ID NO: 29388 - DNA, 50 bp, unidentified
  source 1..50: mol_type = unassigned DNA; note = target_e6c1e1f
  misc_feature 1..23: note = LF
  misc_feature 24..25: note = Core
  misc_feature 26..50: note = RF
gaggcgttaacagggggcccctcctttcactcggtgagggcggcgtggag

SEQ ID NO: 29389 - DNA, 50 bp, unidentified
  source 1..50: mol_type = unassigned DNA; note = target_e6c6c0f
  misc_feature 1..23: note = LF
  misc_feature 24..25: note = Core
  misc_feature 26..50: note = RF
ctcgcgagcgctggaccaacgcctgtcccctggccgttgccggcgtcacc

SEQ ID NO: 29390 - DNA, 50 bp, unidentified
  source 1..50: mol_type = unassigned DNA; note = target_e6c79d1
  misc_feature 1..24: note = LF
  misc_feature 25: note = Core
  misc_feature 26..50: note = RF
tggtcgaacccgataccgggctgaccactgcggcccggctgactcgggcc

SEQ ID NO: 29391 - DNA, 50 bp, unidentified
  source 1..50: mol_type = unassigned DNA; note = target_e6cc105
  misc_feature 1..23: note = LF
  misc_feature 24..25: note = Core
  misc_feature 26..50: note = RF
cttcttctatctccattttattcctcctcaattttccttatatctcatta

SEQ ID NO: 29392 - DNA, 50 bp, unidentified
  source 1..50: mol_type = unassigned DNA; note = target_e6cd036
  misc_feature 1..24: note = LF
  misc_feature 25: note = Core
  misc_feature 26..50: note = RF
gagcagtgaacacgcgactcgcggcatgagcgtgacggaactggccagtc

SEQ ID NO: 29393 - DNA, 50 bp, unidentified
  source 1..50: mol_type = unassigned DNA; note = target_e6d80d0
  misc_feature 1..24: note = LF
  misc_feature 25: note = Core
  misc_feature 26..50: note = RF
tggtggaactctaaaccaccgcagggtctcctgaggcacgaagggaccct

SEQ ID NO: 29394 - DNA, 50 bp, unidentified
  source 1..50: mol_type = unassigned DNA; note = target_e6da401
  misc_feature 1..23: note = LF
  misc_feature 24..25: note = Core
  misc_feature 26..50: note = RF
gcctccttcaccagcacgaattctgaatcagaaaagcagacccgtgggaa

SEQ ID NO: 29395 - DNA, 50 bp, unidentified
  source 1..50: mol_type = unassigned DNA; note = target_e6e2f0a
  misc_feature 1..23: note = LF
  misc_feature 24..25: note = Core
  misc_feature 26..50: note = RF
caagctcgaggctgcaccgtttgagctggctgccgcagatggacccgatg

SEQ ID NO: 29396 - DNA, 50 bp, unidentified
  source 1..50: mol_type = unassigned DNA; note = target_e6e43c6
  misc_feature 1..21: note = LF
  misc_feature 22..25: note = Core
  misc_feature 26..50: note = RF
cctcgtcgggcttcctggtttatgagtacacgcatctagctaccatcgag

SEQ ID NO: 29397 - DNA, 50 bp, unidentified
  source 1..50: mol_type = unassigned DNA; note = target_e6e7f79
  misc_feature 1..23: note = LF
  misc_feature 24..25: note = Core
  misc_feature 26..50: note = RF
attgctgattctgtcatcgcacccttcgggtacttctgatgttcgctatc

SEQ ID NO: 29398 - DNA, 50 bp, unidentified
  source 1..50: mol_type = unassigned DNA; note = target_e6ea255
  misc_feature 1..24: note = LF
  misc_feature 25: note = Core
  misc_feature 26..50: note = RF
caagtggcgaagcgctatatccggcattatgcgtgggtgcctacaccgga

SEQ ID NO: 29399 - DNA, 50 bp, unidentified
  source 1..50: mol_type = unassigned DNA; note = target_e6eba25
  misc_feature 1..21: note = LF
  misc_feature 22..25: note = Core
  misc_feature 26..50: note = RF
tgcggctgcggctgctctgggctcatgcctcgactcccgctcgctccggt

SEQ ID NO: 29400 - DNA, 50 bp, unidentified
  source 1..50: mol_type = unassigned DNA; note = target_e6ee7dd
  misc_feature 1..23: note = LF
  misc_feature 24..25: note = Core
  misc_feature 26..50: note = RF
gggttcccaccacccgacgacgcctgacaccactcccggacgcccttgac

SEQ ID NO: 29401 - DNA, 50 bp, unidentified
  source 1..50: mol_type = unassigned DNA; note = target_e6f4430
  misc_feature 1..22: note = LF
  misc_feature 23..25: note = Core
  misc_feature 26..50: note = RF
taacaagttacctcaacgcagctgcgtctgttgcttcagaaaaacagtaa

SEQ ID NO: 29402 - DNA, 50 bp, unidentified
  source 1..50: mol_type = unassigned DNA; note = target_e6fef17
  misc_feature 1..23: note = LF
  misc_feature 24..25: note = Core
  misc_feature 26..50: note = RF
ccgaagcgctggcgcgcttccccctcaagggggcgacgctggcggaccgg

SEQ ID NO: 29403 - DNA, 50 bp, unidentified
  source 1..50: mol_type = unassigned DNA; note = target_e6ffb15
  misc_feature 1..24: note = LF
  misc_feature 25: note = Core
  misc_feature 26..50: note = RF
tttgggatgctggcctgagtgacgtgagacacgaccggcatatcgatagt

SEQ ID NO: 29404 - DNA, 50 bp, unidentified
  source 1..50: mol_type = unassigned DNA; note = target_e7108f4
  misc_feature 1..23: note = LF
  misc_feature 24..25: note = Core
  misc_feature 26..50: note = RF
gaaaatgccgggactaaacacctagcattacagttgcatttgatttggag

SEQ ID NO: 29405 - DNA, 50 bp, unidentified
  source 1..50: mol_type = unassigned DNA; note = target_e71744d
  misc_feature 1..22: note = LF
  misc_feature 23..25: note = Core
  misc_feature 26..50: note = RF
cggtgcgggtgcggttcatgtgatctcctttgatcgggcccggttgacgg

SEQ ID NO: 29406 - DNA, 50 bp, unidentified
  source 1..50: mol_type = unassigned DNA; note = target_e717801
  misc_feature 1..23: note = LF
  misc_feature 24..25: note = Core
  misc_feature 26..50: note = RF
gaatatttcattgataattcctcctgttttttgttatatcataccctgtt

SEQ ID NO: 29407 - DNA, 50 bp, unidentified
  source 1..50: mol_type = unassigned DNA; note = target_e71aca7
  misc_feature 1..23: note = LF
  misc_feature 24..25: note = Core
  misc_feature 26..50: note = RF
cgcaagaaaacgctctacccatcctacggtaatgttaaatgtgtttacac

SEQ ID NO: 29408 - DNA, 50 bp, unidentified
  source 1..50: mol_type = unassigned DNA; note = target_e72051b
  misc_feature 1..23: note = LF
  misc_feature 24..25: note = Core
  misc_feature 26..50: note = RF
cgaagatcgtggaccgtgaatggctctagcggtaaccttccttcttcgcc

SEQ ID NO: 29409 - DNA, 50 bp, unidentified
  source 1..50: mol_type = unassigned DNA; note = target_e720854
  misc_feature 1..23: note = LF
  misc_feature 24..25: note = Core
  misc_feature 26..50: note = RF
tgttgacgacaagcacagcgccgctcactggtggctcacctccgcggccg

SEQ ID NO: 29410 - DNA, 50 bp, unidentified
  source 1..50: mol_type = unassigned DNA; note = target_e7251e2
  misc_feature 1..22: note = LF
  misc_feature 23..25: note = Core
  misc_feature 26..50: note = RF
ccaataattctcattatttaactctcctttatataataatctattattgc

SEQ ID NO: 29411 - DNA, 50 bp, unidentified
  source 1..50: mol_type = unassigned DNA; note = target_e726aab
  misc_feature 1..23: note = LF
  misc_feature 24..25: note = Core
  misc_feature 26..50: note = RF
atggtcggatcggtcatgatgcgtctccttctcgggacgaaggccaggct

SEQ ID NO: 29412 - DNA, 50 bp, unidentified
  source 1..50: mol_type = unassigned DNA; note = target_e72fa8a
  misc_feature 1..24: note = LF
  misc_feature 25: note = Core
  misc_feature 26..50: note = RF
gggagtggccgtggccaatcggaggttcgagatgtaccaataccgacaga

SEQ ID NO: 29413 - DNA, 50 bp, unidentified
  source 1..50: mol_type = unassigned DNA; note = target_e738be4
  misc_feature 1..23: note = LF
  misc_feature 24..25: note = Core
  misc_feature 26..50: note = RF
tgcactggagggtcggctcggggtggaaacccgaccttcaccagaccggt

SEQ ID NO: 29414 - DNA, 50 bp, unidentified
  source 1..50: mol_type = unassigned DNA; note = target_e7462a3
  misc_feature 1..23: note = LF
  misc_feature 24..25: note = Core
  misc_feature 26..50: note = RF
gcggagagtggtcttcgacaagctcagactgacagtgattcgacaagctt

SEQ ID NO: 29415 - DNA, 50 bp, unidentified
  source 1..50: mol_type = unassigned DNA; note = target_e74793d
  misc_feature 1..24: note = LF
  misc_feature 25: note = Core
  misc_feature 26..50: note = RF
gctgggcccctggaccggcctcggcgggagcggcggtctgcaccatgcaa

SEQ ID NO: 29416 - DNA, 50 bp, unidentified
  source 1..50: mol_type = unassigned DNA; note = target_e747bad
  misc_feature 1..22: note = LF
  misc_feature 23..25: note = Core
  misc_feature 26..50: note = RF
tttggcggctggtgacacgactgttgggtctaggcccaattaccgggtaa

SEQ ID NO: 29417 - DNA, 50 bp, unidentified
  source 1..50: mol_type = unassigned DNA; note = target_e74ca01
  misc_feature 1..24: note = LF
  misc_feature 25: note = Core
  misc_feature 26..50: note = RF
gagtgggaaataacttaatggacttggtattatatgattctattaaaata

SEQ ID NO: 29418 - DNA, 50 bp, unidentified
  source 1..50: mol_type = unassigned DNA; note = target_e753e87
  misc_feature 1..23: note = LF
  misc_feature 24..25: note = Core
  misc_feature 26..50: note = RF
ggtcgccatcgccggcaagccggctcccacagggatggcgtacattcctc

SEQ ID NO: 29419 - DNA, 50 bp, unidentified
  source 1..50: mol_type = unassigned DNA; note = target_e7604b3
  misc_feature 1..22: note = LF
  misc_feature 23..25: note = Core
  misc_feature 26..50: note = RF
tgctcagtctccttgcggagcctgaatcacgccgcaagcggatgatcaat

SEQ ID NO: 29420 - DNA, 50 bp, unidentified
  source 1..50: mol_type = unassigned DNA; note = target_e76917e
  misc_feature 1..23: note = LF
  misc_feature 24..25: note = Core
  misc_feature 26..50: note = RF
ccgcggccgcggaatgaagccgtagggtgggcaaaggcgcacttgcgccg

SEQ ID NO: 29421 - DNA, 50 bp, unidentified
  source 1..50: mol_type = unassigned DNA; note = target_e773139
  misc_feature 1..24: note = LF
  misc_feature 25: note = Core
  misc_feature 26..50: note = RF
tcagagaggacttaagatagccgccggtatgcacgattaagcgcccctga

SEQ ID NO: 29422 - DNA, 50 bp, unidentified
  source 1..50: mol_type = unassigned DNA; note = target_e777e8b
  misc_feature 1..23: note = LF
  misc_feature 24..25: note = Core
  misc_feature 26..50: note = RF
cgcaacggtgcgcacggcacaccctacaaaagcaaaaagccccgcactag

SEQ ID NO: 29423 - DNA, 50 bp, unidentified
  source 1..50: mol_type = unassigned DNA; note = target_e77d8e8
  misc_feature 1..23: note = LF
  misc_feature 24..25: note = Core
  misc_feature 26..50: note = RF
cagtggtgagtcgcgggcgtctcctgggagctgaaagacaagtcggtcac

SEQ ID NO: 29424 - DNA, 50 bp, unidentified
  source 1..50: mol_type = unassigned DNA; note = target_e78529a
  misc_feature 1..23: note = LF
  misc_feature 24..25: note = Core
  misc_feature 26..50: note = RF
ccgaagcgtgccatcccgtgctcctttcgacccttcccggtgcagtgcac

SEQ ID NO: 29425 - DNA, 50 bp, unidentified
  source 1..50: mol_type = unassigned DNA; note = target_e78d960
  misc_feature 1..24: note = LF
  misc_feature 25: note = Core
  misc_feature 26..50: note = RF
cgatgccgttctaccatccggtggtggaagagggcctgcgcacagcgctg

SEQ ID NO: 29426 - DNA, 50 bp, unidentified
  source 1..50: mol_type = unassigned DNA; note = target_e796191
  misc_feature 1..23: note = LF
  misc_feature 24..25: note = Core
  misc_feature 26..50: note = RF
gtcagaagggcgttcgctggctctgttgcacaaatggtctgaggggattc

SEQ ID NO: 29427 - DNA, 50 bp, unidentified
  source 1..50: mol_type = unassigned DNA; note = target_e79a0d1
  misc_feature 1..24: note = LF
  misc_feature 25: note = Core
  misc_feature 26..50: note = RF
ggattcctgtgacgagcacaggaatgaggggagagtagaagaacgcggcg

SEQ ID NO: 29428 - DNA, 50 bp, unidentified
  source 1..50: mol_type = unassigned DNA; note = target_e79a2a0
  misc_feature 1..23: note = LF
  misc_feature 24..25: note = Core
  misc_feature 26..50: note = RF
ggtttcgctgcgctcaacccatcctacgcactcatgccgccgagcaccga

SEQ ID NO: 29429 - DNA, 50 bp, unidentified
  source 1..50: mol_type = unassigned DNA; note = target_e79c17a
  misc_feature 1..23: note = LF
  misc_feature 24..25: note = Core
  misc_feature 26..50: note = RF
cgccgacccgacctgctcgccgactgacccacgctcagtgcgtcccggcg

SEQ ID NO: 29430 - DNA, 50 bp, unidentified
  source 1..50: mol_type = unassigned DNA; note = target_e7a052a
  misc_feature 1..22: note = LF
  misc_feature 23..25: note = Core
  misc_feature 26..50: note = RF
ggacgtgcaacggtcggcgcttcatatcgcctttcaggcgagacgaagcc

SEQ ID NO: 29431 - DNA, 50 bp, unidentified
  source 1..50: mol_type = unassigned DNA; note = target_e7aab40
  misc_feature 1..24: note = LF
  misc_feature 25: note = Core
  misc_feature 26..50: note = RF
gtcattgcttcactcgaccaccctctctacgcaagcgtaaagagggtttt

SEQ ID NO: 29432 - DNA, 50 bp, unidentified
  source 1..50: mol_type = unassigned DNA; note = target_e7ae38a
  misc_feature 1..23: note = LF
  misc_feature 24..25: note = Core
  misc_feature 26..50: note = RF
cttgatccgatctggcggatggcctaattccaccaacgtgctggctaccg

SEQ ID NO: 29433 - DNA, 50 bp, unidentified
  source 1..50: mol_type = unassigned DNA; note = target_e7af965
  misc_feature 1..24: note = LF
  misc_feature 25: note = Core
  misc_feature 26..50: note = RF
gtcctccccatccccgttcatacttttttaagcagacggttctccaggat

SEQ ID NO: 29434 - DNA, 50 bp, unidentified
  source 1..50: mol_type = unassigned DNA; note = target_e7b5323
  misc_feature 1..23: note = LF
  misc_feature 24..25: note = Core
  misc_feature 26..50: note = RF
aatcaattttggcatagaatctcctttctgtcccatacagaattaaaacc

SEQ ID NO: 29435 - DNA, 50 bp, unidentified
  source 1..50: mol_type = unassigned DNA; note = target_e7b8092
  misc_feature 1..22: note = LF
  misc_feature 23..25: note = Core
  misc_feature 26..50: note = RF
gagtcacaaaatcagattacagtgacagtgcaattaactttcaatactga

SEQ ID NO: 29436 - DNA, 50 bp, unidentified
  source 1..50: mol_type = unassigned DNA; note = target_e7b8861
  misc_feature 1..21: note = LF
  misc_feature 22..25: note = Core
  misc_feature 26..50: note = RF
caacccgatcagcaggtcgccttcccagtgccccgggacggcacggtcgg

SEQ ID NO: 29437 - DNA, 50 bp, unidentified
  source 1..50: mol_type = unassigned DNA; note = target_e7bba2f
  misc_feature 1..23: note = LF
  misc_feature 24..25: note = Core
  misc_feature 26..50: note = RF
cagcgcccagcgcaccaatgcctagcacgactttggcagaattttagaag

SEQ ID NO: 29438 - DNA, 50 bp, unidentified
  source 1..50: mol_type = unassigned DNA; note = target_e7bfec1
  misc_feature 1..24: note = LF
  misc_feature 25: note = Core
  misc_feature 26..50: note = RF
cgcggcgcgcgacttcagctgacgtgacgtccctatcgacgacatcatcc

SEQ ID NO: 29439 - DNA, 50 bp, unidentified
  source 1..50: mol_type = unassigned DNA; note = target_e7c75f1
  misc_feature 1..22: note = LF
  misc_feature 23..25: note = Core
  misc_feature 26..50: note = RF
caaggcccggcgtgcattacagtgacagtgcacgtactgctggtcgtcag

SEQ ID NO: 29440 - DNA, 50 bp, unidentified
  source 1..50: mol_type = unassigned DNA; note = target_e7e61b0
  misc_feature 1..20: note = LF
  misc_feature 21..25: note = Core
  misc_feature 26..50: note = RF
acgatgactccgccttcacgccccccggatcgtccagcgcggacagacgt

SEQ ID NO: 29441 - DNA, 50 bp, unidentified
  source 1..50: mol_type = unassigned DNA; note = target_e7f4fb0
  misc_feature 1..22: note = LF
  misc_feature 23..25: note = Core
  misc_feature 26..50: note = RF
agcctctgaccaaaagttaccgtgacatcaccctcgcccgccacataaag

SEQ ID NO: 29442 - DNA, 50 bp, unidentified
  source 1..50: mol_type = unassigned DNA; note = target_e7f5875
  misc_feature 1..24: note = LF
  misc_feature 25: note = Core
  misc_feature 26..50: note = RF
aacgccggggtagcccatagtgggcggaatgagcgcacgctcatcgacat

SEQ ID NO: 29443 - DNA, 50 bp, unidentified
  source 1..50: mol_type = unassigned DNA; note = target_e804e99
  misc_feature 1..23: note = LF
  misc_feature 24..25: note = Core
  misc_feature 26..50: note = RF
gaggctccttcggcttacccaccctacgcggcgagtggtatacgcttttg

SEQ ID NO: 29444 - DNA, 50 bp, unidentified
  source 1..50: mol_type = unassigned DNA; note = target_e805e40
  misc_feature 1..23: note = LF
  misc_feature 24..25: note = Core
  misc_feature 26..50: note = RF
gcctaagtaacaagtctcaggggtggattccgggttcgcgctatgcgcgc

SEQ ID NO: 29445 - DNA, 50 bp, unidentified
  source 1..50: mol_type = unassigned DNA; note = target_e81c0c5
  misc_feature 1..23: note = LF
  misc_feature 24..25: note = Core
  misc_feature 26..50: note = RF
tgcacaatagggcataaactcacctcaaatttgtttcaaccttcaccgaa

SEQ ID NO: 29446 - DNA, 50 bp, unidentified
  source 1..50: mol_type = unassigned DNA; note = target_e822ec3
  misc_feature 1..23: note = LF
  misc_feature 24..25: note = Core
  misc_feature 26..50: note = RF
ctaaattgataagaatattataacataaaaaaacaacgaaattgttgttt

SEQ ID NO: 29447 - DNA, 50 bp, unidentified
  source 1..50: mol_type = unassigned DNA; note = target_e823fec
  misc_feature 1..24: note = LF
  misc_feature 25: note = Core
  misc_feature 26..50: note = RF
ttggcgcccagatcctcatcgcggcatggaaatcctgggtgttgtcggtg

SEQ ID NO: 29448 - DNA, 50 bp, unidentified
  source 1..50: mol_type = unassigned DNA; note = target_e825b2e
  misc_feature 1..24: note = LF
  misc_feature 25: note = Core
  misc_feature 26..50: note = RF
atcgtatataaaaaaaggctttgttgaataaatcgaacttttgctgagtt

SEQ ID NO: 29449 - DNA, 50 bp, unidentified
  source 1..50: mol_type = unassigned DNA; note = target_e82c7f4
  misc_feature 1..24: note = LF
  misc_feature 25: note = Core
  misc_feature 26..50: note = RF
taatggccgtttccaggcggaaagcggaactagattcgcccagaaaccgg

SEQ ID NO: 29450 - DNA, 50 bp, unidentified
  source 1..50: mol_type = unassigned DNA; note = target_e82ce17
  misc_feature 1..24: note = LF
  misc_feature 25: note = Core
  misc_feature 26..50: note = RF
gaggaaaagcctccccaagcccctccgaagcaaaaaggtgagaggaggaa

SEQ ID NO: 29451 - DNA, 50 bp, unidentified
  source 1..50: mol_type = unassigned DNA; note = target_e831723
  misc_feature 1..23: note = LF
  misc_feature 24..25: note = Core
  misc_feature 26..50: note = RF
ggccgaacggttggacccaaatgcggacgtttgtggtctcgaaggcattt

SEQ ID NO: 29452 - DNA, 50 bp, unidentified
  source 1..50: mol_type = unassigned DNA; note = target_e832431
  misc_feature 1..24: note = LF
  misc_feature 25: note = Core
  misc_feature 26..50: note = RF
ttggttcaactatgctgagatccccacccaggtccgcttcccctagggcc

SEQ ID NO: 29453 - DNA, 50 bp, unidentified
  source 1..50: mol_type = unassigned DNA; note = target_e838732
  misc_feature 1..23: note = LF
  misc_feature 24..25: note = Core
  misc_feature 26..50: note = RF
tgaggcggccttatccttgtttcctctccatagggagagggtgcagggtg

SEQ ID NO: 29454 - DNA, 50 bp, unidentified
  source 1..50: mol_type = unassigned DNA; note = target_e839f16
  misc_feature 1..23: note = LF
  misc_feature 24..25: note = Core
  misc_feature 26..50: note = RF
cctctacgccttttacgccaagctgccgttttggaccggactggccagca

SEQ ID NO: 29455 - DNA, 50 bp, unidentified
  source 1..50: mol_type = unassigned DNA; note = target_e849268
  misc_feature 1..24: note = LF
  misc_feature 25: note = Core
  misc_feature 26..50: note = RF
tattttgcccttggcctcacttcctcctgtggagcgcagaaaatcccgca

SEQ ID NO: 29456 - DNA, 50 bp, unidentified
  source 1..50: mol_type = unassigned DNA; note = target_e84aab2
  misc_feature 1..23: note = LF
  misc_feature 24..25: note = Core
  misc_feature 26..50: note = RF
cgcttcgctgcgctacgcgccacctccccctgtctccgcttcgctcgcgg

SEQ ID NO: 29457 - DNA, 50 bp, unidentified
  source 1..50: mol_type = unassigned DNA; note = target_e850189
  misc_feature 1..24: note = LF
  misc_feature 25: note = Core
  misc_feature 26..50: note = RF
ggcaccatcgccaacgacgactgaccctgctccggccgacggcggccccc

SEQ ID NO: 29458 - DNA, 50 bp, unidentified
  source 1..50: mol_type = unassigned DNA; note = target_e85c0c4
  misc_feature 1..23: note = LF
  misc_feature 24..25: note = Core
  misc_feature 26..50: note = RF
ttcgtcatggctcatatcacattctccattcataaaattgctgtctggtg

SEQ ID NO: 29459 - DNA, 50 bp, unidentified
  source 1..50: mol_type = unassigned DNA; note = target_e85c89a
  misc_feature 1..23: note = LF
  misc_feature 24..25: note = Core
  misc_feature 26..50: note = RF
ggcgccggctctttggctcaccatgtccctttggcgtccacagcggcccg

SEQ ID NO: 29460 - DNA, 50 bp, unidentified
  source 1..50: mol_type = unassigned DNA; note = target_e864836
  misc_feature 1..24: note = LF
  misc_feature 25: note = Core
  misc_feature 26..50: note = RF
tcttgctcgctggccagcagcgtttttttgaagcggtagccgttacggat

SEQ ID NO: 29461 - DNA, 50 bp, unidentified
  source 1..50: mol_type = unassigned DNA; note = target_e86a0af
  misc_feature 1..23: note = LF
  misc_feature 24..25: note = Core
  misc_feature 26..50: note = RF
tcctacagaccggtgcttgcctgtaggagcaggctctgcctgcgaccggg

SEQ ID NO: 29462 - DNA, 50 bp, unidentified
  source 1..50: mol_type = unassigned DNA; note = target_e86c3c2
  misc_feature 1..23: note = LF
  misc_feature 24..25: note = Core
  misc_feature 26..50: note = RF
gtctgaccggagaacttcagggtcgaattcattcgaccaggctgttggcc

SEQ ID NO: 29463 - DNA, 50 bp, unidentified
  source 1..50: mol_type = unassigned DNA; note = target_e86d371
  misc_feature 1..21: note = LF
  misc_feature 22..25: note = Core
  misc_feature 26..50: note = RF
ccgaactgtgcgagtccgcggctcatgcctcatcaaggcggaagcggccc

SEQ ID NO: 29464 - DNA, 50 bp, unidentified
  source 1..50: mol_type = unassigned DNA; note = target_e87016f
  misc_feature 1..23: note = LF
  misc_feature 24..25: note = Core
  misc_feature 26..50: note = RF
cttataataatccatccaatcacctcactattcaaagtatttcacataga

SEQ ID NO: 29465 - DNA, 50 bp, unidentified
  source 1..50: mol_type = unassigned DNA; note = target_e87c27a
  misc_feature 1..23: note = LF
  misc_feature 24..25: note = Core
  misc_feature 26..50: note = RF
aataggctggcaatgtccgcttttggcccttagcggacatcccacttaca

SEQ ID NO: 29466 - DNA, 50 bp, unidentified
  source 1..50: mol_type = unassigned DNA; note = target_e87d6f1
  misc_feature 1..24: note = LF
  misc_feature 25: note = Core
  misc_feature 26..50: note = RF
tgaggagcacgcttgcggtttgtccgggggacaaaccgcgctccgagttc

SEQ ID NO: 29467 - DNA, 50 bp, unidentified
  source 1..50: mol_type = unassigned DNA; note = target_e886430
  misc_feature 1..23: note = LF
  misc_feature 24..25: note = Core
  misc_feature 26..50: note = RF
caaaaaagatgcttttggttactttgacatctatcaaaagtaactggggc

SEQ ID NO: 29468 - DNA, 50 bp, unidentified
  source 1..50: mol_type = unassigned DNA; note = target_e88b4d7
  misc_feature 1..22: note = LF
  misc_feature 23..25: note = Core
  misc_feature 26..50: note = RF
tttatgatacaaaggtgtagcctgatgctattgcatcaggtgcgattttg

SEQ ID NO: 29469 - DNA, 50 bp, unidentified
  source 1..50: mol_type = unassigned DNA; note = target_e88d15a
  misc_feature 1..22: note = LF
  misc_feature 23..25: note = Core
  misc_feature 26..50: note = RF
ttatcagccataaagccacctccttccttttaaatgtcaaagggaatcac

SEQ ID NO: 29470 - DNA, 50 bp, unidentified
  source 1..50: mol_type = unassigned DNA; note = target_e89513e
  misc_feature 1..23: note = LF
  misc_feature 24..25: note = Core
  misc_feature 26..50: note = RF
cctttgtgccttttcttcgtgtacttcgtggtaaaaactaagcaacatgc

SEQ ID NO: 29471 - DNA, 50 bp, unidentified
  source 1..50: mol_type = unassigned DNA; note = target_e8963f2
  misc_feature 1..23: note = LF
  misc_feature 24..25: note = Core
  misc_feature 26..50: note = RF
cgaaccttgcgtaaacttagcgcctttgcggttaaacattaaaatcatga

SEQ ID NO: 29472 - DNA, 50 bp, unidentified
  source 1..50: mol_type = unassigned DNA; note = target_e897c9d
  misc_feature 1..23: note = LF
  misc_feature 24..25: note = Core
  misc_feature 26..50: note = RF
cgcgactgcagggagcgcgggagagggggccgggggtgaggcgggtgtga

SEQ ID NO: 29473 - DNA, 50 bp, unidentified
  source 1..50: mol_type = unassigned DNA; note = target_e89c3cb
  misc_feature 1..23: note = LF
  misc_feature 24..25: note = Core
  misc_feature 26..50: note = RF
ttttcctttgtgtcattttacttctcctcatctttaaaaaatatttcttc

SEQ ID NO: 29474 - DNA, 50 bp, unidentified
  source 1..50: mol_type = unassigned DNA; note = target_e8a0253
  misc_feature 1..24: note = LF
  misc_feature 25: note = Core
  misc_feature 26..50: note = RF
agccgcctcactgtaagagcggaacaaaaaacaggccacttcaagaacat

SEQ ID NO: 29475 - DNA, 50 bp, unidentified
  source 1..50: mol_type = unassigned DNA; note = target_e8a6d51
  misc_feature 1..23: note = LF
  misc_feature 24..25: note = Core
  misc_feature 26..50: note = RF
tatgagtcctgagcctaaggtcgctcttaagatcagaaatcaccgttcac

SEQ ID NO: 29476 - DNA, 50 bp, unidentified
  source 1..50: mol_type = unassigned DNA; note = target_e8aad63
  misc_feature 1..23: note = LF
  misc_feature 24..25: note = Core
  misc_feature 26..50: note = RF
cggctcgatgtgggagacgcaccctagccgcggcgggcgcgggcgcgctg

SEQ ID NO: 29477 - DNA, 50 bp, unidentified
  source 1..50: mol_type = unassigned DNA; note = target_e8ab40d
  misc_feature 1..24: note = LF
  misc_feature 25: note = Core
  misc_feature 26..50: note = RF
caaaagcgacccgcttccgtccggttggggtcaatttgagactatgcggg

SEQ ID NO: 29478 - DNA, 50 bp, unidentified
  source 1..50: mol_type = unassigned DNA; note = target_e8b099c
  misc_feature 1..23: note = LF
  misc_feature 24..25: note = Core
  misc_feature 26..50: note = RF
ccttcgcgaagtaggcggcggcttttttaagatgtctcgttctgccttca

SEQ ID NO: 29479 - DNA, 50 bp, unidentified
  source 1..50: mol_type = unassigned DNA; note = target_e8b35c7
  misc_feature 1..24: note = LF
  misc_feature 25: note = Core
  misc_feature 26..50: note = RF
gcagcatggattgcgggtcaggcccgcaatgacgattcccggctcaatac

SEQ ID NO: 29480 - DNA, 50 bp, unidentified
  source 1..50: mol_type = unassigned DNA; note = target_e8c0cb5
  misc_feature 1..23: note = LF
  misc_feature 24..25: note = Core
  misc_feature 26..50: note = RF
gaccctgccaagtagatgaacacagttgctaggtagaatccgatcctgtt

SEQ ID NO: 29481 - DNA, 50 bp, unidentified
  source 1..50: mol_type = unassigned DNA; note = target_e8c63b4
  misc_feature 1..23: note = LF
  misc_feature 24..25: note = Core
  misc_feature 26..50: note = RF
aatgcgctctgcagcgcctgggtccggctctgcgcagcagcgtaagaacg

SEQ ID NO: 29482 - DNA, 50 bp, unidentified
  source 1..50: mol_type = unassigned DNA; note = target_e8c72c4
  misc_feature 1..24: note = LF
  misc_feature 25: note = Core
  misc_feature 26..50: note = RF
caatcgccctcttcaccgtgagctctttcgtttacctttcttaccaaact

SEQ ID NO: 29483 - DNA, 50 bp, unidentified
  source 1..50: mol_type = unassigned DNA; note = target_e8ca18e
  misc_feature 1..23: note = LF
  misc_feature 24..25: note = Core
  misc_feature 26..50: note = RF
ggttttctggtagtgcaataggatgtgccgatgatagaaggcgcatcatt

SEQ ID NO: 29484 - DNA, 50 bp, unidentified
  source 1..50: mol_type = unassigned DNA; note = target_e8cb9b8
  misc_feature 1..23: note = LF
  misc_feature 24..25: note = Core
  misc_feature 26..50: note = RF
cgatgccgtcgaagggggcatccaccccatcagttcaggtcacttctcag

SEQ ID NO: 29485 - DNA, 50 bp, unidentified
  source 1..50: mol_type = unassigned DNA; note = target_e8de034
  misc_feature 1..23: note = LF
  misc_feature 24..25: note = Core
  misc_feature 26..50: note = RF
agttccgggcgatcatcattgcgagccgctacacctatacacgcacatcg

SEQ ID NO: 29486 - DNA, 50 bp, unidentified
  source 1..50: mol_type = unassigned DNA; note = target_e8e2af5
  misc_feature 1..23: note = LF
  misc_feature 24..25: note = Core
  misc_feature 26..50: note = RF
cccgaaactgttcagacaaaccgagccacctctgaggatcgcgatccgat

SEQ ID NO: 29487 - DNA, 50 bp, unidentified
  source 1..50: mol_type = unassigned DNA; note = target_e8e3af6
  misc_feature 1..23: note = LF
  misc_feature 24..25: note = Core
  misc_feature 26..50: note = RF
aagagcgtcgcggctgaaagctgctcctacaacaaattgacatgagcccc

SEQ ID NO: 29488 - DNA, 50 bp, unidentified
  source 1..50: mol_type = unassigned DNA; note = target_e8e6de8
  misc_feature 1..21: note = LF
  misc_feature 22..25: note = Core
  misc_feature 26..50: note = RF
tcggccccggctaccgccggggcttttttgttgaaggggcccctgatgtc

SEQ ID NO: 29489 - DNA, 50 bp, unidentified
  source 1..50: mol_type = unassigned DNA; note = target_e8f3121
  misc_feature 1..23: note = LF
  misc_feature 24..25: note = Core
  misc_feature 26..50: note = RF
tgattgatttcataacgttcctcctgttgatatttttatattagaaaatt

SEQ ID NO: 29490 - DNA, 50 bp, unidentified
  source 1..50: mol_type = unassigned DNA; note = target_e8f7625
  misc_feature 1..23: note = LF
  misc_feature 24..25: note = Core
  misc_feature 26..50: note = RF
agattcacgaccaattttacttcctgttatcaataatcatcaatgttagg

SEQ ID NO: 29491 - DNA, 50 bp, unidentified
  source 1..50: mol_type = unassigned DNA; note = target_e8f98ea
  misc_feature 1..22: note = LF
  misc_feature 23..25: note = Core
  misc_feature 26..50: note = RF
aaccaggattcccttcggcttcgctcagggtacggctcacccaacgagga

SEQ ID NO: 29492 - DNA, 50 bp, unidentified
  source 1..50: mol_type = unassigned DNA; note = target_e9013d5
  misc_feature 1..23: note = LF
  misc_feature 24..25: note = Core
  misc_feature 26..50: note = RF
tttaagtaataaaaaaatgggttctacaataaatgttggggtgtcacatc

SEQ ID NO: 29493 - DNA, 50 bp, unidentified
  source 1..50: mol_type = unassigned DNA; note = target_e90f9fe
  misc_feature 1..22: note = LF
  misc_feature 23..25: note = Core
  misc_feature 26..50: note = RF
tcatgcattggaatatcccctttctttttgtgcgggtgctggaagcccct

SEQ ID NO: 29494 - DNA, 50 bp, unidentified
  source 1..50: mol_type = unassigned DNA; note = target_e91a5d1
  misc_feature 1..24: note = LF
  misc_feature 25: note = Core
  misc_feature 26..50: note = RF
ctgccagcaattaattcatacacgttgttagcctttcattattttatttt

SEQ ID NO: 29495 - DNA, 50 bp, unidentified
  source 1..50: mol_type = unassigned DNA; note = target_e91dbdc
  misc_feature 1..22: note = LF
  misc_feature 23..25: note = Core
  misc_feature 26..50: note = RF
agattttttggattaaccacagagacacggagagcacagagattaataaa

SEQ ID NO: 29496 - DNA, 50 bp, unidentified
  source 1..50: mol_type = unassigned DNA; note = target_e92a11e
  misc_feature 1..24: note = LF
  misc_feature 25: note = Core
  misc_feature 26..50: note = RF
tgggaatgtcaaccaaccagtaactggcggttagccggtaattcgctcgt

SEQ ID NO: 29497 - DNA, 50 bp, unidentified
  source 1..50: mol_type = unassigned DNA; note = target_e92e3dd
  misc_feature 1..24: note = LF
  misc_feature 25: note = Core
  misc_feature 26..50: note = RF
ccggattgccgcgcttgccgtaagcgtccccgccccacacccaaacgtga

SEQ ID NO: 29498 - DNA, 50 bp, unidentified; identical to SEQ ID NO: 26834
  source 1..50: mol_type = unassigned DNA; note = target_e932fb6
  misc_feature 1..23: note = LF
  misc_feature 24..25: note = Core
  misc_feature 26..50: note = RF

SEQ ID NO: 29499 - DNA, 50 bp, unidentified
  source 1..50: mol_type = unassigned DNA; note = target_e934ec8
  misc_feature 1..24: note = LF
  misc_feature 25: note = Core
  misc_feature 26..50: note = RF
cgacaggctcaaagcggccagaagcggacatttgaagtagggaaaatgaa

SEQ ID NO: 29500 - DNA, 50 bp, unidentified
  source 1..50: mol_type = unassigned DNA; note = target_e937ef8
  misc_feature 1..23: note = LF
  misc_feature 24..25: note = Core
  misc_feature 26..50: note = RF
atctctattttccatctaaggaaatagcagaaaaagcaccaataataaag

SEQ ID NO: 29501 - DNA, 50 bp, unidentified
  source 1..50: mol_type = unassigned DNA; note = target_e93c3af
  misc_feature 1..23: note = LF
  misc_feature 24..25: note = Core
  misc_feature 26..50: note = RF
agataggactagaaatagtcttttttttattgctctaaaaaggatttaat

SEQ ID NO: 29502 - DNA, 50 bp, unidentified
  source 1..50: mol_type = unassigned DNA; note = target_e94a28f
  misc_feature 1..23: note = LF
  misc_feature 24..25: note = Core
  misc_feature 26..50: note = RF
cttaaacttttcattttattctccttaattctcattacagagagtccttt

SEQ ID NO: 29503 - DNA, 50 bp, unidentified
  source 1..50: mol_type = unassigned DNA; note = target_e94af9a
  misc_feature 1..24: note = LF
  misc_feature 25: note = Core
  misc_feature 26..50: note = RF
tgacctgaggtttcggatgtccgttccgggtcaaacgctacacgctgttt

SEQ ID NO: 29504 - DNA, 50 bp, unidentified
  source 1..50: mol_type = unassigned DNA; note = target_e954b0d
  misc_feature 1..24: note = LF
  misc_feature 25: note = Core
  misc_feature 26..50: note = RF
gaccaccgagcaccgtcctcgcggcatgagcgtctcactctcatgccgct

SEQ ID NO: 29505 - DNA, 50 bp, unidentified
  source 1..50: mol_type = unassigned DNA; note = target_e95b6f4
  misc_feature 1..23: note = LF
  misc_feature 24..25: note = Core
  misc_feature 26..50: note = RF
ctttcggtccaattacatccctcctttggatgttgtaatatagctgccct

SEQ ID NO: 29506 - DNA, 50 bp, unidentified
  source 1..50: mol_type = unassigned DNA; note = target_e95dc4b
  misc_feature 1..23: note = LF
  misc_feature 24..25: note = Core
  misc_feature 26..50: note = RF
gtgccggttctgacgccccgcccctcactccgtcatgccatggcatgacc

SEQ ID NO: 29507 - DNA, 50 bp, unidentified
  source 1..50: mol_type = unassigned DNA; note = target_e960af1
  misc_feature 1..23: note = LF
  misc_feature 24..25: note = Core
  misc_feature 26..50: note = RF
cgggctgcagtacgactcaccaggcggccagctcgccgacatgttcaaga

SEQ ID NO: 29508 - DNA, 50 bp, unidentified
  source 1..50: mol_type = unassigned DNA; note = target_e96aa36
  misc_feature 1..24: note = LF
  misc_feature 25: note = Core
  misc_feature 26..50: note = RF
gaatgtctgcttacagcgcaatagcggtcattaattgagttttcccaatt

SEQ ID NO: 29509 - DNA, 50 bp, unidentified
  source 1..50: mol_type = unassigned DNA; note = target_e96bcf3
  misc_feature 1..22: note = LF
  misc_feature 23..25: note = Core
  misc_feature 26..50: note = RF
cactcgtccctgaagctgccgttgaagctctcgacaaagccattttgcat

SEQ ID NO: 29510 - DNA, 50 bp, unidentified
  source 1..50: mol_type = unassigned DNA; note = target_e96fc80
  misc_feature 1..24: note = LF
  misc_feature 25: note = Core
  misc_feature 26..50: note = RF
ctccccctgccccctctatcttagagggggagatgctggcgcggttatat

SEQ ID NO: 29511 - DNA, 50 bp, unidentified
  source 1..50: mol_type = unassigned DNA; note = target_e970dbb
  misc_feature 1..23: note = LF
  misc_feature 24..25: note = Core
  misc_feature 26..50: note = RF
tggcgctcgccgagatccccgacctgcgctgccacgtccgcggtccaagc

SEQ ID NO: 29512 - DNA, 50 bp, unidentified
  source 1..50: mol_type = unassigned DNA; note = target_e9774a4
  misc_feature 1..24: note = LF
  misc_feature 25: note = Core
  misc_feature 26..50: note = RF
cccctaaaacgtccagaatttacgttttacacagcctcggccgaaagccg

SEQ ID NO: 29513 - DNA, 50 bp, unidentified
  source 1..50: mol_type = unassigned DNA; note = target_e9774b2
  misc_feature 1..24: note = LF
  misc_feature 25: note = Core
  misc_feature 26..50: note = RF
cgcgagaagatcgctggatcggcgtttatcgcgggttagcgcttcgcgcg

SEQ ID NO: 29514 - DNA, 50 bp, unidentified
  source 1..50: mol_type = unassigned DNA; note = target_e9798d2
  misc_feature 1..22: note = LF
  misc_feature 23..25: note = Core
  misc_feature 26..50: note = RF
gcaatatgcgaatggacaagtgaaacatcgcgatggttcaaatgaaacat

SEQ ID NO: 29515 - DNA, 50 bp, unidentified
  source 1..50: mol_type = unassigned DNA; note = target_e97aae9
  misc_feature 1..23: note = LF
  misc_feature 24..25: note = Core
  misc_feature 26..50: note = RF
actgcggataggtgaagagcaagcgttcgctgcctcccaccttccgcacg

SEQ ID NO: 29516 - DNA, 50 bp, unidentified
  source 1..50: mol_type = unassigned DNA; note = target_e97e17a
  misc_feature 1..23: note = LF
  misc_feature 24..25: note = Core
  misc_feature 26..50: note = RF
atcggcgtcaccggctctaacctgacatcttcgatctggccggaatcgcc

SEQ ID NO: 29517 - DNA, 50 bp, unidentified
  source 1..50: mol_type = unassigned DNA; note = target_e98e8e6
  misc_feature 1..23: note = LF
  misc_feature 24..25: note = Core
  misc_feature 26..50: note = RF
gtcacccagagaggttcccgtatctgccgcgccactcggctgcggccctc

SEQ ID NO: 29518 - DNA, 50 bp, unidentified
  source 1..50: mol_type = unassigned DNA; note = target_e99035c
  misc_feature 1..24: note = LF
  misc_feature 25: note = Core
  misc_feature 26..50: note = RF
gctgaactcctgcccgtcccctacttccacgttgtcttcacccttcctca

SEQ ID NO: 29519 - DNA, 50 bp, unidentified
  source 1..50: mol_type = unassigned DNA; note = target_e99e151
  misc_feature 1..23: note = LF
  misc_feature 24..25: note = Core
  misc_feature 26..50: note = RF
ggtttcgcgatgctctacccagcctacgagctatgccatcgctactggaa

SEQ ID NO: 29520 - DNA, 50 bp, unidentified
  source 1..50: mol_type = unassigned DNA; note = target_e9a0dde
  misc_feature 1..23: note = LF
  misc_feature 24..25: note = Core
  misc_feature 26..50: note = RF
tcacaaactcaccccaacccaacctacgggcttatcttatcaattccaga

SEQ ID NO: 29521 - DNA, 50 bp, unidentified
  source 1..50: mol_type = unassigned DNA; note = target_e9a2ac2
  misc_feature 1..24: note = LF
  misc_feature 25: note = Core
  misc_feature 26..50: note = RF
ccgaattgtttactgagtggtaatttccgggttgccggtgacatgcccag

SEQ ID NO: 29522 - DNA, 50 bp, unidentified
  source 1..50: mol_type = unassigned DNA; note = target_e9a6edb
  misc_feature 1..23: note = LF
  misc_feature 24..25: note = Core
  misc_feature 26..50: note = RF
aaatactcatggagcaaatcctccttcgttttagatgatatatgcggtga

SEQ ID NO: 29523 - DNA, 50 bp, unidentified
  source 1..50: mol_type = unassigned DNA; note = target_e9b23e8
  misc_feature 1..23: note = LF
  misc_feature 24..25: note = Core
  misc_feature 26..50: note = RF
ttttgtagataagatattatgtaataagtcaaaaatttatcctaaagaaa

SEQ ID NO: 29524 - DNA, 50 bp, unidentified
  source 1..50: mol_type = unassigned DNA; note = target_e9c31f6
  misc_feature 1..23: note = LF
  misc_feature 24..25: note = Core
  misc_feature 26..50: note = RF
tgcttactatcctttctgtccgtctaacgcctattaggctgcaaaagaaa

SEQ ID NO: 29525 - DNA, 50 bp, unidentified
  source 1..50: mol_type = unassigned DNA; note = target_e9c475e
  misc_feature 1..23: note = LF
  misc_feature 24..25: note = Core
  misc_feature 26..50: note = RF
aggaccccttggggaagaaagggtcaagtcttgcaaatcaacatttccga

SEQ ID NO: 29526 - DNA, 50 bp, unidentified
  source 1..50: mol_type = unassigned DNA; note = target_e9d154f
  misc_feature 1..24: note = LF
  misc_feature 25: note = Core
  misc_feature 26..50: note = RF
tttttcaacagaatagacccaaagcggacacggtcacccggggcagacct

SEQ ID NO: 29527 - DNA, 50 bp, unidentified
  source 1..50: mol_type = unassigned DNA; note = target_e9db980
  misc_feature 1..23: note = LF
  misc_feature 24..25: note = Core
  misc_feature 26..50: note = RF
tgtttcatatggatttaatcctccttttggcaaaaagaaaagacatgggg

SEQ ID NO: 29528 - DNA, 50 bp, unidentified
  source 1..50: mol_type = unassigned DNA; note = target_e9dea53
  misc_feature 1..23: note = LF
  misc_feature 24..25: note = Core
  misc_feature 26..50: note = RF
taggtcggatttacctttaacgaacgatggaactaaaattcggcttaatc

SEQ ID NO: 29529 - DNA, 50 bp, unidentified
  source 1..50: mol_type = unassigned DNA; note = target_e9dfc95
  misc_feature 1..24: note = LF
  misc_feature 25: note = Core
  misc_feature 26..50: note = RF
gggcgggctttcgccctccccccttctgtccgggggaatgtcagaggcca

SEQ ID NO: 29530 - DNA, 50 bp, unidentified
  source 1..50: mol_type = unassigned DNA; note = target_e9e611e
  misc_feature 1..23: note = LF
  misc_feature 24..25: note = Core
  misc_feature 26..50: note = RF
cataaatcatcgaactattggggtcagcatcgcaatcatttcccaaatgg

SEQ ID NO: 29531 - DNA, 50 bp, unidentified
  source 1..50: mol_type = unassigned DNA; note = target_e9ea0f8
  misc_feature 1..22: note = LF
  misc_feature 23..25: note = Core
  misc_feature 26..50: note = RF
ttcttccctaggaagatgtcattccgaggcgttgttcgccgaggaatccc

SEQ ID NO: 29532 - DNA, 50 bp, unidentified
  source 1..50: mol_type = unassigned DNA; note = target_ea008f8
  misc_feature 1..23: note = LF
  misc_feature 24..25: note = Core
  misc_feature 26..50: note = RF
atatgtgaacattgctttttctcctttttatcattgaagtattttttatt

SEQ ID NO: 29533 - DNA, 50 bp, unidentified
  source 1..50: mol_type = unassigned DNA; note = target_ea04e0b
  misc_feature 1..21: note = LF
  misc_feature 22..25: note = Core
  misc_feature 26..50: note = RF
cgcaggcgcatggtcaccgcggtcatgacgccacctccacctggtcggat

SEQ ID NO: 29534 - DNA, 50 bp, unidentified
  source 1..50: mol_type = unassigned DNA; note = target_ea19107
  misc_feature 1..20: note = LF
  misc_feature 21..25: note = Core
  misc_feature 26..50: note = RF
cacgaggcggggtggccggccccccccgcccgcgcggcagcagcggtggt

SEQ ID NO: 29535 - DNA, 50 bp, unidentified
  source 1..50: mol_type = unassigned DNA; note = target_ea22cc3
  misc_feature 1..24: note = LF
  misc_feature 25: note = Core
  misc_feature 26..50: note = RF
aggactagtaataatttatacacgttgttgccatttcgttgtttttaatc

SEQ ID NO: 29536 - DNA, 50 bp, unidentified
  source 1..50: mol_type = unassigned DNA; note = target_ea25000
  misc_feature 1..23: note = LF
  misc_feature 24..25: note = Core
  misc_feature 26..50: note = RF
cctactttccaaaggtggttggtaggtacgcgcaagcgtcagcgcgcagt

SEQ ID NO: 29537 - DNA, 50 bp, unidentified
  source 1..50: mol_type = unassigned DNA; note = target_ea25a3b
  misc_feature 1..21: note = LF
  misc_feature 22..25: note = Core
  misc_feature 26..50: note = RF
cttaatccaaatttcattttatcacctcatttaatcttccaaaaacatta

SEQ ID NO: 29538 - DNA, 50 bp, unidentified
  source 1..50: mol_type = unassigned DNA; note = target_ea2823f
  misc_feature 1..23: note = LF
  misc_feature 24..25: note = Core
  misc_feature 26..50: note = RF
gaaaagccgctttctatagcggttttttgtgtctattttttcgcattgtt

SEQ ID NO: 29539 - DNA, 50 bp, unidentified
  source 1..50: mol_type = unassigned DNA; note = target_ea299fa
  misc_feature 1..22: note = LF
  misc_feature 23..25: note = Core
  misc_feature 26..50: note = RF
aagcaccgccatcgcgagcaggctcccacaatggtttttgcttcccgcag

SEQ ID NO: 29540 - DNA, 50 bp, unidentified
  source 1..50: mol_type = unassigned DNA; note = target_ea2e304
  misc_feature 1..23: note = LF
  misc_feature 24..25: note = Core
  misc_feature 26..50: note = RF
ttctcagccattttgttttcctccttgttttgtgctgtatttccctgcct

SEQ ID NO: 29541 - DNA, 50 bp, unidentified
  source 1..50: mol_type = unassigned DNA; note = target_ea3ead9
  misc_feature 1..24: note = LF
  misc_feature 25: note = Core
  misc_feature 26..50: note = RF
atctagttctttgtgttcataaaatgctatttaagcatggaggttgacct

SEQ ID NO: 29542 - DNA, 50 bp, unidentified
  source 1..50: mol_type = unassigned DNA; note = target_ea4cac6
  misc_feature 1..23: note = LF
  misc_feature 24..25: note = Core
  misc_feature 26..50: note = RF
gtgctcggcagcctccaggtaagcgtccggtgagggccgcaggcacggcg

SEQ ID NO: 29543 - DNA, 50 bp, unidentified
  source 1..50: mol_type = unassigned DNA; note = target_ea5da4b
  misc_feature 1..23: note = LF
  misc_feature 24..25: note = Core
  misc_feature 26..50: note = RF
tacatttaacatctcatttcctcctatccgttgacaagtttcaggaactt

SEQ ID NO: 29544 - DNA, 50 bp, unidentified
  source 1..50: mol_type = unassigned DNA; note = target_ea649d0
  misc_feature 1..23: note = LF
  misc_feature 24..25: note = Core
  misc_feature 26..50: note = RF
cgcatttagaaaatgtggtattttttttatgcagctttaaagtgcgacaa

SEQ ID NO: 29545 - DNA, 50 bp, unidentified
  source 1..50: mol_type = unassigned DNA; note = target_ea6d8e5
  misc_feature 1..23: note = LF
  misc_feature 24..25: note = Core
  misc_feature 26..50: note = RF
tcgatagattccgcggtatgggtccgggtctgcgcttgcgcttgcccggg

SEQ ID NO: 29546 - DNA, 50 bp, unidentified
  source 1..50: mol_type = unassigned DNA; note = target_ea7fd1d
  misc_feature 1..22: note = LF
  misc_feature 23..25: note = Core
  misc_feature 26..50: note = RF
attttataggttaaaggtataggtttaatggaaaatatttgcatatatca

SEQ ID NO: 29547 - DNA, 50 bp, unidentified
  source 1..50: mol_type = unassigned DNA; note = target_ea835ff
  misc_feature 1..23: note = LF
  misc_feature 24..25: note = Core
  misc_feature 26..50: note = RF
ggtcctcaccggtctttcctcacacagtttctctgccatgcgcgatctgc

SEQ ID NO: 29548 - DNA, 50 bp, unidentified
  source 1..50: mol_type = unassigned DNA; note = target_ea861a5
  misc_feature 1..24: note = LF
  misc_feature 25: note = Core
  misc_feature 26..50: note = RF
gcatcgcgtggaaggtacgccagacaacgctaagcgagaacatttcaaga

SEQ ID NO: 29549 - DNA, 50 bp, unidentified
  source 1..50: mol_type = unassigned DNA; note = target_ea9373f
  misc_feature 1..23: note = LF
  misc_feature 24..25: note = Core
  misc_feature 26..50: note = RF
acccccggcagagcgctttcaattacccacaagttgtgctcccagcataa

SEQ ID NO: 29550 - DNA, 50 bp, unidentified
  source 1..50: mol_type = unassigned DNA; note = target_eabc465
  misc_feature 1..23: note = LF
  misc_feature 24..25: note = Core
  misc_feature 26..50: note = RF
agcaaggaaaaacgagtacaggctggttttatggctttaaacttcatctg

SEQ ID NO: 29551 - DNA, 50 bp, unidentified
  source 1..50: mol_type = unassigned DNA; note = target_eac1571
  misc_feature 1..23: note = LF
  misc_feature 24..25: note = Core
  misc_feature 26..50: note = RF
gcttctttcacccctatcctaaccttcccccgtcaaagggggaaggaacc

SEQ ID NO: 29552 - DNA, 50 bp, unidentified
  source 1..50: mol_type = unassigned DNA; note = target_eac1723
  misc_feature 1..23: note = LF
  misc_feature 24..25: note = Core
  misc_feature 26..50: note = RF
cattaccccggcgcttgtccgacctacgcacaggcagcgacgatgacaca

SEQ ID NO: 29553 - DNA, 50 bp, unidentified
  source 1..50: mol_type = unassigned DNA; note = target_eac3260
  misc_feature 1..23: note = LF
  misc_feature 24..25: note = Core
  misc_feature 26..50: note = RF
cggtcctgccgacccaatccatctggcgaatccgggttgacacggcatcc

SEQ ID NO: 29554 - DNA, 50 bp, unidentified
  source 1..50: mol_type = unassigned DNA; note = target_eac6323
  misc_feature 1..24: note = LF
  misc_feature 25: note = Core
  misc_feature 26..50: note = RF
tgaggtgacccgtccgctcatcggcatgagcgatgggtgggttgcgcctg

SEQ ID NO: 29555 - DNA, 50 bp, unidentified
  source 1..50: mol_type = unassigned DNA; note = target_eac7be3
  misc_feature 1..23: note = LF
  misc_feature 24..25: note = Core
  misc_feature 26..50: note = RF
gggctgctcgatcccgccacgccccccccgcatttgcacggagaccccat

SEQ ID NO: 29556 - DNA, 50 bp, unidentified
  source 1..50: mol_type = unassigned DNA; note = target_eacac90
  misc_feature 1..22: note = LF
  misc_feature 23..25: note = Core
  misc_feature 26..50: note = RF
tcactttgagattagccgctcttgacccaatccggactcacggccacgtg

SEQ ID NO: 29557 - DNA, 50 bp, unidentified
  source 1..50: mol_type = unassigned DNA; note = target_ead24f4
  misc_feature 1..23: note = LF
  misc_feature 24..25: note = Core
  misc_feature 26..50: note = RF
accagaatcgggaagtctttttcaggatttccttaggcgctgcttgccta

SEQ ID NO: 29558 - DNA, 50 bp, unidentified
  source 1..50: mol_type = unassigned DNA; note = target_ead92f0
  misc_feature 1..23: note = LF
  misc_feature 24..25: note = Core
  misc_feature 26..50: note = RF
atttcgttgccctcaccctaaccctctcccgcgcgcgggagagggaaccg

SEQ ID NO: 29559 - DNA, 50 bp, unidentified
  source 1..50: mol_type = unassigned DNA; note = target_eae1c2a
  misc_feature 1..23: note = LF
  misc_feature 24..25: note = Core
  misc_feature 26..50: note = RF
ttatccagcttcattcactcccccttatcaactcattaaccaggaatact

SEQ ID NO: 29560 - DNA, 50 bp, unidentified
  source 1..50: mol_type = unassigned DNA; note = target_eae503f
  misc_feature 1..23: note = LF
  misc_feature 24..25: note = Core
  misc_feature 26..50: note = RF
tggttttgtaaatgtgcccgtcaagtttaacagttcgaattgtaagctcg

SEQ ID NO: 29561 - DNA, 50 bp, unidentified
  source 1..50: mol_type = unassigned DNA; note = target_eaf760b
  misc_feature 1..24: note = LF
  misc_feature 25: note = Core
  misc_feature 26..50: note = RF
cgagttcacgggtgcggccacaaccggtcattcatgacaagcgggcaaat

SEQ ID NO: 29562 - DNA, 50 bp, unidentified
  source 1..50: mol_type = unassigned DNA; note = target_eaf8e12
  misc_feature 1..23: note = LF
  misc_feature 24..25: note = Core
  misc_feature 26..50: note = RF
acttcttcctttggtcgaagaactcgaattgacgaatttcgaatttaaaa

SEQ ID NO: 29563 - DNA, 50 bp, unidentified
  source 1..50: mol_type = unassigned DNA; note = target_eaf9b0f
  misc_feature 1..23: note = LF
  misc_feature 24..25: note = Core
  misc_feature 26..50: note = RF
acaagatcggccgcgatatccgtttttttgagtctgctttggacaaggct

SEQ ID NO: 29564 - DNA, 50 bp, unidentified
  source 1..50: mol_type = unassigned DNA; note = target_eb02028
  misc_feature 1..24: note = LF
  misc_feature 25: note = Core
  misc_feature 26..50: note = RF
aatacaacaaaagatgttacgctaatggtgaactatagttcaatcacgac

SEQ ID NO: 29565 - DNA, 50 bp, unidentified
  source 1..50: mol_type = unassigned DNA; note = target_eb044d2
  misc_feature 1..21: note = LF
  misc_feature 22..25: note = Core
  misc_feature 26..50: note = RF
tcggcggtcagaatgacgcgaatgacccgcagtagaagtggcctcgcatc

SEQ ID NO: 29566 - DNA, 50 bp, unidentified
  source 1..50: mol_type = unassigned DNA; note = target_eb0b937
  misc_feature 1..24: note = LF
  misc_feature 25: note = Core
  misc_feature 26..50: note = RF
cgggagttgttgctcgacttccgtttgggtcaatcgcgacagtttagcga

SEQ ID NO: 29567 - DNA, 50 bp, unidentified
  source 1..50: mol_type = unassigned DNA; note = target_eb0e8b8
  misc_feature 1..24: note = LF
  misc_feature 25: note = Core
  misc_feature 26..50: note = RF
cctggtcgcttcccagaacgcggtttcggaggacccttgccgactcccaa

SEQ ID NO: 29568 - DNA, 50 bp, unidentified
  source 1..50: mol_type = unassigned DNA; note = target_eb19d64
  misc_feature 1..24: note = LF
  misc_feature 25: note = Core
  misc_feature 26..50: note = RF
cttttagtatttaaacccagattccgcattagccaaatactacaaagcaa

SEQ ID NO: 29569 - DNA, 50 bp, unidentified
  source 1..50: mol_type = unassigned DNA; note = target_eb2a05e
  misc_feature 1..23: note = LF
  misc_feature 24..25: note = Core
  misc_feature 26..50: note = RF
ttgaaattccatcctaagcactccttactataggaatttgaggaatatac

SEQ ID NO: 29570 - DNA, 50 bp, unidentified
  source 1..50: mol_type = unassigned DNA; note = target_eb2fae5
  misc_feature 1..23: note = LF
  misc_feature 24..25: note = Core
  misc_feature 26..50: note = RF
gccccgttaccgaagtcctgaccctaacagtgctgcttgctggtaatgct

SEQ ID NO: 29571 - DNA, 50 bp, unidentified
  source 1..50: mol_type = unassigned DNA; note = target_eb3914d
  misc_feature 1..24: note = LF
  misc_feature 25: note = Core
  misc_feature 26..50: note = RF
ttgtcaggtaagacttgtcgtaaccgtccggcagttaccgcattgcgctg

SEQ ID NO: 29572 - DNA, 50 bp, unidentified
  source 1..50: mol_type = unassigned DNA; note = target_eb39f0f
  misc_feature 1..22: note = LF
  misc_feature 23..25: note = Core
  misc_feature 26..50: note = RF
caataagatacatagatttctcctttcatttctgtgtttcatagatttca

SEQ ID NO: 29573 - DNA, 50 bp, unidentified
  source 1..50: mol_type = unassigned DNA; note = target_eb452ac
  misc_feature 1..23: note = LF
  misc_feature 24..25: note = Core
  misc_feature 26..50: note = RF
caggccgcctgaaacggctgaatagcagctggtcgcgcgacgaggcaaga

SEQ ID NO: 29574 - DNA, 50 bp, unidentified; identical to SEQ ID NO: 21735
  source 1..50: mol_type = unassigned DNA; note = target_eb47fdc
  misc_feature 1..24: note = LF
  misc_feature 25: note = Core
  misc_feature 26..50: note = RF

SEQ ID NO: 29575 - DNA, 50 bp, unidentified
  source 1..50: mol_type = unassigned DNA; note = target_eb54d86
  misc_feature 1..22: note = LF
  misc_feature 23..25: note = Core
  misc_feature 26..50: note = RF
cttaaaattaccgctaacggtttgcggctttgcgaagaagcggatttcgg

SEQ ID NO: 29576 - DNA, 50 bp, unidentified
  source 1..50: mol_type = unassigned DNA; note = target_eb54fea
  misc_feature 1..23: note = LF
  misc_feature 24..25: note = Core
  misc_feature 26..50: note = RF
ctggccgcgaacgataccccaccctaacgacgatgaaactgtcgtaagga

SEQ ID NO: 29577 - DNA, 50 bp, unidentified
  source 1..50: mol_type = unassigned DNA; note = target_eb58022
  misc_feature 1..22: note = LF
  misc_feature 23..25: note = Core
  misc_feature 26..50: note = RF
ccttatatcactaacctgcccctttagttgattaaggaaactttaataat

SEQ ID NO: 29578 - DNA, 50 bp, unidentified
  source 1..50: mol_type = unassigned DNA; note = target_eb5e886
  misc_feature 1..23: note = LF
  misc_feature 24..25: note = Core
  misc_feature 26..50: note = RF
ccgcgatgattcgtttcatggtttccccctgtgagcgaactccctcaatg

SEQ ID NO: 29579 - DNA, 50 bp, unidentified
  source 1..50: mol_type = unassigned DNA; note = target_eb75fa1
  misc_feature 1..23: note = LF
  misc_feature 24..25: note = Core
  misc_feature 26..50: note = RF
gccaccccgcagagatcctgcatagcactactaattgggctacggctctg

SEQ ID NO: 29580 - DNA, 50 bp, unidentified
  source 1..50: mol_type = unassigned DNA; note = target_eb790af
  misc_feature 1..22: note = LF
  misc_feature 23..25: note = Core
  misc_feature 26..50: note = RF
ctggcgttcaaggagcgatagctgacattcctcttccgaccccaatctca

SEQ ID NO: 29581 - DNA, 50 bp, unidentified
  source 1..50: mol_type = unassigned DNA; note = target_eb7ed07
  misc_feature 1..22: note = LF
  misc_feature 23..25: note = Core
  misc_feature 26..50: note = RF
ttgcgaccgcggccctttatcttgtgcttttatcgaacgggtaaataggg

SEQ ID NO: 29582 - DNA, 50 bp, unidentified
  source 1..50: mol_type = unassigned DNA; note = target_eb84ca2
  misc_feature 1..23: note = LF
  misc_feature 24..25: note = Core
  misc_feature 26..50: note = RF
gatcctgccaccgctagatgtttagtcccggcatttgatggatcggatcg

SEQ ID NO: 29583 - DNA, 50 bp, unidentified
  source 1..50: mol_type = unassigned DNA; note = target_eb87eac
  misc_feature 1..22: note = LF
  misc_feature 23..25: note = Core
  misc_feature 26..50: note = RF
ttcaaacaaatttctaaacatattaatatcccttccttattttctataaa

SEQ ID NO: 29584 - DNA, 50 bp, unidentified
  source 1..50: mol_type = unassigned DNA; note = target_eb891e1
  misc_feature 1..23: note = LF
  misc_feature 24..25: note = Core
  misc_feature 26..50: note = RF
gcccgccgatgaaattaacaacgctaagcttcactatcatcgaatcatct

SEQ ID NO: 29585 - DNA, 50 bp, unidentified
  source 1..50: mol_type = unassigned DNA; note = target_eb946bc
  misc_feature 1..24: note = LF
  misc_feature 25: note = Core
  misc_feature 26..50: note = RF
tctgttaacttccaacgattgctgtaacctcatcattgtttcggtgacga

SEQ ID NO: 29586 - DNA, 50 bp, unidentified
  source 1..50: mol_type = unassigned DNA; note = target_eb98c2e
  misc_feature 1..21: note = LF
  misc_feature 22..25: note = Core
  misc_feature 26..50: note = RF
cacggtgtcagtcatgcggttctcctttgcgagtggcgcgcgaggtacca

SEQ ID NO: 29587 - DNA, 50 bp, unidentified
  source 1..50: mol_type = unassigned DNA; note = target_eb9acaa
  misc_feature 1..21: note = LF
  misc_feature 22..25: note = Core
  misc_feature 26..50: note = RF
tccacatggctctcatcggtcctcctcgtgctcaccggcggcaggaggag

SEQ ID NO: 29588 - DNA, 50 bp, unidentified
  source 1..50: mol_type = unassigned DNA; note = target_eba00e2
  misc_feature 1..23: note = LF
  misc_feature 24..25: note = Core
  misc_feature 26..50: note = RF
gtgctcacttaggtgtgcgctgctttttgtgtctattaggtttggtttga

SEQ ID NO: 29589 - DNA, 50 bp, unidentified
  source 1..50: mol_type = unassigned DNA; note = target_eba1267
  misc_feature 1..24: note = LF
  misc_feature 25: note = Core
  misc_feature 26..50: note = RF
tcgggtcggtgagtgtaacggcgatattacgccaatcgtctttggctttg

SEQ ID NO: 29590 - DNA, 50 bp, unidentified
  source 1..50: mol_type = unassigned DNA; note = target_ebaf85d
  misc_feature 1..24: note = LF
  misc_feature 25: note = Core
  misc_feature 26..50: note = RF
tggtttctgctaagagcacgtaagcggtcggggaacacacctgccttctg

SEQ ID NO: 29591 - DNA, 50 bp, unidentified
  source 1..50: mol_type = unassigned DNA; note = target_ebaf98b
  misc_feature 1..23: note = LF
  misc_feature 24..25: note = Core
  misc_feature 26..50: note = RF
gggccgcacggggctgaggaacttaccgaaaaacagacttttcaggttgt

SEQ ID NO: 29592 - DNA, 50 bp, unidentified
  source 1..50: mol_type = unassigned DNA; note = target_ebb59b8
  misc_feature 1..23: note = LF
  misc_feature 24..25: note = Core
  misc_feature 26..50: note = RF
ttgccgtcggtgttcaccgccacagcgattatcgccgcaaccgagacgat

SEQ ID NO: 29593 - DNA, 50 bp, unidentified
  source 1..50: mol_type = unassigned DNA; note = target_ebb9625
  misc_feature 1..24: note = LF
  misc_feature 25: note = Core
  misc_feature 26..50: note = RF
gcggtaaaacaaaccaagcaaacttggggcagaattgagttagccaacac

SEQ ID NO: 29594 - DNA, 50 bp, unidentified
  source 1..50: mol_type = unassigned DNA; note = target_ebc66bc
  misc_feature 1..22: note = LF
  misc_feature 23..25: note = Core
  misc_feature 26..50: note = RF
tatcacgatcggacctgcgcttttttaatgcaatttctttcgggatcaga

SEQ ID NO: 29595 - DNA, 50 bp, unidentified
  source 1..50: mol_type = unassigned DNA; note = target_ebd328a
  misc_feature 1..23: note = LF
  misc_feature 24..25: note = Core
  misc_feature 26..50: note = RF
ggaatgctttttcattcctgctcctttctcatcaacatgctgatcgactt

SEQ ID NO: 29596 - DNA, 50 bp, unidentified
  source 1..50: mol_type = unassigned DNA; note = target_ebd3c20
  misc_feature 1..23: note = LF
  misc_feature 24..25: note = Core
  misc_feature 26..50: note = RF
gacggcagcaatgccgcgggagcagccgttcagccgcggttcgtcaacgg

SEQ ID NO: 29597 - DNA, 50 bp, unidentified
  source 1..50: mol_type = unassigned DNA; note = target_ebe2315
  misc_feature 1..23: note = LF
  misc_feature 24..25: note = Core
  misc_feature 26..50: note = RF
catcgtattcgcgagcaagcccgctcccacaataagcgggtcagggcagg

SEQ ID NO: 29598 - DNA, 50 bp, unidentified
  source 1..50: mol_type = unassigned DNA; note = target_ec002f9
  misc_feature 1..23: note = LF
  misc_feature 24..25: note = Core
  misc_feature 26..50: note = RF
ccctcagcgaaccgctctggctctgtcgcaatctctgactgccgacataa

SEQ ID NO: 29599 - DNA, 50 bp, unidentified
  source 1..50: mol_type = unassigned DNA; note = target_ec008f5
  misc_feature 1..23: note = LF
  misc_feature 24..25: note = Core
  misc_feature 26..50: note = RF
ggacgctatcgcgagcaggctcgctcctacaggggatttcgcgagtcagg

SEQ ID NO: 29600 - DNA, 50 bp, unidentified
  source 1..50: mol_type = unassigned DNA; note = target_ec0132e
  misc_feature 1..23: note = LF
  misc_feature 24..25: note = Core
  misc_feature 26..50: note = RF
cacttaattttcaagaagtgccacttattccccataccgtcgcaacaact

SEQ ID NO: 29601 - DNA, 50 bp, unidentified
  source 1..50: mol_type = unassigned DNA; note = target_ec08e72
  misc_feature 1..23: note = LF
  misc_feature 24..25: note = Core
  misc_feature 26..50: note = RF
ggaccctgaccgcaacgtcgtccctgcgctgctgccaggacaaccactcc

SEQ ID NO: 29602 - DNA, 50 bp, unidentified
  source 1..50: mol_type = unassigned DNA; note = target_ec0c178
  misc_feature 1..22: note = LF
  misc_feature 23..25: note = Core
  misc_feature 26..50: note = RF
acatttattaaagacattattatcactcctctaaaactgtatttccaaat

SEQ ID NO: 29603 - DNA, 50 bp, unidentified
  source 1..50: mol_type = unassigned DNA; note = target_ec0cce3
  misc_feature 1..22: note = LF
  misc_feature 23..25: note = Core
  misc_feature 26..50: note = RF
gtcacgttgtttacctttttattttcagcatacgtgctgcggggtgcgag

SEQ ID NO: 29604 - DNA, 50 bp, unidentified
  source 1..50: mol_type = unassigned DNA; note = target_ec13376
  misc_feature 1..23: note = LF
  misc_feature 24..25: note = Core
  misc_feature 26..50: note = RF
catctactttttagaccactctcctttttagagcagcattaaatgtatag

SEQ ID NO: 29605 - DNA, 50 bp, unidentified
  source 1..50: mol_type = unassigned DNA; note = target_ec17c13
  misc_feature 1..21: note = LF
  misc_feature 22..25: note = Core
  misc_feature 26..50: note = RF
aaaaaggaagtcatccgctgcctcaagcgctacatcgcccgcgaggtatt

SEQ ID NO: 29606 - DNA, 50 bp, unidentified
  source 1..50: mol_type = unassigned DNA; note = target_ec1d47b
  misc_feature 1..23: note = LF
  misc_feature 24..25: note = Core
  misc_feature 26..50: note = RF
gggagcggcaggctcacgagacggacctctgtaatgcggtacccaacccg

SEQ ID NO: 29607 - DNA, 50 bp, unidentified
  source 1..50: mol_type = unassigned DNA; note = target_ec2ed69
  misc_feature 1..22: note = LF
  misc_feature 23..25: note = Core
  misc_feature 26..50: note = RF
cagtgcgggcaactgcgggccgcccccccgccagccgccgccgtcgcacc

SEQ ID NO: 29608 - DNA, 50 bp, unidentified
  source 1..50: mol_type = unassigned DNA; note = target_ec3c328
  misc_feature 1..23: note = LF
  misc_feature 24..25: note = Core
  misc_feature 26..50: note = RF
cttccattttagcttgtacactccttcttaaatgatctaataaaactcat

SEQ ID NO: 29609 - DNA, 50 bp, unidentified
  source 1..50: mol_type = unassigned DNA; note = target_ec4220e
  misc_feature 1..23: note = LF
  misc_feature 24..25: note = Core
  misc_feature 26..50: note = RF
cgagacgcgccctgcgggcgctcctcaggatgaggcaaacagtgttatcc

SEQ ID NO: 29610 - DNA, 50 bp, unidentified
  source 1..50: mol_type = unassigned DNA; note = target_ec42693
  misc_feature 1..24: note = LF
  misc_feature 25: note = Core
  misc_feature 26..50: note = RF
ttgctcgctcgcgcgaagcgtcttttttttaaatgacaacccaagccggg

SEQ ID NO: 29611 - DNA, 50 bp, unidentified
  source 1..50: mol_type = unassigned DNA; note = target_ec485bc
  misc_feature 1..21: note = LF
  misc_feature 22..25: note = Core
  misc_feature 26..50: note = RF
cgcagccgggaccggcccgcgctcacgacgccaccgccacggactcgtcg

SEQ ID NO: 29612 - DNA, 50 bp, unidentified
  source 1..50: mol_type = unassigned DNA; note = target_ec4cd4e
  misc_feature 1..22: note = LF
  misc_feature 23..25: note = Core
  misc_feature 26..50: note = RF
tactgtctttatcatatgtttctctcctataaatattttaatatgtcgtt

SEQ ID NO: 29613 - DNA, 50 bp, unidentified
  source 1..50: mol_type = unassigned DNA; note = target_ec4ef67
  misc_feature 1..23: note = LF
  misc_feature 24..25: note = Core
  misc_feature 26..50: note = RF
aagctttccgtgttaatctgtgcctccgtgaaaaatttttggcctacaaa

SEQ ID NO: 29614 - DNA, 50 bp, unidentified
  source 1..50: mol_type = unassigned DNA; note = target_ec57995
  misc_feature 1..23: note = LF
  misc_feature 24..25: note = Core
  misc_feature 26..50: note = RF
cgccgctttgcggctaacccaccctacgggattaaatcattctgtgccgt

SEQ ID NO: 29615 - DNA, 50 bp, unidentified
  source 1..50: mol_type = unassigned DNA; note = target_ec660e5
  misc_feature 1..23: note = LF
  misc_feature 24..25: note = Core
  misc_feature 26..50: note = RF
gcttgttttggcggggctttctgcgagcactgtccgagtcccaatttttg

SEQ ID NO: 29616 - DNA, 50 bp, unidentified
  source 1..50: mol_type = unassigned DNA; note = target_ec6b16d
  misc_feature 1..23: note = LF
  misc_feature 24..25: note = Core
  misc_feature 26..50: note = RF
aaataccagggccagcgcccaacctgacacggcgaacgcggcggtatcga

SEQ ID NO: 29617 - DNA, 50 bp, unidentified
  source 1..50: mol_type = unassigned DNA; note = target_ec7157d
  misc_feature 1..23: note = LF
  misc_feature 24..25: note = Core
  misc_feature 26..50: note = RF
atcgattcgcgccgagggcgacgctcctacaagagcgccggtatctttca

SEQ ID NO: 29618 - DNA, 50 bp, unidentified
  source 1..50: mol_type = unassigned DNA; note = target_ec78661
  misc_feature 1..22: note = LF
  misc_feature 23..25: note = Core
  misc_feature 26..50: note = RF
cgaccgtgggctcatacgatcttgatggccacacgctggcatctgcggcc

SEQ ID NO: 29619 - DNA, 50 bp, unidentified
  source 1..50: mol_type = unassigned DNA; note = target_ec79357
  misc_feature 1..22: note = LF
  misc_feature 23..25: note = Core
  misc_feature 26..50: note = RF
cggagaatgtttagcgttagactgacagcaccggatcaatccccctgcac

SEQ ID NO: 29620 - DNA, 50 bp, unidentified
  source 1..50: mol_type = unassigned DNA; note = target_ec806fa
  misc_feature 1..23: note = LF
  misc_feature 24..25: note = Core
  misc_feature 26..50: note = RF
tcccggcccggtcagccggcctcctaggcagccaggaacggctcgaccac

SEQ ID NO: 29621 - DNA, 50 bp, unidentified
  source 1..50: mol_type = unassigned DNA; note = target_ec881c7
  misc_feature 1..23: note = LF
  misc_feature 24..25: note = Core
  misc_feature 26..50: note = RF
gagatggctgataccggggttactggatccccgcctgcgcggggatgaca

SEQ ID NO: 29622 - DNA, 50 bp, unidentified
  source 1..50: mol_type = unassigned DNA; note = target_ec8c29b
  misc_feature 1..24: note = LF
  misc_feature 25: note = Core
  misc_feature 26..50: note = RF
agaggggcggtatgccgccgatagttccgaatggccgaccatccgggact

SEQ ID NO: 29623 - DNA, 50 bp, unidentified
  source 1..50: mol_type = unassigned DNA; note = target_ec8e191
  misc_feature 1..23: note = LF
  misc_feature 24..25: note = Core
  misc_feature 26..50: note = RF
aatacattgccatacattaagtcctcctgcatagcaaaaaacattttcag

SEQ ID NO: 29624 - DNA, 50 bp, unidentified
  source 1..50: mol_type = unassigned DNA; note = target_ec98cbb
  misc_feature 1..22: note = LF
  misc_feature 23..25: note = Core
  misc_feature 26..50: note = RF
gaagccacgtcacaaccaaaatagagtttccatgacccttaaacactggc

SEQ ID NO: 29625 - DNA, 50 bp, unidentified
  source 1..50: mol_type = unassigned DNA; note = target_eca1753
  misc_feature 1..23: note = LF
  misc_feature 24..25: note = Core
  misc_feature 26..50: note = RF
tccgtgccctcggaatgacccatagcggacatcggcacgcgtggacgtgt

SEQ ID NO: 29626 - DNA, 50 bp, unidentified
  source 1..50: mol_type = unassigned DNA; note = target_ecaf935
  misc_feature 1..20: note = LF
  misc_feature 21..25: note = Core
  misc_feature 26..50: note = RF
caacttttatttttataaacaaaaaggctgtgacaaaagtcttgtcacaa

SEQ ID NO: 29627 - DNA, 50 bp, unidentified
  source 1..50: mol_type = unassigned DNA; note = target_ecc13d8
  misc_feature 1..24: note = LF
  misc_feature 25: note = Core
  misc_feature 26..50: note = RF
acctataccggccaaggtcgtttctgtcgcaacatttcaaaactcacgca

SEQ ID NO: 29628 - DNA, 50 bp, unidentified
  source 1..50: mol_type = unassigned DNA; note = target_ecc5efb
  misc_feature 1..20: note = LF
  misc_feature 21..25: note = Core
  misc_feature 26..50: note = RF
cacgatcttcattggtggcttcctttcgtgaggggcggcgccggagtggc

SEQ ID NO: 29629 - DNA, 50 bp, unidentified
  source 1..50: mol_type = unassigned DNA; note = target_ecc8cd7
  misc_feature 1..23: note = LF
  misc_feature 24..25: note = Core
  misc_feature 26..50: note = RF
gaagagggcgcgatgtctcctgttggcccttagcgccggatcacgttttg

SEQ ID NO: 29630 - DNA, 50 bp, unidentified
  source 1..50: mol_type = unassigned DNA; note = target_ece3ac3
  misc_feature 1..24: note = LF
  misc_feature 25: note = Core
  misc_feature 26..50: note = RF
ataacttgcagccgacactccccccctcccggactgtccggtccagcggg

SEQ ID NO: 29631 - DNA, 50 bp, unidentified
  source 1..50: mol_type = unassigned DNA; note = target_ece5a79
  misc_feature 1..21: note = LF
  misc_feature 22..25: note = Core
  misc_feature 26..50: note = RF
caccgattatggtggcggctatttttatgccatttttgaggaggtgacgg

SEQ ID NO: 29632 - DNA, 50 bp, unidentified
  source 1..50: mol_type = unassigned DNA; note = target_ecf6d0e
  misc_feature 1..24: note = LF
  misc_feature 25: note = Core
  misc_feature 26..50: note = RF
agaacaagcaattacttatagccattgttgtgcgttcgtatttcttttca

SEQ ID NO: 29633 - DNA, 50 bp, unidentified
  source 1..50: mol_type = unassigned DNA; note = target_ecf82b3
  misc_feature 1..22: note = LF
  misc_feature 23..25: note = Core
  misc_feature 26..50: note = RF
ctctcccttgtgaatcagtgcttctcatctcctcaaagagagggaattta

SEQ ID NO: 29634 - DNA, 50 bp, unidentified
  source 1..50: mol_type = unassigned DNA; note = target_ecfb0c6
  misc_feature 1..22: note = LF
  misc_feature 23..25: note = Core
  misc_feature 26..50: note = RF
tggagactggttcgcattcgcctgacagcaccgccatctagcatcgtttt

SEQ ID NO: 29635 - DNA, 50 bp, unidentified
  source 1..50: mol_type = unassigned DNA; note = target_ed0ea29
  misc_feature 1..23: note = LF
  misc_feature 24..25: note = Core
  misc_feature 26..50: note = RF
agcttggcgaacgccttctcgattggattgagcagggctgatttgagatg

SEQ ID NO: 29636 - DNA, 50 bp, unidentified
  source 1..50: mol_type = unassigned DNA; note = target_ed23088
  misc_feature 1..24: note = LF
  misc_feature 25: note = Core
  misc_feature 26..50: note = RF
aagcgcgaaacgactgtggttttctgtggttttgcgaggctggcgcgggg

SEQ ID NO: 29637 - DNA, 50 bp, unidentified
  source 1..50: mol_type = unassigned DNA; note = target_ed35449
  misc_feature 1..23: note = LF
  misc_feature 24..25: note = Core
  misc_feature 26..50: note = RF
agcaggtcgcgaacgtttgaatgtgggtcgtcatgactgaagagcagggt

SEQ ID NO: 29638 - DNA, 50 bp, unidentified
  source 1..50: mol_type = unassigned DNA; note = target_ed3c105
  misc_feature 1..24: note = LF
  misc_feature 25: note = Core
  misc_feature 26..50: note = RF
atgatgaagaaagagcgtatcggagtcatcatgattaacaaaatattgtt

SEQ ID NO: 29639 - DNA, 50 bp, unidentified
  source 1..50: mol_type = unassigned DNA; note = target_ed4d8b5
  misc_feature 1..23: note = LF
  misc_feature 24..25: note = Core
  misc_feature 26..50: note = RF
tgtggacaccctaaaaacaaataatgtgggaaccggctttatatggcagc

SEQ ID NO: 29640 - DNA, 50 bp, unidentified
  source 1..50: mol_type = unassigned DNA; note = target_ed4eeed
  misc_feature 1..23: note = LF
  misc_feature 24..25: note = Core
  misc_feature 26..50: note = RF
attgtcagagttcggactacttcctggaacaaacacctttggaacctgtt

SEQ ID NO: 29641 - DNA, 50 bp, unidentified
  source 1..50: mol_type = unassigned DNA; note = target_ed50e5b
  misc_feature 1..24: note = LF
  misc_feature 25: note = Core
  misc_feature 26..50: note = RF
ccatccccggcgttttgctggtcgctaccgtcggaataggcggctttctg

SEQ ID NO: 29642 - DNA, 50 bp, unidentified
  source 1..50: mol_type = unassigned DNA; note = target_ed54019
  misc_feature 1..23: note = LF
  misc_feature 24..25: note = Core
  misc_feature 26..50: note = RF
gttttaattttcattttcgtctcctttatttgaccataacccattgccta

SEQ ID NO: 29643 - DNA, 50 bp, unidentified
  source 1..50: mol_type = unassigned DNA; note = target_ed543dc
  misc_feature 1..23: note = LF
  misc_feature 24..25: note = Core
  misc_feature 26..50: note = RF
cactgtaaaaccgtcggctcagcctacgttggttcgaacccaacacctgc

SEQ ID NO: 29644 - DNA, 50 bp, unidentified
  source 1..50: mol_type = unassigned DNA; note = target_ed5b900
  misc_feature 1..23: note = LF
  misc_feature 24..25: note = Core
  misc_feature 26..50: note = RF
ggattccgcaagctccatccaggctactcgcttctgcagtagccatcgca

SEQ ID NO: 29645 - DNA, 50 bp, unidentified
  source 1..50: mol_type = unassigned DNA; note = target_ed609dc
  misc_feature 1..23: note = LF
  misc_feature 24..25: note = Core
  misc_feature 26..50: note = RF
aaaaatcaattatcaaattattcctttatttttttacatctgcattcttt

SEQ ID NO: 29646 - DNA, 50 bp, unidentified
  source 1..50: mol_type = unassigned DNA; note = target_ed6b749
  misc_feature 1..23: note = LF
  misc_feature 24..25: note = Core
  misc_feature 26..50: note = RF
cgactccccgttaatctctgtagtggtctaatcatcccgggcaccatttt

SEQ ID NO: 29647 - DNA, 50 bp, unidentified
  source 1..50: mol_type = unassigned DNA; note = target_ed75d82
  misc_feature 1..23: note = LF
  misc_feature 24..25: note = Core
  misc_feature 26..50: note = RF
gcagctttatctaagtctttgattttagtatgtgcagtcgcattaactct

SEQ ID NO: 29648 - DNA, 50 bp, unidentified
  source 1..50: mol_type = unassigned DNA; note = target_ed7862b
  misc_feature 1..23: note = LF
  misc_feature 24..25: note = Core
  misc_feature 26..50: note = RF
gactgaccgttgtggctccagagtgtgtgaaaactccaaaattttagaag

SEQ ID NO: 29649 - DNA, 50 bp, unidentified
  source 1..50: mol_type = unassigned DNA; note = target_ed81963
  misc_feature 1..23: note = LF
  misc_feature 24..25: note = Core
  misc_feature 26..50: note = RF
cataaatatttaaacatcgcttactccttatttatggcatattgcaatac

SEQ ID NO: 29650 - DNA, 50 bp, unidentified
  source 1..50: mol_type = unassigned DNA; note = target_ed8456f
  misc_feature 1..23: note = LF
  misc_feature 24..25: note = Core
  misc_feature 26..50: note = RF
aaaaatcactgcttatccacatcctttttgtttcgaccctctgatttgga

SEQ ID NO: 29651 - DNA, 50 bp, unidentified
  source 1..50: mol_type = unassigned DNA; note = target_ed88cae
  misc_feature 1..23: note = LF
  misc_feature 24..25: note = Core
  misc_feature 26..50: note = RF
gtcgcttgcgctcctcgcacctcagggagcaacgggggcgtcgcttgcgc

SEQ ID NO: 29652 - DNA, 50 bp, unidentified
  source 1..50: mol_type = unassigned DNA; note = target_ed8b621
  misc_feature 1..23: note = LF
  misc_feature 24..25: note = Core
  misc_feature 26..50: note = RF
tcttcccgcctcccaccgtcatcctgagcgacagcgaaggatcttggtaa

SEQ ID NO: 29653 - DNA, 50 bp, unidentified
  source 1..50: mol_type = unassigned DNA; note = target_ed949f9
  misc_feature 1..23: note = LF
  misc_feature 24..25: note = Core
  misc_feature 26..50: note = RF
aggatcgttccgtgccgggtcactgggaaggtgatctgattggcggttcc

SEQ ID NO: 29654 - DNA, 50 bp, unidentified
  source 1..50: mol_type = unassigned DNA; note = target_ed9adb8
  misc_feature 1..22: note = LF
  misc_feature 23..25: note = Core
  misc_feature 26..50: note = RF
gtcccgttccgctattcgcaacagagccggtgtgaagggtcactgcttgg

SEQ ID NO: 29655 - DNA, 50 bp, unidentified
  source 1..50: mol_type = unassigned DNA; note = target_eda62de
  misc_feature 1..24: note = LF
  misc_feature 25: note = Core
  misc_feature 26..50: note = RF
tttcaggctgaagtcgatgtaggctgtgttaggcgcgctgtttgcgtcgt

SEQ ID NO: 29656 - DNA, 50 bp, unidentified
  source 1..50: mol_type = unassigned DNA; note = target_edab886
  misc_feature 1..23: note = LF
  misc_feature 24..25: note = Core
  misc_feature 26..50: note = RF
ccgtctgttagagcgcagtggacctagctggaagatgtgtgaaccgccta

SEQ ID NO: 29657 - DNA, 50 bp, unidentified
  source 1..50: mol_type = unassigned DNA; note = target_edafa22
  misc_feature 1..23: note = LF
  misc_feature 24..25: note = Core
  misc_feature 26..50: note = RF
aggcgatttcgacaagctgcttttggcgctatcgggccgatggtgagacg

SEQ ID NO: 29658 - DNA, 50 bp, unidentified
  source 1..50: mol_type = unassigned DNA; note = target_edb1c7d
  misc_feature 1..23: note = LF
  misc_feature 24..25: note = Core
  misc_feature 26..50: note = RF
gcgtaagtgagtttatcgtggagtgaacccctcgggctggaccgcgggac

SEQ ID NO: 29659 - DNA, 50 bp, unidentified
  source 1..50: mol_type = unassigned DNA; note = target_edc2b3a
  misc_feature 1..24: note = LF
  misc_feature 25: note = Core
  misc_feature 26..50: note = RF
ttccgagaagatggcgacagcctttttttatttggtcgcgctccatgcgc

SEQ ID NO: 29660 - DNA, 50 bp, unidentified
  source 1..50: mol_type = unassigned DNA; note = target_edc3d97
  misc_feature 1..24: note = LF
  misc_feature 25: note = Core
  misc_feature 26..50: note = RF
tcgcttggcggcgggcgtcaccatttttttgacagcatgtccttcagcgc

SEQ ID NO: 29661 - DNA, 50 bp, unidentified
  source 1..50: mol_type = unassigned DNA; note = target_edc4197
  misc_feature 1..22: note = LF
  misc_feature 23..25: note = Core
  misc_feature 26..50: note = RF
tagagtatttactcaatattgtcatttcgacgaaggagactcgagcgtta

SEQ ID NO: 29662 - DNA, 50 bp, unidentified
  source 1..50: mol_type = unassigned DNA; note = target_edcb35f
  misc_feature 1..22: note = LF
  misc_feature 23..25: note = Core
  misc_feature 26..50: note = RF
tccataaatgcactctcctttctctcacatggcaactttgtttcgtacaa

SEQ ID NO: 29663 - DNA, 50 bp, unidentified
  source 1..50: mol_type = unassigned DNA; note = target_edce7b9
  misc_feature 1..23: note = LF
  misc_feature 24..25: note = Core
  misc_feature 26..50: note = RF
tcgaaaccgggatggttgaaagctgtcattccgcgccaaagcatagccgc

SEQ ID NO: 29664 - DNA, 50 bp, unidentified
  source 1..50: mol_type = unassigned DNA; note = target_edd7b03
  misc_feature 1..24: note = LF
  misc_feature 25: note = Core
  misc_feature 26..50: note = RF
tcggggccctcgaacagccggagctttcggctgatgtagtccatctcctc

SEQ ID NO: 29665 - DNA, 50 bp, unidentified
  source 1..50: mol_type = unassigned DNA; note = target_ede30ce
  misc_feature 1..23: note = LF
  misc_feature 24..25: note = Core
  misc_feature 26..50: note = RF
agatgtcaccttttctaccatttagaaatgtcacccgcgtgcaaagttga

SEQ ID NO: 29666 - DNA, 50 bp, unidentified
  source 1..50: mol_type = unassigned DNA; note = target_ede4bf5
  misc_feature 1..23: note = LF
  misc_feature 24..25: note = Core
  misc_feature 26..50: note = RF
atgttgccgctgtaccgtctaacgataagattgaacgacgcgcgggtgcg

SEQ ID NO: 29667 - DNA, 50 bp, unidentified
  source 1..50: mol_type = unassigned DNA; note = target_ede7a06
  misc_feature 1..24: note = LF
  misc_feature 25: note = Core
  misc_feature 26..50: note = RF
aagccccctgactcgtcagggggctttttctttggttcgcgcctcgccgc

SEQ ID NO: 29668 - DNA, 50 bp, unidentified
  source 1..50: mol_type = unassigned DNA; note = target_edec787
  misc_feature 1..23: note = LF
  misc_feature 24..25: note = Core
  misc_feature 26..50: note = RF
cttgtcacttcgatcccgatagttatcgcggagagaagtgtattttgccc

SEQ ID NO: 29669 - DNA, 50 bp, unidentified
  source 1..50: mol_type = unassigned DNA; note = target_edf014a
  misc_feature 1..23: note = LF
  misc_feature 24..25: note = Core
  misc_feature 26..50: note = RF
acgtcgacggagccgcccggcccctattgggacacgcctcgtggctcggt

SEQ ID NO: 29670 - DNA, 50 bp, unidentified
  source 1..50: mol_type = unassigned DNA; note = target_edf0310
  misc_feature 1..24: note = LF
  misc_feature 25: note = Core
  misc_feature 26..50: note = RF
gcagcgtgatgaactcgcggcgtctcattcgatcacctcgtcggcgagct

SEQ ID NO: 29671 - DNA, 50 bp, unidentified
  source 1..50: mol_type = unassigned DNA; note = target_edfd375
  misc_feature 1..23: note = LF
  misc_feature 24..25: note = Core
  misc_feature 26..50: note = RF
aactttgattcacttaatttctcctttcataaataaatcccggcttgaat

SEQ ID NO: 29672 - DNA, 50 bp, unidentified
  source 1..50: mol_type = unassigned DNA; note = target_edff2c6
  misc_feature 1..23: note = LF
  misc_feature 24..25: note = Core
  misc_feature 26..50: note = RF
gcggcttaagccgccctaaaacggacgctgacggtaacaccgtcagatgt

SEQ ID NO: 29673 - DNA, 50 bp, unidentified
  source 1..50: mol_type = unassigned DNA; note = target_ee0c5f4
  misc_feature 1..20: note = LF
  misc_feature 21..25: note = Core
  misc_feature 26..50: note = RF
tccgacgccagccctttatcctgctttctttttcgtcctcgaaaaaggct

SEQ ID NO: 29674 - DNA, 50 bp, unidentified
  source 1..50: mol_type = unassigned DNA; note = target_ee0cc80
  misc_feature 1..23: note = LF
  misc_feature 24..25: note = Core
  misc_feature 26..50: note = RF
cgtctatcgtaacagttgggctttgttgcgcaaagggcttccagtggacg

SEQ ID NO: 29675 - DNA, 50 bp, unidentified
  source 1..50: mol_type = unassigned DNA; note = target_ee0f916
  misc_feature 1..24: note = LF
  misc_feature 25: note = Core
  misc_feature 26..50: note = RF
gatggccaattgcgcgactggcggcatgagcggatgccgagcggaacggc

SEQ ID NO: 29676 - DNA, 50 bp, unidentified
  source 1..50: mol_type = unassigned DNA; note = target_ee1108b
  misc_feature 1..23: note = LF
  misc_feature 24..25: note = Core
  misc_feature 26..50: note = RF
acggtcattaaaccacatcctttctgaattatgatttacatttatagtgt

SEQ ID NO: 29677 - DNA, 50 bp, unidentified
  source 1..50: mol_type = unassigned DNA; note = target_ee17c62
  misc_feature 1..21: note = LF
  misc_feature 22..25: note = Core
  misc_feature 26..50: note = RF
cgcggtcctcaggcatggatcctccttgatcagttgacgagaacggtcgt

SEQ ID NO: 29678 - DNA, 50 bp, unidentified
  source 1..50: mol_type = unassigned DNA; note = target_ee18e8a
  misc_feature 1..24: note = LF
  misc_feature 25: note = Core
  misc_feature 26..50: note = RF
gctgttaacccgcaacacaacctgttaacctcgatcgtcgtgacaacagg

SEQ ID NO: 29679 - DNA, 50 bp, unidentified
  source 1..50: mol_type = unassigned DNA; note = target_ee27b5d
  misc_feature 1..24: note = LF
  misc_feature 25: note = Core
  misc_feature 26..50: note = RF
ccgcccccttcttgcccactgacgtgacccccatttctcatccagccata

SEQ ID NO: 29680 - DNA, 50 bp, unidentified
  source 1..50: mol_type = unassigned DNA; note = target_ee2b582
  misc_feature 1..23: note = LF
  misc_feature 24..25: note = Core
  misc_feature 26..50: note = RF
tgcctggcccgtcattcggcgggtttttgtctaggccccgtgtccacgca

SEQ ID NO: 29681 - DNA, 50 bp, unidentified
  source 1..50: mol_type = unassigned DNA; note = target_ee3213b
  misc_feature 1..23: note = LF
  misc_feature 24..25: note = Core
  misc_feature 26..50: note = RF
aaccgatacacgccctgagggctgtcccgtaagtgatctccgagccgtct

SEQ ID NO: 29682 - DNA, 50 bp, unidentified
  source 1..50: mol_type = unassigned DNA; note = target_ee3397c
  misc_feature 1..23: note = LF
  misc_feature 24..25: note = Core
  misc_feature 26..50: note = RF
ctgctcctcgggcagcagggttttttttgaagctcaggtcctcgtcgtgg

SEQ ID NO: 29683 - DNA, 50 bp, unidentified
  source 1..50: mol_type = unassigned DNA; note = target_ee39ab2
  misc_feature 1..24: note = LF
  misc_feature 25: note = Core
  misc_feature 26..50: note = RF
cggagccgccgtcctcttagctggcgcgggcgccgggtggtgtagcgcgc

SEQ ID NO: 29684 - DNA, 50 bp, unidentified
  source 1..50: mol_type = unassigned DNA; note = target_ee3d81c
  misc_feature 1..22: note = LF
  misc_feature 23..25: note = Core
  misc_feature 26..50: note = RF
taacttccttcttaaactccccgtttagtggaacaattgaacaaggttcc

SEQ ID NO: 29685 - DNA, 50 bp, unidentified
  source 1..50: mol_type = unassigned DNA; note = target_ee408aa
  misc_feature 1..23: note = LF
  misc_feature 24..25: note = Core
  misc_feature 26..50: note = RF
cggcatggatgccgcggccaagcctacacggacgtacttgcggcgtcccc

SEQ ID NO: 29686 - DNA, 50 bp, unidentified
  source 1..50: mol_type = unassigned DNA; note = target_ee42ea6
  misc_feature 1..23: note = LF
  misc_feature 24..25: note = Core
  misc_feature 26..50: note = RF
gcggaacgcccgcagataggtgcctgtcaccacgggtctcaagtaaaatg

SEQ ID NO: 29687 - DNA, 50 bp, unidentified
  source 1..50: mol_type = unassigned DNA; note = target_ee4799f
  misc_feature 1..23: note = LF
  misc_feature 24..25: note = Core
  misc_feature 26..50: note = RF
ggctgtaactgaatttacgccatcttgacggactcaaccgtactcttctc

SEQ ID NO: 29688 - DNA, 50 bp, unidentified
  source 1..50: mol_type = unassigned DNA; note = target_ee54db2
  misc_feature 1..23: note = LF
  misc_feature 24..25: note = Core
  misc_feature 26..50: note = RF
aaggatttccactttaatcggggctatgatgtattggaattgcggtcttt

SEQ ID NO: 29689 - DNA, 50 bp, unidentified
  source 1..50: mol_type = unassigned DNA; note = target_ee61864
  misc_feature 1..23: note = LF
  misc_feature 24..25: note = Core
  misc_feature 26..50: note = RF
tttcatgagacccgcaatttcaaactgacccactaccgaagatttgaggg

SEQ ID NO: 29690 - DNA, 50 bp, unidentified
  source 1..50: mol_type = unassigned DNA; note = target_ee63b73
  misc_feature 1..23: note = LF
  misc_feature 24..25: note = Core
  misc_feature 26..50: note = RF
cgattcaattaagagagatcacgctctagccactcggcctcggacatggc

SEQ ID NO: 29691 - DNA, 50 bp, unidentified
  source 1..50: mol_type = unassigned DNA; note = target_ee63e30
  misc_feature 1..23: note = LF
  misc_feature 24..25: note = Core
  misc_feature 26..50: note = RF
cttttttcataattaaattcctcctttattgccctttgtttcattgatta

SEQ ID NO: 29692 - DNA, 50 bp, unidentified
  source 1..50: mol_type = unassigned DNA; note = target_ee69b30
  misc_feature 1..23: note = LF
  misc_feature 24..25: note = Core
  misc_feature 26..50: note = RF
catccacgagccctcacccctccctctcccgcttcgcaggagagggcgat

SEQ ID NO: 29693 - DNA, 50 bp, unidentified
  source 1..50: mol_type = unassigned DNA; note = target_ee69c5b
  misc_feature 1..23: note = LF
  misc_feature 24..25: note = Core
  misc_feature 26..50: note = RF
gacggtgagcatgagccagtaggcggcggtgtgcaggatcaaccgcattt

SEQ ID NO: 29694 - DNA, 50 bp, unidentified
  source 1..50: mol_type = unassigned DNA; note = target_ee6b95f
  misc_feature 1..23: note = LF
  misc_feature 24..25: note = Core
  misc_feature 26..50: note = RF
ctgctccagtgcatgtgcggtcttttttgaaagtccagccgcgctttcgc

SEQ ID NO: 29695 - DNA, 50 bp, unidentified
  source 1..50: mol_type = unassigned DNA; note = target_ee6dc4f
  misc_feature 1..22: note = LF
  misc_feature 23..25: note = Core
  misc_feature 26..50: note = RF
cccttattcagctatcgcacccgtttagtgaaagaacacgctatttcttt

SEQ ID NO: 29696 - DNA, 50 bp, unidentified
  source 1..50: mol_type = unassigned DNA; note = target_ee6f13e
  misc_feature 1..24: note = LF
  misc_feature 25: note = Core
  misc_feature 26..50: note = RF
gcaagccacgggcccttggtggaggttgccatggcttatgtcgatggatt

SEQ ID NO: 29697 - DNA, 50 bp, unidentified; identical to SEQ ID NO: 25711
  source 1..50: mol_type = unassigned DNA; note = target_ee72847
  misc_feature 1..20: note = LF
  misc_feature 21..25: note = Core
  misc_feature 26..50: note = RF

SEQ ID NO: 29698 - DNA, 50 bp, unidentified
  source 1..50: mol_type = unassigned DNA; note = target_ee7e924
  misc_feature 1..23: note = LF
  misc_feature 24..25: note = Core
  misc_feature 26..50: note = RF
ctccctcgcgatatccattgacctgccactgagtttttcctccacctgga

SEQ ID NO: 29699 - DNA, 50 bp, unidentified
  source 1..50: mol_type = unassigned DNA; note = target_ee80c4e
  misc_feature 1..23: note = LF
  misc_feature 24..25: note = Core
  misc_feature 26..50: note = RF
ccgagcgcgttgagtttgggcactgggagtgcgacttggtgatgttccgc

SEQ ID NO: 29700 - DNA, 50 bp, unidentified
  source 1..50: mol_type = unassigned DNA; note = target_ee84766
  misc_feature 1..24: note = LF
  misc_feature 25: note = Core
  misc_feature 26..50: note = RF
tttttcttcaggtcgcagtagagaaatctcctgatgatttgcaattagct

SEQ ID NO: 29701 - DNA, 50 bp, unidentified
  source 1..50: mol_type = unassigned DNA; note = target_ee88c12
  misc_feature 1..23: note = LF
  misc_feature 24..25: note = Core
  misc_feature 26..50: note = RF
tttaggtacactcatattatcacctctctattcaagtggttttaattcca

SEQ ID NO: 29702 - DNA, 50 bp, unidentified
  source 1..50: mol_type = unassigned DNA; note = target_ee89b09
  misc_feature 1..23: note = LF
  misc_feature 24..25: note = Core
  misc_feature 26..50: note = RF
gtggcggaagccactgcgttaccctacttaaagttcattgttgagaaaac

SEQ ID NO: 29703 - DNA, 50 bp, unidentified
  source 1..50: mol_type = unassigned DNA; note = target_ee8c044
  misc_feature 1..23: note = LF
  misc_feature 24..25: note = Core
  misc_feature 26..50: note = RF
ggacggggaagtcggggctgtgtagcgcgacgattagggagaccggtcgg

SEQ ID NO: 29704 - DNA, 50 bp, unidentified
  source 1..50: mol_type = unassigned DNA; note = target_ee9c911
  misc_feature 1..24: note = LF
  misc_feature 25: note = Core
  misc_feature 26..50: note = RF
tcgcctatacgcggtgtcattagtagccggtgttttcccggcgaagcaat

SEQ ID NO: 29705 - DNA, 50 bp, unidentified
  source 1..50: mol_type = unassigned DNA; note = target_ee9f636
  misc_feature 1..23: note = LF
  misc_feature 24..25: note = Core
  misc_feature 26..50: note = RF
taggggaggacacggtcgacattcccctactcatcgcgaccctgcgggat

SEQ ID NO: 29706 - DNA, 50 bp, unidentified
  source 1..50: mol_type = unassigned DNA; note = target_eeab081
  misc_feature 1..21: note = LF
  misc_feature 22..25: note = Core
  misc_feature 26..50: note = RF
ccgccacgcgcaggaattgagccccccatgacgagcaccttccccccggg

SEQ ID NO: 29707 - DNA, 50 bp, unidentified
  source 1..50: mol_type = unassigned DNA; note = target_eeb39ec
  misc_feature 1..22: note = LF
  misc_feature 23..25: note = Core
  misc_feature 26..50: note = RF
agcgatcctcatcctacggtgcggacgaagcggtcatcaactattttgaa

SEQ ID NO: 29708 - DNA, 50 bp, unidentified
  source 1..50: mol_type = unassigned DNA; note = target_eeb93d2
  misc_feature 1..24: note = LF
  misc_feature 25: note = Core
  misc_feature 26..50: note = RF
tcacgttgtgcccgtgaatcgggattgagcaactatgcggtttcgaagct

SEQ ID NO: 29709 - DNA, 50 bp, unidentified
  source 1..50: mol_type = unassigned DNA; note = target_eec1cf2
  misc_feature 1..23: note = LF
  misc_feature 24..25: note = Core
  misc_feature 26..50: note = RF
ttcggaagtcgctcatatgtatccggcctgttgatcggctcgtgggccgt

SEQ ID NO: 29710 - DNA, 50 bp, unidentified
  source 1..50: mol_type = unassigned DNA; note = target_eec513a
  misc_feature 1..24: note = LF
  misc_feature 25: note = Core
  misc_feature 26..50: note = RF
ttcttcagctgctgcataagtagtactgacggattgccggttgacggatt

SEQ ID NO: 29711 - DNA, 50 bp, unidentified
  source 1..50: mol_type = unassigned DNA; note = target_eed1f28
  misc_feature 1..23: note = LF
  misc_feature 24..25: note = Core
  misc_feature 26..50: note = RF
cgactgagccggcgcacaggtgtctgtccccgcaggggggctggcgcctg

SEQ ID NO: 29712 - DNA, 50 bp, unidentified
  source 1..50: mol_type = unassigned DNA; note = target_eed87e9
  misc_feature 1..23: note = LF
  misc_feature 24..25: note = Core
  misc_feature 26..50: note = RF
ttcattcaagctctaactcatcactgaagtaacgagaatgcgacgcgcag

SEQ ID NO: 29713 - DNA, 50 bp, unidentified
  source 1..50: mol_type = unassigned DNA; note = target_eedbb47
  misc_feature 1..23: note = LF
  misc_feature 24..25: note = Core
  misc_feature 26..50: note = RF
tttttgccatccttcctaacctcctttaaggtataaaacaggctagttgt

SEQ ID NO: 29714 - DNA, 50 bp, unidentified
  source 1..50: mol_type = unassigned DNA; note = target_eedffe3
  misc_feature 1..24: note = LF
  misc_feature 25: note = Core
  misc_feature 26..50: note = RF
ccgaagtaccactgcttgcctttcttcgtctgatgcatctccggatcgcg

SEQ ID NO: 29715 - DNA, 50 bp, unidentified
  source 1..50: mol_type = unassigned DNA; note = target_eef58fc
  misc_feature 1..23: note = LF
  misc_feature 24..25: note = Core
  misc_feature 26..50: note = RF
acataaagtcataatttcacctcctttcaacaaaaaagcccctataataa

SEQ ID NO: 29716 - DNA, 50 bp, unidentified
  source 1..50: mol_type = unassigned DNA; note = target_eef7ed0
  misc_feature 1..24: note = LF
  misc_feature 25: note = Core
  misc_feature 26..50: note = RF
gattgcttcgtcgcttaggctcctcgcaatgacaccttccttaactgacc

SEQ ID NO: 29717 - DNA, 50 bp, unidentified
  source 1..50: mol_type = unassigned DNA; note = target_ef03ac5
  misc_feature 1..23: note = LF
  misc_feature 24..25: note = Core
  misc_feature 26..50: note = RF
tcgttttcgcatggtaaaacctcctttcggatcaggatgctttttccctc

SEQ ID NO: 29718 - DNA, 50 bp, unidentified
  source 1..50: mol_type = unassigned DNA; note = target_ef05db9
  misc_feature 1..23: note = LF
  misc_feature 24..25: note = Core
  misc_feature 26..50: note = RF
taaccctctcggggttattcgccctactaaagctgcatctcggctctgga

SEQ ID NO: 29719 - DNA, 50 bp, unidentified
  source 1..50: mol_type = unassigned DNA; note = target_ef05f18
  misc_feature 1..24: note = LF
  misc_feature 25: note = Core
  misc_feature 26..50: note = RF
gtattgctctgctggcaagtagggttttgatagacgtactaaggctcaat

SEQ ID NO: 29720 - DNA, 50 bp, unidentified
  source 1..50: mol_type = unassigned DNA; note = target_ef087ef
  misc_feature 1..23: note = LF
  misc_feature 24..25: note = Core
  misc_feature 26..50: note = RF
gcgatgtccgctttacccccgaaagcggacattgcgatcattcggaccta

SEQ ID NO: 29721 - DNA, 50 bp, unidentified
  source 1..50: mol_type = unassigned DNA; note = target_ef0c2f5
  misc_feature 1..21: note = LF
  misc_feature 22..25: note = Core
  misc_feature 26..50: note = RF
gtcaggtctcattaccaaaagagtcgctgacccctttattacctaggaag

SEQ ID NO: 29722 - DNA, 50 bp, unidentified
  source 1..50: mol_type = unassigned DNA; note = target_ef1d9b1
  misc_feature 1..24: note = LF
  misc_feature 25: note = Core
  misc_feature 26..50: note = RF
aatcaaccttcgcgcaaacagagccgtccacacatcacagcaacctcaag

SEQ ID NO: 29723 - DNA, 50 bp, unidentified
  source 1..50: mol_type = unassigned DNA; note = target_ef2052b
  misc_feature 1..23: note = LF
  misc_feature 24..25: note = Core
  misc_feature 26..50: note = RF
tacagcaacggcgcagtgagcgtagcccggatgagcgaagcgaaatccgg

SEQ ID NO: 29724 - DNA, 50 bp, unidentified
  source 1..50: mol_type = unassigned DNA; note = target_ef2501a
  misc_feature 1..23: note = LF
  misc_feature 24..25: note = Core
  misc_feature 26..50: note = RF
aagtgattgcccatacgctcctcctatgctcactttagtttccctgaact

SEQ ID NO: 29725 - DNA, 50 bp, unidentified
  source 1..50: mol_type = unassigned DNA; note = target_ef2e00d
  misc_feature 1..24: note = LF
  misc_feature 25: note = Core
  misc_feature 26..50: note = RF
tctggagaaaccattaacccaaatcggtcattagaccacaatgtttcagg

SEQ ID NO: 29726 - DNA, 50 bp, unidentified
  source 1..50: mol_type = unassigned DNA; note = target_ef31afd
  misc_feature 1..24: note = LF
  misc_feature 25: note = Core
  misc_feature 26..50: note = RF
accaagagcaggctcgaagtccggtcgggtcaaacagagaagagagaaca

SEQ ID NO: 29727 - DNA, 50 bp, unidentified
  source 1..50: mol_type = unassigned DNA; note = target_ef36ce2
  misc_feature 1..23: note = LF
  misc_feature 24..25: note = Core
  misc_feature 26..50: note = RF
ggttcccactttcgggagacatgctctagctgtcccgggaatgccggacc

SEQ ID NO: 29728 - DNA, 50 bp, unidentified
  source 1..50: mol_type = unassigned DNA; note = target_ef3cadc
  misc_feature 1..23: note = LF
  misc_feature 24..25: note = Core
  misc_feature 26..50: note = RF
aaatagtcagctctctgaaagcagacatcgccagagtggcttgaaaccaa

SEQ ID NO: 29729 - DNA, 50 bp, unidentified
  source 1..50: mol_type = unassigned DNA; note = target_ef41e0e
  misc_feature 1..23: note = LF
  misc_feature 24..25: note = Core
  misc_feature 26..50: note = RF
ctcaaaagcgccctcttgggggactctgccgcgcaaccccaaaaagccgc

SEQ ID NO: 29730 - DNA, 50 bp, unidentified
  source 1..50: mol_type = unassigned DNA; note = target_ef42674
  misc_feature 1..23: note = LF
  misc_feature 24..25: note = Core
  misc_feature 26..50: note = RF
gtcatcctagagtgctcctatcgaggatctaattggtccaccagcggtaa

SEQ ID NO: 29731 - DNA, 50 bp, unidentified
  source 1..50: mol_type = unassigned DNA; note = target_ef447d7
  misc_feature 1..24: note = LF
  misc_feature 25: note = Core
  misc_feature 26..50: note = RF
cgcgcgagcgggcgcaaagtccgcttcgggtcaactcgggcattaccgca

SEQ ID NO: 29732 - DNA, 50 bp, unidentified
  source 1..50: mol_type = unassigned DNA; note = target_ef45347
  misc_feature 1..24: note = LF
  misc_feature 25: note = Core
  misc_feature 26..50: note = RF
ctctggccgacgcccgctcatcggcacgagcggacggactggaagccccg

SEQ ID NO: 29733 - DNA, 50 bp, unidentified
  source 1..50: mol_type = unassigned DNA; note = target_ef4de79
  misc_feature 1..24: note = LF
  misc_feature 25: note = Core
  misc_feature 26..50: note = RF
cgaggggatcggcgagcgcggaagtaccgtatgatctggggtagccatga

SEQ ID NO: 29734 - DNA, 50 bp, unidentified
  source 1..50: mol_type = unassigned DNA; note = target_ef52a3e
  misc_feature 1..23: note = LF
  misc_feature 24..25: note = Core
  misc_feature 26..50: note = RF
cccgccatgactgcataccttaaaccaaacggtctccggcaaactcggga

SEQ ID NO: 29735 - DNA, 50 bp, unidentified
  source 1..50: mol_type = unassigned DNA; note = target_ef553ce
  misc_feature 1..23: note = LF
  misc_feature 24..25: note = Core
  misc_feature 26..50: note = RF
cgatcccgttttcgccggaaatgctctagcgcatcggctcgaaaatcaaa

SEQ ID NO: 29736 - DNA, 50 bp, unidentified
  source 1..50: mol_type = unassigned DNA; note = target_ef5b71d
  misc_feature 1..23: note = LF
  misc_feature 24..25: note = Core
  misc_feature 26..50: note = RF
gttttcatttttcattacacttcctttctatgtttttttctttttaaaat

SEQ ID NO: 29737 - DNA, 50 bp, unidentified
  source 1..50: mol_type = unassigned DNA; note = target_ef5bf53
  misc_feature 1..23: note = LF
  misc_feature 24..25: note = Core
  misc_feature 26..50: note = RF
caaatgtgcgtcagacccaactttgcatgccggttcacaggttggatttg

SEQ ID NO: 29738 - DNA, 50 bp, unidentified
  source 1..50: mol_type = unassigned DNA; note = target_ef5d2ed
  misc_feature 1..22: note = LF
  misc_feature 23..25: note = Core
  misc_feature 26..50: note = RF
tgatccatcctcccaaacaggatgaatcacagatcagcaatcatgggaat

SEQ ID NO: 29739 - DNA, 50 bp, unidentified
  source 1..50: mol_type = unassigned DNA; note = target_ef5d909
  misc_feature 1..22: note = LF
  misc_feature 23..25: note = Core
  misc_feature 26..50: note = RF
ggggttccggtctaatactttattttcattgaacattatagggttttttt

SEQ ID NO: 29740 - DNA, 50 bp, unidentified
  source 1..50: mol_type = unassigned DNA; note = target_ef69efb
  misc_feature 1..24: note = LF
  misc_feature 25: note = Core
  misc_feature 26..50: note = RF
acagcttgctgcgctgcggactactggatggactcagccctacgcgggtc

SEQ ID NO: 29741 - DNA, 50 bp, unidentified
  source 1..50: mol_type = unassigned DNA; note = target_ef760bf
  misc_feature 1..23: note = LF
  misc_feature 24..25: note = Core
  misc_feature 26..50: note = RF
agcgccgcagagcgcggaagtcttgacttatgcaccgtatgcgtcgggcg

SEQ ID NO: 29742 - DNA, 50 bp, unidentified
  source 1..50: mol_type = unassigned DNA; note = target_ef7c37c
  misc_feature 1..22: note = LF
  misc_feature 23..25: note = Core
  misc_feature 26..50: note = RF
aagtaacattgcaaatattatctgaattcgggacagagcatatctgacga

SEQ ID NO: 29743 - DNA, 50 bp, unidentified
  source 1..50: mol_type = unassigned DNA; note = target_ef8ba2d
  misc_feature 1..23: note = LF
  misc_feature 24..25: note = Core
  misc_feature 26..50: note = RF
gcctgaccgccgcagtgacccgacttgtgacaagttagtgcgcacgtgga

SEQ ID NO: 29744 - DNA, 50 bp, unidentified
  source 1..50: mol_type = unassigned DNA; note = target_ef8c15a
  misc_feature 1..23: note = LF
  misc_feature 24..25: note = Core
  misc_feature 26..50: note = RF
gggctggaatagggctgcgcttttggccctgagagggccggactcgaggg

SEQ ID NO: 29745 - DNA, 50 bp, unidentified
  source 1..50: mol_type = unassigned DNA; note = target_ef9a553
  misc_feature 1..24: note = LF
  misc_feature 25: note = Core
  misc_feature 26..50: note = RF
tctttggaacgctccgaaggggcctttttttttggaaacggggccacaaa

SEQ ID NO: 29746 - DNA, 50 bp, unidentified
  source 1..50: mol_type = unassigned DNA; note = target_ef9d5e7
  misc_feature 1..23: note = LF
  misc_feature 24..25: note = Core
  misc_feature 26..50: note = RF
tcatcttctggctgtgatcaacgagtcctgaccctaaggtacttgctgtt

SEQ ID NO: 29747 - DNA, 50 bp, unidentified
  source 1..50: mol_type = unassigned DNA; note = target_efa15d6
  misc_feature 1..22: note = LF
  misc_feature 23..25: note = Core
  misc_feature 26..50: note = RF
tgcaatatctttcataatgctcctttccatcaaaaaagaaccttacacag

SEQ ID NO: 29748 - DNA, 50 bp, unidentified
  source 1..50: mol_type = unassigned DNA; note = target_efabd76
  misc_feature 1..23: note = LF
  misc_feature 24..25: note = Core
  misc_feature 26..50: note = RF
ccggacgcattctccggcgttcaaggcgaaagtggcgttggccgcgatca

SEQ ID NO: 29749 - DNA, 50 bp, unidentified
  source 1..50: mol_type = unassigned DNA; note = target_efafc15
  misc_feature 1..24: note = LF
  misc_feature 25: note = Core
  misc_feature 26..50: note = RF
ccagccattttgagtgaacgcgatttataagcactagcgaactttccaga

SEQ ID NO: 29750 - DNA, 50 bp, unidentified
  source 1..50: mol_type = unassigned DNA; note = target_efbaba7
  misc_feature 1..23: note = LF
  misc_feature 24..25: note = Core
  misc_feature 26..50: note = RF
agttaaggattggccagtgttcatgggttccgggcctgccccttggggca

SEQ ID NO: 29751 - DNA, 50 bp, unidentified
  source 1..50: mol_type = unassigned DNA; note = target_efbc462
  misc_feature 1..23: note = LF
  misc_feature 24..25: note = Core
  misc_feature 26..50: note = RF
cctgatcgttccatgtccgcaattgggtcgttacccgcccgtcagctttt

SEQ ID NO: 29752 - DNA, 50 bp, unidentified
  source 1..50: mol_type = unassigned DNA; note = target_efbe2e2
  misc_feature 1..24: note = LF
  misc_feature 25: note = Core
  misc_feature 26..50: note = RF
ttctgaagtggcccacttcggcggtttgttttggcccaccctggacacag

SEQ ID NO: 29753 - DNA, 50 bp, unidentified
  source 1..50: mol_type = unassigned DNA; note = target_efca7b4
  misc_feature 1..24: note = LF
  misc_feature 25: note = Core
  misc_feature 26..50: note = RF
gaccagccgcctcactgtcagcggcatgagcgcgcgtcgaggtttgcgat

SEQ ID NO: 29754 - DNA, 50 bp, unidentified
  source 1..50: mol_type = unassigned DNA; note = target_efd0c4e
  misc_feature 1..23: note = LF
  misc_feature 24..25: note = Core
  misc_feature 26..50: note = RF
ccgttctcggctcgggttgaaacctagacgcgccggtatcgtgagcccat

SEQ ID NO: 29755 - DNA, 50 bp, unidentified
  source 1..50: mol_type = unassigned DNA; note = target_efd2047
  misc_feature 1..24: note = LF
  misc_feature 25: note = Core
  misc_feature 26..50: note = RF
tcatagcaagggtttaccgggacgtttttacacactctgggccagaagcg

SEQ ID NO: 29756 - DNA, 50 bp, unidentified
  source 1..50: mol_type = unassigned DNA; note = target_efd2955
  misc_feature 1..23: note = LF
  misc_feature 24..25: note = Core
  misc_feature 26..50: note = RF
gagtctgccaggggaagaggagtagggttggcaaaggcgcacttgcgccg

SEQ ID NO: 29757 - DNA, 50 bp, unidentified
  source 1..50: mol_type = unassigned DNA; note = target_efd64e0
  misc_feature 1..23: note = LF
  misc_feature 24..25: note = Core
  misc_feature 26..50: note = RF
tctgtgatagctagctgccgaaacggaatggggcaaagattacttagagt

SEQ ID NO: 29758 - DNA, 50 bp, unidentified
  source 1..50: mol_type = unassigned DNA; note = target_efdb680
  misc_feature 1..23: note = LF
  misc_feature 24..25: note = Core
  misc_feature 26..50: note = RF
ctcatcttaccaatctcgggattccgggttcaccgctgcgcggcgccccg

SEQ ID NO: 29759 - DNA, 50 bp, unidentified
  source 1..50: mol_type = unassigned DNA; note = target_efe2eab
  misc_feature 1..24: note = LF
  misc_feature 25: note = Core
  misc_feature 26..50: note = RF
ggtgagtgcaattaacactcacctctttctgtggtatactgtttctctat

SEQ ID NO: 29760 - DNA, 50 bp, unidentified
  source 1..50: mol_type = unassigned DNA; note = target_efeae75
  misc_feature 1..21: note = LF
  misc_feature 22..25: note = Core
  misc_feature 26..50: note = RF
tcgcgcggacgaggtgatagaatgaagcggcgggagttcataggtgggct

SEQ ID NO: 29761 - DNA, 50 bp, unidentified
  source 1..50: mol_type = unassigned DNA; note = target_eff4ef5
  misc_feature 1..24: note = LF
  misc_feature 25: note = Core
  misc_feature 26..50: note = RF
ttccgctcccgcgcggacttcgcattcgggccaattccggacattggcca

SEQ ID NO: 29762 - DNA, 50 bp, unidentified
  source 1..50: mol_type = unassigned DNA; note = target_eff7310
  misc_feature 1..24: note = LF
  misc_feature 25: note = Core
  misc_feature 26..50: note = RF
ggtatataaaagtcaaccgagtccccccctactacagcctactggctact

SEQ ID NO: 29763 - DNA, 50 bp, unidentified
  source 1..50: mol_type = unassigned DNA; note = target_eff9974
  misc_feature 1..24: note = LF
  misc_feature 25: note = Core
  misc_feature 26..50: note = RF
gggaacgacggcacggtcggcccccaccccgccggccaggcgccggcccg

SEQ ID NO: 29764 - DNA, 50 bp, unidentified
  source 1..50: mol_type = unassigned DNA; note = target_effeb0b
  misc_feature 1..23: note = LF
  misc_feature 24..25: note = Core
  misc_feature 26..50: note = RF
actgcgctgttcatgggctttgttgcgcaaagactgcgataggattcacc

SEQ ID NO: 29765 - DNA, 50 bp, unidentified
  source 1..50: mol_type = unassigned DNA; note = target_f00384c
  misc_feature 1..22: note = LF
  misc_feature 23..25: note = Core
  misc_feature 26..50: note = RF
aggccttcgagatgtccgctggtgacccaaagcgggcattaccgagcccg

SEQ ID NO: 29766 - DNA, 50 bp, unidentified
  source 1..50: mol_type = unassigned DNA; note = target_f006039
  misc_feature 1..23: note = LF
  misc_feature 24..25: note = Core
  misc_feature 26..50: note = RF
tcaagtggcgtgcgcggatccggcttcgccggtccgctgcgcgagccccc

SEQ ID NO: 29767 - DNA, 50 bp, unidentified
  source 1..50: mol_type = unassigned DNA; note = target_f017d2f
  misc_feature 1..23: note = LF
  misc_feature 24..25: note = Core
  misc_feature 26..50: note = RF
aggcgtcggcaacagagaggcttccgttcgtttgacagtccctgcgctgc

SEQ ID NO: 29768 - DNA, 50 bp, unidentified
  source 1..50: mol_type = unassigned DNA; note = target_f0194ec
  misc_feature 1..23: note = LF
  misc_feature 24..25: note = Core
  misc_feature 26..50: note = RF
gttcttcatttcgtcagggggtcagtttctcaatcggccgacagcttgga

SEQ ID NO: 29769 - DNA, 50 bp, unidentified
  source 1..50: mol_type = unassigned DNA; note = target_f026421
  misc_feature 1..23: note = LF
  misc_feature 24..25: note = Core
  misc_feature 26..50: note = RF
gtcgcagctcgctcgcgaacccctgcgggttgaccgtccaaggacgggac

SEQ ID NO: 29770 - DNA, 50 bp, unidentified
  source 1..50: mol_type = unassigned DNA; note = target_f02d1d4
  misc_feature 1..24: note = LF
  misc_feature 25: note = Core
  misc_feature 26..50: note = RF
aaatggctggcagtacgacatctgtatctggccatgacattgattggggt

SEQ ID NO: 29771 - DNA, 50 bp, unidentified
  source 1..50: mol_type = unassigned DNA; note = target_f034bdb
  misc_feature 1..24: note = LF
  misc_feature 25: note = Core
  misc_feature 26..50: note = RF
actaatgagagtaaatttgtaagtcgtattcgccgctaggcaatacgcca

SEQ ID NO: 29772 - DNA, 50 bp, unidentified
  source 1..50: mol_type = unassigned DNA; note = target_f0398ad
  misc_feature 1..23: note = LF
  misc_feature 24..25: note = Core
  misc_feature 26..50: note = RF
gccctgatccaggcgctgcctcgctaggccaggaccctgcggccgcgagc

SEQ ID NO: 29773 - DNA, 50 bp, unidentified
  source 1..50: mol_type = unassigned DNA; note = target_f03f721
  misc_feature 1..24: note = LF
  misc_feature 25: note = Core
  misc_feature 26..50: note = RF
acaaacaggcatttctgggcactctttgggccaacaaagagtgtctggcg

SEQ ID NO: 29774 - DNA, 50 bp, unidentified
  source 1..50: mol_type = unassigned DNA; note = target_f04740e
  misc_feature 1..22: note = LF
  misc_feature 23..25: note = Core
  misc_feature 26..50: note = RF
gtttcccctgctccgccaccgcatcctcctccagtgaccaccacagagcg

SEQ ID NO: 29775 - DNA, 50 bp, unidentified
  source 1..50: mol_type = unassigned DNA; note = target_f04895f
  misc_feature 1..21: note = LF
  misc_feature 22..25: note = Core
  misc_feature 26..50: note = RF
gtccaggctgccgcgggcccggtcataccgcatcgtcgtccgcgggtcag

SEQ ID NO: 29776 - DNA, 50 bp, unidentified
  source 1..50: mol_type = unassigned DNA; note = target_f04be0a
  misc_feature 1..22: note = LF
  misc_feature 23..25: note = Core
  misc_feature 26..50: note = RF
aggcggtcgatgtcgagacaatagagatttggttccaggacgaggctcgg

SEQ ID NO: 29777 - DNA, 50 bp, unidentified
  source 1..50: mol_type = unassigned DNA; note = target_f04c798
  misc_feature 1..23: note = LF
  misc_feature 24..25: note = Core
  misc_feature 26..50: note = RF
agaaatcatataatcttatattcctgtagtcaataaaatgttaacaacga

SEQ ID NO: 29778 - DNA, 50 bp, unidentified
  source 1..50: mol_type = unassigned DNA; note = target_f058212
  misc_feature 1..23: note = LF
  misc_feature 24..25: note = Core
  misc_feature 26..50: note = RF
tcctcctttgcccctcatgacagcttcgctcattctgggcctactcgttc

SEQ ID NO: 29779 - DNA, 50 bp, unidentified
  source 1..50: mol_type = unassigned DNA; note = target_f05af25
  misc_feature 1..23: note = LF
  misc_feature 24..25: note = Core
  misc_feature 26..50: note = RF
ggaactcgaccgaccagcgtgaccgtccggtgatgctcacctagaccgac

SEQ ID NO: 29780 - DNA, 50 bp, unidentified
  source 1..50: mol_type = unassigned DNA; note = target_f05ffb6
  misc_feature 1..23: note = LF
  misc_feature 24..25: note = Core
  misc_feature 26..50: note = RF
gtcgccaccgttacacagagctactttggggccggtggcatggacccgag

SEQ ID NO: 29781 - DNA, 50 bp, unidentified
  source 1..50: mol_type = unassigned DNA; note = target_f060b17
  misc_feature 1..24: note = LF
  misc_feature 25: note = Core
  misc_feature 26..50: note = RF
gtattcccttaattattcctgaatcagtgactctgcccgctaatataccc

SEQ ID NO: 29782 - DNA, 50 bp, unidentified
  source 1..50: mol_type = unassigned DNA; note = target_f06254c
  misc_feature 1..23: note = LF
  misc_feature 24..25: note = Core
  misc_feature 26..50: note = RF
cctcaggggggcgccgaggttagcgcctttgcggcgaggaaatcatacaa

SEQ ID NO: 29783 - DNA, 50 bp, unidentified
  source 1..50: mol_type = unassigned DNA; note = target_f0670b8
  misc_feature 1..23: note = LF
  misc_feature 24..25: note = Core
  misc_feature 26..50: note = RF
cactaaaaaatgagtacatttttctgtggtaatcttatatatcagcaaat

SEQ ID NO: 29784 - DNA, 50 bp, unidentified
  source 1..50: mol_type = unassigned DNA; note = target_f07af12
  misc_feature 1..23: note = LF
  misc_feature 24..25: note = Core
  misc_feature 26..50: note = RF
ggcttcggggctcaccttgcctcctgtctcgtgcctgaggctgtgctgat

SEQ ID NO: 29785 - DNA, 50 bp, unidentified
  source 1..50: mol_type = unassigned DNA; note = target_f07dac0
  misc_feature 1..23: note = LF
  misc_feature 24..25: note = Core
  misc_feature 26..50: note = RF
ccgcccgcctccatctgcgagcccttatctaagcttgccgtttaacctcg

SEQ ID NO: 29786 - DNA, 50 bp, unidentified
  source 1..50: mol_type = unassigned DNA; note = target_f07e8f3
  misc_feature 1..24: note = LF
  misc_feature 25: note = Core
  misc_feature 26..50: note = RF
attgatagcggcacagtagtgaaccgttggtcggaagcgccgcaggatga

SEQ ID NO: 29787 - DNA, 50 bp, unidentified
  source 1..50: mol_type = unassigned DNA; note = target_f097097
  misc_feature 1..20: note = LF
  misc_feature 21..25: note = Core
  misc_feature 26..50: note = RF
gcagtgatcgggcagcgatacccccccagcgtgagctcccgcaccattgg

SEQ ID NO: 29788 - DNA, 50 bp, unidentified
  source 1..50: mol_type = unassigned DNA; note = target_f0a3f7e
  misc_feature 1..23: note = LF
  misc_feature 24..25: note = Core
  misc_feature 26..50: note = RF
taaaccacctgtgtgccaggtggttttttgctctgttgatctggtttcgg

SEQ ID NO: 29789 - DNA, 50 bp, unidentified
  source 1..50: mol_type = unassigned DNA; note = target_f0bd37c
  misc_feature 1..23: note = LF
  misc_feature 24..25: note = Core
  misc_feature 26..50: note = RF
gaaaacaataattcagtagatggaggttggacgccaggcccatcccctcc

SEQ ID NO: 29790 - DNA, 50 bp, unidentified
  source 1..50: mol_type = unassigned DNA; note = target_f0c4df0
  misc_feature 1..23: note = LF
  misc_feature 24..25: note = Core
  misc_feature 26..50: note = RF
acagagccaaaaaatatctcctcctttaataatagcgtattagacgaaat

SEQ ID NO: 29791 - DNA, 50 bp, unidentified
  source 1..50: mol_type = unassigned DNA; note = target_f0c8f36
  misc_feature 1..24: note = LF
  misc_feature 25: note = Core
  misc_feature 26..50: note = RF
gcttgctacgatcgaacgtgagttttcggcaagggtgtccgtattctgag

SEQ ID NO: 29792 - DNA, 50 bp, unidentified
  source 1..50: mol_type = unassigned DNA; note = target_f0d3679
  misc_feature 1..23: note = LF
  misc_feature 24..25: note = Core
  misc_feature 26..50: note = RF
cctggtcctgtgcccggggggacctagagggccgacgccgggacggccgg

SEQ ID NO: 29793 - DNA, 50 bp, unidentified
  source 1..50: mol_type = unassigned DNA; note = target_f0d6025
  misc_feature 1..19: note = LF
  misc_feature 20..25: note = Core
  misc_feature 26..50: note = RF
tccccctgccgagttgccgcagggcgggaccggacgagaacaaccgacta

SEQ ID NO: 29794 - DNA, 50 bp, unidentified
  source 1..50: mol_type = unassigned DNA; note = target_f113f15
  misc_feature 1..22: note = LF
  misc_feature 23..25: note = Core
  misc_feature 26..50: note = RF
ccttgactaacggaatgcgattagacaacgctgccacggctgaagccgag

SEQ ID NO: 29795 - DNA, 50 bp, unidentified
  source 1..50: mol_type = unassigned DNA; note = target_f114870
  misc_feature 1..23: note = LF
  misc_feature 24..25: note = Core
  misc_feature 26..50: note = RF
acgcggcataagccactcctcgtagcccggatgaagcgcagcgcaatccg

SEQ ID NO: 29796 - DNA, 50 bp, unidentified
  source 1..50: mol_type = unassigned DNA; note = target_f118c2b
  misc_feature 1..23: note = LF
  misc_feature 24..25: note = Core
  misc_feature 26..50: note = RF
cgcatgctcgcatagcggacccctgcgggttgaccgtggaaggccggcgg

SEQ ID NO: 29797 - DNA, 50 bp, unidentified
  source 1..50: mol_type = unassigned DNA; note = target_f120d18
  misc_feature 1..23: note = LF
  misc_feature 24..25: note = Core
  misc_feature 26..50: note = RF
caggccgtcgaggcccgggacgcctgacccgcacaccgttcggggacgaa

SEQ ID NO: 29798 - DNA, 50 bp, unidentified
  source 1..50: mol_type = unassigned DNA; note = target_f123640
  misc_feature 1..23: note = LF
  misc_feature 24..25: note = Core
  misc_feature 26..50: note = RF
gcttcattttattggcgcattttttttggctaaagaatgatccacatttg

SEQ ID NO: 29799 - DNA, 50 bp, unidentified
  source 1..50: mol_type = unassigned DNA; note = target_f12ba84
  misc_feature 1..23: note = LF
  misc_feature 24..25: note = Core
  misc_feature 26..50: note = RF
ttttcccatacagggggtccggtagcaatggaaccagaagttcgattcag

SEQ ID NO: 29800 - DNA, 50 bp, unidentified
  source 1..50: mol_type = unassigned DNA; note = target_f12bf51
  misc_feature 1..22: note = LF
  misc_feature 23..25: note = Core
  misc_feature 26..50: note = RF
caggcgcccggcgtcgccgagcctacgcctcttggtcggcgcgcgtcggg

SEQ ID NO: 29801 - DNA, 50 bp, unidentified
  source 1..50: mol_type = unassigned DNA; note = target_f12d786
  misc_feature 1..23: note = LF
  misc_feature 24..25: note = Core
  misc_feature 26..50: note = RF
cggcgtccgaaagcctccaagggaggaaaccgcgctggggggaacgagga

SEQ ID NO: 29802 - DNA, 50 bp, unidentified
  source 1..50: mol_type = unassigned DNA; note = target_f134eac
  misc_feature 1..24: note = LF
  misc_feature 25: note = Core
  misc_feature 26..50: note = RF
cgacgcggcaaccctggacgaggcggccctatgaaactcggctacgcacg

SEQ ID NO: 29803 - DNA, 50 bp, unidentified
  source 1..50: mol_type = unassigned DNA; note = target_f139bd0
  misc_feature 1..23: note = LF
  misc_feature 24..25: note = Core
  misc_feature 26..50: note = RF
ctgcaatcgcgggcaagcccccgctcccaccaaacctccggctccgttcg

SEQ ID NO: 29804 - DNA, 50 bp, unidentified
  source 1..50: mol_type = unassigned DNA; note = target_f14477d
  misc_feature 1..23: note = LF
  misc_feature 24..25: note = Core
  misc_feature 26..50: note = RF
tgatgccgttacgggcgccgtccaccccatcaagagagcctgaggacact

SEQ ID NO: 29805 - DNA, 50 bp, unidentified
  source 1..50: mol_type = unassigned DNA; note = target_f148aab
  misc_feature 1..24: note = LF
  misc_feature 25: note = Core
  misc_feature 26..50: note = RF
ctcttaccatcaacgccaggggtgatgggtccctgcgttcgcagggacga

SEQ ID NO: 29806 - DNA, 50 bp, unidentified
  source 1..50: mol_type = unassigned DNA; note = target_f14a408
  misc_feature 1..22: note = LF
  misc_feature 23..25: note = Core
  misc_feature 26..50: note = RF
aactcgtctcgcaaccgcccattgaagctttcgatgaaggcgttctggat

SEQ ID NO: 29807 - DNA, 50 bp, unidentified
  source 1..50: mol_type = unassigned DNA; note = target_f14c517
  misc_feature 1..24: note = LF
  misc_feature 25: note = Core
  misc_feature 26..50: note = RF
gctgccaactgtgctggtagcgggcatgagagcgcgatcttcatgatcgg

SEQ ID NO: 29808 - DNA, 50 bp, unidentified
  source 1..50: mol_type = unassigned DNA; note = target_f151ea7
  misc_feature 1..24: note = LF
  misc_feature 25: note = Core
  misc_feature 26..50: note = RF
gtgtcagtccaggcgtttcatctgttaacctccacgttcgccccggtaac

SEQ ID NO: 29809 - DNA, 50 bp, unidentified
  source 1..50: mol_type = unassigned DNA; note = target_f1586ee
  misc_feature 1..23: note = LF
  misc_feature 24..25: note = Core
  misc_feature 26..50: note = RF
ttcactcctttgctaaataacgatttgcagggagcgtcaataagatagaa

SEQ ID NO: 29810 - DNA, 50 bp, unidentified
  source 1..50: mol_type = unassigned DNA; note = target_f15bd80
  misc_feature 1..23: note = LF
  misc_feature 24..25: note = Core
  misc_feature 26..50: note = RF
atctttctgtgagttccgtgagttctgtgtgccattattaattatctcac

SEQ ID NO: 29811 - DNA, 50 bp, unidentified
  source 1..50: mol_type = unassigned DNA; note = target_f166b2e
  misc_feature 1..24: note = LF
  misc_feature 25: note = Core
  misc_feature 26..50: note = RF
tttttctttgccataaaatgtcctcttttattaattcatgatggaatctt

SEQ ID NO: 29812 - DNA, 50 bp, unidentified
  source 1..50: mol_type = unassigned DNA; note = target_f174fbb
  misc_feature 1..21: note = LF
  misc_feature 22..25: note = Core
  misc_feature 26..50: note = RF
gttgaaaaaaattttctaaaacttagatatagtaagcattactcagtagt

SEQ ID NO: 29813 - DNA, 50 bp, unidentified
  source 1..50: mol_type = unassigned DNA; note = target_f176ab6
  misc_feature 1..24: note = LF
  misc_feature 25: note = Core
  misc_feature 26..50: note = RF
tcctattaattttgagcgtataacgcccgcttaagttatttatgtggtta

SEQ ID NO: 29814 - DNA, 50 bp, unidentified
  source 1..50: mol_type = unassigned DNA; note = target_f1771e0
  misc_feature 1..24: note = LF
  misc_feature 25: note = Core
  misc_feature 26..50: note = RF
cacagtgaaaagtgctatggcgatttctcaacaataatcctgtgatcacc

SEQ ID NO: 29815 - DNA, 50 bp, unidentified
  source 1..50: mol_type = unassigned DNA; note = target_f180ad8
  misc_feature 1..24: note = LF
  misc_feature 25: note = Core
  misc_feature 26..50: note = RF
aggtcgtgtgggcggaatgaccgcttggggtcaaactctgccgtctcggg

SEQ ID NO: 29816 - DNA, 50 bp, unidentified
  source 1..50: mol_type = unassigned DNA; note = target_f18ad75
  misc_feature 1..23: note = LF
  misc_feature 24..25: note = Core
  misc_feature 26..50: note = RF
cgcccgcttcgcggctaaagccgctcccacaggtatggcgcgggtccagg

SEQ ID NO: 29817 - DNA, 50 bp, unidentified
  source 1..50: mol_type = unassigned DNA; note = target_f18e2b2
  misc_feature 1..24: note = LF
  misc_feature 25: note = Core
  misc_feature 26..50: note = RF
cctggccgagcacttcgatgcttttctttgctggtagtcataaacacagt

SEQ ID NO: 29818 - DNA, 50 bp, unidentified
  source 1..50: mol_type = unassigned DNA; note = target_f18f713
  misc_feature 1..23: note = LF
  misc_feature 24..25: note = Core
  misc_feature 26..50: note = RF
agccaagaagccggctttccacccttcccacaccccttggaaatccctgc

SEQ ID NO: 29819 - DNA, 50 bp, unidentified
  source 1..50: mol_type = unassigned DNA; note = target_f192aab
  misc_feature 1..23: note = LF
  misc_feature 24..25: note = Core
  misc_feature 26..50: note = RF
ttccacagcttagcgtgctttatttccgttttctgagacgaccacagatc

SEQ ID NO: 29820 - DNA, 50 bp, unidentified
  source 1..50: mol_type = unassigned DNA; note = target_f19955c
  misc_feature 1..23: note = LF
  misc_feature 24..25: note = Core
  misc_feature 26..50: note = RF
gcacggagatgttcatggaagtcctttcaggacgccgagttcggctgcgg

SEQ ID NO: 29821 - DNA, 50 bp, unidentified
  source 1..50: mol_type = unassigned DNA; note = target_f19a0fc
  misc_feature 1..22: note = LF
  misc_feature 23..25: note = Core
  misc_feature 26..50: note = RF
tcgcaccgggttttccccacggagacacaacccatgtccacatcgtttgt

SEQ ID NO: 29822 - DNA, 50 bp, unidentified
  source 1..50: mol_type = unassigned DNA; note = target_f1aecba
  misc_feature 1..23: note = LF
  misc_feature 24..25: note = Core
  misc_feature 26..50: note = RF
gattttaggaatggccaaaagcagaccttgaggcccgggttcctgcaaca

SEQ ID NO: 29823 - DNA, 50 bp, unidentified
  source 1..50: mol_type = unassigned DNA; note = target_f1b3abf
  misc_feature 1..24: note = LF
  misc_feature 25: note = Core
  misc_feature 26..50: note = RF
ctgatactacttttttctccaaagcggacgctggtcaagaggcaataatg

SEQ ID NO: 29824 - DNA, 50 bp, unidentified
  source 1..50: mol_type = unassigned DNA; note = target_f1b754d
  misc_feature 1..23: note = LF
  misc_feature 24..25: note = Core
  misc_feature 26..50: note = RF
cctatattcatgaacttctgttcctttccagcggacatagctgcctgcaa

SEQ ID NO: 29825 - DNA, 50 bp, unidentified
  source 1..50: mol_type = unassigned DNA; note = target_f1d50e5
  misc_feature 1..23: note = LF
  misc_feature 24..25: note = Core
  misc_feature 26..50: note = RF
ggttgcgcttcgctccacccatcctacgtcttcaggcagcgttcccatcg

SEQ ID NO: 29826 - DNA, 50 bp, unidentified
  source 1..50: mol_type = unassigned DNA; note = target_f1d8455
  misc_feature 1..23: note = LF
  misc_feature 24..25: note = Core
  misc_feature 26..50: note = RF
tgctctcactctcataatgcctcctatccaaatcttcccgtaatatagtc

SEQ ID NO: 29827 - DNA, 50 bp, unidentified
  source 1..50: mol_type = unassigned DNA; note = target_f1dfd00
  misc_feature 1..23: note = LF
  misc_feature 24..25: note = Core
  misc_feature 26..50: note = RF
caccgagtggtggggcaagagcgtttgcttacttttgcgcttttcaaaag

SEQ ID NO: 29828 - DNA, 50 bp, unidentified
  source 1..50: mol_type = unassigned DNA; note = target_f1e4359
  misc_feature 1..24: note = LF
  misc_feature 25: note = Core
  misc_feature 26..50: note = RF
gcacacaccgcgacacatatctgccgatctcgcgcaccctgcgaatacgc

SEQ ID NO: 29829 - DNA, 50 bp, unidentified
  source 1..50: mol_type = unassigned DNA; note = target_f1e8b8a
  misc_feature 1..22: note = LF
  misc_feature 23..25: note = Core
  misc_feature 26..50: note = RF
gcagcctccccaaaagccaccttgaatcagaacttgccccaattgggaat

SEQ ID NO: 29830 - DNA, 50 bp, unidentified
  source 1..50: mol_type = unassigned DNA; note = target_f1eab2e
  misc_feature 1..23: note = LF
  misc_feature 24..25: note = Core
  misc_feature 26..50: note = RF
tgctcggcggcgatcagcgtctttttttgtgcgacagcttctcggcatga

SEQ ID NO: 29831 - DNA, 50 bp, unidentified
  source 1..50: mol_type = unassigned DNA; note = target_f1eea47
  misc_feature 1..23: note = LF
  misc_feature 24..25: note = Core
  misc_feature 26..50: note = RF
cgtcagtttcatttaaaattctccttgcataagcagtaatctgtttgtga

SEQ ID NO: 29832 - DNA, 50 bp, unidentified
  source 1..50: mol_type = unassigned DNA; note = target_f1f06b8
  misc_feature 1..23: note = LF
  misc_feature 24..25: note = Core
  misc_feature 26..50: note = RF
ttctcttaatcactatgcttcacctgccttttccaatgctttcaggagag

SEQ ID NO: 29833 - DNA, 50 bp, unidentified
  source 1..50: mol_type = unassigned DNA; note = target_f1f882d
  misc_feature 1..23: note = LF
  misc_feature 24..25: note = Core
  misc_feature 26..50: note = RF
ataaaatactccaaagctttatcataatcgcttagaaattaatttttggc

SEQ ID NO: 29834 - DNA, 50 bp, unidentified
  source 1..50: mol_type = unassigned DNA; note = target_f204321
  misc_feature 1..23: note = LF
  misc_feature 24..25: note = Core
  misc_feature 26..50: note = RF
cctctccctagcgtatggagtggtgttcgacgaagtcaatctttttaggt

SEQ ID NO: 29835 - DNA, 50 bp, unidentified
  source 1..50: mol_type = unassigned DNA; note = target_f204c53
  misc_feature 1..23: note = LF
  misc_feature 24..25: note = Core
  misc_feature 26..50: note = RF
aaaaaggtgatgtgattgcattttacggctccttagaaaatggttcgatt

SEQ ID NO: 29836 - DNA, 50 bp, unidentified
  source 1..50: mol_type = unassigned DNA; note = target_f20ed05
  misc_feature 1..23: note = LF
  misc_feature 24..25: note = Core
  misc_feature 26..50: note = RF
acacgagcaagccgcggccaagcctacaaggacgtacttgcggcgtcccc

SEQ ID NO: 29837 - DNA, 50 bp, unidentified
  source 1..50: mol_type = unassigned DNA; note = target_f21225e
  misc_feature 1..23: note = LF
  misc_feature 24..25: note = Core
  misc_feature 26..50: note = RF
cttcgccaaacccctccctgtggtgggtcccggccttcgccgggacgacg

SEQ ID NO: 29838 - DNA, 50 bp, unidentified
  source 1..50: mol_type = unassigned DNA; note = target_f21bd6d
  misc_feature 1..24: note = LF
  misc_feature 25: note = Core
  misc_feature 26..50: note = RF
cgagcgtagccgtcctcagcgcggcatgaccggatggggcggcccgggga

SEQ ID NO: 29839 - DNA, 50 bp, unidentified
  source 1..50: mol_type = unassigned DNA; note = target_f21d940
  misc_feature 1..23: note = LF
  misc_feature 24..25: note = Core
  misc_feature 26..50: note = RF
cgtcgctcgtatcgttgcatgtttgcgtcagaacgagatgcagctcggcg

SEQ ID NO: 29840 - DNA, 50 bp, unidentified
  source 1..50: mol_type = unassigned DNA; note = target_f221eaa
  misc_feature 1..24: note = LF
  misc_feature 25: note = Core
  misc_feature 26..50: note = RF
tagcgggtaggcatacgactgtgttatgactagatcaaagcaagaagtgg

SEQ ID NO: 29841 - DNA, 50 bp, unidentified
  source 1..50: mol_type = unassigned DNA; note = target_f22619b
  misc_feature 1..20: note = LF
  misc_feature 21..25: note = Core
  misc_feature 26..50: note = RF
ccctgcgggccgcgccgccgctcacgaagcccctccgtcgctgcgcggga

SEQ ID NO: 29842 - DNA, 50 bp, unidentified
  source 1..50: mol_type = unassigned DNA; note = target_f22b086
  misc_feature 1..21: note = LF
  misc_feature 22..25: note = Core
  misc_feature 26..50: note = RF
atatacctccactataattatatcaaaaaagaatctaatttagattctca

SEQ ID NO: 29843 - DNA, 50 bp, unidentified
  source 1..50: mol_type = unassigned DNA; note = target_f22fac2
  misc_feature 1..23: note = LF
  misc_feature 24..25: note = Core
  misc_feature 26..50: note = RF
acaggaaatcagcgcctcttcccctcttctctggcatgaatgcgcatgtt

SEQ ID NO: 29844 - DNA, 50 bp, unidentified
  source 1..50: mol_type = unassigned DNA; note = target_f23c3ec
  misc_feature 1..24: note = LF
  misc_feature 25: note = Core
  misc_feature 26..50: note = RF
atgcccagccggctcgggccgcccccccccgcaaggcaccacgatcgatc

SEQ ID NO: 29845 - DNA, 50 bp, unidentified
  source 1..50: mol_type = unassigned DNA; note = target_f240c13
  misc_feature 1..23: note = LF
  misc_feature 24..25: note = Core
  misc_feature 26..50: note = RF
tcgcgaaagatacgcccaccatcctgtcacgtcgcaggaggcttggaatc

SEQ ID NO: 29846 - DNA, 50 bp, unidentified
  source 1..50: mol_type = unassigned DNA; note = target_f24179f
  misc_feature 1..24: note = LF
  misc_feature 25: note = Core
  misc_feature 26..50: note = RF
gaggttgaacggccagaaatgacccaaagcggaagttcgctggaagcgca

SEQ ID NO: 29847 - DNA, 50 bp, unidentified
  source 1..50: mol_type = unassigned DNA; note = target_f241b76
  misc_feature 1..23: note = LF
  misc_feature 24..25: note = Core
  misc_feature 26..50: note = RF
attcttcggctgatgtcacggcatggatcccagggtctgcgccgcgtcgc

SEQ ID NO: 29848 - DNA, 50 bp, unidentified
  source 1..50: mol_type = unassigned DNA; note = target_f2435ba
  misc_feature 1..23: note = LF
  misc_feature 24..25: note = Core
  misc_feature 26..50: note = RF
tatagccgcttcatgcctcccccccccctcatcacaacacaaaaataaaa

SEQ ID NO: 29849 - DNA, 50 bp, unidentified
  source 1..50: mol_type = unassigned DNA; note = target_f24e8ee
  misc_feature 1..23: note = LF
  misc_feature 24..25: note = Core
  misc_feature 26..50: note = RF
cgatggagccgcctcaacccaacctacgatctagccccctctccctcagg

SEQ ID NO: 29850 - DNA, 50 bp, unidentified
  source 1..50: mol_type = unassigned DNA; note = target_f253f4e
  misc_feature 1..23: note = LF
  misc_feature 24..25: note = Core
  misc_feature 26..50: note = RF
gacgatgttgaagcctactgacctgccactgaactttcatccagcggcaa

SEQ ID NO: 29851 - DNA, 50 bp, unidentified
  source 1..50: mol_type = unassigned DNA; note = target_f2550c7
  misc_feature 1..22: note = LF
  misc_feature 23..25: note = Core
  misc_feature 26..50: note = RF
caatttcaactacaaattactatttatcatcattatctatcaaatttttc

SEQ ID NO: 29852 - DNA, 50 bp, unidentified
  source 1..50: mol_type = unassigned DNA; note = target_f2579b2
  misc_feature 1..24: note = LF
  misc_feature 25: note = Core
  misc_feature 26..50: note = RF
tttctcctctagttcaataatacgttgttggggactttttggcattggat

SEQ ID NO: 29853 - DNA, 50 bp, unidentified
  source 1..50: mol_type = unassigned DNA; note = target_f25807e
  misc_feature 1..23: note = LF
  misc_feature 24..25: note = Core
  misc_feature 26..50: note = RF
catggtcggtgatatatctatcattcagaagtaactccacagcgaattga

SEQ ID NO: 29854 - DNA, 50 bp, unidentified
  source 1..50: mol_type = unassigned DNA; note = target_f25ee87
  misc_feature 1..24: note = LF
  misc_feature 25: note = Core
  misc_feature 26..50: note = RF
ggttgcacccgcgcgtgtaaccgccgttctgcgcggttcctgaacgtgga

SEQ ID NO: 29855 - DNA, 50 bp, unidentified
  source 1..50: mol_type = unassigned DNA; note = target_f265a87
  misc_feature 1..23: note = LF
  misc_feature 24..25: note = Core
  misc_feature 26..50: note = RF
aaccagcataacgaatgatctcactttcaacatatgtaaagcttttttaa

SEQ ID NO: 29856 - DNA, 50 bp, unidentified
  source 1..50: mol_type = unassigned DNA; note = target_f268f40
  misc_feature 1..23: note = LF
  misc_feature 24..25: note = Core
  misc_feature 26..50: note = RF
tcaatgtccgctgttactccaatagcggacaaacgcaggtgtttgggatc

SEQ ID NO: 29857 - DNA, 50 bp, unidentified
  source 1..50: mol_type = unassigned DNA; note = target_f27df07
  misc_feature 1..23: note = LF
  misc_feature 24..25: note = Core
  misc_feature 26..50: note = RF
tggaccaagcctaattcccgataagtcgggatcggatgtgctcactttgg

SEQ ID NO: 29858 - DNA, 50 bp, unidentified
  source 1..50: mol_type = unassigned DNA; note = target_f283809
  misc_feature 1..23: note = LF
  misc_feature 24..25: note = Core
  misc_feature 26..50: note = RF
tgagtccatccgctcgggaaatgctctaaaaagactcgatgcggatcatc

SEQ ID NO: 29859 - DNA, 50 bp, unidentified
  source 1..50: mol_type = unassigned DNA; note = target_f2866d6
  misc_feature 1..23: note = LF
  misc_feature 24..25: note = Core
  misc_feature 26..50: note = RF
tccgtcggggatgtaaccccgacctacggcgcttccgatcaacccttcag

SEQ ID NO: 29860 - DNA, 50 bp, unidentified
  source 1..50: mol_type = unassigned DNA; note = target_f288cb8
  misc_feature 1..24: note = LF
  misc_feature 25: note = Core
  misc_feature 26..50: note = RF
atcagggccggaaaattccggcccttttatcgtcagtcccagctcaaaac

SEQ ID NO: 29861 - DNA, 50 bp, unidentified
  source 1..50: mol_type = unassigned DNA; note = target_f28c32d
  misc_feature 1..22: note = LF
  misc_feature 23..25: note = Core
  misc_feature 26..50: note = RF
tggggaatgaccgctaacgttttgcagctaaacgcaggcagggcttaaac

SEQ ID NO: 29862 - DNA, 50 bp, unidentified
  source 1..50: mol_type = unassigned DNA; note = target_f28dbab
  misc_feature 1..23: note = LF
  misc_feature 24..25: note = Core
  misc_feature 26..50: note = RF
gtcagatacataggcagttcctccttatgaataatcagttacctgcgcag

SEQ ID NO: 29863 - DNA, 50 bp, unidentified
  source 1..50: mol_type = unassigned DNA; note = target_f2a0662
  misc_feature 1..21: note = LF
  misc_feature 22..25: note = Core
  misc_feature 26..50: note = RF
gttgctaccaacttgccctgcttgctgcgattgcaaactcgaaaacttcc

SEQ ID NO: 29864 - DNA, 50 bp, unidentified
  source 1..50: mol_type = unassigned DNA; note = target_f2a2ace
  misc_feature 1..23: note = LF
  misc_feature 24..25: note = Core
  misc_feature 26..50: note = RF
gactaaagccaagatgattatgattttttgacgaccatttacgtgcccaa

SEQ ID NO: 29865 - DNA, 50 bp, unidentified
  source 1..50: mol_type = unassigned DNA; note = target_f2a4d49
  misc_feature 1..23: note = LF
  misc_feature 24..25: note = Core
  misc_feature 26..50: note = RF
gtattgtctttccgatcacactccttcttttaaaatctgtgaacagttaa

SEQ ID NO: 29866 - DNA, 50 bp, unidentified
  source 1..50: mol_type = unassigned DNA; note = target_f2aa895
  misc_feature 1..23: note = LF
  misc_feature 24..25: note = Core
  misc_feature 26..50: note = RF
gttgcagcgcatgagtccggatttggcccttctgcgacatttcgcggcgt

SEQ ID NO: 29867 - DNA, 50 bp, unidentified
  source 1..50: mol_type = unassigned DNA; note = target_f2b0945
  misc_feature 1..22: note = LF
  misc_feature 23..25: note = Core
  misc_feature 26..50: note = RF
gcccccaatgaagggttgcagatctgttgcgtcgggtctccggcaccagg

SEQ ID NO: 29868 - DNA, 50 bp, unidentified
  source 1..50: mol_type = unassigned DNA; note = target_f2b2148
  misc_feature 1..22: note = LF
  misc_feature 23..25: note = Core
  misc_feature 26..50: note = RF
tgacaatgggcgtggttatctcctttcgttcgcaacggcggcaggaataa

SEQ ID NO: 29869 - DNA, 50 bp, unidentified
  source 1..50: mol_type = unassigned DNA; note = target_f2b7bf2
  misc_feature 1..22: note = LF
  misc_feature 23..25: note = Core
  misc_feature 26..50: note = RF
cttgcgtgcggtctttatttaggtttattttctaaaagttctcaactttc

SEQ ID NO: 29870 - DNA, 50 bp, unidentified
  source 1..50: mol_type = unassigned DNA; note = target_f2bd268
  misc_feature 1..23: note = LF
  misc_feature 24..25: note = Core
  misc_feature 26..50: note = RF
atagcacaatgatccgccccagcagttttggacaccgagttaagtgagta

SEQ ID NO: 29871 - DNA, 50 bp, unidentified
  source 1..50: mol_type = unassigned DNA; note = target_f2c2b18
  misc_feature 1..24: note = LF
  misc_feature 25: note = Core
  misc_feature 26..50: note = RF
tgaacgtctgcttctaggcgaaagcggtcattgggacgctagctcaaagt

SEQ ID NO: 29872 - DNA, 50 bp, unidentified
  source 1..50: mol_type = unassigned DNA; note = target_f2cedca
  misc_feature 1..23: note = LF
  misc_feature 24..25: note = Core
  misc_feature 26..50: note = RF
tcctgctcgcttgccaccagtgtttttgaaggtcttgccttctgcgcgca

SEQ ID NO: 29873 - DNA, 50 bp, unidentified
  source 1..50: mol_type = unassigned DNA; note = target_f2e7d86
  misc_feature 1..24: note = LF
  misc_feature 25: note = Core
  misc_feature 26..50: note = RF
tctggaaattggaggactacaaagcagccactcgtaaggagcaagttttt

SEQ ID NO: 29874 - DNA, 50 bp, unidentified
  source 1..50: mol_type = unassigned DNA; note = target_f2eebde
  misc_feature 1..21: note = LF
  misc_feature 22..25: note = Core
  misc_feature 26..50: note = RF
aatagttttcttttcatattatcaccaaaatcattatataaaaaaaagat

SEQ ID NO: 29875 - DNA, 50 bp, unidentified
  source 1..50: mol_type = unassigned DNA; note = target_f2f6ee6
  misc_feature 1..23: note = LF
  misc_feature 24..25: note = Core
  misc_feature 26..50: note = RF
gaagtgacgcttgatcctggagcctctgcggacactccggccagaagaca

SEQ ID NO: 29876 - DNA, 50 bp, unidentified
  source 1..50: mol_type = unassigned DNA; note = target_f2f902c
  misc_feature 1..23: note = LF
  misc_feature 24..25: note = Core
  misc_feature 26..50: note = RF
ctgcagccgcgcctttgcccaccctacaagtctgacggcgaaggagtgtg

SEQ ID NO: 29877 - DNA, 50 bp, unidentified
  source 1..50: mol_type = unassigned DNA; note = target_f2fbcf8
  misc_feature 1..22: note = LF
  misc_feature 23..25: note = Core
  misc_feature 26..50: note = RF
accctaagacactggattcccgctttcgcgggaatgacgatctttgtgtg

SEQ ID NO: 29878 - DNA, 50 bp, unidentified
  source 1..50: mol_type = unassigned DNA; note = target_f2ffdce
  misc_feature 1..23: note = LF
  misc_feature 24..25: note = Core
  misc_feature 26..50: note = RF
gcagaccgaggagattgatgttgctctagaattatacgtgtagagcatcc

SEQ ID NO: 29879 - DNA, 50 bp, unidentified
  source 1..50: mol_type = unassigned DNA; note = target_f30137a
  misc_feature 1..24: note = LF
  misc_feature 25: note = Core
  misc_feature 26..50: note = RF
tccacgccgttcgtgtctctcccccccgtgaacggcgcggagccggcggg

SEQ ID NO: 29880 - DNA, 50 bp, unidentified
  source 1..50: mol_type = unassigned DNA; note = target_f301f9a
  misc_feature 1..23: note = LF
  misc_feature 24..25: note = Core
  misc_feature 26..50: note = RF
ttcacaattacaaacaccaccttgtctattattacagaaaagtgcctact

SEQ ID NO: 29881 - DNA, 50 bp, unidentified
  source 1..50: mol_type = unassigned DNA; note = target_f308b3f
  misc_feature 1..24: note = LF
  misc_feature 25: note = Core
  misc_feature 26..50: note = RF
gatagccataattactgttcctccttgtcgtttctgtcgtgaagctgttc

SEQ ID NO: 29882 - DNA, 50 bp, unidentified
  source 1..50: mol_type = unassigned DNA; note = target_f314d84
  misc_feature 1..24: note = LF
  misc_feature 25: note = Core
  misc_feature 26..50: note = RF
tgtcaaagtgcatcacctcgatacttccgcgttgccggtaatacggccac

SEQ ID NO: 29883 - DNA, 50 bp, unidentified
  source 1..50: mol_type = unassigned DNA; note = target_f315cd2
  misc_feature 1..22: note = LF
  misc_feature 23..25: note = Core
  misc_feature 26..50: note = RF
caccgcatttgcgagcaagcccgctcccacatttggatcgagaaaaaccg

SEQ ID NO: 29884 - DNA, 50 bp, unidentified
  source 1..50: mol_type = unassigned DNA; note = target_f331988
  misc_feature 1..23: note = LF
  misc_feature 24..25: note = Core
  misc_feature 26..50: note = RF
caatggccgctcagggtcgggagcggacattgggatcgacacacaggcgc

SEQ ID NO: 29885 - DNA, 50 bp, unidentified
  source 1..50: mol_type = unassigned DNA; note = target_f338bb7
  misc_feature 1..24: note = LF
  misc_feature 25: note = Core
  misc_feature 26..50: note = RF
agaagcagcaattaattatatacgttgttgtaaaacgtttttcattgaga

SEQ ID NO: 29886 - DNA, 50 bp, unidentified
  source 1..50: mol_type = unassigned DNA; note = target_f3451ce
  misc_feature 1..21: note = LF
  misc_feature 22..25: note = Core
  misc_feature 26..50: note = RF
aaaaggccggtatccgctgctatccctggcgcgacagagggttttgctta

SEQ ID NO: 29887 - DNA, 50 bp, unidentified
  source 1..50: mol_type = unassigned DNA; note = target_f352640
  misc_feature 1..24: note = LF
  misc_feature 25: note = Core
  misc_feature 26..50: note = RF
aaaaatactacctcgacaataaagagtttcactctgacggagcaaacgca

SEQ ID NO: 29888 - DNA, 50 bp, unidentified
  source 1..50: mol_type = unassigned DNA; note = target_f36a092
  misc_feature 1..22: note = LF
  misc_feature 23..25: note = Core
  misc_feature 26..50: note = RF
cggtagccaacccgcgcatcagagattgttccacctcattcttctgaccc

SEQ ID NO: 29889 - DNA, 50 bp, unidentified
  source 1..50: mol_type = unassigned DNA; note = target_f36fabc
  misc_feature 1..24: note = LF
  misc_feature 25: note = Core
  misc_feature 26..50: note = RF
aatttgtaactcatacgtaaaaatctttctgcaatttttgtcaaaataag

SEQ ID NO: 29890 - DNA, 50 bp, unidentified
  source 1..50: mol_type = unassigned DNA; note = target_f376c9d
  misc_feature 1..21: note = LF
  misc_feature 22..25: note = Core
  misc_feature 26..50: note = RF
tagataacaataacattcaactcacctcataacaacaatttaaaatcgta

SEQ ID NO: 29891 - DNA, 50 bp, unidentified
  source 1..50: mol_type = unassigned DNA; note = target_f387e1f
  misc_feature 1..24: note = LF
  misc_feature 25: note = Core
  misc_feature 26..50: note = RF
gtagcggtattcggcgctaatgaaagctatttaggtgtgccgctcatggt

SEQ ID NO: 29892 - DNA, 50 bp, unidentified; identical to SEQ ID NO: 23967
  source 1..50: mol_type = unassigned DNA; note = target_f38d132
  misc_feature 1..23: note = LF
  misc_feature 24..25: note = Core
  misc_feature 26..50: note = RF

SEQ ID NO: 29893 - DNA, 50 bp, unidentified
  source 1..50: mol_type = unassigned DNA; note = target_f3925db
  misc_feature 1..24: note = LF
  misc_feature 25: note = Core
  misc_feature 26..50: note = RF
cgttcttcctgattcatatcttcacctcctgactaccgcatctgcaggac

SEQ ID NO: 29894 - DNA, 50 bp, unidentified
  source 1..50: mol_type = unassigned DNA; note = target_f395766
  misc_feature 1..23: note = LF
  misc_feature 24..25: note = Core
  misc_feature 26..50: note = RF
aatcgatccgccgaagaaaatggtggggccccgccgtccttgacgcggct

SEQ ID NO: 29895 - DNA, 50 bp, unidentified
  source 1..50: mol_type = unassigned DNA; note = target_f3988b0
  misc_feature 1..21: note = LF
  misc_feature 22..25: note = Core
  misc_feature 26..50: note = RF
gcccttttaactgtcatataatcaccgccctttatagttcttctgctgcc

SEQ ID NO: 29896 - DNA, 50 bp, unidentified
  source 1..50: mol_type = unassigned DNA; note = target_f3990fe
  misc_feature 1..23: note = LF
  misc_feature 24..25: note = Core
  misc_feature 26..50: note = RF
cgggcataaacagcatgcccgacctacgcggctagcaaataaattgaaat

SEQ ID NO: 29897 - DNA, 50 bp, unidentified
  source 1..50: mol_type = unassigned DNA; note = target_f3a19d8
  misc_feature 1..23: note = LF
  misc_feature 24..25: note = Core
  misc_feature 26..50: note = RF
ccgctgttgcgagtcgccgatcctggattgctttctcggtgaaagatata

SEQ ID NO: 29898 - DNA, 50 bp, unidentified
  source 1..50: mol_type = unassigned DNA; note = target_f3a3c46
  misc_feature 1..23: note = LF
  misc_feature 24..25: note = Core
  misc_feature 26..50: note = RF
ctcacttttctcatttaatagctgttatacaatattttcattttccataa

SEQ ID NO: 29899 - DNA, 50 bp, unidentified
  source 1..50: mol_type = unassigned DNA; note = target_f3a497d
  misc_feature 1..24: note = LF
  misc_feature 25: note = Core
  misc_feature 26..50: note = RF
cgcggcccctgcgagatcgtaaaccgttcttacttccgatcgggcctggc

SEQ ID NO: 29900 - DNA, 50 bp, unidentified
  source 1..50: mol_type = unassigned DNA; note = target_f3a4fc4
  misc_feature 1..23: note = LF
  misc_feature 24..25: note = Core
  misc_feature 26..50: note = RF
atttcgacaaggacgctgcatggatgtagcttattagagaatgcaggagc

SEQ ID NO: 29901 - DNA, 50 bp, unidentified
  source 1..50: mol_type = unassigned DNA; note = target_f3b1f94
  misc_feature 1..24: note = LF
  misc_feature 25: note = Core
  misc_feature 26..50: note = RF
gacctcgcacccgatcgtaagtgccgtacgcgagcggctattcatcatcc

SEQ ID NO: 29902 - DNA, 50 bp, unidentified
  source 1..50: mol_type = unassigned DNA; note = target_f3b661e
  misc_feature 1..23: note = LF
  misc_feature 24..25: note = Core
  misc_feature 26..50: note = RF
actcaagaatttataaattaggttgggatgacgcctacatgggtaatcca

SEQ ID NO: 29903 - DNA, 50 bp, unidentified
  source 1..50: mol_type = unassigned DNA; note = target_f3be863
  misc_feature 1..23: note = LF
  misc_feature 24..25: note = Core
  misc_feature 26..50: note = RF
tctcagccatgattttcaatctcctttccaaatgtgtgatttctgctgtg

SEQ ID NO: 29904 - DNA, 50 bp, unidentified
  source 1..50: mol_type = unassigned DNA; note = target_f3c2b9d
  misc_feature 1..23: note = LF
  misc_feature 24..25: note = Core
  misc_feature 26..50: note = RF
gtcgctatcgctcctcgcacctcagggagcacaagattcgcaactcagcg

SEQ ID NO: 29905 - DNA, 50 bp, unidentified
  source 1..50: mol_type = unassigned DNA; note = target_f3c4a69
  misc_feature 1..23: note = LF
  misc_feature 24..25: note = Core
  misc_feature 26..50: note = RF
caggccgggacccatttccgccatgggcaccggccccctgttcgctgcca

SEQ ID NO: 29906 - DNA, 50 bp, unidentified
  source 1..50: mol_type = unassigned DNA; note = target_f3cb623
  misc_feature 1..23: note = LF
  misc_feature 24..25: note = Core
  misc_feature 26..50: note = RF
ggttcccacttttcctggaaccgctctagttgagcaatgtgctgcgctga

SEQ ID NO: 29907 - DNA, 50 bp, unidentified
  source 1..50: mol_type = unassigned DNA; note = target_f3cddb9
  misc_feature 1..24: note = LF
  misc_feature 25: note = Core
  misc_feature 26..50: note = RF
agcctgccctaccaaaaacataacgccagcttagcggcgccacgtcagtg

SEQ ID NO: 29908 - DNA, 50 bp, unidentified
  source 1..50: mol_type = unassigned DNA; note = target_f3d4602
  misc_feature 1..23: note = LF
  misc_feature 24..25: note = Core
  misc_feature 26..50: note = RF
ctcaagctgaggttggaaaaggctcactgacgccggctacacggtgcacg

SEQ ID NO: 29909 - DNA, 50 bp, unidentified
  source 1..50: mol_type = unassigned DNA; note = target_f3dd686
  misc_feature 1..22: note = LF
  misc_feature 23..25: note = Core
  misc_feature 26..50: note = RF
atttactcatagaacatacctccttatctattgtttgttctatctaaata

SEQ ID NO: 29910 - DNA, 50 bp, unidentified
  source 1..50: mol_type = unassigned DNA; note = target_f3df8d8
  misc_feature 1..23: note = LF
  misc_feature 24..25: note = Core
  misc_feature 26..50: note = RF
tgcctgcttcgcgggtaaacccgctcccacagggattgcgcaagtcttga

SEQ ID NO: 29911 - DNA, 50 bp, unidentified
  source 1..50: mol_type = unassigned DNA; note = target_f3e1ac4
  misc_feature 1..24: note = LF
  misc_feature 25: note = Core
  misc_feature 26..50: note = RF
acttttcaggcgctacgcaggattacttccgtattgccggtaatccgccc

SEQ ID NO: 29912 - DNA, 50 bp, unidentified
  source 1..50: mol_type = unassigned DNA; note = target_f3e96a0
  misc_feature 1..23: note = LF
  misc_feature 24..25: note = Core
  misc_feature 26..50: note = RF
cgcgtgagagcggcgaccggatgtgaggttgtataggcccgagaaaccgg

SEQ ID NO: 29913 - DNA, 50 bp, unidentified
  source 1..50: mol_type = unassigned DNA; note = target_f3eb5ff
  misc_feature 1..24: note = LF
  misc_feature 25: note = Core
  misc_feature 26..50: note = RF
agcgataggcatgggctatagccattgttgtagcacgttttattcttttc

SEQ ID NO: 29914 - DNA, 50 bp, unidentified
  source 1..50: mol_type = unassigned DNA; note = target_f3ef28f
  misc_feature 1..23: note = LF
  misc_feature 24..25: note = Core
  misc_feature 26..50: note = RF
cgcggggcgtgatgcgccgtcggtagggtcggttcccaaacgactgccgg

SEQ ID NO: 29915 - DNA, 50 bp, unidentified
  source 1..50: mol_type = unassigned DNA; note = target_f3f9d9e
  misc_feature 1..23: note = LF
  misc_feature 24..25: note = Core
  misc_feature 26..50: note = RF
tattgataacaaatcctttaatggtttataattgtctatagccaacttta

SEQ ID NO: 29916 - DNA, 50 bp, unidentified
  source 1..50: mol_type = unassigned DNA; note = target_f3fa0fb
  misc_feature 1..24: note = LF
  misc_feature 25: note = Core
  misc_feature 26..50: note = RF
agagcaccggctcccacccagtttttctcggaggtttaaacggaagcccc

SEQ ID NO: 29917 - DNA, 50 bp, unidentified
  source 1..50: mol_type = unassigned DNA; note = target_f401054
  misc_feature 1..23: note = LF
  misc_feature 24..25: note = Core
  misc_feature 26..50: note = RF
cattatcattttatattcatttccttttatgtgcataaatgattgataaa

SEQ ID NO: 29918 - DNA, 50 bp, unidentified
  source 1..50: mol_type = unassigned DNA; note = target_f40bc8e
  misc_feature 1..24: note = LF
  misc_feature 25: note = Core
  misc_feature 26..50: note = RF
ttccgccgtatttggctttccagttgtagtaagtggcttcagagataccg

SEQ ID NO: 29919 - DNA, 50 bp, unidentified
  source 1..50: mol_type = unassigned DNA; note = target_f4174f5
  misc_feature 1..22: note = LF
  misc_feature 23..25: note = Core
  misc_feature 26..50: note = RF
tcggtttgcactatctttgtaccattttggaataacatctataaaaatca

SEQ ID NO: 29920 - DNA, 50 bp, unidentified
  source 1..50: mol_type = unassigned DNA; note = target_f418739
  misc_feature 1..24: note = LF
  misc_feature 25: note = Core
  misc_feature 26..50: note = RF
gggctttcgccccttgacggtaagcgtccggccaacccatcttgagaaag

SEQ ID NO: 29921 - DNA, 50 bp, unidentified
  source 1..50: mol_type = unassigned DNA; note = target_f421217
  misc_feature 1..22: note = LF
  misc_feature 23..25: note = Core
  misc_feature 26..50: note = RF
cttagaaattatgagagggctatttttgtttgcaaaaaatacaaaatctt

SEQ ID NO: 29922 - DNA, 50 bp, unidentified
  source 1..50: mol_type = unassigned DNA; note = target_f43a6cf
  misc_feature 1..22: note = LF
  misc_feature 23..25: note = Core
  misc_feature 26..50: note = RF
aggggcatccaaacatgagaactgacccggcgtttgagtgaacccctcgg

SEQ ID NO: 29923 - DNA, 50 bp, unidentified
  source 1..50: mol_type = unassigned DNA; note = target_f43f9ef
  misc_feature 1..23: note = LF
  misc_feature 24..25: note = Core
  misc_feature 26..50: note = RF
agtccggccaggccgacttaacgtgtcagtacaagcgcggccaccaagcc

SEQ ID NO: 29924 - DNA, 50 bp, unidentified
  source 1..50: mol_type = unassigned DNA; note = target_f440047
  misc_feature 1..24: note = LF
  misc_feature 25: note = Core
  misc_feature 26..50: note = RF
aatcttcgcccttgtcggaattatttccgtattcgcggtaatacgaccgg

SEQ ID NO: 29925 - DNA, 50 bp, unidentified
  source 1..50: mol_type = unassigned DNA; note = target_f446894
  misc_feature 1..22: note = LF
  misc_feature 23..25: note = Core
  misc_feature 26..50: note = RF
cttcgtggcttcgcttctcgcaatgacgggtatcaacatgctctccgcct

SEQ ID NO: 29926 - DNA, 50 bp, unidentified
  source 1..50: mol_type = unassigned DNA; note = target_f446ab2
  misc_feature 1..24: note = LF
  misc_feature 25: note = Core
  misc_feature 26..50: note = RF
cgcaccctgcatctcagatagctgttatccatgataggcggtggatcctg

SEQ ID NO: 29927 - DNA, 50 bp, unidentified
  source 1..50: mol_type = unassigned DNA; note = target_f44c8ba
  misc_feature 1..24: note = LF
  misc_feature 25: note = Core
  misc_feature 26..50: note = RF
acggcaggcggggcgaacttccgcttcgggtcaaacccggtcctccggcg

SEQ ID NO: 29928 - DNA, 50 bp, unidentified
  source 1..50: mol_type = unassigned DNA; note = target_f452e6f
  misc_feature 1..20: note = LF
  misc_feature 21..25: note = Core
  misc_feature 26..50: note = RF
tacaccgttctcttgacacaccccccaggcggatgctcgataatcgcgac

SEQ ID NO: 29929 - DNA, 50 bp, unidentified
  source 1..50: mol_type = unassigned DNA; note = target_f458bf7
  misc_feature 1..23: note = LF
  misc_feature 24..25: note = Core
  misc_feature 26..50: note = RF
ttcttctctctttaccctacgttctaattttttaatatcttctgatgcgg

SEQ ID NO: 29930 - DNA, 50 bp, unidentified
  source 1..50: mol_type = unassigned DNA; note = target_f45b2c8
  misc_feature 1..24: note = LF
  misc_feature 25: note = Core
  misc_feature 26..50: note = RF
cccgccatgcgcgcacagaatgcccgatctggagctggcccgcctctgcc

SEQ ID NO: 29931 - DNA, 50 bp, unidentified
  source 1..50: mol_type = unassigned DNA; note = target_f466069
  misc_feature 1..23: note = LF
  misc_feature 24..25: note = Core
  misc_feature 26..50: note = RF
gggcccaggaggaggcccagtcgcaatccccttacggggctcaatccctt

SEQ ID NO: 29932 - DNA, 50 bp, unidentified
  source 1..50: mol_type = unassigned DNA; note = target_f474d7c
  misc_feature 1..22: note = LF
  misc_feature 23..25: note = Core
  misc_feature 26..50: note = RF
atccgcataggctctagcagtgtgcaatttatacagcatgacccgcaacc

SEQ ID NO: 29933 - DNA, 50 bp, unidentified
  source 1..50: mol_type = unassigned DNA; note = target_f47629e
  misc_feature 1..24: note = LF
  misc_feature 25: note = Core
  misc_feature 26..50: note = RF
aagtggacgttctcatcgccaatctgcacgaacactgatccggtttcggt

SEQ ID NO: 29934 - DNA, 50 bp, unidentified
  source 1..50: mol_type = unassigned DNA; note = target_f485f3d
  misc_feature 1..24: note = LF
  misc_feature 25: note = Core
  misc_feature 26..50: note = RF
cgtgtgcgtgaatgcaagacctgtcaccgcttacaagacctgacacgaga

SEQ ID NO: 29935 - DNA, 50 bp, unidentified
  source 1..50: mol_type = unassigned DNA; note = target_f49a165
  misc_feature 1..23: note = LF
  misc_feature 24..25: note = Core
  misc_feature 26..50: note = RF
aaagcaattgttgctccttccgatggtatgaagcaaacgacgaatcgagt

SEQ ID NO: 29936 - DNA, 50 bp, unidentified
  source 1..50: mol_type = unassigned DNA; note = target_f49ec82
  misc_feature 1..22: note = LF
  misc_feature 23..25: note = Core
  misc_feature 26..50: note = RF
ttctttcaatttggacttgactttttgttagcaggtctttccgaaaatag

SEQ ID NO: 29937 - DNA, 50 bp, unidentified
  source 1..50: mol_type = unassigned DNA; note = target_f4ac307
  misc_feature 1..21: note = LF
  misc_feature 22..25: note = Core
  misc_feature 26..50: note = RF
cccggccgcgtacggcgtctccccctcctcctcgctcggcgtgtggtcgt

SEQ ID NO: 29938 - DNA, 50 bp, unidentified
  source 1..50: mol_type = unassigned DNA; note = target_f4cb833
  misc_feature 1..23: note = LF
  misc_feature 24..25: note = Core
  misc_feature 26..50: note = RF
tcctggaaccgccgattctcgactggttccacatcgcgatgaaactacag

SEQ ID NO: 29939 - DNA, 50 bp, unidentified
  source 1..50: mol_type = unassigned DNA; note = target_f4ce3c9
  misc_feature 1..23: note = LF
  misc_feature 24..25: note = Core
  misc_feature 26..50: note = RF
ttcattggagtaacgaacagaatctttgcggatgtggtgaatatggaaac

SEQ ID NO: 29940 - DNA, 50 bp, unidentified
  source 1..50: mol_type = unassigned DNA; note = target_f4d0634
  misc_feature 1..24: note = LF
  misc_feature 25: note = Core
  misc_feature 26..50: note = RF
gcttatgccgcccaaaagcggacatacaacttagcctctacagttcaatt

SEQ ID NO: 29941 - DNA, 50 bp, unidentified
  source 1..50: mol_type = unassigned DNA; note = target_f4d37e1
  misc_feature 1..23: note = LF
  misc_feature 24..25: note = Core
  misc_feature 26..50: note = RF
ccgcacgacaccgcgccacttcctgactctaccgttgttcgttctccggc

SEQ ID NO: 29942 - DNA, 50 bp, unidentified
  source 1..50: mol_type = unassigned DNA; note = target_f4d54fd
  misc_feature 1..23: note = LF
  misc_feature 24..25: note = Core
  misc_feature 26..50: note = RF
agaagaacataagtcatttttaactccttagaatatttgataatacagta

SEQ ID NO: 29943 - DNA, 50 bp, unidentified
  source 1..50: mol_type = unassigned DNA; note = target_f4d7492
  misc_feature 1..22: note = LF
  misc_feature 23..25: note = Core
  misc_feature 26..50: note = RF
atgcgaggtcactccgtggagttgaccccattaaaccggacacgcagcgg

SEQ ID NO: 29944 - DNA, 50 bp, unidentified
  source 1..50: mol_type = unassigned DNA; note = target_f4d9b3d
  misc_feature 1..22: note = LF
  misc_feature 23..25: note = Core
  misc_feature 26..50: note = RF
ttcgtcttgtcattagactctcctttctgaccattactgaggttgatgcc

SEQ ID NO: 29945 - DNA, 50 bp, unidentified
  source 1..50: mol_type = unassigned DNA; note = target_f4db548
  misc_feature 1..23: note = LF
  misc_feature 24..25: note = Core
  misc_feature 26..50: note = RF
gacgacctcaccaccctcttcaccccccctgacgcccgactcagccgagt

SEQ ID NO: 29946 - DNA, 50 bp, unidentified
  source 1..50: mol_type = unassigned DNA; note = target_f4e09b6
  misc_feature 1..23: note = LF
  misc_feature 24..25: note = Core
  misc_feature 26..50: note = RF
agggggcgcttcggacgagaggcctagcttctatcgtcgcggccgtagag

SEQ ID NO: 29947 - DNA, 50 bp, unidentified
  source 1..50: mol_type = unassigned DNA; note = target_f4f69e2
  misc_feature 1..23: note = LF
  misc_feature 24..25: note = Core
  misc_feature 26..50: note = RF
taattcgtagcacgtacagtcccctctccctgtgggagagggttagggtg

SEQ ID NO: 29948 - DNA, 50 bp, unidentified
  source 1..50: mol_type = unassigned DNA; note = target_f4fef07
  misc_feature 1..24: note = LF
  misc_feature 25: note = Core
  misc_feature 26..50: note = RF
ggatcatgtacgcggacgtgccccccccccccccgacttcccgagcaccg

SEQ ID NO: 29949 - DNA, 50 bp, unidentified
  source 1..50: mol_type = unassigned DNA; note = target_f501a13
  misc_feature 1..23: note = LF
  misc_feature 24..25: note = Core
  misc_feature 26..50: note = RF
gtgggagccgcagtgttcgcaacctttctgctcaagttcgcagatgaatg

SEQ ID NO: 29950 - DNA, 50 bp, unidentified
  source 1..50: mol_type = unassigned DNA; note = target_f509086
  misc_feature 1..23: note = LF
  misc_feature 24..25: note = Core
  misc_feature 26..50: note = RF
actgtctgctgctgttgctgctgtgggcatgtggtcaacgcgtcagcgtt

SEQ ID NO: 29951 - DNA, 50 bp, unidentified
  source 1..50: mol_type = unassigned DNA; note = target_f50bd3d
  misc_feature 1..23: note = LF
  misc_feature 24..25: note = Core
  misc_feature 26..50: note = RF
gcgtgcccgaagggccaggggaactgaccggaatcccggccggagcggtt

SEQ ID NO: 29952 - DNA, 50 bp, unidentified
  source 1..50: mol_type = unassigned DNA; note = target_f50dc3b
  misc_feature 1..24: note = LF
  misc_feature 25: note = Core
  misc_feature 26..50: note = RF
agtcgccgaggcgtaccgatgtgccgtttccgagcggggcacccaagtcc

SEQ ID NO: 29953 - DNA, 50 bp, unidentified
  source 1..50: mol_type = unassigned DNA; note = target_f51dc97
  misc_feature 1..24: note = LF
  misc_feature 25: note = Core
  misc_feature 26..50: note = RF
gccgcttcgctgagttttgttagccgctcttagcagcagcgcagctacac

SEQ ID NO: 29954 - DNA, 50 bp, unidentified
  source 1..50: mol_type = unassigned DNA; note = target_f522b5c
  misc_feature 1..23: note = LF
  misc_feature 24..25: note = Core
  misc_feature 26..50: note = RF
tgtcgcgcacctctcttccagattgtcgcgctataccagatccaggccaa

SEQ ID NO: 29955 - DNA, 50 bp, unidentified
  source 1..50: mol_type = unassigned DNA; note = target_f526c80
  misc_feature 1..24: note = LF
  misc_feature 25: note = Core
  misc_feature 26..50: note = RF
cgattacagccagcccgcgtagggcgcaataagcgtagcgcattgcgccg

SEQ ID NO: 29956 - DNA, 50 bp, unidentified
  source 1..50: mol_type = unassigned DNA; note = target_f52d3f6
  misc_feature 1..23: note = LF
  misc_feature 24..25: note = Core
  misc_feature 26..50: note = RF
tggcctcacgtccaggttgtgttagcgattcttagtcgacaaggcgcggg

SEQ ID NO: 29957 - DNA, 50 bp, unidentified
  source 1..50: mol_type = unassigned DNA; note = target_f5317f7
  misc_feature 1..23: note = LF
  misc_feature 24..25: note = Core
  misc_feature 26..50: note = RF
aacgaggaaaaacaagtacgggctggttttatggctttaaacttcatctg

SEQ ID NO: 29958 - DNA, 50 bp, unidentified
  source 1..50: mol_type = unassigned DNA; note = target_f53479e
  misc_feature 1..24: note = LF
  misc_feature 25: note = Core
  misc_feature 26..50: note = RF
ttctaacgctccactttcggacatttcattcacgtgcgtgggtaatctcg

SEQ ID NO: 29959 - DNA, 50 bp, unidentified
  source 1..50: mol_type = unassigned DNA; note = target_f53b030
  misc_feature 1..23: note = LF
  misc_feature 24..25: note = Core
  misc_feature 26..50: note = RF
ggccgcgctgtgctgttcgacgatggatcccggctttcgccgggacgaca

SEQ ID NO: 29960 - DNA, 50 bp, unidentified
  source 1..50: mol_type = unassigned DNA; note = target_f540196
  misc_feature 1..24: note = LF
  misc_feature 25: note = Core
  misc_feature 26..50: note = RF
aaagtgatgcgtcaaaaccttagcgtacgattttttccgtttcgtgagct

SEQ ID NO: 29961 - DNA, 50 bp, unidentified
  source 1..50: mol_type = unassigned DNA; note = target_f5498d8
  misc_feature 1..23: note = LF
  misc_feature 24..25: note = Core
  misc_feature 26..50: note = RF
gcgcaagcgcgcctttgcccaccctacccgatgatccgcacccacgaacg

SEQ ID NO: 29962 - DNA, 50 bp, unidentified
  source 1..50: mol_type = unassigned DNA; note = target_f55baba
  misc_feature 1..23: note = LF
  misc_feature 24..25: note = Core
  misc_feature 26..50: note = RF
gtatggattcgcatggccggacgctcagaactccgggaaggtgcgcgaac

SEQ ID NO: 29963 - DNA, 50 bp, unidentified
  source 1..50: mol_type = unassigned DNA; note = target_f55df5d
  misc_feature 1..24: note = LF
  misc_feature 25: note = Core
  misc_feature 26..50: note = RF
gcgacaggcctcggccggcgaaacttccgtattgccgactttacggcagc

SEQ ID NO: 29964 - DNA, 50 bp, unidentified
  source 1..50: mol_type = unassigned DNA; note = target_f5629cb
  misc_feature 1..24: note = LF
  misc_feature 25: note = Core
  misc_feature 26..50: note = RF
acagctagaacatccgctcatcggcattttcgtgctttcccgaggtgcct

SEQ ID NO: 29965 - DNA, 50 bp, unidentified
  source 1..50: mol_type = unassigned DNA; note = target_f563c6b
  misc_feature 1..24: note = LF
  misc_feature 25: note = Core
  misc_feature 26..50: note = RF
gcagatcagcgcaacgagtcagcccaccccccattcatcccattcctaca

SEQ ID NO: 29966 - DNA, 50 bp, unidentified
  source 1..50: mol_type = unassigned DNA; note = target_f5669b3
  misc_feature 1..24: note = LF
  misc_feature 25: note = Core
  misc_feature 26..50: note = RF
atgacctgggcccagcgactgaagcgggtgttcgatatagacatcaaaac

SEQ ID NO: 29967 - DNA, 50 bp, unidentified
  source 1..50: mol_type = unassigned DNA; note = target_f56a68a
  misc_feature 1..24: note = LF
  misc_feature 25: note = Core
  misc_feature 26..50: note = RF
tttgtccgcatccccactggtcagttttcggccagcggcaacgccctgca

SEQ ID NO: 29968 - DNA, 50 bp, unidentified
  source 1..50: mol_type = unassigned DNA; note = target_f56ac50
  misc_feature 1..24: note = LF
  misc_feature 25: note = Core
  misc_feature 26..50: note = RF
tcatcagcgttctggcgatggagggcgcggcatgatccctttatctcaca

SEQ ID NO: 29969 - DNA, 50 bp, unidentified
  source 1..50: mol_type = unassigned DNA; note = target_f56fa31
  misc_feature 1..24: note = LF
  misc_feature 25: note = Core
  misc_feature 26..50: note = RF
ggataagttcattttctttgtcctcttccttaaaactgctttaggaatct

SEQ ID NO: 29970 - DNA, 50 bp, unidentified
  source 1..50: mol_type = unassigned DNA; note = target_f57495d
  misc_feature 1..23: note = LF
  misc_feature 24..25: note = Core
  misc_feature 26..50: note = RF
aggatggcctgggtagtgaccttctggtccatgaccagcatcttcgggtc

SEQ ID NO: 29971 - DNA, 50 bp, unidentified
  source 1..50: mol_type = unassigned DNA; note = target_f574f5c
  misc_feature 1..21: note = LF
  misc_feature 22..25: note = Core
  misc_feature 26..50: note = RF
caacggcgacggaaaccgtataccccccccacgcctttctcctctcggca

SEQ ID NO: 29972 - DNA, 50 bp, unidentified
  source 1..50: mol_type = unassigned DNA; note = target_f57ad83
  misc_feature 1..24: note = LF
  misc_feature 25: note = Core
  misc_feature 26..50: note = RF
gcgcatccgaccaggcttcagagctttcgccggatgacgtcctgcagcat

SEQ ID NO: 29973 - DNA, 50 bp, unidentified
  source 1..50: mol_type = unassigned DNA; note = target_f57da8c
  misc_feature 1..24: note = LF
  misc_feature 25: note = Core
  misc_feature 26..50: note = RF
gaatttttcactatctttgcgcttatgaagaattggcaatgtcggtgggc

SEQ ID NO: 29974 - DNA, 50 bp, unidentified
  source 1..50: mol_type = unassigned DNA; note = target_f57ed4a
  misc_feature 1..22: note = LF
  misc_feature 23..25: note = Core
  misc_feature 26..50: note = RF
ttgctgttttagccatttcaaatcacctcgctattagcatagcacaaatg

SEQ ID NO: 29975 - DNA, 50 bp, unidentified
  source 1..50: mol_type = unassigned DNA; note = target_f57f3fd
  misc_feature 1..23: note = LF
  misc_feature 24..25: note = Core
  misc_feature 26..50: note = RF
gatttgtgcgtgccgcccccccccccttgaagcggcatcgtaatcctgat

SEQ ID NO: 29976 - DNA, 50 bp, unidentified
  source 1..50: mol_type = unassigned DNA; note = target_f5926f5
  misc_feature 1..22: note = LF
  misc_feature 23..25: note = Core
  misc_feature 26..50: note = RF
tccagtcaccctccggttaatttgacggtgccatcaaggcagtgatcaac

SEQ ID NO: 29977 - DNA, 50 bp, unidentified
  source 1..50: mol_type = unassigned DNA; note = target_f5a24d9
  misc_feature 1..23: note = LF
  misc_feature 24..25: note = Core
  misc_feature 26..50: note = RF
ttttcctttcatatcaatacctccttttctagtataatccatgctaaata

SEQ ID NO: 29978 - DNA, 50 bp, unidentified
  source 1..50: mol_type = unassigned DNA; note = target_f5a739b
  misc_feature 1..22: note = LF
  misc_feature 23..25: note = Core
  misc_feature 26..50: note = RF
tgaagccttcgcgggcaagcccgctcccacatttggttttgccttatccg

SEQ ID NO: 29979 - DNA, 50 bp, unidentified
  source 1..50: mol_type = unassigned DNA; note = target_f5afab7
  misc_feature 1..23: note = LF
  misc_feature 24..25: note = Core
  misc_feature 26..50: note = RF
gccgttgacatgcatgggatggcctccttttccataaaaaaaccttttcc

SEQ ID NO: 29980 - DNA, 50 bp, unidentified
  source 1..50: mol_type = unassigned DNA; note = target_f5bd5cb
  misc_feature 1..24: note = LF
  misc_feature 25: note = Core
  misc_feature 26..50: note = RF
ctcgcaacatcacgccagagcgggcattatgcgctaatggctgacgaggt

SEQ ID NO: 29981 - DNA, 50 bp, unidentified
  source 1..50: mol_type = unassigned DNA; note = target_f5cce67
  misc_feature 1..24: note = LF
  misc_feature 25: note = Core
  misc_feature 26..50: note = RF
agaaaacccttgcaaaaccggagccgtccacaaatgacaccaccatttca

SEQ ID NO: 29982 - DNA, 50 bp, unidentified
  source 1..50: mol_type = unassigned DNA; note = target_f5ce319
  misc_feature 1..23: note = LF
  misc_feature 24..25: note = Core
  misc_feature 26..50: note = RF
gatgctccatcctactcacgagttggagcctccggcaaacccggggcggt

SEQ ID NO: 29983 - DNA, 50 bp, unidentified
  source 1..50: mol_type = unassigned DNA; note = target_f5d4679
  misc_feature 1..23: note = LF
  misc_feature 24..25: note = Core
  misc_feature 26..50: note = RF
gcggcgcacccgtacgcaggcccctgacctgcagctaagcatttctctcc

SEQ ID NO: 29984 - DNA, 50 bp, unidentified
  source 1..50: mol_type = unassigned DNA; note = target_f5d7349
  misc_feature 1..23: note = LF
  misc_feature 24..25: note = Core
  misc_feature 26..50: note = RF
cgccatggatggcgcgaccgaggctacaaggacgtacttgcgccgtcccc

SEQ ID NO: 29985 - DNA, 50 bp, unidentified
  source 1..50: mol_type = unassigned DNA; note = target_f5dc253
  misc_feature 1..23: note = LF
  misc_feature 24..25: note = Core
  misc_feature 26..50: note = RF
ggcgcctgtccttggcgcctgtcctttcgggccttcgaggggctcgggtg

SEQ ID NO: 29986 - DNA, 50 bp, unidentified
  source 1..50: mol_type = unassigned DNA; note = target_f5e3855
  misc_feature 1..23: note = LF
  misc_feature 24..25: note = Core
  misc_feature 26..50: note = RF
gatgctttttgatgcccattggctggcttccgggtcttcggcggcgtgcc

SEQ ID NO: 29987 - DNA, 50 bp, unidentified
  source 1..50: mol_type = unassigned DNA; note = target_f5e87de
  misc_feature 1..22: note = LF
  misc_feature 23..25: note = Core
  misc_feature 26..50: note = RF
cctcatacatgataatatcctcctatttttcaaaaatgtactgcataccg

SEQ ID NO: 29988 - DNA, 50 bp, unidentified
  source 1..50: mol_type = unassigned DNA; note = target_f5ed673
  misc_feature 1..23: note = LF
  misc_feature 24..25: note = Core
  misc_feature 26..50: note = RF
gcttggcgcgggacgcgctctcgtgaaccgagccgcgcgaaaggaaagcg

SEQ ID NO: 29989 - DNA, 50 bp, unidentified
  source 1..50: mol_type = unassigned DNA; note = target_f5fe448
  misc_feature 1..23: note = LF
  misc_feature 24..25: note = Core
  misc_feature 26..50: note = RF
tggataatttcatggacaaattcctttctgatgagtggatcgggcaatca

SEQ ID NO: 29990 - DNA, 50 bp, unidentified
  source 1..50: mol_type = unassigned DNA; note = target_f601f29
  misc_feature 1..23: note = LF
  misc_feature 24..25: note = Core
  misc_feature 26..50: note = RF
cgacccggccgagcggtcagcttgtcctttgacctccgtcagcgccgtga

SEQ ID NO: 29991 - DNA, 50 bp, unidentified
  source 1..50: mol_type = unassigned DNA; note = target_f602b96
  misc_feature 1..23: note = LF
  misc_feature 24..25: note = Core
  misc_feature 26..50: note = RF
cgatctcacgtgaaagcgaaaactgccgtttctaggttgaagagctgcgc

SEQ ID NO: 29992 - DNA, 50 bp, unidentified
  source 1..50: mol_type = unassigned DNA; note = target_f60cbc0
  misc_feature 1..23: note = LF
  misc_feature 24..25: note = Core
  misc_feature 26..50: note = RF
gagttaatttcccatcctccttcctgaaatatctaattcaagaatcacga

SEQ ID NO: 29993 - DNA, 50 bp, unidentified
  source 1..50: mol_type = unassigned DNA; note = target_f61d8cb
  misc_feature 1..24: note = LF
  misc_feature 25: note = Core
  misc_feature 26..50: note = RF
tgatggcaaaaaattaaccttaacgtacataattttcgatatccaaactt

SEQ ID NO: 29994 - DNA, 50 bp, unidentified
  source 1..50: mol_type = unassigned DNA; note = target_f648975
  misc_feature 1..24: note = LF
  misc_feature 25: note = Core
  misc_feature 26..50: note = RF
gcgcttcgcggcgggccctaccacttttttgagaggagatcgcgcagggc

SEQ ID NO: 29995 - DNA, 50 bp, unidentified
  source 1..50: mol_type = unassigned DNA; note = target_f64a3d9
  misc_feature 1..22: note = LF
  misc_feature 23..25: note = Core
  misc_feature 26..50: note = RF
taagtaaataccccctcggcgagctcggggaccgatggttggcgtgggta

SEQ ID NO: 29996 - DNA, 50 bp, unidentified
  source 1..50: mol_type = unassigned DNA; note = target_f64b909
  misc_feature 1..21: note = LF
  misc_feature 22..25: note = Core
  misc_feature 26..50: note = RF
tttacgaacgaacttgagcaacttgttataagccatttactcaaattttt

SEQ ID NO: 29997 - DNA, 50 bp, unidentified
  source 1..50: mol_type = unassigned DNA; note = target_f654425
  misc_feature 1..23: note = LF
  misc_feature 24..25: note = Core
  misc_feature 26..50: note = RF
gccggcacggtagtccactcggacagagggtcccagttcagatccagaaa

SEQ ID NO: 29998 - DNA, 50 bp, unidentified
  source 1..50: mol_type = unassigned DNA; note = target_f658ff0
  misc_feature 1..24: note = LF
  misc_feature 25: note = Core
  misc_feature 26..50: note = RF
agtcggcgtggcaattgctgggacaacgccgtggcggaatcctttttcag

SEQ ID NO: 29999 - DNA, 50 bp, unidentified
  source 1..50: mol_type = unassigned DNA; note = target_f667c3c
  misc_feature 1..24: note = LF
  misc_feature 25: note = Core
  misc_feature 26..50: note = RF
tgagggtgtgcagagtggctttgttgcataaatggcctctagttcactct

SEQ ID NO: 30000 - DNA, 50 bp, unidentified
  source 1..50: mol_type = unassigned DNA; note = target_f671e01
  misc_feature 1..23: note = LF
  misc_feature 24..25: note = Core
  misc_feature 26..50: note = RF
aatgcttgtcataatgccttctcctttaaaaaaattctatctgtacctta

SEQ ID NO: 30001 - DNA, 50 bp, unidentified
  source 1..50: mol_type = unassigned DNA; note = target_f677c7f
  misc_feature 1..24: note = LF
  misc_feature 25: note = Core
  misc_feature 26..50: note = RF
gacctggacgagcgataaatcgccttagcgtaagtgtgcgctttccgttc

SEQ ID NO: 30002 - DNA, 50 bp, unidentified
  source 1..50: mol_type = unassigned DNA; note = target_f678735
  misc_feature 1..22: note = LF
  misc_feature 23..25: note = Core
  misc_feature 26..50: note = RF
tggattcccgctttcgcgggaatgacgataaagaaaacagcctgttaggt

SEQ ID NO: 30003 - DNA, 50 bp, unidentified
  source 1..50: mol_type = unassigned DNA; note = target_f680c06
  misc_feature 1..23: note = LF
  misc_feature 24..25: note = Core
  misc_feature 26..50: note = RF
cagaacatggttgatgtcgcttatggcacatcgctacacttcgcaaccgc

SEQ ID NO: 30004 - DNA, 50 bp, unidentified
  source 1..50: mol_type = unassigned DNA; note = target_f69b1e4
  misc_feature 1..23: note = LF
  misc_feature 24..25: note = Core
  misc_feature 26..50: note = RF
ggtttcgtttcactcaacccaacctacgtaaataggcttaaagtcctaag

SEQ ID NO: 30005 - DNA, 50 bp, unidentified
  source 1..50: mol_type = unassigned DNA; note = target_f6a000f
  misc_feature 1..23: note = LF
  misc_feature 24..25: note = Core
  misc_feature 26..50: note = RF
ccttttcataattctttatcctcctttaatttcaattgagcggaatgacg

SEQ ID NO: 30006 - DNA, 50 bp, unidentified; identical to SEQ ID NO: 20411
  source 1..50: mol_type = unassigned DNA; note = target_f6a1ea0
  misc_feature 1..24: note = LF
  misc_feature 25: note = Core
  misc_feature 26..50: note = RF

SEQ ID NO: 30007 - DNA, 50 bp, unidentified
  source 1..50: mol_type = unassigned DNA; note = target_f6a53a3
  misc_feature 1..23: note = LF
  misc_feature 24..25: note = Core
  misc_feature 26..50: note = RF
tgagttcgatttcacgtccgatgctctagcttggcccctcgggtcactga

SEQ ID NO: 30008 - DNA, 50 bp, unidentified
  source 1..50: mol_type = unassigned DNA; note = target_f6a9bf1
  misc_feature 1..23: note = LF
  misc_feature 24..25: note = Core
  misc_feature 26..50: note = RF
ggcgcgaaaccaacttccgcttctggcgcaagcctgacgccgaaggattt

SEQ ID NO: 30009 - DNA, 50 bp, unidentified
  source 1..50: mol_type = unassigned DNA; note = target_f6ad077
  misc_feature 1..22: note = LF
  misc_feature 23..25: note = Core
  misc_feature 26..50: note = RF
ggtttgcgaaacggcgttgccccttacatcccggcggccttttgccggga

SEQ ID NO: 30010 - DNA, 50 bp, unidentified
  source 1..50: mol_type = unassigned DNA; note = target_f6ae744
  misc_feature 1..23: note = LF
  misc_feature 24..25: note = Core
  misc_feature 26..50: note = RF
tcaaatcatatagctttttattcctcctttggcagtgaaacagatactca

SEQ ID NO: 30011 - DNA, 50 bp, unidentified
  source 1..50: mol_type = unassigned DNA; note = target_f6b0fc8
  misc_feature 1..23: note = LF
  misc_feature 24..25: note = Core
  misc_feature 26..50: note = RF
cggtgagacttacctatcccaccctagccacaaagacaaaggcgctgcgc

SEQ ID NO: 30012 - DNA, 50 bp, unidentified
  source 1..50: mol_type = unassigned DNA; note = target_f6b21d2
  misc_feature 1..23: note = LF
  misc_feature 24..25: note = Core
  misc_feature 26..50: note = RF
gagcagtaagggggtcggggcagctcaacctgaacccgtcacaacgttgg

SEQ ID NO: 30013 - DNA, 50 bp, unidentified
  source 1..50: mol_type = unassigned DNA; note = target_f6b2948
  misc_feature 1..23: note = LF
  misc_feature 24..25: note = Core
  misc_feature 26..50: note = RF
gttagccccttggcaggctctgttgcacaaatcgtctgatggccaggcta

SEQ ID NO: 30014 - DNA, 50 bp, unidentified
  source 1..50: mol_type = unassigned DNA; note = target_f6bb993
  misc_feature 1..24: note = LF
  misc_feature 25: note = Core
  misc_feature 26..50: note = RF
gaggggcacccaagcgatggccgctaagtgccagaagcagacattggggc

SEQ ID NO: 30015 - DNA, 50 bp, unidentified
  source 1..50: mol_type = unassigned DNA; note = target_f6bf4fd
  misc_feature 1..23: note = LF
  misc_feature 24..25: note = Core
  misc_feature 26..50: note = RF
ccgggacttcgcggtttcgggctttccttttttgagcttctgcttttcgg

SEQ ID NO: 30016 - DNA, 50 bp, unidentified
  source 1..50: mol_type = unassigned DNA; note = target_f6c48e0
  misc_feature 1..20: note = LF
  misc_feature 21..25: note = Core
  misc_feature 26..50: note = RF
tctcggctacggcggcagcgccccccacacaatctacgcggcagcgtggt

SEQ ID NO: 30017 - DNA, 50 bp, unidentified
  source 1..50: mol_type = unassigned DNA; note = target_f6cb70c
  misc_feature 1..23: note = LF
  misc_feature 24..25: note = Core
  misc_feature 26..50: note = RF
tcgtggccttgccgcgcatgaccctagggattgtccctgaaccaatccac

SEQ ID NO: 30018 - DNA, 50 bp, unidentified
  source 1..50: mol_type = unassigned DNA; note = target_f6d7171
  misc_feature 1..23: note = LF
  misc_feature 24..25: note = Core
  misc_feature 26..50: note = RF
aaaacagggattactcaatagacctctttcataaatcattttttactcag

SEQ ID NO: 30019 - DNA, 50 bp, unidentified
  source 1..50: mol_type = unassigned DNA; note = target_f6e8086
  misc_feature 1..21: note = LF
  misc_feature 22..25: note = Core
  misc_feature 26..50: note = RF
cgccgtctgcccgcccaatgcctcaatcgcctgctgcaacagttcttgac

SEQ ID NO: 30020 - DNA, 50 bp, unidentified
  source 1..50: mol_type = unassigned DNA; note = target_f6ed963
  misc_feature 1..22: note = LF
  misc_feature 23..25: note = Core
  misc_feature 26..50: note = RF
ccgtgccgatgaggtgattgagtgaagcggcgacgcttcatcaccgtcct

SEQ ID NO: 30021 - DNA, 50 bp, unidentified
  source 1..50: mol_type = unassigned DNA; note = target_f6ee3d5
  misc_feature 1..24: note = LF
  misc_feature 25: note = Core
  misc_feature 26..50: note = RF
gcgtaccggctcaacgccgcctgactctcaggcggcgagcaggacgacct

SEQ ID NO: 30022 - DNA, 50 bp, unidentified
  source 1..50: mol_type = unassigned DNA; note = target_f6f31b9
  misc_feature 1..24: note = LF
  misc_feature 25: note = Core
  misc_feature 26..50: note = RF
gtatggtcgctttgtggccaggaccggaacctgtatccacggatgggtct

SEQ ID NO: 30023 - DNA, 50 bp, unidentified
  source 1..50: mol_type = unassigned DNA; note = target_f6f3487
  misc_feature 1..22: note = LF
  misc_feature 23..25: note = Core
  misc_feature 26..50: note = RF
cgtttgcgagtttatacggctccttcaacttccaatacacggaactgacc

SEQ ID NO: 30024 - DNA, 50 bp, unidentified
  source 1..50: mol_type = unassigned DNA; note = target_f6fb869
  misc_feature 1..24: note = LF
  misc_feature 25: note = Core
  misc_feature 26..50: note = RF
ggaaccctcaacaccgagacagcccaccccccgctagctctctgggggtt

SEQ ID NO: 30025 - DNA, 50 bp, unidentified
  source 1..50: mol_type = unassigned DNA; note = target_f716172
  misc_feature 1..23: note = LF
  misc_feature 24..25: note = Core
  misc_feature 26..50: note = RF
tcgtcacaggacatccggatcaccccccgggaccgggaggtctggctgga

SEQ ID NO: 30026 - DNA, 50 bp, unidentified
  source 1..50: mol_type = unassigned DNA; note = target_f717e12
  misc_feature 1..23: note = LF
  misc_feature 24..25: note = Core
  misc_feature 26..50: note = RF
aaggttccatcctcccattatccctatcggatcgtgtgtgatataccgcc

SEQ ID NO: 30027 - DNA, 50 bp, unidentified
  source 1..50: mol_type = unassigned DNA; note = target_f71ae32
  misc_feature 1..23: note = LF
  misc_feature 24..25: note = Core
  misc_feature 26..50: note = RF
gccattcaagcaggacttttaacagttggctaggttccgcttcgctacac

SEQ ID NO: 30028 - DNA, 50 bp, unidentified
  source 1..50: mol_type = unassigned DNA; note = target_f734f89
  misc_feature 1..22: note = LF
  misc_feature 23..25: note = Core
  misc_feature 26..50: note = RF
agttttgagtaaagtaactgaaacttcgcacttgccaaacatacgccacc

SEQ ID NO: 30029 - DNA, 50 bp, unidentified
  source 1..50: mol_type = unassigned DNA; note = target_f739bf1
  misc_feature 1..23: note = LF
  misc_feature 24..25: note = Core
  misc_feature 26..50: note = RF
cgcagtgagcggaatctcaaccgcttactgcgctcgaagactcgctccgt

SEQ ID NO: 30030 - DNA, 50 bp, unidentified
  source 1..50: mol_type = unassigned DNA; note = target_f73cf7a
  misc_feature 1..23: note = LF
  misc_feature 24..25: note = Core
  misc_feature 26..50: note = RF
atcgccttgatgagctattaccctggaattggacgccggcggcatccgcg

SEQ ID NO: 30031 - DNA, 50 bp, unidentified
  source 1..50: mol_type = unassigned DNA; note = target_f74d4fc
  misc_feature 1..23: note = LF
  misc_feature 24..25: note = Core
  misc_feature 26..50: note = RF
gagaagcccgcaacttgcgggttttttcgtcccaaaggcagggcacccgc

SEQ ID NO: 30032 - DNA, 50 bp, unidentified
  source 1..50: mol_type = unassigned DNA; note = target_f74dc26
  misc_feature 1..23: note = LF
  misc_feature 24..25: note = Core
  misc_feature 26..50: note = RF
ccaggcgaagaaaagaactgggtccggatctacgcgcgcttgagccgcgc

SEQ ID NO: 30033 - DNA, 50 bp, unidentified
  source 1..50: mol_type = unassigned DNA; note = target_f74f041
  misc_feature 1..24: note = LF
  misc_feature 25: note = Core
  misc_feature 26..50: note = RF
gggaacgccggacactagactcccccccccaaggaatccggggccgaccc

SEQ ID NO: 30034 - DNA, 50 bp, unidentified
  source 1..50: mol_type = unassigned DNA; note = target_f750e16
  misc_feature 1..23: note = LF
  misc_feature 24..25: note = Core
  misc_feature 26..50: note = RF
ggattgcttcgctttgctcgcaatgacggcgcaaacgactcgagttgacg

SEQ ID NO: 30035 - DNA, 50 bp, unidentified
  source 1..50: mol_type = unassigned DNA; note = target_f758f03
  misc_feature 1..23: note = LF
  misc_feature 24..25: note = Core
  misc_feature 26..50: note = RF
gctgcggtgcatgagtctcttgttggcacatctcggacatggcgtgatgt

SEQ ID NO: 30036 - DNA, 50 bp, unidentified
  source 1..50: mol_type = unassigned DNA; note = target_f764a37
  misc_feature 1..23: note = LF
  misc_feature 24..25: note = Core
  misc_feature 26..50: note = RF
agcgcggcgtgagcagcgcggggtctggtcctgcaatccggcactaggtt

SEQ ID NO: 30037 - DNA, 50 bp, unidentified
  source 1..50: mol_type = unassigned DNA; note = target_f76c3e2
  misc_feature 1..23: note = LF
  misc_feature 24..25: note = Core
  misc_feature 26..50: note = RF
cggttacaccgcttataatatgtctcctcataaaaaaatagcaacatact

SEQ ID NO: 30038 - DNA, 50 bp, unidentified
  source 1..50: mol_type = unassigned DNA; note = target_f77ea40
  misc_feature 1..23: note = LF
  misc_feature 24..25: note = Core
  misc_feature 26..50: note = RF
ccgtcagtcatccttcgacttcgctcaggatgagtccgttttttgctgca

SEQ ID NO: 30039 - DNA, 50 bp, unidentified
  source 1..50: mol_type = unassigned DNA; note = target_f77f0de
  misc_feature 1..23: note = LF
  misc_feature 24..25: note = Core
  misc_feature 26..50: note = RF
actgcatgccgggtctgcgctacctaacgagattgagacagttccgtgta

SEQ ID NO: 30040 - DNA, 50 bp, unidentified
  source 1..50: mol_type = unassigned DNA; note = target_f7878bb
  misc_feature 1..23: note = LF
  misc_feature 24..25: note = Core
  misc_feature 26..50: note = RF
gcgctggggttcagggtgaaaagctcagaagaagccttgcagaagccccc

SEQ ID NO: 30041 - DNA, 50 bp, unidentified
  source 1..50: mol_type = unassigned DNA; note = target_f78c65e
  misc_feature 1..23: note = LF
  misc_feature 24..25: note = Core
  misc_feature 26..50: note = RF
cttgcccttgtgcgagccgagattgtccatgacgacgatgtcgccgggct

SEQ ID NO: 30042 - DNA, 50 bp, unidentified
  source 1..50: mol_type = unassigned DNA; note = target_f795005
  misc_feature 1..24: note = LF
  misc_feature 25: note = Core
  misc_feature 26..50: note = RF
gacatctctgctcgggtgcctaacgacccagataagccgcccgccgtagg

SEQ ID NO: 30043 - DNA, 50 bp, unidentified
  source 1..50: mol_type = unassigned DNA; note = target_f7a303f
  misc_feature 1..24: note = LF
  misc_feature 25: note = Core
  misc_feature 26..50: note = RF
taaatatttttttcattttttacttctcctctattcttataattctacgg

SEQ ID NO: 30044 - DNA, 50 bp, unidentified
  source 1..50: mol_type = unassigned DNA; note = target_f7b22df
  misc_feature 1..23: note = LF
  misc_feature 24..25: note = Core
  misc_feature 26..50: note = RF
aatatattccttaatcgtactcgctcaaacctgatctgacagttacccat

SEQ ID NO: 30045 - DNA, 50 bp, unidentified
  source 1..50: mol_type = unassigned DNA; note = target_f7b727f
  misc_feature 1..24: note = LF
  misc_feature 25: note = Core
  misc_feature 26..50: note = RF
tcctgcgaaccaagtatgttggtttgcactgaatcctgaccctgacgcag

SEQ ID NO: 30046 - DNA, 50 bp, unidentified
  source 1..50: mol_type = unassigned DNA; note = target_f7bb27c
  misc_feature 1..24: note = LF
  misc_feature 25: note = Core
  misc_feature 26..50: note = RF
tgaggagcacgcttgtggtttgtccggggacaaaccgcgctccgagttca

SEQ ID NO: 30047 - DNA, 50 bp, unidentified
  source 1..50: mol_type = unassigned DNA; note = target_f7c8199
  misc_feature 1..23: note = LF
  misc_feature 24..25: note = Core
  misc_feature 26..50: note = RF
cattggagcattgcccaaaagcagacgctaccagcgtgctgaccaaagtt

SEQ ID NO: 30048 - DNA, 50 bp, unidentified
  source 1..50: mol_type = unassigned DNA; note = target_f7c9f8a
  misc_feature 1..24: note = LF
  misc_feature 25: note = Core
  misc_feature 26..50: note = RF
gtttgtgatacatctttttttcctctttaatctattgaatttgggtttga

SEQ ID NO: 30049 - DNA, 50 bp, unidentified
  source 1..50: mol_type = unassigned DNA; note = target_f7cc895
  misc_feature 1..23: note = LF
  misc_feature 24..25: note = Core
  misc_feature 26..50: note = RF
aaaagcaaaacaaacggaaggagaattcatcatgacagtacgcggcatca

SEQ ID NO: 30050 - DNA, 50 bp, unidentified
  source 1..50: mol_type = unassigned DNA; note = target_f7dd917
  misc_feature 1..23: note = LF
  misc_feature 24..25: note = Core
  misc_feature 26..50: note = RF
taaagccttccatatcaaagctcctttttattcatattaactaatatatg

SEQ ID NO: 30051 - DNA, 50 bp, unidentified
  source 1..50: mol_type = unassigned DNA; note = target_f7e6e00
  misc_feature 1..23: note = LF
  misc_feature 24..25: note = Core
  misc_feature 26..50: note = RF
ttctcggctacgttgcactccgctcgaaatgacgaccctagaagaggctg

SEQ ID NO: 30052 - DNA, 50 bp, unidentified
  source 1..50: mol_type = unassigned DNA; note = target_f7ea257
  misc_feature 1..24: note = LF
  misc_feature 25: note = Core
  misc_feature 26..50: note = RF
catccccaaaatcgtccagagtatcttgcaaaaggatggcgaacggactt

SEQ ID NO: 30053 - DNA, 50 bp, unidentified
  source 1..50: mol_type = unassigned DNA; note = target_f7efa83
  misc_feature 1..22: note = LF
  misc_feature 23..25: note = Core
  misc_feature 26..50: note = RF
cccgctaacaccgagtttcctctgacagccccctcgacaaataaaaacgc

SEQ ID NO: 30054 - DNA, 50 bp, unidentified
  source 1..50: mol_type = unassigned DNA; note = target_f7efe0a
  misc_feature 1..22: note = LF
  misc_feature 23..25: note = Core
  misc_feature 26..50: note = RF
gaataccccatctccggtacaaaacgtcacctatgtctcaggtcgggcac

SEQ ID NO: 30055 - DNA, 50 bp, unidentified
  source 1..50: mol_type = unassigned DNA; note = target_f7fa31b
  misc_feature 1..23: note = LF
  misc_feature 24..25: note = Core
  misc_feature 26..50: note = RF
agttgagaagagccctttttgtaagcgtacagccagcgccgtctgttatc

SEQ ID NO: 30056 - DNA, 50 bp, unidentified
  source 1..50: mol_type = unassigned DNA; note = target_f7fd3bd
  misc_feature 1..23: note = LF
  misc_feature 24..25: note = Core
  misc_feature 26..50: note = RF
tccttcttggatcaacgccctcgttagtttaagaacagtgctattattcc

SEQ ID NO: 30057 - DNA, 50 bp, unidentified
  source 1..50: mol_type = unassigned DNA; note = target_f80960d
  misc_feature 1..23: note = LF
  misc_feature 24..25: note = Core
  misc_feature 26..50: note = RF
agcttgcgcatcgtgtccgcttctggcccaagacggcagtgccgtggtcg

SEQ ID NO: 30058 - DNA, 50 bp, unidentified
  source 1..50: mol_type = unassigned DNA; note = target_f80a6b6
  misc_feature 1..24: note = LF
  misc_feature 25: note = Core
  misc_feature 26..50: note = RF
gcgcgaagtcatccgagttctaacgttcgcgctcagcgggcggcgaagcc

SEQ ID NO: 30059 - DNA, 50 bp, unidentified
  source 1..50: mol_type = unassigned DNA; note = target_f810241
  misc_feature 1..24: note = LF
  misc_feature 25: note = Core
  misc_feature 26..50: note = RF
ggaaatgggggagactggcactactttggcactctgatttgggatccaag

SEQ ID NO: 30060 - DNA, 50 bp, unidentified
  source 1..50: mol_type = unassigned DNA; note = target_f81131e
  misc_feature 1..23: note = LF
  misc_feature 24..25: note = Core
  misc_feature 26..50: note = RF
ttttcgatgtgtttcatgtgtgcctcctaagatgacttaaatctattata

SEQ ID NO: 30061 - DNA, 50 bp, unidentified
  source 1..50: mol_type = unassigned DNA; note = target_f814aac
  misc_feature 1..23: note = LF
  misc_feature 24..25: note = Core
  misc_feature 26..50: note = RF
tgcccgccactcaccgtgagattccgccacggttctcgagacccgacacg

SEQ ID NO: 30062 - DNA, 50 bp, unidentified
  source 1..50: mol_type = unassigned DNA; note = target_f81cf2c
  misc_feature 1..23: note = LF
  misc_feature 24..25: note = Core
  misc_feature 26..50: note = RF
tttaccattgagctcacctactcctttccagcaactacatggcgcctctt

SEQ ID NO: 30063 - DNA, 50 bp, unidentified
  source 1..50: mol_type = unassigned DNA; note = target_f8209ef
  misc_feature 1..23: note = LF
  misc_feature 24..25: note = Core
  misc_feature 26..50: note = RF
actgtgagctaggaaactcggggtcaggcctctccagagccaagtctcac

SEQ ID NO: 30064 - DNA, 50 bp, unidentified
  source 1..50: mol_type = unassigned DNA; note = target_f826222
  misc_feature 1..23: note = LF
  misc_feature 24..25: note = Core
  misc_feature 26..50: note = RF
tccacaacaccgaggcgcgccggagtaaccatgccgatgtttggtctggc

SEQ ID NO: 30065 - DNA, 50 bp, unidentified
  source 1..50: mol_type = unassigned DNA; note = target_f82bb98
  misc_feature 1..24: note = LF
  misc_feature 25: note = Core
  misc_feature 26..50: note = RF
gcgccattctacgccatgagaaccccccccccccggtcaaccgcaagatt

SEQ ID NO: 30066 - DNA, 50 bp, unidentified
  source 1..50: mol_type = unassigned DNA; note = target_f82faaa
  misc_feature 1..24: note = LF
  misc_feature 25: note = Core
  misc_feature 26..50: note = RF
cgcactccgccgcgatcagggctttttatacgtgaagccgcgccggcaca

SEQ ID NO: 30067 - DNA, 50 bp, unidentified
  source 1..50: mol_type = unassigned DNA; note = target_f8302e6
  misc_feature 1..23: note = LF
  misc_feature 24..25: note = Core
  misc_feature 26..50: note = RF
tgatgattcatgcgtgctacctcctttcaaaacagcgatgattcggggct

SEQ ID NO: 30068 - DNA, 50 bp, unidentified
  source 1..50: mol_type = unassigned DNA; note = target_f83759a
  misc_feature 1..23: note = LF
  misc_feature 24..25: note = Core
  misc_feature 26..50: note = RF
ctccggactgccccgttgtcaacctcgtacgccttcggcttcctacggtt

SEQ ID NO: 30069 - DNA, 50 bp, unidentified
  source 1..50: mol_type = unassigned DNA; note = target_f841532
  misc_feature 1..23: note = LF
  misc_feature 24..25: note = Core
  misc_feature 26..50: note = RF
aagttcaaggatggcttcgtacctcgcaatgacgtggcgggaagtatgtt

SEQ ID NO: 30070 - DNA, 50 bp, unidentified
  source 1..50: mol_type = unassigned DNA; note = target_f84f960
  misc_feature 1..23: note = LF
  misc_feature 24..25: note = Core
  misc_feature 26..50: note = RF
aaggagaatcatccgcgagagtcctgtgtggaggagctgaccgatgccga

SEQ ID NO: 30071 - DNA, 50 bp, unidentified
  source 1..50: mol_type = unassigned DNA; note = target_f8571db
  misc_feature 1..23: note = LF
  misc_feature 24..25: note = Core
  misc_feature 26..50: note = RF
tgcgtcagccaccctcaccgtacctacgggtggcttcgccatccgccgaa

SEQ ID NO: 30072 - DNA, 50 bp, unidentified
  source 1..50: mol_type = unassigned DNA; note = target_f864527
  misc_feature 1..24: note = LF
  misc_feature 25: note = Core
  misc_feature 26..50: note = RF
gacgccatactccatcagttccttctttaattaggcttcgagcctacctt

SEQ ID NO: 30073 - DNA, 50 bp, unidentified
  source 1..50: mol_type = unassigned DNA; note = target_f86d989
  misc_feature 1..24: note = LF
  misc_feature 25: note = Core
  misc_feature 26..50: note = RF
ccgccttgcgcagtccgccgggaccggacgttcgcgagtttagccaatcg

SEQ ID NO: 30074 - DNA, 50 bp, unidentified
  source 1..50: mol_type = unassigned DNA; note = target_f876e7b
  misc_feature 1..23: note = LF
  misc_feature 24..25: note = Core
  misc_feature 26..50: note = RF
acaaagcccccgctagcgggggcttttacgtttgagcgggctgtgtcaga

SEQ ID NO: 30075 - DNA, 50 bp, unidentified
  source 1..50: mol_type = unassigned DNA; note = target_f881a1b
  misc_feature 1..24: note = LF
  misc_feature 25: note = Core
  misc_feature 26..50: note = RF
ctgcgctgcaatattgccgtccgcttcgggtcagactcgactattcggcg

SEQ ID NO: 30076 - DNA, 50 bp, unidentified
  source 1..50: mol_type = unassigned DNA; note = target_f8911ed
  misc_feature 1..23: note = LF
  misc_feature 24..25: note = Core
  misc_feature 26..50: note = RF
ccagcagacatgcgggggtgatcctttcggctcgcggtcgccgtggcggc

SEQ ID NO: 30077 - DNA, 50 bp, unidentified
  source 1..50: mol_type = unassigned DNA; note = target_f892db7
  misc_feature 1..24: note = LF
  misc_feature 25: note = Core
  misc_feature 26..50: note = RF
gaaaaatgcacttgcctaaagggccgtccacatatgacggccggacagac

SEQ ID NO: 30078 - DNA, 50 bp, unidentified
  source 1..50: mol_type = unassigned DNA; note = target_f89678b
  misc_feature 1..23: note = LF
  misc_feature 24..25: note = Core
  misc_feature 26..50: note = RF
ctgtttatatcagcatattaaacctcctttcctcctcttcgccttcatat

SEQ ID NO: 30079 - DNA, 50 bp, unidentified
  source 1..50: mol_type = unassigned DNA; note = target_f89bc9b
  misc_feature 1..24: note = LF
  misc_feature 25: note = Core
  misc_feature 26..50: note = RF
tcggagactgctactgacccaaagcggacgctcgcctttttgccaaaagg

SEQ ID NO: 30080 - DNA, 50 bp, unidentified
  source 1..50: mol_type = unassigned DNA; note = target_f8b5c34
  misc_feature 1..24: note = LF
  misc_feature 25: note = Core
  misc_feature 26..50: note = RF
tgggatgttcatgtgccgtctaacgttcgacgtaaggggcctgccgtagg

SEQ ID NO: 30081 - DNA, 50 bp, unidentified
  source 1..50: mol_type = unassigned DNA; note = target_f8bc352
  misc_feature 1..24: note = LF
  misc_feature 25: note = Core
  misc_feature 26..50: note = RF
ccttggcgtgaagccactcatcggcagatccggtcgttcgccgcggcgaa

SEQ ID NO: 30082 - DNA, 50 bp, unidentified
  source 1..50: mol_type = unassigned DNA; note = target_f8bde8d
  misc_feature 1..20: note = LF
  misc_feature 21..25: note = Core
  misc_feature 26..50: note = RF
ttaatatccatataaagatcacctgcctcttttaaaaatcatcttttttt

SEQ ID NO: 30083 - DNA, 50 bp, unidentified
  source 1..50: mol_type = unassigned DNA; note = target_f8c20d1
  misc_feature 1..23: note = LF
  misc_feature 24..25: note = Core
  misc_feature 26..50: note = RF
gtgtccatgttgattgctccttgctgtgtgtaaataatcacggattttga

SEQ ID NO: 30084 - DNA, 50 bp, unidentified
  source 1..50: mol_type = unassigned DNA; note = target_f8c68f9
  misc_feature 1..23: note = LF
  misc_feature 24..25: note = Core
  misc_feature 26..50: note = RF
tataaaaagcatactcattcccccttaaattatttcgtttctctaattaa

SEQ ID NO: 30085 - DNA, 50 bp, unidentified
  source 1..50: mol_type = unassigned DNA; note = target_f8cb2b2
  misc_feature 1..24: note = LF
  misc_feature 25: note = Core
  misc_feature 26..50: note = RF
ggtcacctccacgttgaactaaaccgctgacgcggtggtggcgcgagtca

SEQ ID NO: 30086 - DNA, 50 bp, unidentified
  source 1..50: mol_type = unassigned DNA; note = target_f8cf246
  misc_feature 1..22: note = LF
  misc_feature 23..25: note = Core
  misc_feature 26..50: note = RF
aaagaaagttatcgataccctatttttttgcctgaattttggaaataaag

SEQ ID NO: 30087 - DNA, 50 bp, unidentified
  source 1..50: mol_type = unassigned DNA; note = target_f8d5cc2
  misc_feature 1..23: note = LF
  misc_feature 24..25: note = Core
  misc_feature 26..50: note = RF
cttctcggacatagtttactctcctttttgaatggtgtgtagcaactttc

SEQ ID NO: 30088 - DNA, 50 bp, unidentified
  source 1..50: mol_type = unassigned DNA; note = target_f8d96e6
  misc_feature 1..23: note = LF
  misc_feature 24..25: note = Core
  misc_feature 26..50: note = RF
caagcggctgcggacgcgtagcccggacaggcgcgcagcgccacctccgg

SEQ ID NO: 30089 - DNA, 50 bp, unidentified
  source 1..50: mol_type = unassigned DNA; note = target_f8d9b32
  misc_feature 1..24: note = LF
  misc_feature 25: note = Core
  misc_feature 26..50: note = RF
ttttttgggataataaaagggctttgttgcacaaatcaaaagctatccgc

SEQ ID NO: 30090 - DNA, 50 bp, unidentified
  source 1..50: mol_type = unassigned DNA; note = target_f8df5d9
  misc_feature 1..22: note = LF
  misc_feature 23..25: note = Core
  misc_feature 26..50: note = RF
aaacgccttgaaataaggctttttttattgccaaaaacacttgcaaaatt

SEQ ID NO: 30091 - DNA, 50 bp, unidentified
  source 1..50: mol_type = unassigned DNA; note = target_f8e2197
  misc_feature 1..23: note = LF
  misc_feature 24..25: note = Core
  misc_feature 26..50: note = RF
cgtggtgtgcccatagactcctcctatgctcaaaatatagggcagatttg

SEQ ID NO: 30092 - DNA, 50 bp, unidentified
  source 1..50: mol_type = unassigned DNA; note = target_f8e3350
  misc_feature 1..22: note = LF
  misc_feature 23..25: note = Core
  misc_feature 26..50: note = RF
tcattaccaatacagcactcgtcattgcgaggaacgaagcaatctcctga

SEQ ID NO: 30093 - DNA, 50 bp, unidentified
  source 1..50: mol_type = unassigned DNA; note = target_f8ee331
  misc_feature 1..23: note = LF
  misc_feature 24..25: note = Core
  misc_feature 26..50: note = RF
ggacaccgcatcatgcggtgtcccttttattgccgctcgcaaccctgacg

SEQ ID NO: 30094 - DNA, 50 bp, unidentified
  source 1..50: mol_type = unassigned DNA; note = target_f8f911e
  misc_feature 1..23: note = LF
  misc_feature 24..25: note = Core
  misc_feature 26..50: note = RF
gggtgacgcggaggatgcgcagagacgcgggggagggcagcatgtgtcgc

SEQ ID NO: 30095 - DNA, 50 bp, unidentified
  source 1..50: mol_type = unassigned DNA; note = target_f9002d9
  misc_feature 1..24: note = LF
  misc_feature 25: note = Core
  misc_feature 26..50: note = RF
tgatctgcgcgggtggcatcggtgctccttgacccttcgagctcagtgtt

SEQ ID NO: 30096 - DNA, 50 bp, unidentified
  source 1..50: mol_type = unassigned DNA; note = target_f9027c0
  misc_feature 1..22: note = LF
  misc_feature 23..25: note = Core
  misc_feature 26..50: note = RF
ggcgcatagtcgaaatccactctgactcaatttccctggtgctaaatagc

SEQ ID NO: 30097 - DNA, 50 bp, unidentified
  source 1..50: mol_type = unassigned DNA; note = target_f903f65
  misc_feature 1..23: note = LF
  misc_feature 24..25: note = Core
  misc_feature 26..50: note = RF
gcctgcatatatgcaacccctttctgtgttttttcatataaaatttgtta

SEQ ID NO: 30098 - DNA, 50 bp, unidentified
  source 1..50: mol_type = unassigned DNA; note = target_f905765
  misc_feature 1..22: note = LF
  misc_feature 23..25: note = Core
  misc_feature 26..50: note = RF
tcaatagagcaacaaattccgatttgtcaggcatgtattgaaacagataa

SEQ ID NO: 30099 - DNA, 50 bp, unidentified
  source 1..50: mol_type = unassigned DNA; note = target_f9094d7
  misc_feature 1..24: note = LF
  misc_feature 25: note = Core
  misc_feature 26..50: note = RF
cgatcatcaccgacagacgaaccccaccccccggagtccgcggatgacgt

SEQ ID NO: 30100 - DNA, 50 bp, unidentified
  source 1..50: mol_type = unassigned DNA; note = target_f914ea2
  misc_feature 1..23: note = LF
  misc_feature 24..25: note = Core
  misc_feature 26..50: note = RF
cagccctgtagattcattttgttagggcttcttagtgaggtcactgccta

SEQ ID NO: 30101 - DNA, 50 bp, unidentified
  source 1..50: mol_type = unassigned DNA; note = target_f92d773
  misc_feature 1..23: note = LF
  misc_feature 24..25: note = Core
  misc_feature 26..50: note = RF
aattatctgccgtatcaagaggtcgacatacgaatgcgcctgaccacttt

SEQ ID NO: 30102 - DNA, 50 bp, unidentified
  source 1..50: mol_type = unassigned DNA; note = target_f943865
  misc_feature 1..23: note = LF
  misc_feature 24..25: note = Core
  misc_feature 26..50: note = RF
accgtatatctgtgcccctttaatgttcaggggccaaaatgccgttggca

SEQ ID NO: 30103 - DNA, 50 bp, unidentified
  source 1..50: mol_type = unassigned DNA; note = target_f94900c
  misc_feature 1..24: note = LF
  misc_feature 25: note = Core
  misc_feature 26..50: note = RF
ccgctttgcgtcgggcgtcaccatttttttgctgcgacatccttgaggat

SEQ ID NO: 30104 - DNA, 50 bp, unidentified
  source 1..50: mol_type = unassigned DNA; note = target_f94c89a
  misc_feature 1..22: note = LF
  misc_feature 23..25: note = Core
  misc_feature 26..50: note = RF
gatgcgcacacggtgtactgcttgaataatcctccgctgcttgcccgcta

SEQ ID NO: 30105 - DNA, 50 bp, unidentified
  source 1..50: mol_type = unassigned DNA; note = target_f957379
  misc_feature 1..23: note = LF
  misc_feature 24..25: note = Core
  misc_feature 26..50: note = RF
ccggttcggttggcggctattcgtcactgtgacgatgggcttcgcatcgg

SEQ ID NO: 30106 - DNA, 50 bp, unidentified
  source 1..50: mol_type = unassigned DNA; note = target_f95b527
  misc_feature 1..23: note = LF
  misc_feature 24..25: note = Core
  misc_feature 26..50: note = RF
gcaagcgcgcgcctttgcccaccctacgtcttccccacatccttcttctt

SEQ ID NO: 30107 - DNA, 50 bp, unidentified
  source 1..50: mol_type = unassigned DNA; note = target_f96867e
  misc_feature 1..23: note = LF
  misc_feature 24..25: note = Core
  misc_feature 26..50: note = RF
tcggaacttcatatatacgcctcctttcttatccgttaaatcgataatat

SEQ ID NO: 30108 - DNA, 50 bp, unidentified
  source 1..50: mol_type = unassigned DNA; note = target_f96e85b
  misc_feature 1..23: note = LF
  misc_feature 24..25: note = Core
  misc_feature 26..50: note = RF
tgcgttcgggcggttccgatagctatcggaatcggagcataaaactgtca

SEQ ID NO: 30109 - DNA, 50 bp, unidentified
  source 1..50: mol_type = unassigned DNA; note = target_f96f4c2
  misc_feature 1..23: note = LF
  misc_feature 24..25: note = Core
  misc_feature 26..50: note = RF
aaatgattttcaaaacttttctccttcctaaaaagattatttaatggtta

SEQ ID NO: 30110 - DNA, 50 bp, unidentified
  source 1..50: mol_type = unassigned DNA; note = target_f97b2d2
  misc_feature 1..24: note = LF
  misc_feature 25: note = Core
  misc_feature 26..50: note = RF
tgactggcgagtgaggcattgcggcatgagcggagccaccaaaccggctg

SEQ ID NO: 30111 - DNA, 50 bp, unidentified
  source 1..50: mol_type = unassigned DNA; note = target_f983033
  misc_feature 1..23: note = LF
  misc_feature 24..25: note = Core
  misc_feature 26..50: note = RF
tcggggcgatatataatcgccccctactgttacaacattaatcgtgtatt

SEQ ID NO: 30112 - DNA, 50 bp, unidentified
  source 1..50: mol_type = unassigned DNA; note = target_f9868e0
  misc_feature 1..23: note = LF
  misc_feature 24..25: note = Core
  misc_feature 26..50: note = RF
cagcagcggacagcatcctgaggtgatcccagcccgcgaatgcgcgccca

SEQ ID NO: 30113 - DNA, 50 bp, unidentified
  source 1..50: mol_type = unassigned DNA; note = target_f988f91
  misc_feature 1..24: note = LF
  misc_feature 25: note = Core
  misc_feature 26..50: note = RF
cttggtgcgccgccgcatatccggtttgggtcattcgcgtcgtgttggca

SEQ ID NO: 30114 - DNA, 50 bp, unidentified
  source 1..50: mol_type = unassigned DNA; note = target_f990f47
  misc_feature 1..23: note = LF
  misc_feature 24..25: note = Core
  misc_feature 26..50: note = RF
ctgatcctgcgtacctgaaattaatgtaggagccggcttgccggcgaaag

SEQ ID NO: 30115 - DNA, 50 bp, unidentified
  source 1..50: mol_type = unassigned DNA; note = target_f9955d0
  misc_feature 1..22: note = LF
  misc_feature 23..25: note = Core
  misc_feature 26..50: note = RF
ttcaatccaacttcagctatgcggacaaaaaaaggcgcccgattgagcgc

SEQ ID NO: 30116 - DNA, 50 bp, unidentified
  source 1..50: mol_type = unassigned DNA; note = target_f99d297
  misc_feature 1..23: note = LF
  misc_feature 24..25: note = Core
  misc_feature 26..50: note = RF
ccaggaacgcgaacgagaggtcgctcacgaccgctcctcccccggtcgga

SEQ ID NO: 30117 - DNA, 50 bp, unidentified
  source 1..50: mol_type = unassigned DNA; note = target_f9aaa70
  misc_feature 1..23: note = LF
  misc_feature 24..25: note = Core
  misc_feature 26..50: note = RF
tggggccggagtgatctccagccctcatcacttccgtgcaacatggtccc

SEQ ID NO: 30118 - DNA, 50 bp, unidentified
  source 1..50: mol_type = unassigned DNA; note = target_f9adc42
  misc_feature 1..24: note = LF
  misc_feature 25: note = Core
  misc_feature 26..50: note = RF
gtttcagcaatggggcgcttgacgtgaccccctgaaactcctccaggaat

SEQ ID NO: 30119 - DNA, 50 bp, unidentified
  source 1..50: mol_type = unassigned DNA; note = target_f9b5899
  misc_feature 1..24: note = LF
  misc_feature 25: note = Core
  misc_feature 26..50: note = RF
gcggaggagacttccgctcatcggcatgtgcgtgcaggtttgcagtgtgt

SEQ ID NO: 30120 - DNA, 50 bp, unidentified
  source 1..50: mol_type = unassigned DNA; note = target_f9b6f8a
  misc_feature 1..23: note = LF
  misc_feature 24..25: note = Core
  misc_feature 26..50: note = RF
gagatccgcttcgaagaagaaggaatgaacatgtttgcgtgcggtattaa

SEQ ID NO: 30121 - DNA, 50 bp, unidentified
  source 1..50: mol_type = unassigned DNA; note = target_f9b923d
  misc_feature 1..24: note = LF
  misc_feature 25: note = Core
  misc_feature 26..50: note = RF
gcagctgcgggcagtcgtgtctctcacccccccgtgcctcaagggcctgg

SEQ ID NO: 30122 - DNA, 50 bp, unidentified
  source 1..50: mol_type = unassigned DNA; note = target_f9c2f58
  misc_feature 1..23: note = LF
  misc_feature 24..25: note = Core
  misc_feature 26..50: note = RF
ccttatcgcgggcaagcccgctcctacaattggccagcctggccaacatg

SEQ ID NO: 30123 - DNA, 50 bp, unidentified
  source 1..50: mol_type = unassigned DNA; note = target_f9c63e5
  misc_feature 1..23: note = LF
  misc_feature 24..25: note = Core
  misc_feature 26..50: note = RF
atggccgtcccgatcctcggcctctgacctgcgtcggaggccctttctgg

SEQ ID NO: 30124 - DNA, 50 bp, unidentified
  source 1..50: mol_type = unassigned DNA; note = target_f9c7e40
  misc_feature 1..23: note = LF
  misc_feature 24..25: note = Core
  misc_feature 26..50: note = RF
aggaatgagccattgtccgccattggtccgaggacaatggcgaatgatgc

SEQ ID NO: 30125 - DNA, 50 bp, unidentified
  source 1..50: mol_type = unassigned DNA; note = target_f9c9fc1
  misc_feature 1..23: note = LF
  misc_feature 24..25: note = Core
  misc_feature 26..50: note = RF
cgaacgaataatctgaagggcactgggaaggacataaatccattcaccgt

SEQ ID NO: 30126 - DNA, 50 bp, unidentified
  source 1..50: mol_type = unassigned DNA; note = target_f9ccca3
  misc_feature 1..22: note = LF
  misc_feature 23..25: note = Core
  misc_feature 26..50: note = RF
tgatatatgccaaaaccaatttactcctacagtctaaatcaaattctcag

SEQ ID NO: 30127 - DNA, 50 bp, unidentified
  source 1..50: mol_type = unassigned DNA; note = target_f9cef77
  misc_feature 1..23: note = LF
  misc_feature 24..25: note = Core
  misc_feature 26..50: note = RF
tcaaggagggttgagccttcatcttcgttccttcgtcactacgacgaagc

SEQ ID NO: 30128 - DNA, 50 bp, unidentified
  source 1..50: mol_type = unassigned DNA; note = target_f9cf488
  misc_feature 1..22: note = LF
  misc_feature 23..25: note = Core
  misc_feature 26..50: note = RF
gatgtcgaccacgacgaacgttctccttgccatccgggctgcccatcggc

SEQ ID NO: 30129 - DNA, 50 bp, unidentified
  source 1..50: mol_type = unassigned DNA; note = target_f9d172b
  misc_feature 1..22: note = LF
  misc_feature 23..25: note = Core
  misc_feature 26..50: note = RF
taaattgtattcataaattctcctttagttgtatatgcaaattatactat

SEQ ID NO: 30130 - DNA, 50 bp, unidentified
  source 1..50: mol_type = unassigned DNA; note = target_f9e15b6
  misc_feature 1..23: note = LF
  misc_feature 24..25: note = Core
  misc_feature 26..50: note = RF
aagaacgatgagcatcataaaaactctagaacgggtcgccgatggtcatg

SEQ ID NO: 30131 - DNA, 50 bp, unidentified
  source 1..50: mol_type = unassigned DNA; note = target_f9e3381
  misc_feature 1..23: note = LF
  misc_feature 24..25: note = Core
  misc_feature 26..50: note = RF
ctcagggaaccgaacagaatagctattgataacagcccttccgtccaaca

SEQ ID NO: 30132 - DNA, 50 bp, unidentified
  source 1..50: mol_type = unassigned DNA; note = target_f9e5b02
  misc_feature 1..21: note = LF
  misc_feature 22..25: note = Core
  misc_feature 26..50: note = RF
ggcgccaccgatgtcgatccgctcatgcgtgcgccatcgaaatcattcca

SEQ ID NO: 30133 - DNA, 50 bp, unidentified
  source 1..50: mol_type = unassigned DNA; note = target_f9f0b9a
  misc_feature 1..23: note = LF
  misc_feature 24..25: note = Core
  misc_feature 26..50: note = RF
ccggacgcccattccgattggagtgcaccctcagactgagacaaggaaga

SEQ ID NO: 30134 - DNA, 50 bp, unidentified
  source 1..50: mol_type = unassigned DNA; note = target_f9f87b5
  misc_feature 1..21: note = LF
  misc_feature 22..25: note = Core
  misc_feature 26..50: note = RF
gcatgggggacagcgcatccgctcatccgtcacgcccgtccggcggaatt

SEQ ID NO: 30135 - DNA, 50 bp, unidentified
  source 1..50: mol_type = unassigned DNA; note = target_f9ffbcd
  misc_feature 1..23: note = LF
  misc_feature 24..25: note = Core
  misc_feature 26..50: note = RF
gcgactccggggcagtccgaagttggcccgagtatttctattttggagtg

SEQ ID NO: 30136 - DNA, 50 bp, unidentified
  source 1..50: mol_type = unassigned DNA; note = target_fa04563
  misc_feature 1..23: note = LF
  misc_feature 24..25: note = Core
  misc_feature 26..50: note = RF
agaaagccccgcatccgcggggcttttattgggcgctatcgcctcaattc

SEQ ID NO: 30137 - DNA, 50 bp, unidentified
  source 1..50: mol_type = unassigned DNA; note = target_fa0580a
  misc_feature 1..23: note = LF
  misc_feature 24..25: note = Core
  misc_feature 26..50: note = RF
atttatgggagccccagtacgtcctgcgtacgattcaacttcgcacaaaa

SEQ ID NO: 30138 - DNA, 50 bp, unidentified
  source 1..50: mol_type = unassigned DNA; note = target_fa07c46
  misc_feature 1..22: note = LF
  misc_feature 23..25: note = Core
  misc_feature 26..50: note = RF
tgccatcgtgctcgcggccgtcaaggacaagcccttcgggtggccgcgaa

SEQ ID NO: 30139 - DNA, 50 bp, unidentified
  source 1..50: mol_type = unassigned DNA; note = target_fa12a2f
  misc_feature 1..24: note = LF
  misc_feature 25: note = Core
  misc_feature 26..50: note = RF
atgctgagtgcggcatgacaggcgtggattccaaaaataggacctactat

SEQ ID NO: 30140 - DNA, 50 bp, unidentified
  source 1..50: mol_type = unassigned DNA; note = target_fa16e53
  misc_feature 1..23: note = LF
  misc_feature 24..25: note = Core
  misc_feature 26..50: note = RF
tcaccctgcgtgaaggcccctgactgaccgcataccgcacatccgtcccc

SEQ ID NO: 30141 - DNA, 50 bp, unidentified
  source 1..50: mol_type = unassigned DNA; note = target_fa19c46
  misc_feature 1..23: note = LF
  misc_feature 24..25: note = Core
  misc_feature 26..50: note = RF
ctaagtttaacatatttatgctcctttctgtttatgttgactgttctgcg

SEQ ID NO: 30142 - DNA, 50 bp, unidentified
  source 1..50: mol_type = unassigned DNA; note = target_fa1ccb3
  misc_feature 1..24: note = LF
  misc_feature 25: note = Core
  misc_feature 26..50: note = RF
gaacaccggccacccgcccggccccccccccccccccccccccccccctg

SEQ ID NO: 30143 - DNA, 50 bp, unidentified
  source 1..50: mol_type = unassigned DNA; note = target_fa1eab3
  misc_feature 1..24: note = LF
  misc_feature 25: note = Core
  misc_feature 26..50: note = RF
aacgactagtcattcaagaacgtccccaacgactacatgaaagcgccccc

SEQ ID NO: 30144 - DNA, 50 bp, unidentified
  source 1..50: mol_type = unassigned DNA; note = target_fa1edda
  misc_feature 1..21: note = LF
  misc_feature 22..25: note = Core
  misc_feature 26..50: note = RF
gcacgtcggacctgccgggcgctcatgcgaccagccgccgggtgaacagg

SEQ ID NO: 30145 - DNA, 50 bp, unidentified
  source 1..50: mol_type = unassigned DNA; note = target_fa1fbb9
  misc_feature 1..23: note = LF
  misc_feature 24..25: note = Core
  misc_feature 26..50: note = RF
tgctgttttcattctctttcctcctttttcttccattgtaataaaaatat

SEQ ID NO: 30146 - DNA, 50 bp, unidentified
  source 1..50: mol_type = unassigned DNA; note = target_fa2508b
  misc_feature 1..24: note = LF
  misc_feature 25: note = Core
  misc_feature 26..50: note = RF
tatctcggctattatttttatacattgttggcatttcgttatttattttc

SEQ ID NO: 30147 - DNA, 50 bp, unidentified
  source 1..50: mol_type = unassigned DNA; note = target_fa2b28e
  misc_feature 1..23: note = LF
  misc_feature 24..25: note = Core
  misc_feature 26..50: note = RF
tgcgtccattcggacgcagggcgctctaacctattgaatcgacgcatcgt

SEQ ID NO: 30148 - DNA, 50 bp, unidentified
  source 1..50: mol_type = unassigned DNA; note = target_fa38df8
  misc_feature 1..23: note = LF
  misc_feature 24..25: note = Core
  misc_feature 26..50: note = RF
gaaattaatatctacatcatttcgttgtaaaaaagatgaggctaatattc

SEQ ID NO: 30149 - DNA, 50 bp, unidentified
  source 1..50: mol_type = unassigned DNA; note = target_fa46090
  misc_feature 1..23: note = LF
  misc_feature 24..25: note = Core
  misc_feature 26..50: note = RF
gccgtagtttggcttgggctcctagcctgctggttttgcgggtaccgtct

SEQ ID NO: 30150 - DNA, 50 bp, unidentified
  source 1..50: mol_type = unassigned DNA; note = target_fa47690
  misc_feature 1..22: note = LF
  misc_feature 23..25: note = Core
  misc_feature 26..50: note = RF
gaatgccccttgggctgtaccccttctcccaagtggggagaaggggagca

SEQ ID NO: 30151 - DNA, 50 bp, unidentified
  source 1..50: mol_type = unassigned DNA; note = target_fa49708
  misc_feature 1..23: note = LF
  misc_feature 24..25: note = Core
  misc_feature 26..50: note = RF
agattgagaacgtcagcccagggtggttagcggcctttcccaaataacct

SEQ ID NO: 30152 - DNA, 50 bp, unidentified
  source 1..50: mol_type = unassigned DNA; note = target_fa4ec0d
  misc_feature 1..23: note = LF
  misc_feature 24..25: note = Core
  misc_feature 26..50: note = RF
tccaaagtccatcttcatttctcctttcatttttcatcatcacggacagg

SEQ ID NO: 30153 - DNA, 50 bp, unidentified
  source 1..50: mol_type = unassigned DNA; note = target_fa518fe
  misc_feature 1..23: note = LF
  misc_feature 24..25: note = Core
  misc_feature 26..50: note = RF
cactggccccgccccgagagggcagggggcgcggacctggccgcctgagc

SEQ ID NO: 30154 - DNA, 50 bp, unidentified
  source 1..50: mol_type = unassigned DNA; note = target_fa576db
  misc_feature 1..23: note = LF
  misc_feature 24..25: note = Core
  misc_feature 26..50: note = RF
acttctttgatatctcttttacgctcatattatatttattctcaaacatc

SEQ ID NO: 30155 - DNA, 50 bp, unidentified
  source 1..50: mol_type = unassigned DNA; note = target_fa5a718
  misc_feature 1..24: note = LF
  misc_feature 25: note = Core
  misc_feature 26..50: note = RF
aatttcctcaccgtgaataaagttttagtttaccacaataaataagtgtc

SEQ ID NO: 30156 - DNA, 50 bp, unidentified
  source 1..50: mol_type = unassigned DNA; note = target_fa6f830
  misc_feature 1..22: note = LF
  misc_feature 23..25: note = Core
  misc_feature 26..50: note = RF
ttttcagaaacataatgatttcctttcagattaaattgttgattttctgt

SEQ ID NO: 30157 - DNA, 50 bp, unidentified
  source 1..50: mol_type = unassigned DNA; note = target_fa7058e
  misc_feature 1..24: note = LF
  misc_feature 25: note = Core
  misc_feature 26..50: note = RF
tgattattcaataaaagcgcccgattgttgaagattgttattaactaaac

SEQ ID NO: 30158 - DNA, 50 bp, unidentified
  source 1..50: mol_type = unassigned DNA; note = target_fa70fb3
  misc_feature 1..23: note = LF
  misc_feature 24..25: note = Core
  misc_feature 26..50: note = RF
ttcttttgcatatttcatgttacctctctcctttcaatatgtggctttcc

SEQ ID NO: 30159 - DNA, 50 bp, unidentified
  source 1..50: mol_type = unassigned DNA; note = target_fa7a698
  misc_feature 1..23: note = LF
  misc_feature 24..25: note = Core
  misc_feature 26..50: note = RF
gaatgggccgagatgcatgtatcagccttcttgagagccactggcaaagc

SEQ ID NO: 30160 - DNA, 50 bp, unidentified
  source 1..50: mol_type = unassigned DNA; note = target_fa7d429
  misc_feature 1..23: note = LF
  misc_feature 24..25: note = Core
  misc_feature 26..50: note = RF
cgcgtgggctcggggagcccaccctacgcagccgccggatcggcctgctc

SEQ ID NO: 30161 - DNA, 50 bp, unidentified
  source 1..50: mol_type = unassigned DNA; note = target_fa8eac6
  misc_feature 1..21: note = LF
  misc_feature 22..25: note = Core
  misc_feature 26..50: note = RF
gaatagagcgtgataataaacctccaaagtttagtatgccttcctcttta

SEQ ID NO: 30162 - DNA, 50 bp, unidentified
  source 1..50: mol_type = unassigned DNA; note = target_fa971d7
  misc_feature 1..24: note = LF
  misc_feature 25: note = Core
  misc_feature 26..50: note = RF
agtactagcaatgatttatacacgttgttgtaagcagttttttagttgtt

SEQ ID NO: 30163 - DNA, 50 bp, unidentified
  source 1..50: mol_type = unassigned DNA; note = target_fa9f145
  misc_feature 1..23: note = LF
  misc_feature 24..25: note = Core
  misc_feature 26..50: note = RF
ttgggccagaatcggtagtaggtcggattagccaaaggcgtaatccgacg

SEQ ID NO: 30164 - DNA, 50 bp, unidentified
  source 1..50: mol_type = unassigned DNA; note = target_faa57f7
  misc_feature 1..23: note = LF
  misc_feature 24..25: note = Core
  misc_feature 26..50: note = RF
gagcggagcgtacttaaagtacgtgagcaccggaagcgcaggaagccgcc

SEQ ID NO: 30165 - DNA, 50 bp, unidentified
  source 1..50: mol_type = unassigned DNA; note = target_faa8cda
  misc_feature 1..23: note = LF
  misc_feature 24..25: note = Core
  misc_feature 26..50: note = RF
aagatcgcagcctccggcagctcctacattggaatgtgatcctctgtagg

SEQ ID NO: 30166 - DNA, 50 bp, unidentified
  source 1..50: mol_type = unassigned DNA; note = target_fab38a7
  misc_feature 1..24: note = LF
  misc_feature 25: note = Core
  misc_feature 26..50: note = RF
ctgcacagctatgagctatatacgttgttgccagtagtacttttttaaaa

SEQ ID NO: 30167 - DNA, 50 bp, unidentified
  source 1..50: mol_type = unassigned DNA; note = target_fabaf4b
  misc_feature 1..23: note = LF
  misc_feature 24..25: note = Core
  misc_feature 26..50: note = RF
agcggctgagctgcttgaaatcagacatcgggccagttctgctttggagg

SEQ ID NO: 30168 - DNA, 50 bp, unidentified
  source 1..50: mol_type = unassigned DNA; note = target_fabeca0
  misc_feature 1..23: note = LF
  misc_feature 24..25: note = Core
  misc_feature 26..50: note = RF
tggcgcgactagtggtgcatatctgacgcttggtgcgcgattcggaggac

SEQ ID NO: 30169 - DNA, 50 bp, unidentified
  source 1..50: mol_type = unassigned DNA; note = target_faccd57
  misc_feature 1..23: note = LF
  misc_feature 24..25: note = Core
  misc_feature 26..50: note = RF
tcctgagtgattacaacctgccttgcataaaggcagctccccaaaagaaa

SEQ ID NO: 30170 - DNA, 50 bp, unidentified
  source 1..50: mol_type = unassigned DNA; note = target_fadc301
  misc_feature 1..24: note = LF
  misc_feature 25: note = Core
  misc_feature 26..50: note = RF
agccgccccactataaggacggaacaaaaatcaggccacttcatacattt

SEQ ID NO: 30171 - DNA, 50 bp, unidentified
  source 1..50: mol_type = unassigned DNA; note = target_fafda8d
  misc_feature 1..24: note = LF
  misc_feature 25: note = Core
  misc_feature 26..50: note = RF
ccagatctccgggcccggcccgcgcgggagcatgcggtccgcaccccggc

SEQ ID NO: 30172 - DNA, 50 bp, unidentified
  source 1..50: mol_type = unassigned DNA; note = target_fb0009b
  misc_feature 1..23: note = LF
  misc_feature 24..25: note = Core
  misc_feature 26..50: note = RF
ggggctggatcgcggaacccatctgggccagcggtcatgatgccgcgtca

SEQ ID NO: 30173 - DNA, 50 bp, unidentified
  source 1..50: mol_type = unassigned DNA; note = target_fb0518a
  misc_feature 1..23: note = LF
  misc_feature 24..25: note = Core
  misc_feature 26..50: note = RF
aaagtttaatcattttcttcctccttatacttctttattgccgtaaaaag

SEQ ID NO: 30174 - DNA, 50 bp, unidentified
  source 1..50: mol_type = unassigned DNA; note = target_fb138ea
  misc_feature 1..24: note = LF
  misc_feature 25: note = Core
  misc_feature 26..50: note = RF
tcaacaactgctgtaggtccagactgtgtgaaaactaaattgttgccttt

SEQ ID NO: 30175 - DNA, 50 bp, unidentified
  source 1..50: mol_type = unassigned DNA; note = target_fb280b3
  misc_feature 1..22: note = LF
  misc_feature 23..25: note = Core
  misc_feature 26..50: note = RF
gccgcgtcggtcttgccccgcttgacgtagggcttcacgtaagccggcgg

SEQ ID NO: 30176 - DNA, 50 bp, unidentified
  source 1..50: mol_type = unassigned DNA; note = target_fb37c70
  misc_feature 1..22: note = LF
  misc_feature 23..25: note = Core
  misc_feature 26..50: note = RF
taaaacacctcaacaaattccgatttgttaaattcatgatagcacacgca

SEQ ID NO: 30177 - DNA, 50 bp, unidentified
  source 1..50: mol_type = unassigned DNA; note = target_fb3a05c
  misc_feature 1..21: note = LF
  misc_feature 22..25: note = Core
  misc_feature 26..50: note = RF
gtgacgaggacgcgccggccgctcatcgccggccctcgagcgcggcgcgc

SEQ ID NO: 30178 - DNA, 50 bp, unidentified
  source 1..50: mol_type = unassigned DNA; note = target_fb5a1e3
  misc_feature 1..24: note = LF
  misc_feature 25: note = Core
  misc_feature 26..50: note = RF
ttgttccaggctgtaccccataaacgtccatgtacgggggatgccgcatt

SEQ ID NO: 30179 - DNA, 50 bp, unidentified
  source 1..50: mol_type = unassigned DNA; note = target_fb6a5c6
  misc_feature 1..22: note = LF
  misc_feature 23..25: note = Core
  misc_feature 26..50: note = RF
atttccgggccaaattgcacgttctccgactggcgagtctcgctgtgggg

SEQ ID NO: 30180 - DNA, 50 bp, unidentified
  source 1..50: mol_type = unassigned DNA; note = target_fb747e6
  misc_feature 1..23: note = LF
  misc_feature 24..25: note = Core
  misc_feature 26..50: note = RF
gtcatcttctggcacaatcaatgagtcctgggcctaggcttcagtgccaa

SEQ ID NO: 30181 - DNA, 50 bp, unidentified
  source 1..50: mol_type = unassigned DNA; note = target_fb75dc0
  misc_feature 1..23: note = LF
  misc_feature 24..25: note = Core
  misc_feature 26..50: note = RF
tggaaaaccgccagcctggcggttttttatacctgactgttgcactcaag

SEQ ID NO: 30182 - DNA, 50 bp, unidentified
  source 1..50: mol_type = unassigned DNA; note = target_fb78ba1
  misc_feature 1..23: note = LF
  misc_feature 24..25: note = Core
  misc_feature 26..50: note = RF
tgggcttaaggggacgtttgtcccttttcttttgaggtgagcatgattaa

SEQ ID NO: 30183 - DNA, 50 bp, unidentified
  source 1..50: mol_type = unassigned DNA; note = target_fb7ae89
  misc_feature 1..24: note = LF
  misc_feature 25: note = Core
  misc_feature 26..50: note = RF
tactcaaaacattctataaaagagggttaccatgaaacctctttgtttta

SEQ ID NO: 30184 - DNA, 50 bp, unidentified
  source 1..50: mol_type = unassigned DNA; note = target_fb83370
  misc_feature 1..23: note = LF
  misc_feature 24..25: note = Core
  misc_feature 26..50: note = RF
aatccgaaaaattgtttctttcaaaataaccataaatccccttgtactga

SEQ ID NO: 30185 - DNA, 50 bp, unidentified
  source 1..50: mol_type = unassigned DNA; note = target_fb87288
  misc_feature 1..22: note = LF
  misc_feature 23..25: note = Core
  misc_feature 26..50: note = RF
tcgtgctgcgaaatttgagatccttcgccgtctacgcggctcgggatgac

SEQ ID NO: 30186 - DNA, 50 bp, unidentified
  source 1..50: mol_type = unassigned DNA; note = target_fb9dfef
  misc_feature 1..23: note = LF
  misc_feature 24..25: note = Core
  misc_feature 26..50: note = RF
cttggcgttttgacccacatcacctcaaatgtggttcggatccttttgca

SEQ ID NO: 30187 - DNA, 50 bp, unidentified
  source 1..50: mol_type = unassigned DNA; note = target_fb9fa92
  misc_feature 1..23: note = LF
  misc_feature 24..25: note = Core
  misc_feature 26..50: note = RF
tagcgctgccagcgtagtgcgtgtgtcacctctcggccgcttgcatttcc

SEQ ID NO: 30188 - DNA, 50 bp, unidentified
  source 1..50: mol_type = unassigned DNA; note = target_fbaf8fd
  misc_feature 1..23: note = LF
  misc_feature 24..25: note = Core
  misc_feature 26..50: note = RF
gtaatgctcatctccagagagaacttacagggattgaagaaaactataaa

SEQ ID NO: 30189 - DNA, 50 bp, unidentified
  source 1..50: mol_type = unassigned DNA; note = target_fbb9ea7
  misc_feature 1..22: note = LF
  misc_feature 23..25: note = Core
  misc_feature 26..50: note = RF
acccgaaattgcctcaagtgtgagaaatccgcgtcaacggcagcacgcag

SEQ ID NO: 30190 - DNA, 50 bp, unidentified
  source 1..50: mol_type = unassigned DNA; note = target_fbbd9c2
  misc_feature 1..23: note = LF
  misc_feature 24..25: note = Core
  misc_feature 26..50: note = RF
cgctatcgctacaataaaatcactcgaagtgacagtagcgttcaaagttg

SEQ ID NO: 30191 - DNA, 50 bp, unidentified
  source 1..50: mol_type = unassigned DNA; note = target_fbbf133
  misc_feature 1..21: note = LF
  misc_feature 22..25: note = Core
  misc_feature 26..50: note = RF
ccccccggccacgccgtaacgccccccaggccacagttcatcctttctct

SEQ ID NO: 30192 - DNA, 50 bp, unidentified
  source 1..50: mol_type = unassigned DNA; note = target_fbdb9ad
  misc_feature 1..23: note = LF
  misc_feature 24..25: note = Core
  misc_feature 26..50: note = RF
gtgcgtgaatgacggatttggggtgggtagccgacaggcggctttcgggt

SEQ ID NO: 30193 - DNA, 50 bp, unidentified
  source 1..50: mol_type = unassigned DNA; note = target_fbdcddb
  misc_feature 1..21: note = LF
  misc_feature 22..25: note = Core
  misc_feature 26..50: note = RF
gccgaacgtgcgttcacggttctcctcgcagacagggggtgggggacgcg

SEQ ID NO: 30194 - DNA, 50 bp, unidentified
  source 1..50: mol_type = unassigned DNA; note = target_fbdf61c
  misc_feature 1..24: note = LF
  misc_feature 25: note = Core
  misc_feature 26..50: note = RF
ccaccaccgcggccacccccctcccaccaaggccgacgacggatgcggcg

SEQ ID NO: 30195 - DNA, 50 bp, unidentified
  source 1..50: mol_type = unassigned DNA; note = target_fbe2235
  misc_feature 1..23: note = LF
  misc_feature 24..25: note = Core
  misc_feature 26..50: note = RF
atgctacgggcggagggcggctttgtcggaatcgaacgcgacggtcgaga

SEQ ID NO: 30196 - DNA, 50 bp, unidentified
  source 1..50: mol_type = unassigned DNA; note = target_fbeb7a5
  misc_feature 1..23: note = LF
  misc_feature 24..25: note = Core
  misc_feature 26..50: note = RF
tgattatttatccgcaaccgttactactcaggatggaggttttttacttg

SEQ ID NO: 30197 - DNA, 50 bp, unidentified
  source 1..50: mol_type = unassigned DNA; note = target_fbf69e7
  misc_feature 1..23: note = LF
  misc_feature 24..25: note = Core
  misc_feature 26..50: note = RF
ttcattgataagcatattatcacctccactggtatgataagcccaccccc

SEQ ID NO: 30198 - DNA, 50 bp, unidentified
  source 1..50: mol_type = unassigned DNA; note = target_fbfef73
  misc_feature 1..23: note = LF
  misc_feature 24..25: note = Core
  misc_feature 26..50: note = RF
gggcgacgaatgcggcctggtgctgttgcagaagcccacatagcggccga

SEQ ID NO: 30199 - DNA, 50 bp, unidentified
  source 1..50: mol_type = unassigned DNA; note = target_fc09541
  misc_feature 1..23: note = LF
  misc_feature 24..25: note = Core
  misc_feature 26..50: note = RF
tcgattccacgtgatcggaaaagctctaggagtgttcaagattaagctgc

SEQ ID NO: 30200 - DNA, 50 bp, unidentified
  source 1..50: mol_type = unassigned DNA; note = target_fc2001a
  misc_feature 1..22: note = LF
  misc_feature 23..25: note = Core
  misc_feature 26..50: note = RF
cttgccgtccttttttatcctcctttcttaaaaaacctatacctgaaagg

SEQ ID NO: 30201 - DNA, 50 bp, unidentified
  source 1..50: mol_type = unassigned DNA; note = target_fc2363f
  misc_feature 1..24: note = LF
  misc_feature 25: note = Core
  misc_feature 26..50: note = RF
tccttattacagaatcgcgcccgattgttgtataaggttttttcttattc

SEQ ID NO: 30202 - DNA, 50 bp, unidentified
  source 1..50: mol_type = unassigned DNA; note = target_fc28cd0
  misc_feature 1..23: note = LF
  misc_feature 24..25: note = Core
  misc_feature 26..50: note = RF
gggggtagttgtctcatcatcgttggcacggagggcgacaaaccgagcgt

SEQ ID NO: 30203 - DNA, 50 bp, unidentified
  source 1..50: mol_type = unassigned DNA; note = target_fc4050b
  misc_feature 1..24: note = LF
  misc_feature 25: note = Core
  misc_feature 26..50: note = RF
tgagtgaaacgccctgtgcggagccgcatgcagggtgttgtgggggctgg

SEQ ID NO: 30204 - DNA, 50 bp, unidentified
  source 1..50: mol_type = unassigned DNA; note = target_fc41b1b
  misc_feature 1..22: note = LF
  misc_feature 23..25: note = Core
  misc_feature 26..50: note = RF
ttgtacttaaactatcaggggcgtttagtcaaataacaagtacagccact

SEQ ID NO: 30205 - DNA, 50 bp, unidentified
  source 1..50: mol_type = unassigned DNA; note = target_fc4b41a
  misc_feature 1..23: note = LF
  misc_feature 24..25: note = Core
  misc_feature 26..50: note = RF
gatactatcattatagtaataacctcttttatagattatcttgatgacgc

SEQ ID NO: 30206 - DNA, 50 bp, unidentified
  source 1..50: mol_type = unassigned DNA; note = target_fc4db3f
  misc_feature 1..23: note = LF
  misc_feature 24..25: note = Core
  misc_feature 26..50: note = RF
tgattgctgcaattatattcctccttttgttcactactttttataaatca

SEQ ID NO: 30207 - DNA, 50 bp, unidentified
  source 1..50: mol_type = unassigned DNA; note = target_fc4e08f
  misc_feature 1..24: note = LF
  misc_feature 25: note = Core
  misc_feature 26..50: note = RF
gattcctgtgacaagcacaggaaatgagggagagtgaagggatggcgcag

SEQ ID NO: 30208 - DNA, 50 bp, unidentified
  source 1..50: mol_type = unassigned DNA; note = target_fc52da6
  misc_feature 1..22: note = LF
  misc_feature 23..25: note = Core
  misc_feature 26..50: note = RF
ggaatggagagccctgcgctccccccccgagctgtgactacttcttttta

SEQ ID NO: 30209 - DNA, 50 bp, unidentified
  source 1..50: mol_type = unassigned DNA; note = target_fc5309c
  misc_feature 1..24: note = LF
  misc_feature 25: note = Core
  misc_feature 26..50: note = RF
gatcgccgaccgcgctctgcgcggcatttgaggatgtttcggtgaaccgt

SEQ ID NO: 30210 - DNA, 50 bp, unidentified
  source 1..50: mol_type = unassigned DNA; note = target_fc57905
  misc_feature 1..23: note = LF
  misc_feature 24..25: note = Core
  misc_feature 26..50: note = RF
taagaccaaccctaaccctaaccctctccctaaaagggagaggggacgaa

SEQ ID NO: 30211 - DNA, 50 bp, unidentified
  source 1..50: mol_type = unassigned DNA; note = target_fc5e65d
  misc_feature 1..20: note = LF
  misc_feature 21..25: note = Core
  misc_feature 26..50: note = RF
aaaagcgtcaggcctttctcctgctttctcgccgctttctcgccgcggcg

SEQ ID NO: 30212 - DNA, 50 bp, unidentified
  source 1..50: mol_type = unassigned DNA; note = target_fc5f7e8
  misc_feature 1..24: note = LF
  misc_feature 25: note = Core
  misc_feature 26..50: note = RF
acgacagcgaccgcaacatctgtttttttgagcccgccgccacctcaaga

SEQ ID NO: 30213 - DNA, 50 bp, unidentified
  source 1..50: mol_type = unassigned DNA; note = target_fc6696d
  misc_feature 1..23: note = LF
  misc_feature 24..25: note = Core
  misc_feature 26..50: note = RF
aggttgcagcccccggttcgtcgctaggtcctaccctcagtcacactctg

SEQ ID NO: 30214 - DNA, 50 bp, unidentified
  source 1..50: mol_type = unassigned DNA; note = target_fc68802
  misc_feature 1..24: note = LF
  misc_feature 25: note = Core
  misc_feature 26..50: note = RF
gcccctaccgcgaccgatcgtaagcgtccagcgaacacacgctcgacgtg

SEQ ID NO: 30215 - DNA, 50 bp, unidentified
  source 1..50: mol_type = unassigned DNA; note = target_fc6ab03
  misc_feature 1..23: note = LF
  misc_feature 24..25: note = Core
  misc_feature 26..50: note = RF
ttatagaaagaaaaactttgcgcctttgcgagaaaaaaaataaacaatga

SEQ ID NO: 30216 - DNA, 50 bp, unidentified
  source 1..50: mol_type = unassigned DNA; note = target_fc72668
  misc_feature 1..24: note = LF
  misc_feature 25: note = Core
  misc_feature 26..50: note = RF
taatttttcataattcttatttcctccaaaagaatattttattttcgagt

SEQ ID NO: 30217 - DNA, 50 bp, unidentified
  source 1..50: mol_type = unassigned DNA; note = target_fc78d8e
  misc_feature 1..23: note = LF
  misc_feature 24..25: note = Core
  misc_feature 26..50: note = RF
tcgtcgaggcatggaatgggcgttgttgcagaattcgtcgtcgggacgcg

SEQ ID NO: 30218 - DNA, 50 bp, unidentified
  source 1..50: mol_type = unassigned DNA; note = target_fc8650c
  misc_feature 1..23: note = LF
  misc_feature 24..25: note = Core
  misc_feature 26..50: note = RF
tgtggcggcggacctgcgattcttttttctgtcccgcctgagcgaggcgg

SEQ ID NO: 30219 - DNA, 50 bp, unidentified
  source 1..50: mol_type = unassigned DNA; note = target_fc89a8f
  misc_feature 1..21: note = LF
  misc_feature 22..25: note = Core
  misc_feature 26..50: note = RF
gtggtgaccgcggtcttcatgttatcgtagatgccgcgcaggggaacgcc

SEQ ID NO: 30220 - DNA, 50 bp, unidentified
  source 1..50: mol_type = unassigned DNA; note = target_fc91aac
  misc_feature 1..24: note = LF
  misc_feature 25: note = Core
  misc_feature 26..50: note = RF
cctagccaaacgcgctgtacgcggcatgagcgcgcattcacgcccagcgc

SEQ ID NO: 30221 - DNA, 50 bp, unidentified
  source 1..50: mol_type = unassigned DNA; note = target_fc92dc9
  misc_feature 1..24: note = LF
  misc_feature 25: note = Core
  misc_feature 26..50: note = RF
cggtgcgggggtcaagacgtccgctcgggtcatcattccccggtccgtta

SEQ ID NO: 30222 - DNA, 50 bp, unidentified
  source 1..50: mol_type = unassigned DNA; note = target_fc984e1
  misc_feature 1..23: note = LF
  misc_feature 24..25: note = Core
  misc_feature 26..50: note = RF
acaaacgttaactcggcggctattggcacacgaatttcgggaacagcggc

SEQ ID NO: 30223 - DNA, 50 bp, unidentified
  source 1..50: mol_type = unassigned DNA; note = target_fc994b8
  misc_feature 1..23: note = LF
  misc_feature 24..25: note = Core
  misc_feature 26..50: note = RF
tgttacaggcgcagttacaggacctacagccattagctctgatatggtga

SEQ ID NO: 30224 - DNA, 50 bp, unidentified
  source 1..50: mol_type = unassigned DNA; note = target_fc9a9ec
  misc_feature 1..22: note = LF
  misc_feature 23..25: note = Core
  misc_feature 26..50: note = RF
tagaaataaattcaaagcgatttttttatggaaattttttatctacattt

SEQ ID NO: 30225 - DNA, 50 bp, unidentified
  source 1..50: mol_type = unassigned DNA; note = target_fc9afb3
  misc_feature 1..23: note = LF
  misc_feature 24..25: note = Core
  misc_feature 26..50: note = RF
agcccgaccgatcggtaaggctctggattgcttcgctccctcgcaatgac

SEQ ID NO: 30226 - DNA, 50 bp, unidentified
  source 1..50: mol_type = unassigned DNA; note = target_fc9e3bf
  misc_feature 1..22: note = LF
  misc_feature 23..25: note = Core
  misc_feature 26..50: note = RF
cgagcggaagaacgcaggaaaaatgcgtgtaggagcgggacatggcgatg

SEQ ID NO: 30227 - DNA, 50 bp, unidentified
  source 1..50: mol_type = unassigned DNA; note = target_fc9e7ae
  misc_feature 1..20: note = LF
  misc_feature 21..25: note = Core
  misc_feature 26..50: note = RF
tgccgaaggggttctgctcgctcacgggacgtccacttcggcggcgccgg

SEQ ID NO: 30228 - DNA, 50 bp, unidentified
  source 1..50: mol_type = unassigned DNA; note = target_fc9eb86
  misc_feature 1..22: note = LF
  misc_feature 23..25: note = Core
  misc_feature 26..50: note = RF
gttgtatttttctcctctgtaggagcgaattcattcgcgaaaatccggta

SEQ ID NO: 30229 - DNA, 50 bp, unidentified
  source 1..50: mol_type = unassigned DNA; note = target_fca0953
  misc_feature 1..24: note = LF
  misc_feature 25: note = Core
  misc_feature 26..50: note = RF
ccgacagttcaacgatgggtgacttgtgtgtaatgggatgcctcaaaaag

SEQ ID NO: 30230 - DNA, 50 bp, unidentified
  source 1..50: mol_type = unassigned DNA; note = target_fca203a
  misc_feature 1..23: note = LF
  misc_feature 24..25: note = Core
  misc_feature 26..50: note = RF
tactgggtgaacaccgtggtaggagccgctttacgctgcgagcagttaaa

SEQ ID NO: 30231 - DNA, 50 bp, unidentified
  source 1..50: mol_type = unassigned DNA; note = target_fca2df2
  misc_feature 1..24: note = LF
  misc_feature 25: note = Core
  misc_feature 26..50: note = RF
ttcggaacgcgtgaaaaagccacattccggtaacgcctgccagctcaacc

SEQ ID NO: 30232 - DNA, 50 bp, unidentified
  source 1..50: mol_type = unassigned DNA; note = target_fca4afa
  misc_feature 1..24: note = LF
  misc_feature 25: note = Core
  misc_feature 26..50: note = RF
actacgacgaccgcccataagtgccgttatgtgcggcctgtatttgtggc

SEQ ID NO: 30233 - DNA, 50 bp, unidentified
  source 1..50: mol_type = unassigned DNA; note = target_fca802f
  misc_feature 1..24: note = LF
  misc_feature 25: note = Core
  misc_feature 26..50: note = RF
cctacgcggaagttttatctcacacagaaatcacagaaatcacagaaagg

SEQ ID NO: 30234 - DNA, 50 bp, unidentified
  source 1..50: mol_type = unassigned DNA; note = target_fcb00c5
  misc_feature 1..23: note = LF
  misc_feature 24..25: note = Core
  misc_feature 26..50: note = RF
tccgcaaaaaaatctaacccaacctacggaacttctatagccctataggt

SEQ ID NO: 30235 - DNA, 50 bp, unidentified
  source 1..50: mol_type = unassigned DNA; note = target_fcbba44
  misc_feature 1..23: note = LF
  misc_feature 24..25: note = Core
  misc_feature 26..50: note = RF
tgtgatgacggactgacccgagctgtcattcgttcaccggtccggcaatg

SEQ ID NO: 30236 - DNA, 50 bp, unidentified
  source 1..50: mol_type = unassigned DNA; note = target_fcc868f
  misc_feature 1..24: note = LF
  misc_feature 25: note = Core
  misc_feature 26..50: note = RF
ttcagccgcaatgaactatagccgttgttaccttttgtagcgcgaccgaa

SEQ ID NO: 30237 - DNA, 50 bp, unidentified
  source 1..50: mol_type = unassigned DNA; note = target_fcca76f
  misc_feature 1..24: note = LF
  misc_feature 25: note = Core
  misc_feature 26..50: note = RF
atcaaaaaatggtaacagcgatggctctatgggaagtaaatcaaaaccga

SEQ ID NO: 30238 - DNA, 50 bp, unidentified
  source 1..50: mol_type = unassigned DNA; note = target_fccb79d
  misc_feature 1..22: note = LF
  misc_feature 23..25: note = Core
  misc_feature 26..50: note = RF
aaaaagatttctaaattagaaaaaagacaagaaaaaaagaggtgggatat

SEQ ID NO: 30239 - DNA, 50 bp, unidentified
  source 1..50: mol_type = unassigned DNA; note = target_fcdfbad
  misc_feature 1..23: note = LF
  misc_feature 24..25: note = Core
  misc_feature 26..50: note = RF
cggcgccgtcgaacgaccttccgcttttcaggccggacatatccccagtt

SEQ ID NO: 30240 - DNA, 50 bp, unidentified
  source 1..50: mol_type = unassigned DNA; note = target_fce85af
  misc_feature 1..24: note = LF
  misc_feature 25: note = Core
  misc_feature 26..50: note = RF
gccgcccgtttagtgcggtctaacgttgtggtgaacggcgggccgaccga

SEQ ID NO: 30241 - DNA, 50 bp, unidentified
  source 1..50: mol_type = unassigned DNA; note = target_fcec0e3
  misc_feature 1..24: note = LF
  misc_feature 25: note = Core
  misc_feature 26..50: note = RF
agagtcaacccaaatccgcaggagagtcaaacatgaacgatattcgcccc

SEQ ID NO: 30242 - DNA, 50 bp, unidentified
  source 1..50: mol_type = unassigned DNA; note = target_fcf2e4f
  misc_feature 1..23: note = LF
  misc_feature 24..25: note = Core
  misc_feature 26..50: note = RF
tgatggtcatggttgttacactcctttcagaaaggcgcctgttccgccgg

SEQ ID NO: 30243 - DNA, 50 bp, unidentified
  source 1..50: mol_type = unassigned DNA; note = target_fcf41e2
  misc_feature 1..24: note = LF
  misc_feature 25: note = Core
  misc_feature 26..50: note = RF
cgaaccaggtacgcacattctgggcggatcgggctacatggcgtctccgc

SEQ ID NO: 30244 - DNA, 50 bp, unidentified
  source 1..50: mol_type = unassigned DNA; note = target_fcfdb19
  misc_feature 1..23: note = LF
  misc_feature 24..25: note = Core
  misc_feature 26..50: note = RF
ctttgagctgccattgttttctcctttatacatcataaaagcactacaat

SEQ ID NO: 30245 - DNA, 50 bp, unidentified
  source 1..50: mol_type = unassigned DNA; note = target_fd04eb2
  misc_feature 1..24: note = LF
  misc_feature 25: note = Core
  misc_feature 26..50: note = RF
ccgccggcttatctgaagcgtaaacgtcacataaaccacgcctagccacc

SEQ ID NO: 30246 - DNA, 50 bp, unidentified
  source 1..50: mol_type = unassigned DNA; note = target_fd13abd
  misc_feature 1..22: note = LF
  misc_feature 23..25: note = Core
  misc_feature 26..50: note = RF
cctctgcaagacccgcttcctcctttcctccaatccctacactcccgacg

SEQ ID NO: 30247 - DNA, 50 bp, unidentified
  source 1..50: mol_type = unassigned DNA; note = target_fd14887
  misc_feature 1..23: note = LF
  misc_feature 24..25: note = Core
  misc_feature 26..50: note = RF
caccgcttctgaccgcatctgggtgcagatgccggccggtaaggcaacac

SEQ ID NO: 30248 - DNA, 50 bp, unidentified
  source 1..50: mol_type = unassigned DNA; note = target_fd15f0e
  misc_feature 1..24: note = LF
  misc_feature 25: note = Core
  misc_feature 26..50: note = RF
ccaaaaagaattatcatatttccttctcctatatttttaacttaactatc

SEQ ID NO: 30249 - DNA, 50 bp, unidentified
  source 1..50: mol_type = unassigned DNA; note = target_fd23376
  misc_feature 1..24: note = LF
  misc_feature 25: note = Core
  misc_feature 26..50: note = RF
aatcaaccgggaaataggggttaaatttgccatgaacactctctatagat

SEQ ID NO: 30250 - DNA, 50 bp, unidentified
  source 1..50: mol_type = unassigned DNA; note = target_fd26167
  misc_feature 1..21: note = LF
  misc_feature 22..25: note = Core
  misc_feature 26..50: note = RF
tgctacattctttcattcattgtctccttattctttcaataatatatgtt

SEQ ID NO: 30251 - DNA, 50 bp, unidentified
  source 1..50: mol_type = unassigned DNA; note = target_fd268ce
  misc_feature 1..23: note = LF
  misc_feature 24..25: note = Core
  misc_feature 26..50: note = RF
aaagcctctaacatcgtcatatcaatactccctcaattccagttcgctat

SEQ ID NO: 30252 - DNA, 50 bp, unidentified
  source 1..50: mol_type = unassigned DNA; note = target_fd29a8f
  misc_feature 1..23: note = LF
  misc_feature 24..25: note = Core
  misc_feature 26..50: note = RF
aggatataagttctcgactccgctcgaacaccctaatgttgaagtgttaa

SEQ ID NO: 30253 - DNA, 50 bp, unidentified
  source 1..50: mol_type = unassigned DNA; note = target_fd2cae6
  misc_feature 1..23: note = LF
  misc_feature 24..25: note = Core
  misc_feature 26..50: note = RF
ggtcagtcctttccaattcagaaatgagcctgaaggaaggcggtaggtga

SEQ ID NO: 30254 - DNA, 50 bp, unidentified
  source 1..50: mol_type = unassigned DNA; note = target_fd2fb47
  misc_feature 1..23: note = LF
  misc_feature 24..25: note = Core
  misc_feature 26..50: note = RF
tcgcgggcggtcgtatgtgcgccctctcccgcttgcgggggagggctgct

SEQ ID NO: 30255 - DNA, 50 bp, unidentified
  source 1..50: mol_type = unassigned DNA; note = target_fd30a4c
  misc_feature 1..23: note = LF
  misc_feature 24..25: note = Core
  misc_feature 26..50: note = RF
aatataaaacttgtaatgccatactttagatctaaagtttaaatcgattt

SEQ ID NO: 30256 - DNA, 50 bp, unidentified
  source 1..50: mol_type = unassigned DNA; note = target_fd339d2
  misc_feature 1..24: note = LF
  misc_feature 25: note = Core
  misc_feature 26..50: note = RF
tgaggttgcacgtcgcgaaataaagtcgggcgcttgcgttcaacggggaa

SEQ ID NO: 30257 - DNA, 50 bp, unidentified
  source 1..50: mol_type = unassigned DNA; note = target_fd356d3
  misc_feature 1..23: note = LF
  misc_feature 24..25: note = Core
  misc_feature 26..50: note = RF
tactacataatccatattttcgcctcctttactatattatataacattat

SEQ ID NO: 30258 - DNA, 50 bp, unidentified
  source 1..50: mol_type = unassigned DNA; note = target_fd38aa3
  misc_feature 1..24: note = LF
  misc_feature 25: note = Core
  misc_feature 26..50: note = RF
cattaagtttgcagcattgtgtaacccccagtaccgccgtcggagcgagc

SEQ ID NO: 30259 - DNA, 50 bp, unidentified
  source 1..50: mol_type = unassigned DNA; note = target_fd56fc0
  misc_feature 1..24: note = LF
  misc_feature 25: note = Core
  misc_feature 26..50: note = RF
tttgcgcatgcaatgcactctaacgtgaagtagaagccttaaaaggcggg

SEQ ID NO: 30260 - DNA, 50 bp, unidentified
  source 1..50: mol_type = unassigned DNA; note = target_fd639f9
  misc_feature 1..24: note = LF
  misc_feature 25: note = Core
  misc_feature 26..50: note = RF
agcccgcgttaacgcgggcttttttgtgtctatcctcgtttcgaaacaag

SEQ ID NO: 30261 - DNA, 50 bp, unidentified
  source 1..50: mol_type = unassigned DNA; note = target_fd6bc44
  misc_feature 1..24: note = LF
  misc_feature 25: note = Core
  misc_feature 26..50: note = RF
cgcaattacttttttcataaatacacctccatagaataacggttatattg

SEQ ID NO: 30262 - DNA, 50 bp, unidentified
  source 1..50: mol_type = unassigned DNA; note = target_fd6d265
  misc_feature 1..23: note = LF
  misc_feature 24..25: note = Core
  misc_feature 26..50: note = RF
gaggggttgtgcaacagctacggctgttatgcgatcgcccctttttattt

SEQ ID NO: 30263 - DNA, 50 bp, unidentified
  source 1..50: mol_type = unassigned DNA; note = target_fd710e5
  misc_feature 1..23: note = LF
  misc_feature 24..25: note = Core
  misc_feature 26..50: note = RF
tgtaggtcatccgtaaccgtaaccgtccggcgtcgccgaccttgcggatt

SEQ ID NO: 30264 - DNA, 50 bp, unidentified
  source 1..50: mol_type = unassigned DNA; note = target_fd7387a
  misc_feature 1..24: note = LF
  misc_feature 25: note = Core
  misc_feature 26..50: note = RF
catatctgccatatgagcacctcctccttacaacactattacactttatg

SEQ ID NO: 30265 - DNA, 50 bp, unidentified
  source 1..50: mol_type = unassigned DNA; note = target_fd765b7
  misc_feature 1..23: note = LF
  misc_feature 24..25: note = Core
  misc_feature 26..50: note = RF
ccgcgtagcggacatgtgaatttagccgtgggtggagcgcagcggaaccc

SEQ ID NO: 30266 - DNA, 50 bp, unidentified
  source 1..50: mol_type = unassigned DNA; note = target_fd767ff
  misc_feature 1..23: note = LF
  misc_feature 24..25: note = Core
  misc_feature 26..50: note = RF
gggcagaagaagtcaagaaaacacttgtaacagcagcactaacaaaagat

SEQ ID NO: 30267 - DNA, 50 bp, unidentified
  source 1..50: mol_type = unassigned DNA; note = target_fd7dfca
  misc_feature 1..23: note = LF
  misc_feature 24..25: note = Core
  misc_feature 26..50: note = RF
cgccatggatggcgcccacgagcctccagggatggattcacggcgtgtcc

SEQ ID NO: 30268 - DNA, 50 bp, unidentified
  source 1..50: mol_type = unassigned DNA; note = target_fd9649a
  misc_feature 1..24: note = LF
  misc_feature 25: note = Core
  misc_feature 26..50: note = RF
cccgagacggaactcacagaggagaggttgaatgacgacgatcgacgaac

SEQ ID NO: 30269 - DNA, 50 bp, unidentified
  source 1..50: mol_type = unassigned DNA; note = target_fd9abdd
  misc_feature 1..23: note = LF
  misc_feature 24..25: note = Core
  misc_feature 26..50: note = RF
acgacccgaaaggcctccgcccttgacccattagagaacacaatcgacgt

SEQ ID NO: 30270 - DNA, 50 bp, unidentified
  source 1..50: mol_type = unassigned DNA; note = target_fd9cda8
  misc_feature 1..22: note = LF
  misc_feature 23..25: note = Core
  misc_feature 26..50: note = RF
caagccataacaaaggcaccgtcatcccggaatttgcgcagcaaatatcc

SEQ ID NO: 30271 - DNA, 50 bp, unidentified
  source 1..50: mol_type = unassigned DNA; note = target_fdac6f9
  misc_feature 1..24: note = LF
  misc_feature 25: note = Core
  misc_feature 26..50: note = RF
aatggaccttttgggacagcccctttttgctcaagcgataatcttcgtct

SEQ ID NO: 30272 - DNA, 50 bp, unidentified
  source 1..50: mol_type = unassigned DNA; note = target_fdb4299
  misc_feature 1..24: note = LF
  misc_feature 25: note = Core
  misc_feature 26..50: note = RF
agagataagttatcttaagtcggcttgtcggaagtaatcatggggctcga

SEQ ID NO: 30273 - DNA, 50 bp, unidentified
  source 1..50: mol_type = unassigned DNA; note = target_fdc226a
  misc_feature 1..22: note = LF
  misc_feature 23..25: note = Core
  misc_feature 26..50: note = RF
tcctttttgaactaaagcacccgtttagttgaaaaacaaagtcattgttc

SEQ ID NO: 30274 - DNA, 50 bp, unidentified
  source 1..50: mol_type = unassigned DNA; note = target_fdc52f0
  misc_feature 1..23: note = LF
  misc_feature 24..25: note = Core
  misc_feature 26..50: note = RF
ggtttcgctgcgctctacccatcctacgaagcgctacagccgcttgatcg

SEQ ID NO: 30275 - DNA, 50 bp, unidentified; identical to SEQ ID NO: 24741
  source 1..50: mol_type = unassigned DNA; note = target_fdc73d6
  misc_feature 1..22: note = LF
  misc_feature 23..25: note = Core
  misc_feature 26..50: note = RF

SEQ ID NO: 30276 - DNA, 50 bp, unidentified
  source 1..50: mol_type = unassigned DNA; note = target_fdcfd30
  misc_feature 1..23: note = LF
  misc_feature 24..25: note = Core
  misc_feature 26..50: note = RF
ggtttcccatctggaaaaacctcctgttccacatcatagaaacggggaag

SEQ ID NO: 30277 - DNA, 50 bp, unidentified
  source 1..50: mol_type = unassigned DNA; note = target_fdd7a87
  misc_feature 1..23: note = LF
  misc_feature 24..25: note = Core
  misc_feature 26..50: note = RF
ggaaaacaaggatgtgaccgcgttgggccaccttgtgccgtaccggcccg

SEQ ID NO: 30278 - DNA, 50 bp, unidentified
  source 1..50: mol_type = unassigned DNA; note = target_fde2b7a
  misc_feature 1..24: note = LF
  misc_feature 25: note = Core
  misc_feature 26..50: note = RF
agcgcacacttacgataaggcgattcacaacaatcacgcgatctgcgttg

SEQ ID NO: 30279 - DNA, 50 bp, unidentified
  source 1..50: mol_type = unassigned DNA; note = target_fde64e5
  misc_feature 1..20: note = LF
  misc_feature 21..25: note = Core
  misc_feature 26..50: note = RF
gcggccgccgctgcgctccccccccttgacttaggagatcagccgtttaa

SEQ ID NO: 30280 - DNA, 50 bp, unidentified
  source 1..50: mol_type = unassigned DNA; note = target_fdebb0b
  misc_feature 1..23: note = LF
  misc_feature 24..25: note = Core
  misc_feature 26..50: note = RF
gtgggcactaaatcgtgcccaccctactgggctaaattgtgccaacactc

SEQ ID NO: 30281 - DNA, 50 bp, unidentified
  source 1..50: mol_type = unassigned DNA; note = target_fded0f1
  misc_feature 1..23: note = LF
  misc_feature 24..25: note = Core
  misc_feature 26..50: note = RF
caaatccgcttaacggcgcagccctcttgaacaccttagaaaatataaca

SEQ ID NO: 30282 - DNA, 50 bp, unidentified
  source 1..50: mol_type = unassigned DNA; note = target_fdf30a2
  misc_feature 1..23: note = LF
  misc_feature 24..25: note = Core
  misc_feature 26..50: note = RF
tttgacgccggtggttatgggtcccggcctgcgccgggacgacaagagaa

SEQ ID NO: 30283 - DNA, 50 bp, unidentified
  source 1..50: mol_type = unassigned DNA; note = target_fe0befa
  misc_feature 1..24: note = LF
  misc_feature 25: note = Core
  misc_feature 26..50: note = RF
ctgaagtacctgaaaagtcgggttttgtctaagttcgattttgccgctgg

SEQ ID NO: 30284 - DNA, 50 bp, unidentified
  source 1..50: mol_type = unassigned DNA; note = target_fe15973
  misc_feature 1..23: note = LF
  misc_feature 24..25: note = Core
  misc_feature 26..50: note = RF
ctctatcttcatcacagcacctccttattttcggaaaatgtcaagtgcat

SEQ ID NO: 30285 - DNA, 50 bp, unidentified
  source 1..50: mol_type = unassigned DNA; note = target_fe1b9d3
  misc_feature 1..23: note = LF
  misc_feature 24..25: note = Core
  misc_feature 26..50: note = RF
aatactgtgaacacagtctgaagtggcatagttgattaggccaccaagtc

SEQ ID NO: 30286 - DNA, 50 bp, unidentified
  source 1..50: mol_type = unassigned DNA; note = target_fe25858
  misc_feature 1..24: note = LF
  misc_feature 25: note = Core
  misc_feature 26..50: note = RF
tcgggtgcgcccgatcggacgtgccgatagcggacagggtgatgtcaagt

SEQ ID NO: 30287 - DNA, 50 bp, unidentified
  source 1..50: mol_type = unassigned DNA; note = target_fe2a084
  misc_feature 1..23: note = LF
  misc_feature 24..25: note = Core
  misc_feature 26..50: note = RF
tttatggatgactaacaggtgcatttagttttataagataataccaaaaa

SEQ ID NO: 30288 - DNA, 50 bp, unidentified
  source 1..50: mol_type = unassigned DNA; note = target_fe2ffda
  misc_feature 1..23: note = LF
  misc_feature 24..25: note = Core
  misc_feature 26..50: note = RF
gttccgcaaagcccacacccaacctacgaatattttctcggtctgaaact

SEQ ID NO: 30289 - DNA, 50 bp, unidentified
  source 1..50: mol_type = unassigned DNA; note = target_fe40271
  misc_feature 1..23: note = LF
  misc_feature 24..25: note = Core
  misc_feature 26..50: note = RF
aaagcttcgcgccgagggcggcgctcccacggttgcggtgtgcaccgcgc

SEQ ID NO: 30290 - DNA, 50 bp, unidentified
  source 1..50: mol_type = unassigned DNA; note = target_fe45d10
  misc_feature 1..23: note = LF
  misc_feature 24..25: note = Core
  misc_feature 26..50: note = RF
ccagcatggagctggcatagagcctacatggacgtatttacggcgtcctg

SEQ ID NO: 30291 - DNA, 50 bp, unidentified
  source 1..50: mol_type = unassigned DNA; note = target_fe4b927
  misc_feature 1..24: note = LF
  misc_feature 25: note = Core
  misc_feature 26..50: note = RF
cacatcttgccagactctcagaggtttttcgaggtgcccaatcgttcacc

SEQ ID NO: 30292 - DNA, 50 bp, unidentified
  source 1..50: mol_type = unassigned DNA; note = target_fe57b48
  misc_feature 1..22: note = LF
  misc_feature 23..25: note = Core
  misc_feature 26..50: note = RF
acttcttcaccgacccgatgccccccccgcttcttaccctctccgatgtt

SEQ ID NO: 30293 - DNA, 50 bp, unidentified
  source 1..50: mol_type = unassigned DNA; note = target_fe5c47f
  misc_feature 1..24: note = LF
  misc_feature 25: note = Core
  misc_feature 26..50: note = RF
cgatctgtgtatttgtagcccccgtgttgcttgaacgggagaatagtttt

SEQ ID NO: 30294 - DNA, 50 bp, unidentified
  source 1..50: mol_type = unassigned DNA; note = target_fe5e080
  misc_feature 1..24: note = LF
  misc_feature 25: note = Core
  misc_feature 26..50: note = RF
ctgcccagctatgagctatacacgttgttgccagcagtactttttcagtc

SEQ ID NO: 30295 - DNA, 50 bp, unidentified
  source 1..50: mol_type = unassigned DNA; note = target_fe69aaf
  misc_feature 1..23: note = LF
  misc_feature 24..25: note = Core
  misc_feature 26..50: note = RF
atccataataatcatccttccttgtctttctcatattagctttcctcacc

SEQ ID NO: 30296 - DNA, 50 bp, unidentified
  source 1..50: mol_type = unassigned DNA; note = target_fe6fb1a
  misc_feature 1..24: note = LF
  misc_feature 25: note = Core
  misc_feature 26..50: note = RF
cacgcatcgcttgctgcgcgtcaaaaacaagatgagagcagcgcgtcaat

SEQ ID NO: 30297 - DNA, 50 bp, unidentified
  source 1..50: mol_type = unassigned DNA; note = target_fe7d2c4
  misc_feature 1..23: note = LF
  misc_feature 24..25: note = Core
  misc_feature 26..50: note = RF
ctcccatggagaacctggcccatagcgcatccctccattccggcgataag

SEQ ID NO: 30298 - DNA, 50 bp, unidentified
  source 1..50: mol_type = unassigned DNA; note = target_fe80a3f
  misc_feature 1..23: note = LF
  misc_feature 24..25: note = Core
  misc_feature 26..50: note = RF
aacaaacaaaattatttaaacatagttattctatatttcattcattttgt

SEQ ID NO: 30299 - DNA, 50 bp, unidentified
  source 1..50: mol_type = unassigned DNA; note = target_fe8cf78
  misc_feature 1..23: note = LF
  misc_feature 24..25: note = Core
  misc_feature 26..50: note = RF
cttcatcgcgcctttggcgctcctcgcaatgacgtgtggtaataattgcc

SEQ ID NO: 30300 - DNA, 50 bp, unidentified
  source 1..50: mol_type = unassigned DNA; note = target_fe8ec79
  misc_feature 1..24: note = LF
  misc_feature 25: note = Core
  misc_feature 26..50: note = RF
ataccatgagccaaggcccccctttttacggggcggacgacgaactggtt

SEQ ID NO: 30301 - DNA, 50 bp, unidentified
  source 1..50: mol_type = unassigned DNA; note = target_fe9415d
  misc_feature 1..23: note = LF
  misc_feature 24..25: note = Core
  misc_feature 26..50: note = RF
aaaaatcacgcttctgccaaagtagtgctaagctatgcgattctttaacg

SEQ ID NO: 30302 - DNA, 50 bp, unidentified
  source 1..50: mol_type = unassigned DNA; note = target_fe9a349
  misc_feature 1..24: note = LF
  misc_feature 25: note = Core
  misc_feature 26..50: note = RF
tgatgggagctcctatcacataacgccgcattaagtggtgaacaacgcga

SEQ ID NO: 30303 - DNA, 50 bp, unidentified
  source 1..50: mol_type = unassigned DNA; note = target_fe9b122
  misc_feature 1..23: note = LF
  misc_feature 24..25: note = Core
  misc_feature 26..50: note = RF
tggtgtgaacgctggcagcccgtagcccggatggagcgaagcgcaatccg

SEQ ID NO: 30304 - DNA, 50 bp, unidentified
  source 1..50: mol_type = unassigned DNA; note = target_fe9e990
  misc_feature 1..24: note = LF
  misc_feature 25: note = Core
  misc_feature 26..50: note = RF
caggggcatgaggacggtaggaaccgtccccacagtccttggcaacccaa

SEQ ID NO: 30305 - DNA, 50 bp, unidentified
  source 1..50: mol_type = unassigned DNA; note = target_fea0879
  misc_feature 1..24: note = LF
  misc_feature 25: note = Core
  misc_feature 26..50: note = RF
aacacgaaggagttcagggagtgaagcgcttgctcaaacggagcgcgttc

SEQ ID NO: 30306 - DNA, 50 bp, unidentified
  source 1..50: mol_type = unassigned DNA; note = target_fea1929
  misc_feature 1..23: note = LF
  misc_feature 24..25: note = Core
  misc_feature 26..50: note = RF
cagtaatttctgtaatttcattttaaacctccatttgtagtgcattttcg

SEQ ID NO: 30307 - DNA, 50 bp, unidentified
  source 1..50: mol_type = unassigned DNA; note = target_fea2a68
  misc_feature 1..23: note = LF
  misc_feature 24..25: note = Core
  misc_feature 26..50: note = RF
tgcttttttcatagtcttatatcctttcctgtttctaatgaaatgatatc

SEQ ID NO: 30308 - DNA, 50 bp, unidentified
  source 1..50: mol_type = unassigned DNA; note = target_fea30b2
  misc_feature 1..24: note = LF
  misc_feature 25: note = Core
  misc_feature 26..50: note = RF
gcgccgtcgctcagggcttagaagtttcccgaggcgatgtccttcaacac

SEQ ID NO: 30309 - DNA, 50 bp, unidentified
  source 1..50: mol_type = unassigned DNA; note = target_fea6692
  misc_feature 1..22: note = LF
  misc_feature 23..25: note = Core
  misc_feature 26..50: note = RF
tgaatgtcgtatttgggctgggagctgccgttagacgtgtttgtcacgag

SEQ ID NO: 30310 - DNA, 50 bp, unidentified
  source 1..50: mol_type = unassigned DNA; note = target_fea8fbe
  misc_feature 1..24: note = LF
  misc_feature 25: note = Core
  misc_feature 26..50: note = RF
cgtcgcgtctcgtccgcacatcggcatgagcgggcggtcgtctgccacgt

SEQ ID NO: 30311 - DNA, 50 bp, unidentified
  source 1..50: mol_type = unassigned DNA; note = target_feb7ee3
  misc_feature 1..22: note = LF
  misc_feature 23..25: note = Core
  misc_feature 26..50: note = RF
acccgctctcgcatacgggcagtgaatcacctcaagccgtcagacgccaa

SEQ ID NO: 30312 - DNA, 50 bp, unidentified
  source 1..50: mol_type = unassigned DNA; note = target_fed6a48
  misc_feature 1..23: note = LF
  misc_feature 24..25: note = Core
  misc_feature 26..50: note = RF
gaatcagtcggacggggtcctgttgcacaaatcctctgagatctggagtt

SEQ ID NO: 30313 - DNA, 50 bp, unidentified
  source 1..50: mol_type = unassigned DNA; note = target_fedfa1d
  misc_feature 1..23: note = LF
  misc_feature 24..25: note = Core
  misc_feature 26..50: note = RF
ggcggcggcccgaacgtcctcatctgccgcatagcgtgcgcgtgggtgcg

SEQ ID NO: 30314 - DNA, 50 bp, unidentified
  source 1..50: mol_type = unassigned DNA; note = target_fefeee3
  misc_feature 1..24: note = LF
  misc_feature 25: note = Core
  misc_feature 26..50: note = RF
ggaccaatcgtgggtcccctccccccctatcaggaaggcattccgttgtc

SEQ ID NO: 30315 - DNA, 50 bp, unidentified
  source 1..50: mol_type = unassigned DNA; note = target_ff0a4f3
  misc_feature 1..24: note = LF
  misc_feature 25: note = Core
  misc_feature 26..50: note = RF
accaaccagcggccaactacgacatacaactttgctcttacaaatttaac

SEQ ID NO: 30316 - DNA, 50 bp, unidentified
  source 1..50: mol_type = unassigned DNA; note = target_ff0e827
  misc_feature 1..23: note = LF
  misc_feature 24..25: note = Core
  misc_feature 26..50: note = RF
ttgtgccgtggcgcttgtagtcatgggtcatcgtcgcgcctcggcccttc

SEQ ID NO: 30317 - DNA, 50 bp, unidentified
  source 1..50: mol_type = unassigned DNA; note = target_ff18819
  misc_feature 1..23: note = LF
  misc_feature 24..25: note = Core
  misc_feature 26..50: note = RF
gggctggccgctggcgctagcgcctaactggtcgccgccccgctggcccg

SEQ ID NO: 30318 - DNA, 50 bp, unidentified
  source 1..50: mol_type = unassigned DNA; note = target_ff247e7
  misc_feature 1..24: note = LF
  misc_feature 25: note = Core
  misc_feature 26..50: note = RF
catgagacctcaaaagaacctaacgaaatgtagccgagggactatcgtag

SEQ ID NO: 30319 - DNA, 50 bp, unidentified
  source 1..50: mol_type = unassigned DNA; note = target_ff2f3e1
  misc_feature 1..23: note = LF
  misc_feature 24..25: note = Core
  misc_feature 26..50: note = RF
tctttttcgcatgataattcctccttgtataataagtttaataaaatagt

SEQ ID NO: 30320 - DNA, 50 bp, unidentified
  source 1..50: mol_type = unassigned DNA; note = target_ff32082
  misc_feature 1..24: note = LF
  misc_feature 25: note = Core
  misc_feature 26..50: note = RF
atagattttatatatatcataaaaataattcctctttctatccaccataa

SEQ ID NO: 30321 - DNA, 50 bp, unidentified
  source 1..50: mol_type = unassigned DNA; note = target_ff3409a
  misc_feature 1..23: note = LF
  misc_feature 24..25: note = Core
  misc_feature 26..50: note = RF
cgggcaaagcccggccgccccgcctcaggccagcgcctcgtcgcagcgca

SEQ ID NO: 30322 - DNA, 50 bp, unidentified
  source 1..50: mol_type = unassigned DNA; note = target_ff4612d
  misc_feature 1..23: note = LF
  misc_feature 24..25: note = Core
  misc_feature 26..50: note = RF
cccgtgacgatcgcgtagcgcccctcctgagagagcgggatgcggggaga

SEQ ID NO: 30323 - DNA, 50 bp, unidentified
  source 1..50: mol_type = unassigned DNA; note = target_ff511b1
  misc_feature 1..23: note = LF
  misc_feature 24..25: note = Core
  misc_feature 26..50: note = RF
ggtgctcggtctcgtagggactgctcatcgggcttcgggcccgggtccgg

SEQ ID NO: 30324 - DNA, 50 bp, unidentified
  source 1..50: mol_type = unassigned DNA; note = target_ff5d2e7
  misc_feature 1..24: note = LF
  misc_feature 25: note = Core
  misc_feature 26..50: note = RF
gggttcctgtgacgagcacaggaatgagggagggtgaggggacgttgacg

SEQ ID NO: 30325 - DNA, 50 bp, unidentified
  source 1..50: mol_type = unassigned DNA; note = target_ff60d8a
  misc_feature 1..24: note = LF
  misc_feature 25: note = Core
  misc_feature 26..50: note = RF
ggtcatgcccgagctgggtggccccccgggatgtgttgcgaacattgggg

SEQ ID NO: 30326 - DNA, 50 bp, unidentified
  source 1..50: mol_type = unassigned DNA; note = target_ff6cfec
  misc_feature 1..24: note = LF
  misc_feature 25: note = Core
  misc_feature 26..50: note = RF
ccgtgttgcgcaattgttatgatgtgtgctgtcaagaatggagtccattg

SEQ ID NO: 30327 - DNA, 50 bp, unidentified
  source 1..50: mol_type = unassigned DNA; note = target_ff7b315
  misc_feature 1..23: note = LF
  misc_feature 24..25: note = Core
  misc_feature 26..50: note = RF
ttggacgactagtggcgaaagcagacagtcgctctgttgacgttagcaac

SEQ ID NO: 30328 - DNA, 50 bp, unidentified
  source 1..50: mol_type = unassigned DNA; note = target_ff7d222
  misc_feature 1..23: note = LF
  misc_feature 24..25: note = Core
  misc_feature 26..50: note = RF
actctgatatactacgattgttttcttgtatttcttattgttttaattta

SEQ ID NO: 30329 - DNA, 50 bp, unidentified
  source 1..50: mol_type = unassigned DNA; note = target_ff7efd4
  misc_feature 1..24: note = LF
  misc_feature 25: note = Core
  misc_feature 26..50: note = RF
aaatctggtgagcttcgacaaccccaccccctcatgcctgagcatcgcat

SEQ ID NO: 30330 - DNA, 50 bp, unidentified
  source 1..50: mol_type = unassigned DNA; note = target_ff876d7
  misc_feature 1..23: note = LF
  misc_feature 24..25: note = Core
  misc_feature 26..50: note = RF
ttgttcggtgggcgatgcccaccctacatcgtatgaagtcattgaacgaa

SEQ ID NO: 30331 - DNA, 50 bp, unidentified
  source 1..50: mol_type = unassigned DNA; note = target_ff8a9b8
  misc_feature 1..23: note = LF
  misc_feature 24..25: note = Core
  misc_feature 26..50: note = RF
taccgccccggcgaccacgacgcctgacctcaccgccgcccgcaccgccg

SEQ ID NO: 30332 - DNA, 50 bp, unidentified
  source 1..50: mol_type = unassigned DNA; note = target_ff8fdc5
  misc_feature 1..23: note = LF
  misc_feature 24..25: note = Core
  misc_feature 26..50: note = RF
ggttgaagctgaattaagaccgtaggcccgttacagaagggcgcaatagc

SEQ ID NO: 30333 - DNA, 50 bp, unidentified
  source 1..50: mol_type = unassigned DNA; note = target_ff917c1
  misc_feature 1..23: note = LF
  misc_feature 24..25: note = Core
  misc_feature 26..50: note = RF
tcttagtcatctaccagaaagatctctcgactcgtcgaagctgtagcgat

SEQ ID NO: 30334 - DNA, 50 bp, unidentified
  source 1..50: mol_type = unassigned DNA; note = target_ff9180e
  misc_feature 1..24: note = LF
  misc_feature 25: note = Core
  misc_feature 26..50: note = RF
agacaaccacgcggagataagtgccgatatgtgtggatctgatggggtcg

SEQ ID NO: 30335 - DNA, 50 bp, unidentified
  source 1..50: mol_type = unassigned DNA; note = target_ff9e636
  misc_feature 1..23: note = LF
  misc_feature 24..25: note = Core
  misc_feature 26..50: note = RF
ctgttggccgaatgaattcggccctacaacggtaatctacccactcgatt

SEQ ID NO: 30336 - DNA, 50 bp, unidentified
  source 1..50: mol_type = unassigned DNA; note = target_ffa3984
  misc_feature 1..24: note = LF
  misc_feature 25: note = Core
  misc_feature 26..50: note = RF
gggcgtgtcgcttacgacttttgacacaccctcctcctaatatatacttc

SEQ ID NO: 30337 - DNA, 50 bp, unidentified
  source 1..50: mol_type = unassigned DNA; note = target_ffa5a2f
  misc_feature 1..23: note = LF
  misc_feature 24..25: note = Core
  misc_feature 26..50: note = RF
cgcgattttggtggcaaaaaggtagggcggattggcgccgtgggggcgta

SEQ ID NO: 30338 - DNA, 50 bp, unidentified
  source 1..50: mol_type = unassigned DNA; note = target_ffab3e2
  misc_feature 1..23: note = LF
  misc_feature 24..25: note = Core
  misc_feature 26..50: note = RF
ttggaagtttcgcttaatacttcctgaacttaataaattcagcctataat

SEQ ID NO: 30339 - DNA, 50 bp, unidentified
  source 1..50: mol_type = unassigned DNA; note = target_ffab849
  misc_feature 1..23: note = LF
  misc_feature 24..25: note = Core
  misc_feature 26..50: note = RF
caattaccatccctaatcccctccttgttttagcattgatataatgaata

SEQ ID NO: 30340 - DNA, 50 bp, unidentified
  source 1..50: mol_type = unassigned DNA; note = target_ffb3016
  misc_feature 1..24: note = LF
  misc_feature 25: note = Core
  misc_feature 26..50: note = RF
gcattcgctcttgcaaagcaggagcatccacacaggactaaactgtcatt

SEQ ID NO: 30341 - DNA, 50 bp, unidentified
  source 1..50: mol_type = unassigned DNA; note = target_ffb5afd
  misc_feature 1..22: note = LF
  misc_feature 23..25: note = Core
  misc_feature 26..50: note = RF
gtcatcggcgaaagacttacgaagttttaaaaacttcgtaagtctggtca

SEQ ID NO: 30342 - DNA, 50 bp, unidentified
  source 1..50: mol_type = unassigned DNA; note = target_ffb7db4
  misc_feature 1..23: note = LF
  misc_feature 24..25: note = Core
  misc_feature 26..50: note = RF
gtcgggcagatccaccactttcgtgtcgtgacgcctatttatgcaaaccg

SEQ ID NO: 30343 - DNA, 50 bp, unidentified
  source 1..50: mol_type = unassigned DNA; note = target_ffbb148
  misc_feature 1..24: note = LF
  misc_feature 25: note = Core
  misc_feature 26..50: note = RF
aatacgggggcagtcggcgaggactgtctgagaccgcaggccgagttccg

SEQ ID NO: 30344 - DNA, 50 bp, unidentified
  source 1..50: mol_type = unassigned DNA; note = target_ffbfc2c
  misc_feature 1..24: note = LF
  misc_feature 25: note = Core
  misc_feature 26..50: note = RF
tcatcgcctccgaaggcgcctaacgttcgcgttgtggcgcgttgcagaag

SEQ ID NO: 30345 - DNA, 50 bp, unidentified
  source 1..50: mol_type = unassigned DNA; note = target_ffc04f4
  misc_feature 1..23: note = LF
  misc_feature 24..25: note = Core
  misc_feature 26..50: note = RF
atgctcgggcgccgtgcagtgtaaggccgtatgtccgccgtcaagcccgg

SEQ ID NO: 30346 - DNA, 50 bp, unidentified
  source 1..50: mol_type = unassigned DNA; note = target_ffc1085
  misc_feature 1..23: note = LF
  misc_feature 24..25: note = Core
  misc_feature 26..50: note = RF
tgagcaatccctctctacccaaggatcgacatgcgtatttcacaggctct

SEQ ID NO: 30347 - DNA, 50 bp, unidentified
  source 1..50: mol_type = unassigned DNA; note = target_ffc5e95
  misc_feature 1..23: note = LF
  misc_feature 24..25: note = Core
  misc_feature 26..50: note = RF
ccacggacacgccactgcgcacttggcacatctgcgacgtttggcgctgc

SEQ ID NO: 30348 - DNA, 50 bp, unidentified
  source 1..50: mol_type = unassigned DNA; note = target_ffcf629
  misc_feature 1..23: note = LF
  misc_feature 24..25: note = Core
  misc_feature 26..50: note = RF
caccatgtcgggcgaagcccgacctacatccaatggggtggccgcatgat

SEQ ID NO: 30349 - DNA, 50 bp, unidentified
  source 1..50: mol_type = unassigned DNA; note = target_ffcfb93
  misc_feature 1..23: note = LF
  misc_feature 24..25: note = Core
  misc_feature 26..50: note = RF
gggcaacgaaagacttttgtctactttgggtctttccaaagtagagcctt

SEQ ID NO: 30350 - DNA, 50 bp, unidentified
  source 1..50: mol_type = unassigned DNA; note = target_ffd0f9d
  misc_feature 1..23: note = LF
  misc_feature 24..25: note = Core
  misc_feature 26..50: note = RF
accgaaggccagccgagcataggctcggctctacaggtcaagccttcagc

SEQ ID NO: 30351 - DNA, 50 bp, unidentified
  source 1..50: mol_type = unassigned DNA; note = target_ffd661d
  misc_feature 1..23: note = LF
  misc_feature 24..25: note = Core
  misc_feature 26..50: note = RF
ttatgaaataattatatgtattcctttcgttccgtgatggcattcatgat

SEQ ID NO: 30352 - DNA, 50 bp, unidentified
  source 1..50: mol_type = unassigned DNA; note = target_ffeb32d
  misc_feature 1..24: note = LF
  misc_feature 25: note = Core
  misc_feature 26..50: note = RF
gctcttttcgatgattgggattacttccggttgggcgaccatacagaaaa

SEQ ID NO: 30353 - DNA, 50 bp, unidentified
  source 1..50: mol_type = unassigned DNA; note = target_fffa977
  misc_feature 1..24: note = LF
  misc_feature 25: note = Core
  misc_feature 26..50: note = RF
ggtttttcacacgccccaatgtgccggtaggggacgctttcacccgtgta

SEQ ID NO: 30354 - DNA, 50 bp, unidentified
  source 1..50: mol_type = unassigned DNA; note = donor_IS621
aaacttgcaggccataacagtatcttgtattatccctccagtgcagagaa

SEQ ID NO: 30355 - DNA, 50 bp, unidentified
  source 1..50: mol_type = unassigned DNA; note = donor_IS621_161642
atgcttgcatggcataacagtatcttgtattattaaaaaatccagagaga

SEQ ID NO: 30356 - DNA, 50 bp, unidentified
  source 1..50: mol_type = unassigned DNA; note = donor_IS621_127209
aaacttgcgggctataacagtatcttgtattatcctttctgagcagagag

SEQ ID NO: 30357 - DNA, 50 bp, unidentified
  source 1..50: mol_type = unassigned DNA; note = donor_IS621_55201
aagtttgcaggcgataacagtatcttgtataattttttctgtgcagggag

SEQ ID NO: 30358 - DNA, 50 bp, unidentified
  source 1..50: mol_type = unassigned DNA; note = donor_IS621_145219
aaacttgcaggccataacagtatcttgtattatccttcccgtgcagagag

SEQ ID NO: 30359 - DNA, 50 bp, unidentified
  source 1..50: mol_type = unassigned DNA; note = donor_IS621_23122
aagcttgcaggcgataacagtatcttgtattatcccttcagtgcagggag

SEQ ID NO: 30360 - DNA, 50 bp, unidentified
  source 1..50: mol_type = unassigned DNA; note = donor_ISAar41-192
cttgacaccgacacatagaagggtctctcatagtcattggctggcctggg

SEQ ID NO: 30361 - DNA, 50 bp, unidentified
  source 1..50: mol_type = unassigned DNA; note = donor_ISAar41-39
acttgacttcagtcatagaagggtctctaatggtttctggctggcctggg

SEQ ID NO: 30362 - DNA, 50 bp, unidentified
  source 1..50: mol_type = unassigned DNA; note = donor_ISAar41
ccttgacagaacccatagaagggtctctaatggttattggcaggtctggg

SEQ ID NO: 30363 - DNA, 50 bp, unidentified
  source 1..50: mol_type = unassigned DNA; note = donor_ISAar41-74
gttgacaacgaaccatagaaggatctctaatggttgtggccggtctggga

SEQ ID NO: 30364 - DNA, 50 bp, unidentified
  source 1..50: mol_type = unassigned DNA; note = donor_ISAar41-12
gcttgactttgaacataaaagggtctctaattggatttggctggtctggc

SEQ ID NO: 30365 - DNA, 50 bp, unidentified
  source 1..50: mol_type = unassigned DNA; note = donor_ISAar18
tcttgttgacagatatagaagattctgtgagtattgaggtggctggtctg

SEQ ID NO: 30366 - DNA, 50 bp, unidentified
  source 1..50: mol_type = unassigned DNA; note = donor_ISAar41-86
gcttgacttcaaccatagaagggtctctaatggttagtagctggcctggg

SEQ ID NO: 30367 - DNA, 50 bp, unidentified
  source 1..50: mol_type = unassigned DNA; note = donor_ISAar41-36
gcttgacaccacccatagaagggtctctaatggttagtagccgacccgag

SEQ ID NO: 30368 - DNA, 50 bp, unidentified
  source 1..50: mol_type = unassigned DNA; note = donor_ISAar29
gccggttgacagacatagaagggtctgtgagacttggtgcagctggtctg

SEQ ID NO: 30369 - DNA, 50 bp, unidentified
  source 1..50: mol_type = unassigned DNA; note = donor_ISAar29-423
tcacttgacaaaacatagaagcttctgtgagtcttggggtggctggtccg

SEQ ID NO: 30370 - DNA, 50 bp, unidentified
  source 1..50: mol_type = unassigned DNA; note = donor_ISAar29-364
ccgcttgacgcgacatagaagcatctgtcagtctgcgggtggctggcccg

SEQ ID NO: 30371 - DNA, 50 bp, unidentified
  source 1..50: mol_type = unassigned DNA; note = donor_ISAar41-54
gcttgacacagaccatagaagagtctctaatggtcttggctggtctggtg

SEQ ID NO: 30372 - DNA, 50 bp, unidentified
  source 1..50: mol_type = unassigned DNA; note = donor_locus59881
tgcctgaagggccgttccacatatgatgaggtggaacggcccgctaccgc

SEQ ID NO: 30373 - DNA, 50 bp, unidentified
  source 1..50: mol_type = unassigned DNA; note = donor_locus163322
caacgcgggagccatccacagaggatgaggtggatggctcccgctcacgg

SEQ ID NO: 30374 - DNA, 50 bp, unidentified
  source 1..50: mol_type = unassigned DNA; note = donor_locus136201
ttgcaaacgggacgcgttcatatagaatgagatgaacgcatcccaccctt

SEQ ID NO: 30375 - DNA, 50 bp, unidentified; identical to SEQ ID NO: 30355
  source 1..50: mol_type = unassigned DNA; note = donor_locus153600

SEQ ID NO: 30376 - DNA, 50 bp, unidentified
  source 1..50: mol_type = unassigned DNA; note = donor_locus200162
cgcccgcgggccgttccatacatgatggggtggaacggcccgctccgaca

SEQ ID NO: 30377 - DNA, 50 bp, unidentified
  source 1..50: mol_type = unassigned DNA; note = donor_locus238387
tgcttatgtccgaaacctagaatacctttggtcaagtaatagaattttct

SEQ ID NO: 30378 - DNA, 50 bp, unidentified
  source 1..50: mol_type = unassigned DNA; note = donor_locus36182
gccgacccggagccgtccacacatgatgctgtggacggctcctccaccgg

SEQ ID NO: 30379 - DNA, 50 bp, unidentified
  source 1..50: mol_type = unassigned DNA; note = donor_locus6338
caatgcgggagccatccacacaggatggggtggatggctcccgctccaac

SEQ ID NO: 30380 - DNA, 50 bp, unidentified
  source 1..50: mol_type = unassigned DNA; note = donor_locus229727
ggtttgacacggaaagtcatatcaggcagtatgactttccgtgagacaga

SEQ ID NO: 30381 - DNA, 50 bp, unidentified
  source 1..50: mol_type = unassigned DNA; note = donor_locus189474
tgacatgccggggaagcccttatagaatggaagggacttcccctgattat

SEQ ID NO: 30382 - DNA, 50 bp, unidentified
  source 1..50: mol_type = unassigned DNA; note = donor_locus40696
ttgcaaacgggatgcgttcatataaatgtaatgaacgcatcccaacatta

SEQ ID NO: 30383 - DNA, 50 bp, unidentified
  source 1..50: mol_type = unassigned DNA; note = donor_locus196678
gcaaaaacgggagtgaccatagattaatgagatggtcactccctccttcc

SEQ ID NO: 30384 - DNA, 50 bp, unidentified
  source 1..50: mol_type = unassigned DNA; note = donor_locus137473
tgcaagggggagccgtccacatatgatggggtggacggctcccaacggca

SEQ ID NO: 30385 - DNA, 50 bp, unidentified
  source 1..50: mol_type = unassigned DNA; note = donor_locus101259
tgcttgacagaccgcattaggaatccctacgttgttctgtggggggtggt

SEQ ID NO: 30386 - DNA, 50 bp, unidentified
  source 1..50: mol_type = unassigned DNA; note = donor_locus78905
gcggcttgacagatagagaggcaccgacttatggtcgtgtcagcggtccg

SEQ ID NO: 30387 - DNA, 50 bp, unidentified
  source 1..50: mol_type = unassigned DNA; note = donor_locus71993
cagaaacggggccgtccacacatgatggggtggacggccccacccgacgg

SEQ ID NO: 30388 - DNA, 50 bp, unidentified
  source 1..50: mol_type = unassigned DNA; note = donor_locus95399
tttttcttgacagaacacggtagcttgtatgtaataggactcgatggcta

SEQ ID NO: 30389 - DNA, 50 bp, unidentified
  source 1..50: mol_type = unassigned DNA; note = donor_locus79791
tgcaaaaacgggggtgaccatagataatgatatggtcacccccaccttaa

SEQ ID NO: 30390 - DNA, 50 bp, unidentified
  source 1..50: mol_type = unassigned DNA; note = donor_locus108084
gcaatacgggggaagaccatatacgatgagatggtcttcccctccttcac

SEQ ID NO: 30391 - DNA, 50 bp, unidentified
  source 1..50: mol_type = unassigned DNA; note = donor_locus241619
ttaataggtaatcaacacagaatctcctatgtttacaaaattaattcagt

SEQ ID NO: 30392 - DNA, 50 bp, unidentified
  source 1..50: mol_type = unassigned DNA; note = donor_locus38909
aaacttggaaatcaagagagaatcttgtatcttgtttgtaactgcccgat

SEQ ID NO: 30393 - DNA, 50 bp, unidentified
  source 1..50: mol_type = unassigned DNA; note = donor_locus107523
tgccaagcgggccgttccacatatgatgaggtggaacggcccttctcaaa

SEQ ID NO: 30394 - DNA, 50 bp, unidentified
  source 1..50: mol_type = unassigned DNA; note = donor_locus31809
cgagccgggggccatccacacatgatggggtggatggccccctcacggca

SEQ ID NO: 30395 - DNA, 50 bp, unidentified
  source 1..50: mol_type = unassigned DNA; note = donor_locus144529
ccgcttgacaacgacattaggaagctctaccttctgagtcgggttgatcg

SEQ ID NO: 30396 - DNA, 50 bp, unidentified
  source 1..50: mol_type = unassigned DNA; note = donor_locus65581
ccggatagccgacaagacggtatcttatgtcttgatcttctccgccttag

SEQ ID NO: 30397 - DNA, 50 bp, unidentified
  source 1..50: mol_type = unassigned DNA; note = donor_locus206026
agcattgcagggcaccatagaatcttgtatggtttcccggcaagtcttag

SEQ ID NO: 30398 - DNA, 50 bp, unidentified
  source 1..50: mol_type = unassigned DNA; note = donor_locus9882
tgccaagcgggccgttccacatatgatgaggtggaacggcccttctcaat

SEQ ID NO: 30399 - DNA, 50 bp, unidentified
  source 1..50: mol_type = unassigned DNA; note = donor_locus146556
ataacagcttgactcttagaagggcagtaataatgccgatgtcagtcttt

SEQ ID NO: 30400 - DNA, 50 bp, unidentified
  source 1..50: mol_type = unassigned DNA; note = donor_locus222797
gctaaacagggaccgtccacacatgatgaggtggacggttccacccaccg

SEQ ID NO: 30401 - DNA, 50 bp, unidentified
  source 1..50: mol_type = unassigned DNA; note = donor_locus11380
tcttgacttttgttagcaggtttttagtaccatataagtgtaagagataa

SEQ ID NO: 30402 - DNA, 50 bp, unidentified
  source 1..50: mol_type = unassigned DNA; note = donor_locus102412
tgacatgccggggaagcccttatagaatggaagggacttcccctggatat

SEQ ID NO: 30403 - DNA, 50 bp, unidentified
  source 1..50: mol_type = unassigned DNA; note = donor_locus67572
gacctcggttggccgaatagagaagatggggtattcggccggccggtgtc

SEQ ID NO: 30404 - DNA, 50 bp, unidentified
  source 1..50: mol_type = unassigned DNA; note = donor_locus153144
ccgcttgacaaagatcacggtatcttgtatggtatccactcatcggggca

SEQ ID NO: 30405 - DNA, 50 bp, unidentified
  source 1..50: mol_type = unassigned DNA; note = donor_locus20607
cgcttgacagcaaccatagaatcttgtatggtgcgacgggggtgagtcgt

SEQ ID NO: 30406 - DNA, 50 bp, unidentified
  source 1..50: mol_type = unassigned DNA; note = donor_locus22609
tggagagaagttaaacctagaatacctttggtcaatgaaagaatatttat

SEQ ID NO: 30407 - DNA, 50 bp, unidentified
  source 1..50: mol_type = unassigned DNA; note = donor_locus111069
attattgacaaactattagctggttcgtattataaggtcatccagtttta

SEQ ID NO: 30408 - DNA, 50 bp, unidentified
  source 1..50: mol_type = unassigned DNA; note = donor_locus123581
aaatttggtcaataacatagaatgctctaagtttgcagcagttaagcggc

SEQ ID NO: 30409 - DNA, 50 bp, unidentified
  source 1..50: mol_type = unassigned DNA; note = donor_locus39063
tggcaaacaggaggcgaccatctataatggaatggtcgcctcccatctct

SEQ ID NO: 30410 - DNA, 50 bp, unidentified
  source 1..50: mol_type = unassigned DNA; note = donor_locus165043
aaacttgcaggtcataacagtatcttgtattatccctcctgtgcagagaa

SEQ ID NO: 30411 - DNA, 50 bp, unidentified
  source 1..50: mol_type = unassigned DNA; note = donor_locus187447
tgacatgccggggaagtccttatagaatggaagggacttcccctgattat

SEQ ID NO: 30412 - DNA, 50 bp, unidentified
  source 1..50: mol_type = unassigned DNA; note = donor_locus82201
ttgcattccgggagcgtccatatataatgagatggacgctccagatttta

SEQ ID NO: 30413 - DNA, 50 bp, unidentified
  source 1..50: mol_type = unassigned DNA; note = donor_locus21613
ggcttgacaacatcattgagattccgtaagactgttggtggtccgggagg

SEQ ID NO: 30414 - DNA, 50 bp, unidentified
  source 1..50: mol_type = unassigned DNA; note = donor_locus66768
tgactgttcggggaagcccttatagaatggaagggacttcccctggatat

SEQ ID NO: 30415 - DNA, 50 bp, unidentified; identical to SEQ ID NO: 30383
  source 1..50: mol_type = unassigned DNA; note = donor_locus177259

SEQ ID NO: 30416 - DNA, 50 bp, unidentified
  source 1..50: mol_type = unassigned DNA; note = donor_locus47056
attttcttgactaaacacggtagcttgtatgtaatcaacgagcgatgatt

SEQ ID NO: 30417 - DNA, 50 bp, unidentified
  source 1..50: mol_type = unassigned DNA; note = donor_locus31940
tgacaacttaataggggccccccccgttactttattcgtaccccttataa

SEQ ID NO: 30418 - DNA, 50 bp, unidentified
  source 1..50: mol_type = unassigned DNA; note = donor_locus65800
agccttgactttttatttgcaggctactacaatatatttatggttaatat

SEQ ID NO: 30419 - DNA, 50 bp, unidentified
  source 1..50: mol_type = unassigned DNA; note = donor_locus181296
gcgctcaatggggaagcccttgtagaatgaaagggacttcccccgtcccg

SEQ ID NO: 30420 - DNA, 50 bp, unidentified
  source 1..50: mol_type = unassigned DNA; note = donor_IS1000B
tcgcttgacaggcaagacagtatcatgtatcttgccccctgagggaggcc

SEQ ID NO: 30421 - DNA, 50 bp, unidentified
  source 1..50: mol_type = unassigned DNA; note = donor_IS1111A
tgacaacaagggtgggtccatatacaatgaaatggacccaccccttaaag

SEQ ID NO: 30422 - DNA, 50 bp, unidentified
  source 1..50: mol_type = unassigned DNA; note = donor_IS1328
gcaaaaacgggggtgaccatagattaatgagatggtcacccccaccctgt

SEQ ID NO: 30423 - DNA, 50 bp, unidentified
  source 1..50: mol_type = unassigned DNA; note = donor_IS1383
gagctccgggaggcgtccatataagatggtatggacgcctccccccggca

SEQ ID NO: 30424 - DNA, 50 bp, unidentified
  source 1..50: mol_type = unassigned DNA; note = donor_IS1492
gcgctcaatggggaagcccttgtagaatgaaagggacttccccgtccaag

SEQ ID NO: 30425 - DNA, 50 bp, unidentified
  source 1..50: mol_type = unassigned DNA; note = donor_IS2112
ctgcttgatttcctcattgaaactccgtaagttgttagttggtccggaag

SEQ ID NO: 30426 - DNA, 50 bp, unidentified
  source 1..50: mol_type = unassigned DNA; note = donor_IS5708
tgactgttcggggaagcccttatagaatggaagggacttcccctagatat

SEQ ID NO: 30427 - DNA, 50 bp, unidentified
  source 1..50: mol_type = unassigned DNA; note = donor_IS884
cgcaaacgggacgcgttcatatagattgaaatgaacgcgtcccacccgtg

SEQ ID NO: 30428 - DNA, 50 bp, unidentified
  source 1..50: mol_type = unassigned DNA; note = donor_IS900
cggcttgacaacgtcattgagaatccttacctttcttgaagggtgttcgg

SEQ ID NO: 30429 - DNA, 50 bp, unidentified
  source 1..50: mol_type = unassigned DNA; note = donor_IS902
cttgacacgctcattgagattccttagggttgaaggggtctgggattgga

SEQ ID NO: 30430 - DNA, 50 bp, unidentified
  source 1..50: mol_type = unassigned DNA; note = donor_ISAar2
atagcttgactttttacataggggcgttatgttgttgacagctccttaac

SEQ ID NO: 30431 - DNA, 50 bp, unidentified
  source 1..50: mol_type = unassigned DNA; note = donor_ISAeca3
tgcaaaaaagggggtgaccatagataatgagatggtcacccccaccctgt

SEQ ID NO: 30432 - DNA, 50 bp, unidentified
  source 1..50: mol_type = unassigned DNA; note = donor_ISAfe1
tgcacacatggaggcatccatataatgtaatggatgcctccccctacagg

SEQ ID NO: 30433 - DNA, 50 bp, unidentified
  source 1..50: mol_type = unassigned DNA; note = donor_ISAli16
gcaacccatgaacaagacagttgcttgtgtctttgaattttgctagagaa

SEQ ID NO: 30434 - DNA, 50 bp, unidentified
  source 1..50: mol_type = unassigned DNA; note = donor_ISArsp5
gccgcttgacgaaaaccatagaggcgttacctttttcgtagcccgttcct

SEQ ID NO: 30435 - DNA, 50 bp, unidentified
  source 1..50: mol_type = unassigned DNA; note = donor_ISAs16
ttggcaaaccggggcgaccatctataatgggatggtcgcccctccccaaa

SEQ ID NO: 30436 - DNA, 50 bp, unidentified
  source 1..50: mol_type = unassigned DNA; note = donor_ISAs24
gcaaagttcaggctgaccatagattaatgtgatggtcagcctgacccaca

SEQ ID NO: 30437 - DNA, 50 bp, unidentified
  source 1..50: mol_type = unassigned DNA; note = donor_ISAtu1
cgcccgggaggcgtccatagattatgggatggacgcctccctccgaactg

SEQ ID NO: 30438 - DNA, 50 bp, unidentified
  source 1..50: mol_type = unassigned DNA; note = donor_ISAve1
ttggcaaaccggggcgaccatctataatggaatggtcgcccctccccaaa

SEQ ID NO: 30439 - DNA, 50 bp, unidentified
  source 1..50: mol_type = unassigned DNA; note = donor_ISAzs4
gcgccgagagggccgtccacacatgatgtggtggacggccctttcaccaa

SEQ ID NO: 30440 - DNA, 50 bp, unidentified
  source 1..50: mol_type = unassigned DNA; note = donor_ISAzvi2
ggcaaaccggggggagtccatatacaatgaaatggactcccccctcctac

SEQ ID NO: 30441 - DNA, 50 bp, unidentified
  source 1..50: mol_type = unassigned DNA; note = donor_ISAzvi4
gcaaaaacgggggtgaccatagattaatgagatggtcacccccacaccct

SEQ ID NO: 30442 - DNA, 50 bp, unidentified
  source 1..50: mol_type = unassigned DNA; note = donor_ISBcen1
gcaaaaaagggggtgaccatagattaatgagatggtcacccccaccctac

SEQ ID NO: 30443 - DNA, 50 bp, unidentified
  source 1..50: mol_type = unassigned DNA; note = donor_ISBcen2
gcaaaaatcgggctgaccatagattaataggatggtcagcccgatcctca

SEQ ID NO: 30444 - DNA, 50 bp, unidentified
  source 1..50: mol_type = unassigned DNA; note = donor_ISBcen3
tggcaaaacgggggcgtccatgtataatggaatggacgcccccgcccggc

SEQ ID NO: 30445 - DNA, 50 bp, unidentified
  source 1..50: mol_type = unassigned DNA; note = donor_ISBcen4
ttggcaagccggaggcgtccatataaaatggtatggacgcctcctcatcg

SEQ ID NO: 30446 - DNA, 50 bp, unidentified
  source 1..50: mol_type = unassigned DNA; note = donor_ISBcen5
gttgcaaacgggacgcgttcatataattgaaatgaacgcgtcccacccgt

SEQ ID NO: 30447 - DNA, 50 bp, unidentified
  source 1..50: mol_type = unassigned DNA; note = donor_ISBcen8
gggcttgactcggaagacggttacttgtatgttcagtactgaccagtacg

SEQ ID NO: 30448 - DNA, 50 bp, unidentified
  source 1..50: mol_type = unassigned DNA; note = donor_ISBdi11
gacgtcccagcagcgattagacgacatggggtaatcgcaggagcgtgttg

SEQ ID NO: 30449 - DNA, 50 bp, unidentified
  source 1..50: mol_type = unassigned DNA; note = donor_ISBfun1
gtgctcaacggggaagcccttgtagaatgaaagggacttccccgtcccga

SEQ ID NO: 30450 - DNA, 50 bp, unidentified
  source 1..50: mol_type = unassigned DNA; note = donor_ISBj18
tgcctcgcgggccgttccacatatgatgtggtggaacggcccgctccaac

SEQ ID NO: 30451 - DNA, 50 bp, unidentified
  source 1..50: mol_type = unassigned DNA; note = donor_ISBj19
gccaacccggagccgtccacacatgatgctgtggacggctcctccaccgg

SEQ ID NO: 30452 - DNA, 50 bp, unidentified
  source 1..50: mol_type = unassigned DNA; note = donor_ISBj4
tgctacgcacggccggaccgtacataatgggatggtccggccgtgctcct

SEQ ID NO: 30453 - DNA, 50 bp, unidentified
  source 1..50: mol_type = unassigned DNA; note = donor_ISBma3
aacgcttgacgaaagacataggggcgttactatcttcctgtcccaataat

SEQ ID NO: 30454 - DNA, 50 bp, unidentified
  source 1..50: mol_type = unassigned DNA; note = donor_ISBmu9
aggcttgacttggtagacggttacttgtatgtttaagcctgaccagtacg

SEQ ID NO: 30455 - DNA, 50 bp, unidentified
  source 1..50: mol_type = unassigned DNA; note = donor_ISBth13
ccccttgacttctcatagttggtctcgtatgataaagttaggttttttag

SEQ ID NO: 30456 - DNA, 50 bp, unidentified
  source 1..50: mol_type = unassigned DNA; note = donor_ISC1190
cggaaaggtttttataccggaagcttatataaaacatattagtcagatct

SEQ ID NO: 30457 - DNA, 50 bp, unidentified
  source 1..50: mol_type = unassigned DNA; note = donor_ISCaa14
aaccttgcttttgaacacagttcatcctatgtttgtataaatgttgagta

SEQ ID NO: 30458 - DNA, 50 bp, unidentified
  source 1..50: mol_type = unassigned DNA; note = donor_ISCARN26
ctgcttgactttcaacacggttacttgtatgtttaaaccagatcagcgcg

SEQ ID NO: 30459 - DNA, 50 bp, unidentified
  source 1..50: mol_type = unassigned DNA; note = donor_ISCARN36
ttgcaagccgggggcacccatgtataatggaatgggtgcccccacccgat

SEQ ID NO: 30460 - DNA, 50 bp, unidentified; identical to SEQ ID NO: 30359
  source 1..50: mol_type = unassigned DNA; note = donor_ISCro4

SEQ ID NO: 30461 - DNA, 50 bp, unidentified
  source 1..50: mol_type = unassigned DNA; note = donor_ISCro5
gcataacgggaggtgtccatatacgatgtgatggacacctcccaccttac

SEQ ID NO: 30462 - DNA, 50 bp, unidentified
  source 1..50: mol_type = unassigned DNA; note = donor_ISCth7
ttgttgacttttcatagcacgtcttgtacaatatagttagtttttcgacg

SEQ ID NO: 30463 - DNA, 50 bp, unidentified
  source 1..50: mol_type = unassigned DNA; note = donor_ISEc11
gcaaacgggatgcgttcatataaatgtaatgaacgcatcccacacaatta

SEQ ID NO: 30464 - DNA, 50 bp, unidentified
  source 1..50: mol_type = unassigned DNA; note = donor_ISEch1
atacttgactggagacacggttacttgtatcttgctcatgtcgtgattag

SEQ ID NO: 30465 - DNA, 50 bp, unidentified
  source 1..50: mol_type = unassigned DNA; note = donor_ISEch4
gcaaaaacgggggtgaccatagattaataagatggtcacccccaccctgt

SEQ ID NO: 30466 - DNA, 50 bp, unidentified
  source 1..50: mol_type = unassigned DNA; note = donor_ISEnfa110
ctacttgacttttattagcaggtctattacaataaatttggacaggaaag

SEQ ID NO: 30467 - DNA, 50 bp, unidentified
  source 1..50: mol_type = unassigned DNA; note = donor_ISFnu4
aagttcttgacttttcatagttggtgtatgataaatatataaaatattta

SEQ ID NO: 30468 - DNA, 50 bp, unidentified
  source 1..50: mol_type = unassigned DNA; note = donor_ISFop3
taaataaattagcaacatagttgattgtaagttaaattcttagtataatg

SEQ ID NO: 30469 - DNA, 50 bp, unidentified
  source 1..50: mol_type = unassigned DNA; note = donor_ISGpa2
ttttttgtgtgtaaacacagttgcttgtatattaaaattatagtaaacta

SEQ ID NO: 30470 - DNA, 50 bp, unidentified
  source 1..50: mol_type = unassigned DNA; note = donor_ISHaha5
atgttgacaaactattagctggtttcgtattataaggttaaccagaattc

SEQ ID NO: 30471 - DNA, 50 bp, unidentified
  source 1..50: mol_type = unassigned DNA; note = donor_ISHar3
tgcaaaaggtgtcgggtccatacatactgagatggacccggcaccaccaa

SEQ ID NO: 30472 - DNA, 50 bp, unidentified
  source 1..50: mol_type = unassigned DNA; note = donor_ISHar6
tgcaaaaaggagggtgaccatagataatgagatggtcaccctccacccta

SEQ ID NO: 30473 - DNA, 50 bp, unidentified
  source 1..50: mol_type = unassigned DNA; note = donor_ISHne5
aacccaattgaccaacacggatacttgtcttatggcatttgcgtctgatc

SEQ ID NO: 30474 - DNA, 50 bp, unidentified
  source 1..50: mol_type = unassigned DNA; note = donor_ISKpn2
tgcaaaacggaggtagtccatagataatgggatggactacctactcccgc

SEQ ID NO: 30475 - DNA, 50 bp, unidentified
  source 1..50: mol_type = unassigned DNA; note = donor_ISKpn42
aatttttaccttcaagacagttgcttgtatcttgaagactgattaaaatt

SEQ ID NO: 30476 - DNA, 50 bp, unidentified
  source 1..50: mol_type = unassigned DNA; note = donor_ISKrh6
gcttgactcggaacatagggacaccgttaccttgtgagtgcctccgatgg

SEQ ID NO: 30477 - DNA, 50 bp, unidentified
  source 1..50: mol_type = unassigned DNA; note = donor_ISMahy7
ttgaccgcagggggagtccatgtagaatgatatggactccccctgctccc

SEQ ID NO: 30478 - DNA, 50 bp, unidentified
  source 1..50: mol_type = unassigned DNA; note = donor_ISMch6
gccgcttgacacatagaagggcgtcagtcagaagatcggtgccagttccc

SEQ ID NO: 30479 - DNA, 50 bp, unidentified
  source 1..50: mol_type = unassigned DNA; note = donor_ISMlo1
gcagggaggaggccgtccacatatgttggtgtggacggcctcctgcacgg

SEQ ID NO: 30480 - DNA, 50 bp, unidentified
  source 1..50: mol_type = unassigned DNA; note = donor_ISMlo2
gcgagaagggtgccgtccacatatgttggggtggacggcccccgcacggc

SEQ ID NO: 30481 - DNA, 50 bp, unidentified
  source 1..50: mol_type = unassigned DNA; note = donor_ISMlu12
gcggcttgacgaaaaccatagaggcgttaccttcttcgtggctcctggat

SEQ ID NO: 30482 - DNA, 50 bp, unidentified
  source 1..50: mol_type = unassigned DNA; note = donor_ISMno14
gctttatgcgaggcgattagacgacatggggtaatcgcgggagcgttccc

SEQ ID NO: 30483 - DNA, 50 bp, unidentified
  source 1..50: mol_type = unassigned DNA; note = donor_ISMno26
gcaccgcaggggccgtccacacatgatggggtggacggcccctgctcacg

SEQ ID NO: 30484 - DNA, 50 bp, unidentified
  source 1..50: mol_type = unassigned DNA; note = donor_ISMpa1
acaacttacggacctgggatgtctaatggggatcgaacagtgagccttcg

SEQ ID NO: 30485 - DNA, 50 bp, unidentified
  source 1..50: mol_type = unassigned DNA; note = donor_ISMtsp7
ttgccgcgggaggcgtccatagattatgggatggacgcctcccgctccgc

SEQ ID NO: 30486 - DNA, 50 bp, unidentified
  source 1..50: mol_type = unassigned DNA; note = donor_ISMysp1
cttgacttcttcattgagagtccttaagttcgtagttgcagttacttcgt

SEQ ID NO: 30487 - DNA, 50 bp, unidentified
  source 1..50: mol_type = unassigned DNA; note = donor_ISOt5
tttcttgattcttatcacggtatcttgtatgataaaaataagtgaaattg

SEQ ID NO: 30488 - DNA, 50 bp, unidentified
  source 1..50: mol_type = unassigned DNA; note = donor_ISPa11
ggcaaaccgggaggagtccatatacaatgaaatggactcctccctcctac

SEQ ID NO: 30489 - DNA, 50 bp, unidentified
  source 1..50: mol_type = unassigned DNA; note = donor_ISPa49
tggcaaacgggaggcgtccatataaaatgtaatggacgcctccctcttac

SEQ ID NO: 30490 - DNA, 50 bp, unidentified
  source 1..50: mol_type = unassigned DNA; note = donor_ISPa62
actgcttgtggggagagtccatatatgctgtaatggactctccccacacc

SEQ ID NO: 30491 - DNA, 50 bp, unidentified
  source 1..50: mol_type = unassigned DNA; note = donor_ISPath1
tgcaaaaatgggggtgaccatagataatgagatggtcacccccaccctac

SEQ ID NO: 30492 - DNA, 50 bp, unidentified
  source 1..50: mol_type = unassigned DNA; note = donor_ISPfa1
tcgcaaacgggaggcgttcatataatgatatgaacgcctcccacccgtga

SEQ ID NO: 30493 - DNA, 50 bp, unidentified
  source 1..50: mol_type = unassigned DNA; note = donor_ISPfa2
tgcaaacgggacgcgttcatatagaatgaaatgaacgcgtcccaccccgt

SEQ ID NO: 30494 - DNA, 50 bp, unidentified
  source 1..50: mol_type = unassigned DNA; note = donor_ISPfl1
tgcaggagatgggctgaccatacataatgagatggtcagcccagtacggg

SEQ ID NO: 30495 - DNA, 50 bp, unidentified
  source 1..50: mol_type = unassigned DNA; note = donor_ISPpr8
ttgcaatgcgagagggtccatatataatggtatggaccctctccccccaa

SEQ ID NO: 30496 - DNA, 50 bp, unidentified
  source 1..50: mol_type = unassigned DNA; note = donor_ISPpu10
aaatttgcctccggccatagaatcttgtatggtaggacttgaagggagga

SEQ ID NO: 30497 - DNA, 50 bp, unidentified
  source 1..50: mol_type = unassigned DNA; note = donor_ISPpu31
ggcaaaacgggaggagtccatatacaatgagatggactcctccctcctac

SEQ ID NO: 30498 - DNA, 50 bp, unidentified
  source 1..50: mol_type = unassigned DNA; note = donor_ISPpu9
gtttgatagaagcgggttcacccgctcctacaggtacggcgcagaattcg

SEQ ID NO: 30499 - DNA, 50 bp, unidentified
  source 1..50: mol_type = unassigned DNA; note = donor_ISPsy7
tgcaggaggtgggctgaccatacataatgagatggtcagcccgatccgag

SEQ ID NO: 30500 - DNA, 50 bp, unidentified
  source 1..50: mol_type = unassigned DNA; note = donor_ISPye16
tgcaatagcggggcggaccatacataatgggatggcccgccccgcgcccc

SEQ ID NO: 30501 - DNA, 50 bp, unidentified
  source 1..50: mol_type = unassigned DNA; note = donor_ISPye47
gcatccaacggggcgtccacagatgatggggtggacgcccccccgacggc

SEQ ID NO: 30502 - DNA, 50 bp, unidentified
  source 1..50: mol_type = unassigned DNA; note = donor_ISPye59
accgcccttgaccaagacggatacttgtcttatgagatttgaggctcctg

SEQ ID NO: 30503 - DNA, 50 bp, unidentified
  source 1..50: mol_type = unassigned DNA; note = donor_ISRel7
ttgccacggaggccgtccatacatgatgtggtggacggcctccgcacccg

SEQ ID NO: 30504 - DNA, 50 bp, unidentified
  source 1..50: mol_type = unassigned DNA; note = donor_ISRfsp2
ccccttgacaagcaacacagttactagtataatctaacgggacacggtat

SEQ ID NO: 30505 - DNA, 50 bp, unidentified
  source 1..50: mol_type = unassigned DNA; note = donor_ISRhosp8
gcttgacgggaaccatagggacaccgttacgttatttacggtccttcaca

SEQ ID NO: 30506 - DNA, 50 bp, unidentified
  source 1..50: mol_type = unassigned DNA; note = donor_ISRhru3
gacaccagaaggcccattacggaagatgcggtaatgggccttggccagga

SEQ ID NO: 30507 - DNA, 50 bp, unidentified
  source 1..50: mol_type = unassigned DNA; note = donor_ISRsp4
tgcaagcgggagccgtccacatatgttgaggtggacggctcccaacggca

SEQ ID NO: 30508 - DNA, 50 bp, unidentified
  source 1..50: mol_type = unassigned DNA; note = donor_ISSam1
ctcgcttgacgaaggacatagaggcgttatctttttcgcggtcctgcaag

SEQ ID NO: 30509 - DNA, 50 bp, unidentified
  source 1..50: mol_type = unassigned DNA; note = donor_ISShes7
gatctattcgaggtgtccatatatgatgggatggacacctcttgtgaagt

SEQ ID NO: 30510 - DNA, 50 bp, unidentified
  source 1..50: mol_type = unassigned DNA; note = donor_ISShsp1
tgcaagagggagccgtccacatatgttggggtggacggctcccaacggca

SEQ ID NO: 30511 - DNA, 50 bp, unidentified
  source 1..50: mol_type = unassigned DNA; note = donor_ISSlo1
gatctatccgaggtgtccatatatgatgagatggacacctcttgtgaagt

SEQ ID NO: 30512 - DNA, 50 bp, unidentified
  source 1..50: mol_type = unassigned DNA; note = donor_ISSm3
tagtcgcactcgaaagacagttgcttgtatctcgaaagtggattactatg

SEQ ID NO: 30513 - DNA, 50 bp, unidentified
  source 1..50: mol_type = unassigned DNA; note = donor_ISSod14
gctaaccccgaggtgaccatatatgctgagatggtcacctcggtctcggc

SEQ ID NO: 30514 - DNA, 50 bp, unidentified
  source 1..50: mol_type = unassigned DNA; note = donor_ISSod19
ttgcaaaccggatgggtccatatataatggaatggacccatccactttta

SEQ ID NO: 30515 - DNA, 50 bp, unidentified; identical to SEQ ID NO: 30514
  source 1..50: mol_type = unassigned DNA; note = donor_ISSpe2

SEQ ID NO: 30516 - DNA, 50 bp, unidentified
  source 1..50: mol_type = unassigned DNA; note = donor_ISSpe4
gttgacacaggggagtccacataagataattggactccccactctttaat

SEQ ID NO: 30517 - DNA, 50 bp, unidentified
  source 1..50: mol_type = unassigned DNA; note = donor_ISSph14
cttgcaaacggggcgggccatacgtatgggatggcccgccccttttcacc

SEQ ID NO: 30518 - DNA, 50 bp, unidentified
  source 1..50: mol_type = unassigned DNA; note = donor_ISSphsp16
tgtaagagggggtcgtccacatatgttggagtggacgacccccagcggca

SEQ ID NO: 30519 - DNA, 50 bp, unidentified
  source 1..50: mol_type = unassigned DNA; note = donor_ISSpi6
gcaataacgaggcggaccatacattaattagatggtccgcctcaccccta

SEQ ID NO: 30520 - DNA, 50 bp, unidentified
  source 1..50: mol_type = unassigned DNA; note = donor_ISSpu22
ttgcaaaccggatgggtccatatataatggaatggacccatccactttaa

SEQ ID NO: 30521 - DNA, 50 bp, unidentified
  source 1..50: mol_type = unassigned DNA; note = donor_ISStma4
cctaggcgagggcgacacggtatcttgtgtcttggatcgtgccctgatca

SEQ ID NO: 30522 - DNA, 50 bp, unidentified
  source 1..50: mol_type = unassigned DNA; note = donor_ISStma6
ggctgcccctgacaagacagttgcttatctcttgccaatctggcaccttg

SEQ ID NO: 30523 - DNA, 50 bp, unidentified
  source 1..50: mol_type = unassigned DNA; note = donor_ISStma7
aagtccctccatcaacacagttgcttatctgatgaaaatctgtcagcgta

SEQ ID NO: 30524 - DNA, 50 bp, unidentified
  source 1..50: mol_type = unassigned DNA; note = donor_ISStma8
cgagcctcccatcaacacagttgcttatctgatcggaatctggcagcgta

SEQ ID NO: 30525 - DNA, 50 bp, unidentified
  source 1..50: mol_type = unassigned DNA; note = donor_ISSto5
tggaaaggtttttataccggaagcttatataaaacatattagtcagatct

SEQ ID NO: 30526 - DNA, 50 bp, unidentified
  source 1..50: mol_type = unassigned DNA; note = donor_ISVpa1
tgcaaaacggggcgtaccatacattaataagatggtacgccccacacctg

SEQ ID NO: 30527 - DNA, 50 bp, unidentified
  source 1..50: mol_type = unassigned DNA; note = donor_ISWen2
ttgttgactaacaagacggtatcttgtatcttgaaaaaagcatctagtgt

SEQ ID NO: 30528 - DNA, 50 bp, unidentified
  source 1..50: mol_type = unassigned DNA; note = donor_ISWpi12
aaaaaatttaaaaaacatagttgattgtaagtcaaaaatatgatataaag

SEQ ID NO: 30529 - DNA, 50 bp, unidentified
  source 1..50: mol_type = unassigned DNA; note = donor_ISXne4
tgcaaacgggatgcgttcatatagaatgtaatgagcgcatcccaatcact

SEQ ID NO: 30530 - DNA, 50 bp, unidentified
  source 1..50: mol_type = unassigned DNA; note = donor_001fad1
  misc_feature 1..22: note = RE
  misc_feature 23..25: note = Core
  misc_feature 26..50: note = LE
acctcaacacgccgaatagagaagatggggtattcggctcgagcccatcc

SEQ ID NO: 30531 - DNA, 50 bp, unidentified
  source 1..50: mol_type = unassigned DNA; note = donor_0020f6d
  misc_feature 1..23: note = RE
  misc_feature 24..25: note = Core
  misc_feature 26..50: note = LE
tcgcttgaccgaagacacggttacttgtatgttcaggcctgaccagcacg

SEQ ID NO: 30532 - DNA, 50 bp, unidentified
  source 1..50: mol_type = unassigned DNA; note = donor_0021d87
  misc_feature 1..24: note = RE
  misc_feature 25: note = Core
  misc_feature 26..50: note = LE
tgcaatacggcggcggaccatacatactggcatggtccgccgcctagccc

SEQ ID NO: 30533 - DNA, 50 bp, unidentified
  source 1..50: mol_type = unassigned DNA; note = donor_0024046
  misc_feature 1..24: note = RE
  misc_feature 25: note = Core
  misc_feature 26..50: note = LE
ttggcaaaagtgggcatccatgtataatggaatggacgcccacttcctaa

SEQ ID NO: 30534 - DNA, 50 bp, unidentified
  source 1..50: mol_type = unassigned DNA; note = donor_002e543
  misc_feature 1..23: note = RE
  misc_feature 24..25: note = Core
  misc_feature 26..50: note = LE
tgacacccaagaccatgggatgtctaatggggctcaccgggtcggccctg

SEQ ID NO: 30535 - DNA, 50 bp, unidentified
  source 1..50: mol_type = unassigned DNA; note = donor_002f21a
  misc_feature 1..24: note = RE
  misc_feature 25: note = Core
  misc_feature 26..50: note = LE
cttgcaagcagggcgggccatacgtatgggatggcccgcccttccgagaa

SEQ ID NO: 30536 - DNA, 50 bp, unidentified
  source 1..50: mol_type = unassigned DNA; note = donor_0041c38
  misc_feature 1..23: note = RE
  misc_feature 24..25: note = Core
  misc_feature 26..50: note = LE
ctttgcagcagctatccacacaggatggtgtggatagctcctgctccaat

SEQ ID NO: 30537 - DNA, 50 bp, unidentified
  source 1..50: mol_type = unassigned DNA; note = donor_0046f74
  misc_feature 1..22: note = RE
  misc_feature 23..25: note = Core
  misc_feature 26..50: note = LE
cttgactcttgacatagagggtcttatatgttactattttgccagaccct

SEQ ID NO: 30538 - DNA, 50 bp, unidentified
  source 1..50: mol_type = unassigned DNA; note = donor_004eae7
  misc_feature 1..22: note = RE
  misc_feature 23..25: note = Core
  misc_feature 26..50: note = LE
tttaaacttgacagggcgtagaaaatccactaagcttaaaggcgtacatg

SEQ ID NO: 30539 - DNA, 50 bp, unidentified
  source 1..50: mol_type = unassigned DNA; note = donor_0053ab9
  misc_feature 1..23: note = RE
  misc_feature 24..25: note = Core
  misc_feature 26..50: note = LE
gcaacttgacaaatagagaggcaccgacttatatcgccggtagcggtgtc

SEQ ID NO: 30540 - DNA, 50 bp, unidentified
  source 1..50: mol_type = unassigned DNA; note = donor_006c6c6
  misc_feature 1..24: note = RE
  misc_feature 25: note = Core
  misc_feature 26..50: note = LE
ccgcctcttgacacagaggggagcctacttatctactggtgttacgaccg

SEQ ID NO: 30541 - DNA, 50 bp, unidentified
  source 1..50: mol_type = unassigned DNA; note = donor_00743d6
  misc_feature 1..23: note = RE
  misc_feature 24..25: note = Core
  misc_feature 26..50: note = LE
tgacatccaagctcctgggatgtctaatgggagctaccgggtcagccagt

SEQ ID NO: 30542 - DNA, 50 bp, unidentified
  source 1..50: mol_type = unassigned DNA; note = donor_0074fd6
  misc_feature 1..23: note = RE
  misc_feature 24..25: note = Core
  misc_feature 26..50: note = LE
gcagtcaggcggcggaccatacataatgagatggtccgccgccccgatca

SEQ ID NO: 30543 - DNA, 50 bp, unidentified
  source 1..50: mol_type = unassigned DNA; note = donor_0078451
  misc_feature 1..23: note = RE
  misc_feature 24..25: note = Core
  misc_feature 26..50: note = LE
gcgtccaagggggcgtccacagatgatggggtggacgcccccgacggcat

SEQ ID NO: 30544 - DNA, 50 bp, unidentified
  source 1..50: mol_type = unassigned DNA; note = donor_007871a
  misc_feature 1..23: note = RE
  misc_feature 24..25: note = Core
  misc_feature 26..50: note = LE
gcattcatgggggcgtccacacacgatggggtggacgccccccggcggca

SEQ ID NO: 30545 - DNA, 50 bp, unidentified
  source 1..50: mol_type = unassigned DNA; note = donor_0079ae6
  misc_feature 1..24: note = RE
  misc_feature 25: note = Core
  misc_feature 26..50: note = LE
ttgggccttgacagaaagaggcttctgatggaggatcgaggtcgacgctg

SEQ ID NO: 30546 - DNA, 50 bp, unidentified
  source 1..50: mol_type = unassigned DNA; note = donor_007b3fc
  misc_feature 1..24: note = RE
  misc_feature 25: note = Core
  misc_feature 26..50: note = LE
atgttgacaagctattagctggtatcgtattatgagatcaaccaattctt

SEQ ID NO: 30547 - DNA, 50 bp, unidentified
  source 1..50: mol_type = unassigned DNA; note = donor_007da4e
  misc_feature 1..23: note = RE
  misc_feature 24..25: note = Core
  misc_feature 26..50: note = LE
ccgcttgacaacaacattagaaatccctaccttgttgatcgggatgagcg

SEQ ID NO: 30548 - DNA, 50 bp, unidentified
  source 1..50: mol_type = unassigned DNA; note = donor_00809fb
  misc_feature 1..23: note = RE
  misc_feature 24..25: note = Core
  misc_feature 26..50: note = LE
tcacttgacatcacaccgctggactcgtataatatatttaagataccaaa

SEQ ID NO: 30549 - DNA, 50 bp, unidentified
  source 1..50: mol_type = unassigned DNA; note = donor_0080dc3
  misc_feature 1..23: note = RE
  misc_feature 24..25: note = Core
  misc_feature 26..50: note = LE
gcatcatgggcggcaaccaaagaagatggaatggttgccgccctcccccc

SEQ ID NO: 30550 - DNA, 50 bp, unidentified
  source 1..50: mol_type = unassigned DNA; note = donor_0085a3d
  misc_feature 1..23: note = RE
  misc_feature 24..25: note = Core
  misc_feature 26..50: note = LE
ccgcttgacaaaaacattaggcagccctacctttcagaggtgcatctggt

SEQ ID NO: 30551 - DNA, 50 bp, unidentified
  source 1..50: mol_type = unassigned DNA; note = donor_00860ff
  misc_feature 1..23: note = RE
  misc_feature 24..25: note = Core
  misc_feature 26..50: note = LE
aggcttgattttttattagtaggctcctactataggttttgtgatggtac

SEQ ID NO: 30552 - DNA, 50 bp, unidentified
  source 1..50: mol_type = unassigned DNA; note = donor_009a237
  misc_feature 1..23: note = RE
  misc_feature 24..25: note = Core
  misc_feature 26..50: note = LE
gcgacaaggcggcggaccatacataatggcatggtccggcgcttttaccc

SEQ ID NO: 30553 - DNA, 50 bp, unidentified
  source 1..50: mol_type = unassigned DNA; note = donor_009dd87
  misc_feature 1..24: note = RE
  misc_feature 25: note = Core
  misc_feature 26..50: note = LE
tgcggcaaggcggcggaccatacataatgggatggtccgccgccttttga

SEQ ID NO: 30554 - DNA, 50 bp, unidentified
  source 1..50: mol_type = unassigned DNA; note = donor_009e4ae
  misc_feature 1..22: note = RE
  misc_feature 23..25: note = Core
  misc_feature 26..50: note = LE
cctcacgggcggcaaccacagaagatggggtggttgccgccctccccaga

SEQ ID NO: 30555 - DNA, 50 bp, unidentified
  source 1..50: mol_type = unassigned DNA; note = donor_00a0078
  misc_feature 1..24: note = RE
  misc_feature 25: note = Core
  misc_feature 26..50: note = LE
tatatttggttttatcttagaatacctttagatttacgttttaatgattc

SEQ ID NO: 30556 - DNA, 50 bp, unidentified
  source 1..50: mol_type = unassigned DNA; note = donor_00bd0de
  misc_feature 1..21: note = RE
  misc_feature 22..25: note = Core
  misc_feature 26..50: note = LE
ctaggggtagacacagggcaactcactggtgcaccatcctcgtgtcggta

SEQ ID NO: 30557 - DNA, 50 bp, unidentified
  source 1..50: mol_type = unassigned DNA; note = donor_00bee42
  misc_feature 1..22: note = RE
  misc_feature 23..25: note = Core
  misc_feature 26..50: note = LE
actattgatttttattagcaagtttggtactataaaagtgtaatattaat

SEQ ID NO: 30558 - DNA, 50 bp, unidentified
  source 1..50: mol_type = unassigned DNA; note = donor_00c55a3
  misc_feature 1..22: note = RE
  misc_feature 23..25: note = Core
  misc_feature 26..50: note = LE
attgacttttctgatagtttgtcttatattagaattagtgcagttagcta

SEQ ID NO: 30559 - DNA, 50 bp, unidentified
  source 1..50: mol_type = unassigned DNA; note = donor_00d89ca
  misc_feature 1..22: note = RE
  misc_feature 23..25: note = Core
  misc_feature 26..50: note = LE
tgccataggcggcgtccacatatgatgatgtggacgccgctgccagcgaa

SEQ ID NO: 30560 - DNA, 50 bp, unidentified
  source 1..50: mol_type = unassigned DNA; note = donor_00db659
  misc_feature 1..23: note = RE
  misc_feature 24..25: note = Core
  misc_feature 26..50: note = LE
tgccccaaacttgacttagagaactcattggggaagtatcgagggtgcgg

SEQ ID NO: 30561 - DNA, 50 bp, unidentified
  source 1..50: mol_type = unassigned DNA; note = donor_00e1564
  misc_feature 1..23: note = RE
  misc_feature 24..25: note = Core
  misc_feature 26..50: note = LE
ggctcgcctaaccaacacagttgcctgtctgttggagtgatggtatgagg

SEQ ID NO: 30562 - DNA, 50 bp, unidentified
  source 1..50: mol_type = unassigned DNA; note = donor_00f1c69
  misc_feature 1..23: note = RE
  misc_feature 24..25: note = Core
  misc_feature 26..50: note = LE
aggcttgcgccaaaccatagaatcttgtatgttttcatagcacttaccga

SEQ ID NO: 30563 - DNA, 50 bp, unidentified
  source 1..50: mol_type = unassigned DNA; note = donor_00f8b27
  misc_feature 1..24: note = RE
  misc_feature 25: note = Core
  misc_feature 26..50: note = LE
taggcttgcaaaaatcataagaataccttagatttgcagcggcaaaccga

SEQ ID NO: 30564 - DNA, 50 bp, unidentified
  source 1..50: mol_type = unassigned DNA; note = donor_00ff113
  misc_feature 1..24: note = RE
  misc_feature 25: note = Core
  misc_feature 26..50: note = LE
cttgcagacggggcgggccatacgtatggatggcccgcccctcaacctcg

SEQ ID NO: 30565 - DNA, 50 bp, unidentified
  source 1..50: mol_type = unassigned DNA; note = donor_0107d72
  misc_feature 1..22: note = RE
  misc_feature 23..25: note = Core
  misc_feature 26..50: note = LE
cttgacttttataatagtttgtcttatattattatttgtaggtagctcct

SEQ ID NO: 30566 - DNA, 50 bp, unidentified
  source 1..50: mol_type = unassigned DNA; note = donor_010e660
  misc_feature 1..23: note = RE
  misc_feature 24..25: note = Core
  misc_feature 26..50: note = LE
gacaacaaccacccgtgggatgtctaatggggatcgaccgtccgggtcga

SEQ ID NO: 30567 - DNA, 50 bp, unidentified
  source 1..50: mol_type = unassigned DNA; note = donor_01103c4
  misc_feature 1..22: note = RE
  misc_feature 23..25: note = Core
  misc_feature 26..50: note = LE
ttttctcattgacatagaaggtcttatctgttaaactcaacttagtggca

SEQ ID NO: 30568 - DNA, 50 bp, unidentified
  source 1..50: mol_type = unassigned DNA; note = donor_0117f5e
  misc_feature 1..22: note = RE
  misc_feature 23..25: note = Core
  misc_feature 26..50: note = LE
catcgccggggccgtccacagatgatggggtggacggcccctgtatccgg

SEQ ID NO: 30569 - DNA, 50 bp, unidentified
  source 1..50: mol_type = unassigned DNA; note = donor_0118d1a
  misc_feature 1..22: note = RE
  misc_feature 23..25: note = Core
  misc_feature 26..50: note = LE
ctattgacttttaatagttagtcttgtattatagagtagtagttattaga

SEQ ID NO: 30570 - DNA, 50 bp, unidentified
  source 1..50: mol_type = unassigned DNA; note = donor_0122ddb
  misc_feature 1..24: note = RE
  misc_feature 25: note = Core
  misc_feature 26..50: note = LE
agcaaagtggggagggtccatatacaatgggatggacccctccccacacc

SEQ ID NO: 30571 - DNA, 50 bp, unidentified
  source 1..50: mol_type = unassigned DNA; note = donor_01556e5
  misc_feature 1..23: note = RE
  misc_feature 24..25: note = Core
  misc_feature 26..50: note = LE
tcaacgcgggagccttccacacacgatgggatggaaggctcccgctccgc

SEQ ID NO: 30572 - DNA, 50 bp, unidentified
  source 1..50: mol_type = unassigned DNA; note = donor_015a4e1
  misc_feature 1..23: note = RE
  misc_feature 24..25: note = Core
  misc_feature 26..50: note = LE
gccccttgagttctttcattggagaggtggcatgaaagctgctgctccca

SEQ ID NO: 30573 - DNA, 50 bp, unidentified
  source 1..50: mol_type = unassigned DNA; note = donor_016d258
  misc_feature 1..24: note = RE
  misc_feature 25: note = Core
  misc_feature 26..50: note = LE
ttgaccgcagggggaatccatgtagaatgatatggactccccctgctccc

SEQ ID NO: 30574 - DNA, 50 bp, unidentified
  source 1..50: mol_type = unassigned DNA; note = donor_0172b2d
  misc_feature 1..23: note = RE
  misc_feature 24..25: note = Core
  misc_feature 26..50: note = LE
aaacatcttgatcaagacggatacttgtctcatgactgccccggcttttt

SEQ ID NO: 30575 - DNA, 50 bp, unidentified
  source 1..50: mol_type = unassigned DNA; note = donor_0174494
  misc_feature 1..23: note = RE
  misc_feature 24..25: note = Core
  misc_feature 26..50: note = LE
gggcttgacttttaatagttagtctcgtatcataaaagagtagtatttat

SEQ ID NO: 30576 - DNA, 50 bp, unidentified
  source 1..50: mol_type = unassigned DNA; note = donor_017daa5
  misc_feature 1..24: note = RE
  misc_feature 25: note = Core
  misc_feature 26..50: note = LE
tgcaaaaatgggggtgaccatagataatgagatggtcacccccgacaccc

SEQ ID NO: 30577 - DNA, 50 bp, unidentified
  source 1..50: mol_type = unassigned DNA; note = donor_017f72e
  misc_feature 1..23: note = RE
  misc_feature 24..25: note = Core
  misc_feature 26..50: note = LE
aatagtaaaattaatatggtatacttgtataatgattttaaccataactc

SEQ ID NO: 30578 - DNA, 50 bp, unidentified
  source 1..50: mol_type = unassigned DNA; note = donor_0182188
  misc_feature 1..23: note = RE
  misc_feature 24..25: note = Core
  misc_feature 26..50: note = LE
tgccgacggggcgggccatacgtttatggaatggcccgcccctcctgccc

SEQ ID NO: 30579 - DNA, 50 bp, unidentified
  source 1..50: mol_type = unassigned DNA; note = donor_01874bf
  misc_feature 1..21: note = RE
  misc_feature 22..25: note = Core
  misc_feature 26..50: note = LE
gcttgactttgaacacagttgcttgtatgttctttgtacgttccttcacg

SEQ ID NO: 30580 - DNA, 50 bp, unidentified
  source 1..50: mol_type = unassigned DNA; note = donor_018b4fd
  misc_feature 1..23: note = RE
  misc_feature 24..25: note = Core
  misc_feature 26..50: note = LE
gaggttgactggagagacggtatcttgtatcttgtttcctgtggtggtta

SEQ ID NO: 30581 - DNA, 50 bp, unidentified
  source 1..50: mol_type = unassigned DNA; note = donor_019213e
  misc_feature 1..23: note = RE
  misc_feature 24..25: note = Core
  misc_feature 26..50: note = LE
ttacttgacttcatatagttagtcttgtataatgaactcatagggaaatt

SEQ ID NO: 30582 - DNA, 50 bp, unidentified
  source 1..50: mol_type = unassigned DNA; note = donor_0197a09
  misc_feature 1..23: note = RE
  misc_feature 24..25: note = Core
  misc_feature 26..50: note = LE
gagtagccatcacttaatggttgcttgtattgatgcgaatcactagtgtg

SEQ ID NO: 30583 - DNA, 50 bp, unidentified
  source 1..50: mol_type = unassigned DNA; note = donor_019aaee
  misc_feature 1..21: note = RE
  misc_feature 22..25: note = Core
  misc_feature 26..50: note = LE
ggcttgacttcgtcattgagactccgtaagttgttaggtggcccgggagg

SEQ ID NO: 30584 - DNA, 50 bp, unidentified
  source 1..50: mol_type = unassigned DNA; note = donor_01a9c4f
  misc_feature 1..24: note = RE
  misc_feature 25: note = Core
  misc_feature 26..50: note = LE
tgcagtcagacggcggaccatacatactgagatggtccgccgcttgaact

SEQ ID NO: 30585 - DNA, 50 bp, unidentified
  source 1..50: mol_type = unassigned DNA; note = donor_01ad162
  misc_feature 1..24: note = RE
  misc_feature 25: note = Core
  misc_feature 26..50: note = LE
ttgcaaatggggggcgtccatgtataatgaaatggacgccccctcccaaa

SEQ ID NO: 30586 - DNA, 50 bp, unidentified
  source 1..50: mol_type = unassigned DNA; note = donor_01c3370
  misc_feature 1..23: note = RE
  misc_feature 24..25: note = Core
  misc_feature 26..50: note = LE
gttgacagatggtccgttacagaagatggtgtaacggcccggtcgccaca

SEQ ID NO: 30587 - DNA, 50 bp, unidentified
  source 1..50: mol_type = unassigned DNA; note = donor_01cfb4a
  misc_feature 1..24: note = RE
  misc_feature 25: note = Core
  misc_feature 26..50: note = LE
ttgaacaaacgggaagtccctgtagaatacgaagggacttcccgcaatcc

SEQ ID NO: 30588 - DNA, 50 bp, unidentified
  source 1..50: mol_type = unassigned DNA; note = donor_01d09e5
  misc_feature 1..24: note = RE
  misc_feature 25: note = Core
  misc_feature 26..50: note = LE
atgcttggaaattagcttagttcttcttaagtttgatttcctaactttaa

SEQ ID NO: 30589 - DNA, 50 bp, unidentified
  source 1..50: mol_type = unassigned DNA; note = donor_01d39a7
  misc_feature 1..24: note = RE
  misc_feature 25: note = Core
  misc_feature 26..50: note = LE
ttgcaattaggtggggtccatatacaatggtatggaccccgccacccgcg

SEQ ID NO: 30590 - DNA, 50 bp, unidentified
  source 1..50: mol_type = unassigned DNA; note = donor_01d8bc3
  misc_feature 1..23: note = RE
  misc_feature 24..25: note = Core
  misc_feature 26..50: note = LE
gccaacctggagccgtccacacatgatgctgtggacggctccgccaccgg

SEQ ID NO: 30591 - DNA, 50 bp, unidentified
  source 1..50: mol_type = unassigned DNA; note = donor_01de067
  misc_feature 1..23: note = RE
  misc_feature 24..25: note = Core
  misc_feature 26..50: note = LE
gggtttgacatctaatagttagtcttgtattatagagtagtagtttttag

SEQ ID NO: 30592 - DNA, 50 bp, unidentified
  source 1..50: mol_type = unassigned DNA; note = donor_01e30b2
  misc_feature 1..23: note = RE
  misc_feature 24..25: note = Core
  misc_feature 26..50: note = LE
ataatttgcaaaaatcatagtagtaccttagatttgcatctgaggattac

SEQ ID NO: 30593 - DNA, 50 bp, unidentified
  source 1..50: mol_type = unassigned DNA; note = donor_01e4de2
  misc_feature 1..23: note = RE
  misc_feature 24..25: note = Core
  misc_feature 26..50: note = LE
tctcttgacttttaagacagtcgcttgtatcttagaaagagtagtagacc

SEQ ID NO: 30594 - DNA, 50 bp, unidentified
  source 1..50: mol_type = unassigned DNA; note = donor_01e73c5
  misc_feature 1..23: note = RE
  misc_feature 24..25: note = Core
  misc_feature 26..50: note = LE
gcatccgaaggggactccacagatgatggggtggacgccccccgacggca

SEQ ID NO: 30595 - DNA, 50 bp, unidentified
  source 1..50: mol_type = unassigned DNA; note = donor_01e9d2e
  misc_feature 1..23: note = RE
  misc_feature 24..25: note = Core
  misc_feature 26..50: note = LE
ccacttgactttttattagcaggctcctattatggttttgtaaggagatt

SEQ ID NO: 30596 - DNA, 50 bp, unidentified
  source 1..50: mol_type = unassigned DNA; note = donor_01ebc3d
  misc_feature 1..23: note = RE
  misc_feature 24..25: note = Core
  misc_feature 26..50: note = LE
cgtagggggcgttaagacggtatcttatatctcgattttgatctttaccg

SEQ ID NO: 30597 - DNA, 50 bp, unidentified
  source 1..50: mol_type = unassigned DNA; note = donor_01ed685
  misc_feature 1..23: note = RE
  misc_feature 24..25: note = Core
  misc_feature 26..50: note = LE
ggtcttgacaactcttggcaggtttgctacaatgccaacaggccgggaga

SEQ ID NO: 30598 - DNA, 50 bp, unidentified
  source 1..50: mol_type = unassigned DNA; note = donor_01f19ee
  misc_feature 1..22: note = RE
  misc_feature 23..25: note = Core
  misc_feature 26..50: note = LE
atcagcgggcgacgtccagacatgatggtgtggacgacgcccgcgcggca

SEQ ID NO: 30599 - DNA, 50 bp, unidentified
  source 1..50: mol_type = unassigned DNA; note = donor_01f3239
  misc_feature 1..24: note = RE
  misc_feature 25: note = Core
  misc_feature 26..50: note = LE
tgcgatttatgggagcgtccatatataatgagatggacgctccatcttta

SEQ ID NO: 30600 - DNA, 50 bp, unidentified
  source 1..50: mol_type = unassigned DNA; note = donor_01f707c
  misc_feature 1..23: note = RE
  misc_feature 24..25: note = Core
  misc_feature 26..50: note = LE
agccttgactttttatttgcaggctactacaatatatttatggttaatac

SEQ ID NO: 30601 - DNA, 50 bp, unidentified
  source 1..50: mol_type = unassigned DNA; note = donor_01f733a
  misc_feature 1..24: note = RE
  misc_feature 25: note = Core
  misc_feature 26..50: note = LE
taagttgttttttaactcagttcttcttaagtttgtcttttattaaattt

SEQ ID NO: 30602 - DNA, 50 bp, unidentified
  source 1..50: mol_type = unassigned DNA; note = donor_01fb361
  misc_feature 1..23: note = RE
  misc_feature 24..25: note = Core
  misc_feature 26..50: note = LE
tctcttgacatttgatagctggtctcgtatattatagttgtagtaataaa

SEQ ID NO: 30603 - DNA, 50 bp, unidentified
  source 1..50: mol_type = unassigned DNA; note = donor_01fcdbf
  misc_feature 1..24: note = RE
  misc_feature 25: note = Core
  misc_feature 26..50: note = LE
cttggcatagggggcgaccatgtataatggaatggtcgccccttcctgaa

SEQ ID NO: 30604 - DNA, 50 bp, unidentified
  source 1..50: mol_type = unassigned DNA; note = donor_0203eeb
  misc_feature 1..22: note = RE
  misc_feature 23..25: note = Core
  misc_feature 26..50: note = LE
gccaactcggagccgtccacacatgatgctgtggacggctcctccaccgg

SEQ ID NO: 30605 - DNA, 50 bp, unidentified
  source 1..50: mol_type = unassigned DNA; note = donor_0204134
  misc_feature 1..23: note = RE
  misc_feature 24..25: note = Core
  misc_feature 26..50: note = LE
gcatcaacgggggcgtccacacatgatggggtggacgccccctcacggca

SEQ ID NO: 30606 - DNA, 50 bp, unidentified
  source 1..50: mol_type = unassigned DNA; note = donor_0225791
  misc_feature 1..22: note = RE
  misc_feature 23..25: note = Core
  misc_feature 26..50: note = LE
ttgccaaggcgccgtccacacgtgatgctgtggacggcgcccactctacg

SEQ ID NO: 30607 - DNA, 50 bp, unidentified
  source 1..50: mol_type = unassigned DNA; note = donor_022611f
  misc_feature 1..21: note = RE
  misc_feature 22..25: note = Core
  misc_feature 26..50: note = LE
ttgacgaagcagataggggcaccccgttacctttttagtagcccctaaat

SEQ ID NO: 30608 - DNA, 50 bp, unidentified
  source 1..50: mol_type = unassigned DNA; note = donor_022f473
  misc_feature 1..23: note = RE
  misc_feature 24..25: note = Core
  misc_feature 26..50: note = LE
tctcttgacatttaatagctggtctcgtataataatgttatagtttaaaa

SEQ ID NO: 30609 - DNA, 50 bp, unidentified
  source 1..50: mol_type = unassigned DNA; note = donor_022fe00
  misc_feature 1..22: note = RE
  misc_feature 23..25: note = Core
  misc_feature 26..50: note = LE
attgacttttcttatagtttgtcttatattatatttagcgcagttagcta

SEQ ID NO: 30610 - DNA, 50 bp, unidentified
  source 1..50: mol_type = unassigned DNA; note = donor_022fe03
  misc_feature 1..23: note = RE
  misc_feature 24..25: note = Core
  misc_feature 26..50: note = LE
gacaaccaaagcccatggggtgtctaatgggaggtgccggggaagccacg

SEQ ID NO: 30611 - DNA, 50 bp, unidentified
  source 1..50: mol_type = unassigned DNA; note = donor_0234e45
  misc_feature 1..22: note = RE
  misc_feature 23..25: note = Core
  misc_feature 26..50: note = LE
attcatttttgttttatagaggaaattttgataaatttccgaattataag

SEQ ID NO: 30612 - DNA, 50 bp, unidentified
  source 1..50: mol_type = unassigned DNA; note = donor_023b80b
  misc_feature 1..23: note = RE
  misc_feature 24..25: note = Core
  misc_feature 26..50: note = LE
ctgcttgactttttttttgcagactactacaatatatttatggttaatac

SEQ ID NO: 30613 - DNA, 50 bp, unidentified
  source 1..50: mol_type = unassigned DNA; note = donor_023eb55
  misc_feature 1..24: note = RE
  misc_feature 25: note = Core
  misc_feature 26..50: note = LE
ggcgcaaacggggacgttcatataatgaaatgaacgtccccgcctaccgc

SEQ ID NO: 30614 - DNA, 50 bp, unidentified
  source 1..50: mol_type = unassigned DNA; note = donor_0243c78
  misc_feature 1..23: note = RE
  misc_feature 24..25: note = Core
  misc_feature 26..50: note = LE
acttaaagaatcaaacacggtatcttatatgttgaaagtgttctccagaa

SEQ ID NO: 30615 - DNA, 50 bp, unidentified
  source 1..50: mol_type = unassigned DNA; note = donor_0243f85
  misc_feature 1..23: note = RE
  misc_feature 24..25: note = Core
  misc_feature 26..50: note = LE
caatgcgggagccatccacacaagatggggtggatggctcccgctcccgg

SEQ ID NO: 30616 - DNA, 50 bp, unidentified
  source 1..50: mol_type = unassigned DNA; note = donor_0244740
  misc_feature 1..23: note = RE
  misc_feature 24..25: note = Core
  misc_feature 26..50: note = LE
caatgcgggagccatccacacaagatggggtggatggctcccgctcccga

SEQ ID NO: 30617 - DNA, 50 bp, unidentified
  source 1..50: mol_type = unassigned DNA; note = donor_024ce75
  misc_feature 1..23: note = RE
  misc_feature 24..25: note = Core
  misc_feature 26..50: note = LE
aacacgatcaggagagatggtatcttgtatctcttggtgacgaatgatta

SEQ ID NO: 30618 - DNA, 50 bp, unidentified
  source 1..50: mol_type = unassigned DNA; note = donor_02593ed
  misc_feature 1..22: note = RE
  misc_feature 23..25: note = Core
  misc_feature 26..50: note = LE
cgttgcctgaatataggagcatctgctattaaagaactaccggcgtttcc

SEQ ID NO: 30619 - DNA, 50 bp, unidentified
  source 1..50: mol_type = unassigned DNA; note = donor_025a32e
  misc_feature 1..23: note = RE
  misc_feature 24..25: note = Core
  misc_feature 26..50: note = LE
gcactacgggcggcaaccacagaagatggagtggttgccgccctccctag

SEQ ID NO: 30620 - DNA, 50 bp, unidentified
  source 1..50: mol_type = unassigned DNA; note = donor_025e5da
  misc_feature 1..23: note = RE
  misc_feature 24..25: note = Core
  misc_feature 26..50: note = LE
cttgacaatcctttatagccggtctactataaagattaagatttggtatc

SEQ ID NO: 30621 - DNA, 50 bp, unidentified
  source 1..50: mol_type = unassigned DNA; note = donor_0260eb0
  misc_feature 1..23: note = RE
  misc_feature 24..25: note = Core
  misc_feature 26..50: note = LE
gcgagacgggggccgtccacatatgttggggtggacggcccccgacggca

SEQ ID NO: 30622 - DNA, 50 bp, unidentified
  source 1..50: mol_type = unassigned DNA; note = donor_0264524
  misc_feature 1..24: note = RE
  misc_feature 25: note = Core
  misc_feature 26..50: note = LE
gccgcttgacacaccacataggggcccgttaccttgttggtggtcccggg

SEQ ID NO: 30623 - DNA, 50 bp, unidentified
  source 1..50: mol_type = unassigned DNA; note = donor_0266862
  misc_feature 1..24: note = RE
  misc_feature 25: note = Core
  misc_feature 26..50: note = LE
gctggcaaacggggagtccatatacaatgggatggattcctccccaccct

SEQ ID NO: 30624 - DNA, 50 bp, unidentified
  source 1..50: mol_type = unassigned DNA; note = donor_0267f89
  misc_feature 1..24: note = RE
  misc_feature 25: note = Core
  misc_feature 26..50: note = LE
acgaaagagataggggcacccccccgttaccgtcttcgtggctccgcaat

SEQ ID NO: 30625 - DNA, 50 bp, unidentified
  source 1..50: mol_type = unassigned DNA; note = donor_0271b29
  misc_feature 1..22: note = RE
  misc_feature 23..25: note = Core
  misc_feature 26..50: note = LE
tcttgactttttcattagcaagattcataatgtaagagtaaggtctatcc

SEQ ID NO: 30626 - DNA, 50 bp, unidentified
  source 1..50: mol_type = unassigned DNA; note = donor_027a933
  misc_feature 1..23: note = RE
  misc_feature 24..25: note = Core
  misc_feature 26..50: note = LE
agatatatttatctaactgagggagcattcctgtagtgcgctattttcaa

SEQ ID NO: 30627 - DNA, 50 bp, unidentified
  source 1..50: mol_type = unassigned DNA; note = donor_02835f5
  misc_feature 1..20: note = RE
  misc_feature 21..25: note = Core
  misc_feature 26..50: note = LE
cttggattttaaaacagtaccttttatttttacaaagaattattaaaggt

SEQ ID NO: 30628 - DNA, 50 bp, unidentified
  source 1..50: mol_type = unassigned DNA; note = donor_02851fb
  misc_feature 1..22: note = RE
  misc_feature 23..25: note = Core
  misc_feature 26..50: note = LE
cttgactaaaaaagccccatacaagatgctatggggcggcggcgaggata

SEQ ID NO: 30629 - DNA, 50 bp, unidentified
  source 1..50: mol_type = unassigned DNA; note = donor_028a2d6
  misc_feature 1..23: note = RE
  misc_feature 24..25: note = Core
  misc_feature 26..50: note = LE
acacttgactttcaacagagaatcttgtatgttgcgatcacaggcgtgag

SEQ ID NO: 30630 - DNA, 50 bp, unidentified
  source 1..50: mol_type = unassigned DNA; note = donor_028a4db
  misc_feature 1..24: note = RE
  misc_feature 25: note = Core
  misc_feature 26..50: note = LE
tcagttgacaaaactataggaacacattacagtaaaaaacagctagttgg

SEQ ID NO: 30631 - DNA, 50 bp, unidentified
  source 1..50: mol_type = unassigned DNA; note = donor_028b083
  misc_feature 1..23: note = RE
  misc_feature 24..25: note = Core
  misc_feature 26..50: note = LE
tgacattcaagctcctgggatgtctaatgagttctgggagtgagccatcc

SEQ ID NO: 30632 - DNA, 50 bp, unidentified
  source 1..50: mol_type = unassigned DNA; note = donor_028b3d9
  misc_feature 1..24: note = RE
  misc_feature 25: note = Core
  misc_feature 26..50: note = LE
ttgcaaatcgggggcgtccatgtacaatgggatggacgccccctccgaaa

SEQ ID NO: 30633 - DNA, 50 bp, unidentified
  source 1..50: mol_type = unassigned DNA; note = donor_028e2fd
  misc_feature 1..23: note = RE
  misc_feature 24..25: note = Core
  misc_feature 26..50: note = LE
gcaataaacgaggagtccatatatgatgatatggactcctctctctctac

SEQ ID NO: 30634 - DNA, 50 bp, unidentified
  source 1..50: mol_type = unassigned DNA; note = donor_028f7c1
  misc_feature 1..23: note = RE
  misc_feature 24..25: note = Core
  misc_feature 26..50: note = LE
ttgcaaacggggcgggccatacgttatggaatggcccgccccttttcccc

SEQ ID NO: 30635 - DNA, 50 bp, unidentified
  source 1..50: mol_type = unassigned DNA; note = donor_02a0ca8
  misc_feature 1..22: note = RE
  misc_feature 23..25: note = Core
  misc_feature 26..50: note = LE
caccaacgggggcatccacacatgatggcgtggatgccccctcccaccta

SEQ ID NO: 30636 - DNA, 50 bp, unidentified
  source 1..50: mol_type = unassigned DNA; note = donor_02a2aff
  misc_feature 1..24: note = RE
  misc_feature 25: note = Core
  misc_feature 26..50: note = LE
tgcagtcagacggcggaccatacatactgagatggtccgccgcttgatct

SEQ ID NO: 30637 - DNA, 50 bp, unidentified
  source 1..50: mol_type = unassigned DNA; note = donor_02b26ab
  misc_feature 1..21: note = RE
  misc_feature 22..25: note = Core
  misc_feature 26..50: note = LE
ggcttgacacggtcattgagagtccctaagtttgtgggtgtctggggttg

SEQ ID NO: 30638 - DNA, 50 bp, unidentified
  source 1..50: mol_type = unassigned DNA; note = donor_02c83a1
  misc_feature 1..24: note = RE
  misc_feature 25: note = Core
  misc_feature 26..50: note = LE
cttgcagagggggcgggccatacgtatgggatggcccgccccccaccagc

SEQ ID NO: 30639 - DNA, 50 bp, unidentified
  source 1..50: mol_type = unassigned DNA; note = donor_02cbbf8
  misc_feature 1..23: note = RE
  misc_feature 24..25: note = Core
  misc_feature 26..50: note = LE
agtattgactttttatttgcaggctactactatgtaagtaaggtaaaatt

SEQ ID NO: 30640 - DNA, 50 bp, unidentified
  source 1..50: mol_type = unassigned DNA; note = donor_02cc050
  misc_feature 1..23: note = RE
  misc_feature 24..25: note = Core
  misc_feature 26..50: note = LE
ccagcttgaaatcaacacagttacttgtatcttggcatttgaaccgttgt

SEQ ID NO: 30641 - DNA, 50 bp, unidentified
  source 1..50: mol_type = unassigned DNA; note = donor_02d1b0d
  misc_feature 1..21: note = RE
  misc_feature 22..25: note = Core
  misc_feature 26..50: note = LE
ggcttgacttcgtcattgagactccgtaaggtgttaagcggcccgggagg

SEQ ID NO: 30642 - DNA, 50 bp, unidentified
  source 1..50: mol_type = unassigned DNA; note = donor_02d3b90
  misc_feature 1..23: note = RE
  misc_feature 24..25: note = Core
  misc_feature 26..50: note = LE
gccggtttacttcagcacagttgcttgtgtcccaaaaatttggcagaatg

SEQ ID NO: 30643 - DNA, 50 bp, unidentified
  source 1..50: mol_type = unassigned DNA; note = donor_02d8d27
  misc_feature 1..23: note = RE
  misc_feature 24..25: note = Core
  misc_feature 26..50: note = LE
tgcaaacggggatgcgttcatacagaatgagatgaacgcatccccaacca

SEQ ID NO: 30644 - DNA, 50 bp, unidentified
  source 1..50: mol_type = unassigned DNA; note = donor_02f7caa
  misc_feature 1..23: note = RE
  misc_feature 24..25: note = Core
  misc_feature 26..50: note = LE
tttcttgacatttcttagctggactagtataataatggtgtagtcaagaa

SEQ ID NO: 30645 - DNA, 50 bp, unidentified
  source 1..50: mol_type = unassigned DNA; note = donor_03060bb
  misc_feature 1..23: note = RE
  misc_feature 24..25: note = Core
  misc_feature 26..50: note = LE
atgcttgacttttcatagctggtcttgtatgataattaggaagttattta

SEQ ID NO: 30646 - DNA, 50 bp, unidentified
  source 1..50: mol_type = unassigned DNA; note = donor_030b853
  misc_feature 1..24: note = RE
  misc_feature 25: note = Core
  misc_feature 26..50: note = LE
tgcaaaaatggaggtaaccatagataatgagatggtcacccccgacaccc

SEQ ID NO: 30647 - DNA, 50 bp, unidentified
  source 1..50: mol_type = unassigned DNA; note = donor_030c53b
  misc_feature 1..23: note = RE
  misc_feature 24..25: note = Core
  misc_feature 26..50: note = LE
cttgcgcatggggcggttatacatgatactgtaaccgccccccgacggca

SEQ ID NO: 30648 - DNA, 50 bp, unidentified
  source 1..50: mol_type = unassigned DNA; note = donor_031016a
  misc_feature 1..22: note = RE
  misc_feature 23..25: note = Core
  misc_feature 26..50: note = LE
ctacttgacttttattagcaggtctattacaataaatttggacatgaaag

SEQ ID NO: 30649 - DNA, 50 bp, unidentified
  source 1..50: mol_type = unassigned DNA; note = donor_03114d1
  misc_feature 1..23: note = RE
  misc_feature 24..25: note = Core
  misc_feature 26..50: note = LE
agcttgacaaccgcgattagagaacatagcgtaatcgctcagggcctagc

SEQ ID NO: 30650 - DNA, 50 bp, unidentified
  source 1..50: mol_type = unassigned DNA; note = donor_0329289
  misc_feature 1..24: note = RE
  misc_feature 25: note = Core
  misc_feature 26..50: note = LE
gttcgggtcttgacgtaggagcttcacttcctccaccattgttgggcagg

SEQ ID NO: 30651 - DNA, 50 bp, unidentified
  source 1..50: mol_type = unassigned DNA; note = donor_032d267
  misc_feature 1..23: note = RE
  misc_feature 24..25: note = Core
  misc_feature 26..50: note = LE
gcaaggagggggctatccacacatgatggggtggatagcccccgacggca

SEQ ID NO: 30652 - DNA, 50 bp, unidentified
  source 1..50: mol_type = unassigned DNA; note = donor_0331695
  misc_feature 1..23: note = RE
  misc_feature 24..25: note = Core
  misc_feature 26..50: note = LE
aattttatcgttcaagacagttgcttgtatcttgaaaattgtttaaaata

SEQ ID NO: 30653 - DNA, 50 bp, unidentified
  source 1..50: mol_type = unassigned DNA; note = donor_0333db1
  misc_feature 1..24: note = RE
  misc_feature 25: note = Core
  misc_feature 26..50: note = LE
gaccagttgacaacagaggggagcctactagagacttccctgcaggatcg

SEQ ID NO: 30654 - DNA, 50 bp, unidentified
  source 1..50: mol_type = unassigned DNA; note = donor_0334600
  misc_feature 1..23: note = RE
  misc_feature 24..25: note = Core
  misc_feature 26..50: note = LE
agatatacctatctaactgagggagcattcctgtagagcgttaattttca

SEQ ID NO: 30655 - DNA, 50 bp, unidentified
  source 1..50: mol_type = unassigned DNA; note = donor_033975c
  misc_feature 1..22: note = RE
  misc_feature 23..25: note = Core
  misc_feature 26..50: note = LE
ccaaaagggagccgtccacacatgatgcggtggacggctcccaccgccgg

SEQ ID NO: 30656 - DNA, 50 bp, unidentified
  source 1..50: mol_type = unassigned DNA; note = donor_033af7c
  misc_feature 1..23: note = RE
  misc_feature 24..25: note = Core
  misc_feature 26..50: note = LE
ggtcttgacttttaatagttagtctcgtattatataaaagtagtagtttt

SEQ ID NO: 30657 - DNA, 50 bp, unidentified
  source 1..50: mol_type = unassigned DNA; note = donor_0341bc3
  misc_feature 1..21: note = RE
  misc_feature 22..25: note = Core
  misc_feature 26..50: note = LE
gcgaggcttgacacagggctactcactggtgcaccatccttatgtcagtg

SEQ ID NO: 30658 - DNA, 50 bp, unidentified; identical to SEQ ID NO: 30451
  source 1..50: mol_type = unassigned DNA; note = donor_0349c53
  misc_feature 1..23: note = RE
  misc_feature 24..25: note = Core
  misc_feature 26..50: note = LE

SEQ ID NO: 30659 - DNA, 50 bp, unidentified
  source 1..50: mol_type = unassigned DNA; note = donor_035f46c
  misc_feature 1..23: note = RE
  misc_feature 24..25: note = Core
  misc_feature 26..50: note = LE
gcgcttgactgaaagcatagaaccttgtatggttgaggcgtcggggtgga

SEQ ID NO: 30660 - DNA, 50 bp, unidentified
  source 1..50: mol_type = unassigned DNA; note = donor_0361d5b
  misc_feature 1..22: note = RE
  misc_feature 23..25: note = Core
  misc_feature 26..50: note = LE
caccgcgggcgtcgtccacacatgatgaggtggacgacgcccgctcccgg

SEQ ID NO: 30661 - DNA, 50 bp, unidentified
  source 1..50: mol_type = unassigned DNA; note = donor_036877e
  misc_feature 1..23: note = RE
  misc_feature 24..25: note = Core
  misc_feature 26..50: note = LE
ttgacaaagggggagtccacataagataattggactccccctaccccgaa

SEQ ID NO: 30662 - DNA, 50 bp, unidentified
  source 1..50: mol_type = unassigned DNA; note = donor_037008c
  misc_feature 1..22: note = RE
  misc_feature 23..25: note = Core
  misc_feature 26..50: note = LE
aaaaggacttgacatagagagtcttatacagtaaactattaacaagccca

SEQ ID NO: 30663 - DNA, 50 bp, unidentified
  source 1..50: mol_type = unassigned DNA; note = donor_03703b4
  misc_feature 1..23: note = RE
  misc_feature 24..25: note = Core
  misc_feature 26..50: note = LE
aggtcggtcgggagagacggtatcttgtgtctctccagtggggagtgatt

SEQ ID NO: 30664 - DNA, 50 bp, unidentified
  source 1..50: mol_type = unassigned DNA; note = donor_0377ebc
  misc_feature 1..23: note = RE
  misc_feature 24..25: note = Core
  misc_feature 26..50: note = LE
acaggtacgcctgttttcatagaagatgtgatgaaagcaggcgtgcctcc

SEQ ID NO: 30665 - DNA, 50 bp, unidentified
  source 1..50: mol_type = unassigned DNA; note = donor_037ddbc
  misc_feature 1..23: note = RE
  misc_feature 24..25: note = Core
  misc_feature 26..50: note = LE
tgctttgtgggccgttccacatatgatggtgtggaacggcccttcgcacc

SEQ ID NO: 30666 - DNA, 50 bp, unidentified
  source 1..50: mol_type = unassigned DNA; note = donor_03814dc
  misc_feature 1..24: note = RE
  misc_feature 25: note = Core
  misc_feature 26..50: note = LE
gccgcttgacaaacgacataggggcgttactttctttgtggcccggatgg

SEQ ID NO: 30667 - DNA, 50 bp, unidentified
  source 1..50: mol_type = unassigned DNA; note = donor_038c354
  misc_feature 1..23: note = RE
  misc_feature 24..25: note = Core
  misc_feature 26..50: note = LE
gcaatcaggcgacggaccatacataatgggatggtccgtcgtcttcaggt

SEQ ID NO: 30668 - DNA, 50 bp, unidentified
  source 1..50: mol_type = unassigned DNA; note = donor_038c5c8
  misc_feature 1..23: note = RE
  misc_feature 24..25: note = Core
  misc_feature 26..50: note = LE
gtgccacgggggccgtccacatatgatggtgtggacggccccctacggca

SEQ ID NO: 30669 - DNA, 50 bp, unidentified
  source 1..50: mol_type = unassigned DNA; note = donor_0394048
  misc_feature 1..24: note = RE
  misc_feature 25: note = Core
  misc_feature 26..50: note = LE
tgcaaatccggggcagaccatacataatggaatggtctgccccacctgct

SEQ ID NO: 30670 - DNA, 50 bp, unidentified
  source 1..50: mol_type = unassigned DNA; note = donor_03a0bc3
  misc_feature 1..24: note = RE
  misc_feature 25: note = Core
  misc_feature 26..50: note = LE
cgcggcttgacacttagaagggcgtagtctatgatggtcaccagttctcg

SEQ ID NO: 30671 - DNA, 50 bp, unidentified
  source 1..50: mol_type = unassigned DNA; note = donor_03a0d69
  misc_feature 1..24: note = RE
  misc_feature 25: note = Core
  misc_feature 26..50: note = LE
tgcaaaacggaggtagtccatagataatgggatggactacctccttcctc

SEQ ID NO: 30672 - DNA, 50 bp, unidentified
  source 1..50: mol_type = unassigned DNA; note = donor_03a84fb
  misc_feature 1..23: note = RE
  misc_feature 24..25: note = Core
  misc_feature 26..50: note = LE
cttgacctcagcatcgtcatgtgagatcccatgaccggtggtggatagcg

SEQ ID NO: 30673 - DNA, 50 bp, unidentified
  source 1..50: mol_type = unassigned DNA; note = donor_03ad14a
  misc_feature 1..23: note = RE
  misc_feature 24..25: note = Core
  misc_feature 26..50: note = LE
ccagcttgaaaccaagacagttacttgtatctttaatttctgatcctgtt

SEQ ID NO: 30674 - DNA, 50 bp, unidentified
  source 1..50: mol_type = unassigned DNA; note = donor_03b3860
  misc_feature 1..24: note = RE
  misc_feature 25: note = Core
  misc_feature 26..50: note = LE
gacagcagggagaccgtccacacatgatgctgtggacggctcccacctac

SEQ ID NO: 30675 - DNA, 50 bp, unidentified
  source 1..50: mol_type = unassigned DNA; note = donor_03d541d
  misc_feature 1..23: note = RE
  misc_feature 24..25: note = Core
  misc_feature 26..50: note = LE
gacacccaccgatcctggggtgtctaatgggggcagaccaggtcggctag

SEQ ID NO: 30676 - DNA, 50 bp, unidentified
  source 1..50: mol_type = unassigned DNA; note = donor_03d8ed4
  misc_feature 1..23: note = RE
  misc_feature 24..25: note = Core
  misc_feature 26..50: note = LE
gcactacgggcggcaaccacagaagatggagtggttgccgccctccccag

SEQ ID NO: 30677 - DNA, 50 bp, unidentified
  source 1..50: mol_type = unassigned DNA; note = donor_03da94e
  misc_feature 1..24: note = RE
  misc_feature 25: note = Core
  misc_feature 26..50: note = LE
tgcaaaattcgggctggccatagataatgaaatggccagcccgatcccag

SEQ ID NO: 30678 - DNA, 50 bp, unidentified
  source 1..50: mol_type = unassigned DNA; note = donor_03dede4
  misc_feature 1..22: note = RE
  misc_feature 23..25: note = Core
  misc_feature 26..50: note = LE
cccccgcttgaccatcacggatacttgtcttatgactttgtggtccgttc

SEQ ID NO: 30679 - DNA, 50 bp, unidentified
  source 1..50: mol_type = unassigned DNA; note = donor_03e81bf
  misc_feature 1..23: note = RE
  misc_feature 24..25: note = Core
  misc_feature 26..50: note = LE
gcatccgaaggggcgtccacacacgatggggtggacgccccctgacggca

SEQ ID NO: 30680 - DNA, 50 bp, unidentified
  source 1..50: mol_type = unassigned DNA; note = donor_03ed8fa
  misc_feature 1..23: note = RE
  misc_feature 24..25: note = Core
  misc_feature 26..50: note = LE
cccacttgaactccacacagttacttgtatcttggctttgcaggttgtgt

SEQ ID NO: 30681 - DNA, 50 bp, unidentified
  source 1..50: mol_type = unassigned DNA; note = donor_03f736a
  misc_feature 1..23: note = RE
  misc_feature 24..25: note = Core
  misc_feature 26..50: note = LE
gcattaaagggggcatccacagatgatggagtggatgcccctcccgacgg

SEQ ID NO: 30682 - DNA, 50 bp, unidentified
  source 1..50: mol_type = unassigned DNA; note = donor_03f89f2
  misc_feature 1..23: note = RE
  misc_feature 24..25: note = Core
  misc_feature 26..50: note = LE
aaaaaacacttgactatatagggagcttcctgtataattcaaatataggg

SEQ ID NO: 30683 - DNA, 50 bp, unidentified
  source 1..50: mol_type = unassigned DNA; note = donor_03fcd23
  misc_feature 1..24: note = RE
  misc_feature 25: note = Core
  misc_feature 26..50: note = LE
tgcaatagcgcggcggaccatacataatgggatggtccgccccgcgcccc

SEQ ID NO: 30684 - DNA, 50 bp, unidentified
  source 1..50: mol_type = unassigned DNA; note = donor_040e383
  misc_feature 1..20: note = RE
  misc_feature 21..25: note = Core
  misc_feature 26..50: note = LE
cttgacacgatcattgagattccctaagaatggttggcggtccgggagga

SEQ ID NO: 30685 - DNA, 50 bp, unidentified
  source 1..50: mol_type = unassigned DNA; note = donor_040eb4f
  misc_feature 1..23: note = RE
  misc_feature 24..25: note = Core
  misc_feature 26..50: note = LE
actattgactttttctttgcaggctactacaatagaattatggataaggt

SEQ ID NO: 30686 - DNA, 50 bp, unidentified
  source 1..50: mol_type = unassigned DNA; note = donor_0417412
  misc_feature 1..22: note = RE
  misc_feature 23..25: note = Core
  misc_feature 26..50: note = LE
tttgccctattgacatagagggtcttatacgttaagatatatccagccct

SEQ ID NO: 30687 - DNA, 50 bp, unidentified
  source 1..50: mol_type = unassigned DNA; note = donor_041d2e9
  misc_feature 1..24: note = RE
  misc_feature 25: note = Core
  misc_feature 26..50: note = LE
tgcaactgaggaggagtccatacacaatgggatggactcctcttccccct

SEQ ID NO: 30688 - DNA, 50 bp, unidentified
  source 1..50: mol_type = unassigned DNA; note = donor_0422044
  misc_feature 1..23: note = RE
  misc_feature 24..25: note = Core
  misc_feature 26..50: note = LE
tgccggcagggagcgtccagatatgatggagtggacgctccctgctcacc

SEQ ID NO: 30689 - DNA, 50 bp, unidentified
  source 1..50: mol_type = unassigned DNA; note = donor_0434af8
  misc_feature 1..24: note = RE
  misc_feature 25: note = Core
  misc_feature 26..50: note = LE
gagagttgacatacataggagcttcactgataatgggaatcgcgctatcg

SEQ ID NO: 30690 - DNA, 50 bp, unidentified
  source 1..50: mol_type = unassigned DNA; note = donor_0437385
  misc_feature 1..23: note = RE
  misc_feature 24..25: note = Core
  misc_feature 26..50: note = LE
gatcggtcgcgacttaatggttgcttgtaatagcgcaatcgaatattgtc

SEQ ID NO: 30691 - DNA, 50 bp, unidentified
  source 1..50: mol_type = unassigned DNA; note = donor_043c182
  misc_feature 1..23: note = RE
  misc_feature 24..25: note = Core
  misc_feature 26..50: note = LE
tggcttgacttggataacagtatcttgtattatccacccgtgtttttcag

SEQ ID NO: 30692 - DNA, 50 bp, unidentified
  source 1..50: mol_type = unassigned DNA; note = donor_043d337
  misc_feature 1..23: note = RE
  misc_feature 24..25: note = Core
  misc_feature 26..50: note = LE
cttgacaaaatgactcacatatcagacggtatgaggaggctggggcctcg

SEQ ID NO: 30693 - DNA, 50 bp, unidentified
  source 1..50: mol_type = unassigned DNA; note = donor_0448288
  misc_feature 1..23: note = RE
  misc_feature 24..25: note = Core
  misc_feature 26..50: note = LE
gccaacccggagccgtccacacatgatgctgtggacggctcctccacggg

SEQ ID NO: 30694 - DNA, 50 bp, unidentified
  source 1..50: mol_type = unassigned DNA; note = donor_044923c
  misc_feature 1..23: note = RE
  misc_feature 24..25: note = Core
  misc_feature 26..50: note = LE
tgacatccaagctcatgggatgtctaatgagtgttaccgggtcggcttcg

SEQ ID NO: 30695 - DNA, 50 bp, unidentified
  source 1..50: mol_type = unassigned DNA; note = donor_044fae2
  misc_feature 1..23: note = RE
  misc_feature 24..25: note = Core
  misc_feature 26..50: note = LE
aagaggcttgatcaagacggatacttgtcttatgaagatcccagcttttg

SEQ ID NO: 30696 - DNA, 50 bp, unidentified
  source 1..50: mol_type = unassigned DNA; note = donor_045196a
  misc_feature 1..23: note = RE
  misc_feature 24..25: note = Core
  misc_feature 26..50: note = LE
gcaataacgaggcggaccatacattaattagatggtccgcctcactctaa

SEQ ID NO: 30697 - DNA, 50 bp, unidentified
  source 1..50: mol_type = unassigned DNA; note = donor_046d868
  misc_feature 1..24: note = RE
  misc_feature 25: note = Core
  misc_feature 26..50: note = LE
gacttttatggggaagcccttgtagaatgaaagggacttccccgtcccga

SEQ ID NO: 30698 - DNA, 50 bp, unidentified
  source 1..50: mol_type = unassigned DNA; note = donor_046f912
  misc_feature 1..23: note = RE
  misc_feature 24..25: note = Core
  misc_feature 26..50: note = LE
ctacttgacttttattagcaggtctattacaatagtttttggtaggaagc

SEQ ID NO: 30699 - DNA, 50 bp, unidentified
  source 1..50: mol_type = unassigned DNA; note = donor_0470ab1
  misc_feature 1..23: note = RE
  misc_feature 24..25: note = Core
  misc_feature 26..50: note = LE
acgcttgactgccaagacggttgcttgtatctttcagcccgcggaccggc

SEQ ID NO: 30700 - DNA, 50 bp, unidentified
  source 1..50: mol_type = unassigned DNA; note = donor_047aef7
  misc_feature 1..23: note = RE
  misc_feature 24..25: note = Core
  misc_feature 26..50: note = LE
cggcttgacttcagcattgggaagctctaccttctttctgggctcaccgc

SEQ ID NO: 30701 - DNA, 50 bp, unidentified
  source 1..50: mol_type = unassigned DNA; note = donor_0481207
  misc_feature 1..24: note = RE
  misc_feature 25: note = Core
  misc_feature 26..50: note = LE
tgcgacgcacggccggaccatacataatgggatggtccgaccgtgctcct

SEQ ID NO: 30702 - DNA, 50 bp, unidentified
  source 1..50: mol_type = unassigned DNA; note = donor_0489b67
  misc_feature 1..22: note = RE
  misc_feature 23..25: note = Core
  misc_feature 26..50: note = LE
atgcttgacaaacattagctggtttcgtattatcaggttagccagtaatt

SEQ ID NO: 30703 - DNA, 50 bp, unidentified
  source 1..50: mol_type = unassigned DNA; note = donor_048fde6
  misc_feature 1..24: note = RE
  misc_feature 25: note = Core
  misc_feature 26..50: note = LE
tgcaaaaatcggggtgtccatagataatgaaatggacacccccttctata

SEQ ID NO: 30704 - DNA, 50 bp, unidentified
  source 1..50: mol_type = unassigned DNA; note = donor_049e3bf
  misc_feature 1..24: note = RE
  misc_feature 25: note = Core
  misc_feature 26..50: note = LE
tgaccccttgaccgagaggggagcctacttgtttaatttgatctacgacc

SEQ ID NO: 30705 - DNA, 50 bp, unidentified
  source 1..50: mol_type = unassigned DNA; note = donor_04a3066
  misc_feature 1..23: note = RE
  misc_feature 24..25: note = Core
  misc_feature 26..50: note = LE
gcacaacgggcggcaaccacagaagatggggtggttgccgccctccccag

SEQ ID NO: 30706 - DNA, 50 bp, unidentified
  source 1..50: mol_type = unassigned DNA; note = donor_04b172d
  misc_feature 1..24: note = RE
  misc_feature 25: note = Core
  misc_feature 26..50: note = LE
ctcttgacatttcttagctggacttagtataataatggtgtagtcaataa

SEQ ID NO: 30707 - DNA, 50 bp, unidentified
  source 1..50: mol_type = unassigned DNA; note = donor_04b4c5f
  misc_feature 1..23: note = RE
  misc_feature 24..25: note = Core
  misc_feature 26..50: note = LE
ttttttctatgttttattcacactttcctccatttccccgcgcctaaagt

SEQ ID NO: 30708 - DNA, 50 bp, unidentified
  source 1..50: mol_type = unassigned DNA; note = donor_04c03bc
  misc_feature 1..23: note = RE
  misc_feature 24..25: note = Core
  misc_feature 26..50: note = LE
gcaaaccgggtggcatccacacaagatggggtggatgccacccttccgca

SEQ ID NO: 30709 - DNA, 50 bp, unidentified
  source 1..50: mol_type = unassigned DNA; note = donor_04d8221
  misc_feature 1..23: note = RE
  misc_feature 24..25: note = Core
  misc_feature 26..50: note = LE
gacttgacaatccccattgggaagtcctaccttctttgttgggtctgaac

SEQ ID NO: 30710 - DNA, 50 bp, unidentified
  source 1..50: mol_type = unassigned DNA; note = donor_04e1b4f
  misc_feature 1..24: note = RE
  misc_feature 25: note = Core
  misc_feature 26..50: note = LE
tgcgtcttggaggtcgtccacacatgatggtgtggacgacctccacccaa

SEQ ID NO: 30711 - DNA, 50 bp, unidentified
  source 1..50: mol_type = unassigned DNA; note = donor_04f7f1e
  misc_feature 1..24: note = RE
  misc_feature 25: note = Core
  misc_feature 26..50: note = LE
tgcaaacgaggaggggtccatatacaatgggatggacccctcctcacctg

SEQ ID NO: 30712 - DNA, 50 bp, unidentified
  source 1..50: mol_type = unassigned DNA; note = donor_04fdbb5
  misc_feature 1..23: note = RE
  misc_feature 24..25: note = Core
  misc_feature 26..50: note = LE
tgacaaacaaaatcatggggtgtctaatgggagctaccgggtcggccacc

SEQ ID NO: 30713 - DNA, 50 bp, unidentified
  source 1..50: mol_type = unassigned DNA; note = donor_05007f4
  misc_feature 1..22: note = RE
  misc_feature 23..25: note = Core
  misc_feature 26..50: note = LE
ttgccaaggcgccgtccacacgtgatgctgtggacggcgcccactctgcg

SEQ ID NO: 30714 - DNA, 50 bp, unidentified
  source 1..50: mol_type = unassigned DNA; note = donor_0508996
  misc_feature 1..23: note = RE
  misc_feature 24..25: note = Core
  misc_feature 26..50: note = LE
cagcttgacattgaacacggttacttgtatgtttaaaccagaccagcgcg

SEQ ID NO: 30715 - DNA, 50 bp, unidentified
  source 1..50: mol_type = unassigned DNA; note = donor_050eb69
  misc_feature 1..23: note = RE
  misc_feature 24..25: note = Core
  misc_feature 26..50: note = LE
cttgccaagaggccgtccacatatgatgatgtggacggcctcacccgaac

SEQ ID NO: 30716 - DNA, 50 bp, unidentified
  source 1..50: mol_type = unassigned DNA; note = donor_05113fc
  misc_feature 1..24: note = RE
  misc_feature 25: note = Core
  misc_feature 26..50: note = LE
tgcagttcggtggcggaccatacataatgagatggtccgccgccgagtag

SEQ ID NO: 30717 - DNA, 50 bp, unidentified
  source 1..50: mol_type = unassigned DNA; note = donor_051497f
  misc_feature 1..23: note = RE
  misc_feature 24..25: note = Core
  misc_feature 26..50: note = LE
ggggttgacttttaatagttaatcttgtattatagagtagtagttattaa

SEQ ID NO: 30718 - DNA, 50 bp, unidentified
  source 1..50: mol_type = unassigned DNA; note = donor_051c786
  misc_feature 1..24: note = RE
  misc_feature 25: note = Core
  misc_feature 26..50: note = LE
ttgcaaaaggggatggttcatatataatgtaatgaaccatccccgcctct

SEQ ID NO: 30719 - DNA, 50 bp, unidentified
  source 1..50: mol_type = unassigned DNA; note = donor_052bc59
  misc_feature 1..23: note = RE
  misc_feature 24..25: note = Core
  misc_feature 26..50: note = LE
tgcaaaccggagtgggtccatatataatggtatggacccactccacctta

SEQ ID NO: 30720 - DNA, 50 bp, unidentified
  source 1..50: mol_type = unassigned DNA; note = donor_052c4e3
  misc_feature 1..23: note = RE
  misc_feature 24..25: note = Core
  misc_feature 26..50: note = LE
tgacatttaagctcctgggatgtctaatgagtcttagggagcgcgccgtc

SEQ ID NO: 30721 - DNA, 50 bp, unidentified
  source 1..50: mol_type = unassigned DNA; note = donor_05308da
  misc_feature 1..24: note = RE
  misc_feature 25: note = Core
  misc_feature 26..50: note = LE
tgcacggacggcgcggaccatacataatgggatggtccgccccgtcctcc

SEQ ID NO: 30722 - DNA, 50 bp, unidentified
  source 1..50: mol_type = unassigned DNA; note = donor_053725d
  misc_feature 1..23: note = RE
  misc_feature 24..25: note = Core
  misc_feature 26..50: note = LE
cagcggcttgacacacagaggcgctgacttgtctaatcggtgcaggcgct

SEQ ID NO: 30723 - DNA, 50 bp, unidentified
  source 1..50: mol_type = unassigned DNA; note = donor_05385b4
  misc_feature 1..23: note = RE
  misc_feature 24..25: note = Core
  misc_feature 26..50: note = LE
aagtattgactttgcttagcaggttggtacgttataagtgcagtaaataa

SEQ ID NO: 30724 - DNA, 50 bp, unidentified
  source 1..50: mol_type = unassigned DNA; note = donor_0539635
  misc_feature 1..23: note = RE
  misc_feature 24..25: note = Core
  misc_feature 26..50: note = LE
gcgccgaagcgggcgtccacacatgatggggtggacgccccccaacggca

SEQ ID NO: 30725 - DNA, 50 bp, unidentified; identical to SEQ ID NO: 30686
  source 1..50: mol_type = unassigned DNA; note = donor_0540497
  misc_feature 1..22: note = RE
  misc_feature 23..25: note = Core
  misc_feature 26..50: note = LE

SEQ ID NO: 30726 - DNA, 50 bp, unidentified
  source 1..50: mol_type = unassigned DNA; note = donor_054c5ea
  misc_feature 1..21: note = RE
  misc_feature 22..25: note = Core
  misc_feature 26..50: note = LE
tgtggctttcctctactttctttcataaaaatctccattccgccgccaag

SEQ ID NO: 30727 - DNA, 50 bp, unidentified
  source 1..50: mol_type = unassigned DNA; note = donor_054f327
  misc_feature 1..23: note = RE
  misc_feature 24..25: note = Core
  misc_feature 26..50: note = LE
atgcttaaaaatagagatggtatcttgtatctctaagtagtaaatgacta

SEQ ID NO: 30728 - DNA, 50 bp, unidentified
  source 1..50: mol_type = unassigned DNA; note = donor_055a497
  misc_feature 1..22: note = RE
  misc_feature 23..25: note = Core
  misc_feature 26..50: note = LE
tactaaatttttattatagttcgttgtataattaaaatattttttgtatc

SEQ ID NO: 30729 - DNA, 50 bp, unidentified
  source 1..50: mol_type = unassigned DNA; note = donor_056c365
  misc_feature 1..21: note = RE
  misc_feature 22..25: note = Core
  misc_feature 26..50: note = LE
cctgaggttgacacagggagtgtcactagggcaccatccttattgcgggt

SEQ ID NO: 30730 - DNA, 50 bp, unidentified
  source 1..50: mol_type = unassigned DNA; note = donor_056e2db
  misc_feature 1..23: note = RE
  misc_feature 24..25: note = Core
  misc_feature 26..50: note = LE
tgacacctaagcccctgggatgtctaatgagtgttagcgggtccgctgtt

SEQ ID NO: 30731 - DNA, 50 bp, unidentified
  source 1..50: mol_type = unassigned DNA; note = donor_056e914
  misc_feature 1..24: note = RE
  misc_feature 25: note = Core
  misc_feature 26..50: note = LE
ggctcttgacatacataggagcatcagtgaggatggtgtgggccgtcgtg

SEQ ID NO: 30732 - DNA, 50 bp, unidentified
  source 1..50: mol_type = unassigned DNA; note = donor_0570fec
  misc_feature 1..23: note = RE
  misc_feature 24..25: note = Core
  misc_feature 26..50: note = LE
tatacttgacttttgttagcaggttagtaccataaatagtgtaagaaagg

SEQ ID NO: 30733 - DNA, 50 bp, unidentified
  source 1..50: mol_type = unassigned DNA; note = donor_0573458
  misc_feature 1..23: note = RE
  misc_feature 24..25: note = Core
  misc_feature 26..50: note = LE
ccacttgacattttatagctggtcttgtatattgtttatgtaatcaggta

SEQ ID NO: 30734 - DNA, 50 bp, unidentified
  source 1..50: mol_type = unassigned DNA; note = donor_0574cd6
  misc_feature 1..23: note = RE
  misc_feature 24..25: note = Core
  misc_feature 26..50: note = LE
gggcttgacttttaatagttagtcttgtattatagagtagtagtgtttat

SEQ ID NO: 30735 - DNA, 50 bp, unidentified
  source 1..50: mol_type = unassigned DNA; note = donor_0580567
  misc_feature 1..24: note = RE
  misc_feature 25: note = Core
  misc_feature 26..50: note = LE
ttgcaacgcggggcggaccatatataatgggatggtccgccccgcacctt

SEQ ID NO: 30736 - DNA, 50 bp, unidentified
  source 1..50: mol_type = unassigned DNA; note = donor_058f057
  misc_feature 1..24: note = RE
  misc_feature 25: note = Core
  misc_feature 26..50: note = LE
ttgcaatcggggatggctcatatataatgtaatgagccatccccacccct

SEQ ID NO: 30737 - DNA, 50 bp, unidentified
  source 1..50: mol_type = unassigned DNA; note = donor_05956ee
  misc_feature 1..23: note = RE
  misc_feature 24..25: note = Core
  misc_feature 26..50: note = LE
tgacaaacaaaacccagggatgtctaatgggttgtgttcgggtctggttt

SEQ ID NO: 30738 - DNA, 50 bp, unidentified
  source 1..50: mol_type = unassigned DNA; note = donor_059f257
  misc_feature 1..23: note = RE
  misc_feature 24..25: note = Core
  misc_feature 26..50: note = LE
gacaagttacaaccctggggtgtctaatggggatcgaccagttgatctga

SEQ ID NO: 30739 - DNA, 50 bp, unidentified
  source 1..50: mol_type = unassigned DNA; note = donor_05aa055
  misc_feature 1..23: note = RE
  misc_feature 24..25: note = Core
  misc_feature 26..50: note = LE
ccacttgacattaaagacagttgcttgtatattcaatttaacgtgtgtct

SEQ ID NO: 30740 - DNA, 50 bp, unidentified
  source 1..50: mol_type = unassigned DNA; note = donor_05ae041
  misc_feature 1..23: note = RE
  misc_feature 24..25: note = Core
  misc_feature 26..50: note = LE
aggctgattaggagagatggtatcttgtatctcttcttgatgggtgttta

SEQ ID NO: 30741 - DNA, 50 bp, unidentified
  source 1..50: mol_type = unassigned DNA; note = donor_05b4329
  misc_feature 1..23: note = RE
  misc_feature 24..25: note = Core
  misc_feature 26..50: note = LE
gttgacaagagggagtccacataagataattggactccctcacacccaaa

SEQ ID NO: 30742 - DNA, 50 bp, unidentified
  source 1..50: mol_type = unassigned DNA; note = donor_05bdaec
  misc_feature 1..23: note = RE
  misc_feature 24..25: note = Core
  misc_feature 26..50: note = LE
ggggttgacttctaatagttaatcttgtataatagagtagtagtttatta

SEQ ID NO: 30743 - DNA, 50 bp, unidentified
  source 1..50: mol_type = unassigned DNA; note = donor_05bdcc1
  misc_feature 1..24: note = RE
  misc_feature 25: note = Core
  misc_feature 26..50: note = LE
tgcagttcggcggcggaccatacataatgagatggtccgccgccgagtag

SEQ ID NO: 30744 - DNA, 50 bp, unidentified
  source 1..50: mol_type = unassigned DNA; note = donor_05bf0cc
  misc_feature 1..23: note = RE
  misc_feature 24..25: note = Core
  misc_feature 26..50: note = LE
gggcttgacttttaatagttagtcttgtattatagagtagtagtttttag

SEQ ID NO: 30745 - DNA, 50 bp, unidentified
  source 1..50: mol_type = unassigned DNA; note = donor_05c2ae9
  misc_feature 1..24: note = RE
  misc_feature 25: note = Core
  misc_feature 26..50: note = LE
ttacttgttttttaacacagttcttcttaagttagccttatcaaatataa

SEQ ID NO: 30746 - DNA, 50 bp, unidentified
  source 1..50: mol_type = unassigned DNA; note = donor_05ddd62
  misc_feature 1..22: note = RE
  misc_feature 23..25: note = Core
  misc_feature 26..50: note = LE
gaccccgagcacgcgattagacaacatggagtaatcgcggacggtttccc

SEQ ID NO: 30747 - DNA, 50 bp, unidentified
  source 1..50: mol_type = unassigned DNA; note = donor_05e98d4
  misc_feature 1..23: note = RE
  misc_feature 24..25: note = Core
  misc_feature 26..50: note = LE
attgtttgttttagtcttagaattcctttagattcacaaaatgaaaagat

SEQ ID NO: 30748 - DNA, 50 bp, unidentified
  source 1..50: mol_type = unassigned DNA; note = donor_05ecb7e
  misc_feature 1..21: note = RE
  misc_feature 22..25: note = Core
  misc_feature 26..50: note = LE
gacttgactttttatagttggtcacgtataatgaaaccatctcgaaaggg

SEQ ID NO: 30749 - DNA, 50 bp, unidentified
  source 1..50: mol_type = unassigned DNA; note = donor_05ed742
  misc_feature 1..23: note = RE
  misc_feature 24..25: note = Core
  misc_feature 26..50: note = LE
gcttgacaagggtcatagaaagtcttatattgggtttgttgcatggaagt

SEQ ID NO: 30750 - DNA, 50 bp, unidentified
  source 1..50: mol_type = unassigned DNA; note = donor_05ee89a
  misc_feature 1..22: note = RE
  misc_feature 23..25: note = Core
  misc_feature 26..50: note = LE
ggcttgacatcttcattgagagtccttaagttcgtaggtgcagttacttc

SEQ ID NO: 30751 - DNA, 50 bp, unidentified
  source 1..50: mol_type = unassigned DNA; note = donor_05fd7d2
  misc_feature 1..22: note = RE
  misc_feature 23..25: note = Core
  misc_feature 26..50: note = LE
gccacacttgaccaagacggatacttgtcttatgaaatccgggtcgctgt

SEQ ID NO: 30752 - DNA, 50 bp, unidentified
  source 1..50: mol_type = unassigned DNA; note = donor_06111a6
  misc_feature 1..23: note = RE
  misc_feature 24..25: note = Core
  misc_feature 26..50: note = LE
gtccttgactttgcttaactggtctggtacaataacctcgtaaacggcgg

SEQ ID NO: 30753 - DNA, 50 bp, unidentified
  source 1..50: mol_type = unassigned DNA; note = donor_061b5ed
  misc_feature 1..24: note = RE
  misc_feature 25: note = Core
  misc_feature 26..50: note = LE
ccggccttgacaacatagaagcgtctgtgtagcttcgtcgcgctaggccg

SEQ ID NO: 30754 - DNA, 50 bp, unidentified
  source 1..50: mol_type = unassigned DNA; note = donor_0620c2e
  misc_feature 1..23: note = RE
  misc_feature 24..25: note = Core
  misc_feature 26..50: note = LE
ggcagaccctgacaagacagttgcttatctcttgccgatctggcacttta

SEQ ID NO: 30755 - DNA, 50 bp, unidentified
  source 1..50: mol_type = unassigned DNA; note = donor_0623a79
  misc_feature 1..24: note = RE
  misc_feature 25: note = Core
  misc_feature 26..50: note = LE
cccttgacatttcttagctggacttagtataataatggtgtagtcaacaa

SEQ ID NO: 30756 - DNA, 50 bp, unidentified
  source 1..50: mol_type = unassigned DNA; note = donor_06303cf
  misc_feature 1..23: note = RE
  misc_feature 24..25: note = Core
  misc_feature 26..50: note = LE
gcgccgaagggggcgtccacagatgatggagtggacgccccctacggcat

SEQ ID NO: 30757 - DNA, 50 bp, unidentified
  source 1..50: mol_type = unassigned DNA; note = donor_0631794
  misc_feature 1..23: note = RE
  misc_feature 24..25: note = Core
  misc_feature 26..50: note = LE
ttgacagacgtccactacatatcagacggtatgtagtgaccgctccggcg

SEQ ID NO: 30758 - DNA, 50 bp, unidentified
  source 1..50: mol_type = unassigned DNA; note = donor_064629c
  misc_feature 1..20: note = RE
  misc_feature 21..25: note = Core
  misc_feature 26..50: note = LE
tttggaatttaaaacagtaccttttatttttactgagaattttaaaaagg

SEQ ID NO: 30759 - DNA, 50 bp, unidentified
  source 1..50: mol_type = unassigned DNA; note = donor_0658f5c
  misc_feature 1..23: note = RE
  misc_feature 24..25: note = Core
  misc_feature 26..50: note = LE
gccaacggagagccgtccacacatgatgctatggacggctcccacccagc

SEQ ID NO: 30760 - DNA, 50 bp, unidentified
  source 1..50: mol_type = unassigned DNA; note = donor_065a83e
  misc_feature 1..22: note = RE
  misc_feature 23..25: note = Core
  misc_feature 26..50: note = LE
tttggctcttgacatagagggtcttatatgttactatttttacaagccct

SEQ ID NO: 30761 - DNA, 50 bp, unidentified
  source 1..50: mol_type = unassigned DNA; note = donor_065de92
  misc_feature 1..24: note = RE
  misc_feature 25: note = Core
  misc_feature 26..50: note = LE
tgcaaaacggaggtagtccatagataatgggatggactacctcctccctc

SEQ ID NO: 30762 - DNA, 50 bp, unidentified
  source 1..50: mol_type = unassigned DNA; note = donor_0660fbf
  misc_feature 1..23: note = RE
  misc_feature 24..25: note = Core
  misc_feature 26..50: note = LE
tgacattcaagctcctgggatgtctaatgagttctgggagccagccatcc

SEQ ID NO: 30763 - DNA, 50 bp, unidentified
  source 1..50: mol_type = unassigned DNA; note = donor_067a758
  misc_feature 1..23: note = RE
  misc_feature 24..25: note = Core
  misc_feature 26..50: note = LE
acgcttgacgaacaagacggttgcttgtatcttctgggctcggaccggcc

SEQ ID NO: 30764 - DNA, 50 bp, unidentified
  source 1..50: mol_type = unassigned DNA; note = donor_0682c12
  misc_feature 1..23: note = RE
  misc_feature 24..25: note = Core
  misc_feature 26..50: note = LE
gcctggagcggggcgtccacagatgatggggtggacgccccccgacggca

SEQ ID NO: 30765 - DNA, 50 bp, unidentified
  source 1..50: mol_type = unassigned DNA; note = donor_068972b
  misc_feature 1..23: note = RE
  misc_feature 24..25: note = Core
  misc_feature 26..50: note = LE
gacaagttagggacaaggggtgtctaatgggactggatggcgatcagttt

SEQ ID NO: 30766 - DNA, 50 bp, unidentified
  source 1..50: mol_type = unassigned DNA; note = donor_068e009
  misc_feature 1..23: note = RE
  misc_feature 24..25: note = Core
  misc_feature 26..50: note = LE
cttgactttctttaatagttagtctactattagtattgtcatagtcattc

SEQ ID NO: 30767 - DNA, 50 bp, unidentified
  source 1..50: mol_type = unassigned DNA; note = donor_06922c1
  misc_feature 1..22: note = RE
  misc_feature 23..25: note = Core
  misc_feature 26..50: note = LE
caatgcaagagccatccacacaggatgaggtggatggctcctgctccccc

SEQ ID NO: 30768 - DNA, 50 bp, unidentified
  source 1..50: mol_type = unassigned DNA; note = donor_06930e7
  misc_feature 1..24: note = RE
  misc_feature 25: note = Core
  misc_feature 26..50: note = LE
ttgcaataaggcggggtccatatacaatggtatggaccccgccgccttca

SEQ ID NO: 30769 - DNA, 50 bp, unidentified
  source 1..50: mol_type = unassigned DNA; note = donor_0694b8f
  misc_feature 1..23: note = RE
  misc_feature 24..25: note = Core
  misc_feature 26..50: note = LE
gactcatcgaggcccgttacagaagatggtgtaacgggccaccaagccgc

SEQ ID NO: 30770 - DNA, 50 bp, unidentified
  source 1..50: mol_type = unassigned DNA; note = donor_06a7c76
  misc_feature 1..24: note = RE
  misc_feature 25: note = Core
  misc_feature 26..50: note = LE
tgctagactggaggagtccatatactatgtatggactcctccaacctaat

SEQ ID NO: 30771 - DNA, 50 bp, unidentified; identical to SEQ ID NO: 30443
  source 1..50: mol_type = unassigned DNA; note = donor_06be574
  misc_feature 1..23: note = RE
  misc_feature 24..25: note = Core
  misc_feature 26..50: note = LE

SEQ ID NO: 30772 - DNA, 50 bp, unidentified
  source 1..50: mol_type = unassigned DNA; note = donor_06c35ee
  misc_feature 1..23: note = RE
  misc_feature 24..25: note = Core
  misc_feature 26..50: note = LE
aatccgcttgatcaaaacggatacttgtcttatgatttctgtgcttcttg

SEQ ID NO: 30773 - DNA, 50 bp, unidentified
  source 1..50: mol_type = unassigned DNA; note = donor_06cd010
  misc_feature 1..24: note = RE
  misc_feature 25: note = Core
  misc_feature 26..50: note = LE
ccgcgtcttgacacagaggggagcctacttgtttcatgaccgcaggatcg

SEQ ID NO: 30774 - DNA, 50 bp, unidentified
  source 1..50: mol_type = unassigned DNA; note = donor_06d0c65
  misc_feature 1..23: note = RE
  misc_feature 24..25: note = Core
  misc_feature 26..50: note = LE
gcccttgacaatgaagacagttgcttgtatcttgaatcccgagtctaaac

SEQ ID NO: 30775 - DNA, 50 bp, unidentified
  source 1..50: mol_type = unassigned DNA; note = donor_06d6eff
  misc_feature 1..23: note = RE
  misc_feature 24..25: note = Core
  misc_feature 26..50: note = LE
gacgaaggggcgccgtccagacatgatggggtggacggcgccccgaacgg

SEQ ID NO: 30776 - DNA, 50 bp, unidentified
  source 1..50: mol_type = unassigned DNA; note = donor_06dfae3
  misc_feature 1..24: note = RE
  misc_feature 25: note = Core
  misc_feature 26..50: note = LE
tgcaaatagggaggagtccatatacaatgggatggactcctccccgctga

SEQ ID NO: 30777 - DNA, 50 bp, unidentified
  source 1..50: mol_type = unassigned DNA; note = donor_06e175c
  misc_feature 1..21: note = RE
  misc_feature 22..25: note = Core
  misc_feature 26..50: note = LE
gcttgacttttatttgcaagactcctacaatataaattaaggtaatggac

SEQ ID NO: 30778 - DNA, 50 bp, unidentified
  source 1..50: mol_type = unassigned DNA; note = donor_06e6c51
  misc_feature 1..24: note = RE
  misc_feature 25: note = Core
  misc_feature 26..50: note = LE
ttgcaagtcgggggccgtccacatatgttggagtggacggcccctgaacg

SEQ ID NO: 30779 - DNA, 50 bp, unidentified
  source 1..50: mol_type = unassigned DNA; note = donor_06ed074
  misc_feature 1..24: note = RE
  misc_feature 25: note = Core
  misc_feature 26..50: note = LE
ttcgcttgcgtaatccataagaataccttagatttgcagcatcaaaatat

SEQ ID NO: 30780 - DNA, 50 bp, unidentified
  source 1..50: mol_type = unassigned DNA; note = donor_06eecc8
  misc_feature 1..23: note = RE
  misc_feature 24..25: note = Core
  misc_feature 26..50: note = LE
tcgcttgacttttaatagctggtctggtaaaatatagttgaattgcaaca

SEQ ID NO: 30781 - DNA, 50 bp, unidentified
  source 1..50: mol_type = unassigned DNA; note = donor_06f1d0b
  misc_feature 1..23: note = RE
  misc_feature 24..25: note = Core
  misc_feature 26..50: note = LE
tgcaaaccgggccgttccacatatgatggtgtggaacggcccttcgaagc

SEQ ID NO: 30782 - DNA, 50 bp, unidentified
  source 1..50: mol_type = unassigned DNA; note = donor_06fd218
  misc_feature 1..24: note = RE
  misc_feature 25: note = Core
  misc_feature 26..50: note = LE
ctcgcttgacgaaagacatagaggcgttatgttttccgcggtcctgcaag

SEQ ID NO: 30783 - DNA, 50 bp, unidentified
  source 1..50: mol_type = unassigned DNA; note = donor_06fe798
  misc_feature 1..22: note = RE
  misc_feature 23..25: note = Core
  misc_feature 26..50: note = LE
ccaggcgggggccatccacacatgatggggtggatggcccccttgcggca

SEQ ID NO: 30784 - DNA, 50 bp, unidentified
  source 1..50: mol_type = unassigned DNA; note = donor_070a447
  misc_feature 1..23: note = RE
  misc_feature 24..25: note = Core
  misc_feature 26..50: note = LE
actattgactttatatttgcaggctactacaataagtttatgggttatat

SEQ ID NO: 30785 - DNA, 50 bp, unidentified
  source 1..50: mol_type = unassigned DNA; note = donor_071aa7f
  misc_feature 1..22: note = RE
  misc_feature 23..25: note = Core
  misc_feature 26..50: note = LE
aaatttggatttatcttagaatgctattagattagcatcattaaataaat

SEQ ID NO: 30786 - DNA, 50 bp, unidentified
  source 1..50: mol_type = unassigned DNA; note = donor_071d561
  misc_feature 1..23: note = RE
  misc_feature 24..25: note = Core
  misc_feature 26..50: note = LE
ctgcttgactttttatttgcagactactacaatatatttatggtaaatat

SEQ ID NO: 30787 - DNA, 50 bp, unidentified
  source 1..50: mol_type = unassigned DNA; note = donor_071ee78
  misc_feature 1..23: note = RE
  misc_feature 24..25: note = Core
  misc_feature 26..50: note = LE
gcttgaaatttccagcgggatgatctaccatcggaaattgcaggttacag

SEQ ID NO: 30788 - DNA, 50 bp, unidentified
  source 1..50: mol_type = unassigned DNA; note = donor_0728a46
  misc_feature 1..21: note = RE
  misc_feature 22..25: note = Core
  misc_feature 26..50: note = LE
acttgtttttatcatagaatacgggagcctttagattagcaaatagaaat

SEQ ID NO: 30789 - DNA, 50 bp, unidentified
  source 1..50: mol_type = unassigned DNA; note = donor_07342b9
  misc_feature 1..23: note = RE
  misc_feature 24..25: note = Core
  misc_feature 26..50: note = LE
gacaaccaccgaccgtgggatgtctaatggggtcgtgatcaagcgttggc

SEQ ID NO: 30790 - DNA, 50 bp, unidentified
  source 1..50: mol_type = unassigned DNA; note = donor_0736085
  misc_feature 1..24: note = RE
  misc_feature 25: note = Core
  misc_feature 26..50: note = LE
agctactcgatgaacgtgggcaaccagtgaggatggtggtgggggtccgg

SEQ ID NO: 30791 - DNA, 50 bp, unidentified
  source 1..50: mol_type = unassigned DNA; note = donor_074ac57
  misc_feature 1..23: note = RE
  misc_feature 24..25: note = Core
  misc_feature 26..50: note = LE
gcaaggagggggccgtccacatatgatggggtggacggcccccgacggca

SEQ ID NO: 30792 - DNA, 50 bp, unidentified
  source 1..50: mol_type = unassigned DNA; note = donor_0751509
  misc_feature 1..23: note = RE
  misc_feature 24..25: note = Core
  misc_feature 26..50: note = LE
acacttgatttttatatagttagctggtataatgtaaaaaagactcatct

SEQ ID NO: 30793 - DNA, 50 bp, unidentified
  source 1..50: mol_type = unassigned DNA; note = donor_0751734
  misc_feature 1..23: note = RE
  misc_feature 24..25: note = Core
  misc_feature 26..50: note = LE
tgcggaccgggcgggccatacgtttatggtatggcccgcccctcgcttcc

SEQ ID NO: 30794 - DNA, 50 bp, unidentified
  source 1..50: mol_type = unassigned DNA; note = donor_075227a
  misc_feature 1..22: note = RE
  misc_feature 23..25: note = Core
  misc_feature 26..50: note = LE
ggcttgacacgatcattcagattccctaaggttgatgttgttcggggttg

SEQ ID NO: 30795 - DNA, 50 bp, unidentified
  source 1..50: mol_type = unassigned DNA; note = donor_07597ef
  misc_feature 1..23: note = RE
  misc_feature 24..25: note = Core
  misc_feature 26..50: note = LE
ggcttgacagaccgcattaggaatccctacattgttctgcgggaggcggt

SEQ ID NO: 30796 - DNA, 50 bp, unidentified
  source 1..50: mol_type = unassigned DNA; note = donor_0761e79
  misc_feature 1..24: note = RE
  misc_feature 25: note = Core
  misc_feature 26..50: note = LE
gcactccttgacacagaggggtgcctactaggaaacttcccgcaggatcg

SEQ ID NO: 30797 - DNA, 50 bp, unidentified
  source 1..50: mol_type = unassigned DNA; note = donor_076d454
  misc_feature 1..24: note = RE
  misc_feature 25: note = Core
  misc_feature 26..50: note = LE
gccgcttgacgaagaacataggggcgttacctttttcgtagccccttctt

SEQ ID NO: 30798 - DNA, 50 bp, unidentified
  source 1..50: mol_type = unassigned DNA; note = donor_07700a6
  misc_feature 1..23: note = RE
  misc_feature 24..25: note = Core
  misc_feature 26..50: note = LE
tcacgtgaccgagctgacggtatcttgtatgttgagtcctcgctcgctac

SEQ ID NO: 30799 - DNA, 50 bp, unidentified
  source 1..50: mol_type = unassigned DNA; note = donor_0774db6
  misc_feature 1..22: note = RE
  misc_feature 23..25: note = Core
  misc_feature 26..50: note = LE
catcatgggcggcaaccacagaagatggggtggttgccgccctccccaga

SEQ ID NO: 30800 - DNA, 50 bp, unidentified
  source 1..50: mol_type = unassigned DNA; note = donor_0784884
  misc_feature 1..23: note = RE
  misc_feature 24..25: note = Core
  misc_feature 26..50: note = LE
tttcttgacatcacaccgctggactcgtataatatctttcagatacataa

SEQ ID NO: 30801 - DNA, 50 bp, unidentified; identical to SEQ ID NO: 30451
  source 1..50: mol_type = unassigned DNA; note = donor_078c958
  misc_feature 1..23: note = RE
  misc_feature 24..25: note = Core
  misc_feature 26..50: note = LE

SEQ ID NO: 30802 - DNA, 50 bp, unidentified
  source 1..50: mol_type = unassigned DNA; note = donor_078f1f0
  misc_feature 1..21: note = RE
  misc_feature 22..25: note = Core
  misc_feature 26..50: note = LE
gcctgtggggccgttccacatatgatggtgtggaacggccccgctacgac

SEQ ID NO: 30803 - DNA, 50 bp, unidentified
  source 1..50: mol_type = unassigned DNA; note = donor_079c3f5
  misc_feature 1..21: note = RE
  misc_feature 22..25: note = Core
  misc_feature 26..50: note = LE
ccaaccgggggccgtccatacatgatgaggtggacggccccctcgcggca

SEQ ID NO: 30804 - DNA, 50 bp, unidentified
  source 1..50: mol_type = unassigned DNA; note = donor_079caac
  misc_feature 1..24: note = RE
  misc_feature 25: note = Core
  misc_feature 26..50: note = LE
tgcaacgcacggccggaccatacataatgggatggtccggccgtgctcct

SEQ ID NO: 30805 - DNA, 50 bp, unidentified
  source 1..50: mol_type = unassigned DNA; note = donor_07ab388
  misc_feature 1..22: note = RE
  misc_feature 23..25: note = Core
  misc_feature 26..50: note = LE
ttacttgacttattaatagttatcttgtatactctatttatgattatagt

SEQ ID NO: 30806 - DNA, 50 bp, unidentified
  source 1..50: mol_type = unassigned DNA; note = donor_07b50a9
  misc_feature 1..23: note = RE
  misc_feature 24..25: note = Core
  misc_feature 26..50: note = LE
gcgagccggaggccgtccacatatgttggggtggacggcccccgacggca

SEQ ID NO: 30807 - DNA, 50 bp, unidentified
  source 1..50: mol_type = unassigned DNA; note = donor_07b6051
  misc_feature 1..23: note = RE
  misc_feature 24..25: note = Core
  misc_feature 26..50: note = LE
caaaaatcgggctgatcatagatttaataggatggtcagcccgatcctca

SEQ ID NO: 30808 - DNA, 50 bp, unidentified
  source 1..50: mol_type = unassigned DNA; note = donor_07c1001
  misc_feature 1..24: note = RE
  misc_feature 25: note = Core
  misc_feature 26..50: note = LE
caccggttgacaacaaaggggagcctactagagacttccttgcaggatcg

SEQ ID NO: 30809 - DNA, 50 bp, unidentified
  source 1..50: mol_type = unassigned DNA; note = donor_07c80b5
  misc_feature 1..23: note = RE
  misc_feature 24..25: note = Core
  misc_feature 26..50: note = LE
cggcttgacaacttcattgagaatccttacctttcttgcagggtgttcgt

SEQ ID NO: 30810 - DNA, 50 bp, unidentified
  source 1..50: mol_type = unassigned DNA; note = donor_07cad29
  misc_feature 1..23: note = RE
  misc_feature 24..25: note = Core
  misc_feature 26..50: note = LE
gacacccaaacgacatggggtgtctaatgggagctgcggggtcgtagaga

SEQ ID NO: 30811 - DNA, 50 bp, unidentified
  source 1..50: mol_type = unassigned DNA; note = donor_07ce804
  misc_feature 1..23: note = RE
  misc_feature 24..25: note = Core
  misc_feature 26..50: note = LE
aagcttgacttttcatagctggtcttgtatgataattaggaagttaatta

SEQ ID NO: 30812 - DNA, 50 bp, unidentified
  source 1..50: mol_type = unassigned DNA; note = donor_07cfdc0
  misc_feature 1..23: note = RE
  misc_feature 24..25: note = Core
  misc_feature 26..50: note = LE
gcgcaaaggggggcgttcatgtagaatgatatgaacgccccccacccaac

SEQ ID NO: 30813 - DNA, 50 bp, unidentified
  source 1..50: mol_type = unassigned DNA; note = donor_07d54be
  misc_feature 1..23: note = RE
  misc_feature 24..25: note = Core
  misc_feature 26..50: note = LE
ccgcttgacttccagattgggaagctctaccttccttcctgggttagccc

SEQ ID NO: 30814 - DNA, 50 bp, unidentified
  source 1..50: mol_type = unassigned DNA; note = donor_07d6bb9
  misc_feature 1..23: note = RE
  misc_feature 24..25: note = Core
  misc_feature 26..50: note = LE
gactaacgggatgcgattagacaacatggggtaatcgcggcgcgatcgtc

SEQ ID NO: 30815 - DNA, 50 bp, unidentified
  source 1..50: mol_type = unassigned DNA; note = donor_07e1b80
  misc_feature 1..22: note = RE
  misc_feature 23..25: note = Core
  misc_feature 26..50: note = LE
ggcttgacttcttcattgagagtccttaagttcgtagttgcagttacttc

SEQ ID NO: 30816 - DNA, 50 bp, unidentified
  source 1..50: mol_type = unassigned DNA; note = donor_07e2945
  misc_feature 1..23: note = RE
  misc_feature 24..25: note = Core
  misc_feature 26..50: note = LE
ttccttgacttttttttgcaggtctgatacaatatatttgaccgagaaag

SEQ ID NO: 30817 - DNA, 50 bp, unidentified
  source 1..50: mol_type = unassigned DNA; note = donor_07e5bc8
  misc_feature 1..23: note = RE
  misc_feature 24..25: note = Core
  misc_feature 26..50: note = LE
caaattgaatttcaagagagaatcttgtatcttgtttgcatctgcccgat

SEQ ID NO: 30818 - DNA, 50 bp, unidentified
  source 1..50: mol_type = unassigned DNA; note = donor_07f27bd
  misc_feature 1..24: note = RE
  misc_feature 25: note = Core
  misc_feature 26..50: note = LE
gcaacgcacggccggtccatagattaatggcatggaccggccgtgctccc

SEQ ID NO: 30819 - DNA, 50 bp, unidentified
  source 1..50: mol_type = unassigned DNA; note = donor_07f6110
  misc_feature 1..24: note = RE
  misc_feature 25: note = Core
  misc_feature 26..50: note = LE
ggacttgacaggacatagaagcatctgtaagtctttgggtggctggcctg

SEQ ID NO: 30820 - DNA, 50 bp, unidentified
  source 1..50: mol_type = unassigned DNA; note = donor_07f8cfc
  misc_feature 1..23: note = RE
  misc_feature 24..25: note = Core
  misc_feature 26..50: note = LE
gccaacctggagccgtccacacatgatgctgtggacggctcctccaccgg

SEQ ID NO: 30821 - DNA, 50 bp, unidentified
  source 1..50: mol_type = unassigned DNA; note = donor_07fcbfc
  misc_feature 1..23: note = RE
  misc_feature 24..25: note = Core
  misc_feature 26..50: note = LE
gggcttgacaatttctatggcttctcatatactaattggtgtcgagtaga

SEQ ID NO: 30822 - DNA, 50 bp, unidentified
  source 1..50: mol_type = unassigned DNA; note = donor_07fde3d
  misc_feature 1..24: note = RE
  misc_feature 25: note = Core
  misc_feature 26..50: note = LE
atcacttgactttttattagcaggcctcctaatatataagtgtagggttt

SEQ ID NO: 30823 - DNA, 50 bp, unidentified
  source 1..50: mol_type = unassigned DNA; note = donor_07ff35b
  misc_feature 1..23: note = RE
  misc_feature 24..25: note = Core
  misc_feature 26..50: note = LE
gccatccctgaaggatacagttgcttctgtatctcggatctggtagcgtg

SEQ ID NO: 30824 - DNA, 50 bp, unidentified
  source 1..50: mol_type = unassigned DNA; note = donor_0800b9c
  misc_feature 1..24: note = RE
  misc_feature 25: note = Core
  misc_feature 26..50: note = LE
tgcagtcgcgcggcggaccatacataatgagatggtccgccgcttgcact

SEQ ID NO: 30825 - DNA, 50 bp, unidentified
  source 1..50: mol_type = unassigned DNA; note = donor_0805652
  misc_feature 1..23: note = RE
  misc_feature 24..25: note = Core
  misc_feature 26..50: note = LE
tagcttgactttttatttgcaggctactacaatatatttatggttaatac

SEQ ID NO: 30826 - DNA, 50 bp, unidentified; identical to SEQ ID NO: 30631
  source 1..50: mol_type = unassigned DNA; note = donor_0809f65
  misc_feature 1..23: note = RE
  misc_feature 24..25: note = Core
  misc_feature 26..50: note = LE

SEQ ID NO: 30827 - DNA, 50 bp, unidentified
  source 1..50: mol_type = unassigned DNA; note = donor_080ba4b
  misc_feature 1..23: note = RE
  misc_feature 24..25: note = Core
  misc_feature 26..50: note = LE
ccacttgacggacgtcacggtatcttgtatgttgtccactcatcggcgga

SEQ ID NO: 30828 - DNA, 50 bp, unidentified
  source 1..50: mol_type = unassigned DNA; note = donor_0811741
  misc_feature 1..23: note = RE
  misc_feature 24..25: note = Core
  misc_feature 26..50: note = LE
gggcttgacatttatttgcaggactcctacaatatagttacggtgaaagg

SEQ ID NO: 30829 - DNA, 50 bp, unidentified
  source 1..50: mol_type = unassigned DNA; note = donor_0817244
  misc_feature 1..24: note = RE
  misc_feature 25: note = Core
  misc_feature 26..50: note = LE
ggcaaaacgggaggagtccatatacaatgaaatggactcctccctcctac

SEQ ID NO: 30830 - DNA, 50 bp, unidentified
  source 1..50: mol_type = unassigned DNA; note = donor_0817348
  misc_feature 1..23: note = RE
  misc_feature 24..25: note = Core
  misc_feature 26..50: note = LE
gcaccaggggggccgtccacacatgatggggtggacggccccagctgcgg

SEQ ID NO: 30831 - DNA, 50 bp, unidentified
  source 1..50: mol_type = unassigned DNA; note = donor_0819ffe
  misc_feature 1..24: note = RE
  misc_feature 25: note = Core
  misc_feature 26..50: note = LE
tgcacatcgggaggcgtccatataatggtatggacgcctcccacttcgaa

SEQ ID NO: 30832 - DNA, 50 bp, unidentified
  source 1..50: mol_type = unassigned DNA; note = donor_081cf84
  misc_feature 1..23: note = RE
  misc_feature 24..25: note = Core
  misc_feature 26..50: note = LE
gcagggcggggggcgtccatagatgatgggatggacgccccccggatctg

SEQ ID NO: 30833 - DNA, 50 bp, unidentified
  source 1..50: mol_type = unassigned DNA; note = donor_0833d73
  misc_feature 1..23: note = RE
  misc_feature 24..25: note = Core
  misc_feature 26..50: note = LE
caaaaacgggggtgaccatagatttaatgagatggtcacccccaccctac

SEQ ID NO: 30834 - DNA, 50 bp, unidentified
  source 1..50: mol_type = unassigned DNA; note = donor_0835f97
  misc_feature 1..23: note = RE
  misc_feature 24..25: note = Core
  misc_feature 26..50: note = LE
caatgcaggagccatccacacaggatgaggtggatggctcctgctccacc

SEQ ID NO: 30835 - DNA, 50 bp, unidentified
  source 1..50: mol_type = unassigned DNA; note = donor_0839a2d
  misc_feature 1..22: note = RE
  misc_feature 23..25: note = Core
  misc_feature 26..50: note = LE
atggttgacaaacattagcaagattcgtaatatataagtgagggttttaa

SEQ ID NO: 30836 - DNA, 50 bp, unidentified
  source 1..50: mol_type = unassigned DNA; note = donor_0843fd6
  misc_feature 1..24: note = RE
  misc_feature 25: note = Core
  misc_feature 26..50: note = LE
tgcaacgcaggggccgtccacacatgatggggtggacggcccctgctcac

SEQ ID NO: 30837 - DNA, 50 bp, unidentified
  source 1..50: mol_type = unassigned DNA; note = donor_08498b6
  misc_feature 1..23: note = RE
  misc_feature 24..25: note = Core
  misc_feature 26..50: note = LE
ttgcttgacttcccagacagttgcttgtatctagatcctcacgagagttt

SEQ ID NO: 30838 - DNA, 50 bp, unidentified
  source 1..50: mol_type = unassigned DNA; note = donor_0878cc2
  misc_feature 1..23: note = RE
  misc_feature 24..25: note = Core
  misc_feature 26..50: note = LE
gcaccgcgggcgccgtccatacatgatgtggtggacggcgcccgctcccg

SEQ ID NO: 30839 - DNA, 50 bp, unidentified
  source 1..50: mol_type = unassigned DNA; note = donor_0881c0b
  misc_feature 1..23: note = RE
  misc_feature 24..25: note = Core
  misc_feature 26..50: note = LE
acatttgataattaacacagaatctcctatgtttgttatcaaataataaa

SEQ ID NO: 30840 - DNA, 50 bp, unidentified
  source 1..50: mol_type = unassigned DNA; note = donor_08855f8
  misc_feature 1..23: note = RE
  misc_feature 24..25: note = Core
  misc_feature 26..50: note = LE
agccgcctagctcttaatggttgcttgtaatagcgcaatcggttatcgtc

SEQ ID NO: 30841 - DNA, 50 bp, unidentified
  source 1..50: mol_type = unassigned DNA; note = donor_08a6c05
  misc_feature 1..23: note = RE
  misc_feature 24..25: note = Core
  misc_feature 26..50: note = LE
ggtattgactttttatagctggtctcgtataatatatttatgggtaattt

SEQ ID NO: 30842 - DNA, 50 bp, unidentified
  source 1..50: mol_type = unassigned DNA; note = donor_08b7549
  misc_feature 1..23: note = RE
  misc_feature 24..25: note = Core
  misc_feature 26..50: note = LE
gacgccgctacggcatgggatgtctaatgggcctcgtcgggccgtgaggg

SEQ ID NO: 30843 - DNA, 50 bp, unidentified
  source 1..50: mol_type = unassigned DNA; note = donor_08c0275
  misc_feature 1..24: note = RE
  misc_feature 25: note = Core
  misc_feature 26..50: note = LE
cttgactcagaacatagggacacccgttaccttgtgagcaccccgaagga

SEQ ID NO: 30844 - DNA, 50 bp, unidentified
  source 1..50: mol_type = unassigned DNA; note = donor_08c58bc
  misc_feature 1..23: note = RE
  misc_feature 24..25: note = Core
  misc_feature 26..50: note = LE
cccggtaaggctcaagacggtatcttgtatctcgactaacgctccgccag

SEQ ID NO: 30845 - DNA, 50 bp, unidentified; identical to SEQ ID NO: 30488
  source 1..50: mol_type = unassigned DNA; note = donor_08c7f5e
  misc_feature 1..24: note = RE
  misc_feature 25: note = Core
  misc_feature 26..50: note = LE

SEQ ID NO: 30846 - DNA, 50 bp, unidentified
  source 1..50: mol_type = unassigned DNA; note = donor_08cead7
  misc_feature 1..23: note = RE
  misc_feature 24..25: note = Core
  misc_feature 26..50: note = LE
gaatttgaatattaacatagaacatggtaagtttgcattaaacttcattg

SEQ ID NO: 30847 - DNA, 50 bp, unidentified
  source 1..50: mol_type = unassigned DNA; note = donor_08d66d1
  misc_feature 1..24: note = RE
  misc_feature 25: note = Core
  misc_feature 26..50: note = LE
tgcaaacgaggaggagtccatatacaatgggatggactcctcctcaccta

SEQ ID NO: 30848 - DNA, 50 bp, unidentified
  source 1..50: mol_type = unassigned DNA; note = donor_08e1286
  misc_feature 1..24: note = RE
  misc_feature 25: note = Core
  misc_feature 26..50: note = LE
ttgacagatggggaagcccttgtagaatgaaagggacttcccgtcccgag

SEQ ID NO: 30849 - DNA, 50 bp, unidentified
  source 1..50: mol_type = unassigned DNA; note = donor_08eb7e9
  misc_feature 1..23: note = RE
  misc_feature 24..25: note = Core
  misc_feature 26..50: note = LE
gcttgacaaacaacatagggacaccgttaccgtggaagagtcctcgaacg

SEQ ID NO: 30850 - DNA, 50 bp, unidentified
  source 1..50: mol_type = unassigned DNA; note = donor_08ee89e
  misc_feature 1..23: note = RE
  misc_feature 24..25: note = Core
  misc_feature 26..50: note = LE
cttgacaaataaatccccatacaagaagctatggggagagcggcgaggtc

SEQ ID NO: 30851 - DNA, 50 bp, unidentified
  source 1..50: mol_type = unassigned DNA; note = donor_08fd24e
  misc_feature 1..23: note = RE
  misc_feature 24..25: note = Core
  misc_feature 26..50: note = LE
atgcttgacaatatatagttggtctcgtataataagcatgtacccaatat

SEQ ID NO: 30852 - DNA, 50 bp, unidentified; identical to SEQ ID NO: 30581
  source 1..50: mol_type = unassigned DNA; note = donor_090eaff
  misc_feature 1..23: note = RE
  misc_feature 24..25: note = Core
  misc_feature 26..50: note = LE

SEQ ID NO: 30853 - DNA, 50 bp, unidentified
  source 1..50: mol_type = unassigned DNA; note = donor_0919758
  misc_feature 1..22: note = RE
  misc_feature 23..25: note = Core
  misc_feature 26..50: note = LE
ctttcctggagacgtccatgtaagatggcatggacgtctccacctacccg

SEQ ID NO: 30854 - DNA, 50 bp, unidentified
  source 1..50: mol_type = unassigned DNA; note = donor_092822b
  misc_feature 1..23: note = RE
  misc_feature 24..25: note = Core
  misc_feature 26..50: note = LE
gcgagacgggggccgtccacatatgttggggtggacggccccctacggca

SEQ ID NO: 30855 - DNA, 50 bp, unidentified
  source 1..50: mol_type = unassigned DNA; note = donor_092badd
  misc_feature 1..23: note = RE
  misc_feature 24..25: note = Core
  misc_feature 26..50: note = LE
gcaaacggggaggagaccatatacgatgagatggtctcctcccctctgta

SEQ ID NO: 30856 - DNA, 50 bp, unidentified
  source 1..50: mol_type = unassigned DNA; note = donor_092e34c
  misc_feature 1..23: note = RE
  misc_feature 24..25: note = Core
  misc_feature 26..50: note = LE
gacagtgggggcgagtccatacataatcagatggactcgcccacgccgag

SEQ ID NO: 30857 - DNA, 50 bp, unidentified
  source 1..50: mol_type = unassigned DNA; note = donor_092f712
  misc_feature 1..23: note = RE
  misc_feature 24..25: note = Core
  misc_feature 26..50: note = LE
cggcttgacttcagcattgggaagctctaccttcttcctgggtccgcccc

SEQ ID NO: 30858 - DNA, 50 bp, unidentified
  source 1..50: mol_type = unassigned DNA; note = donor_0937032
  misc_feature 1..23: note = RE
  misc_feature 24..25: note = Core
  misc_feature 26..50: note = LE
cggcgtgacacctgtttctttctagcccctcacccgtgaacggacccgct

SEQ ID NO: 30859 - DNA, 50 bp, unidentified
  source 1..50: mol_type = unassigned DNA; note = donor_09379ed
  misc_feature 1..22: note = RE
  misc_feature 23..25: note = Core
  misc_feature 26..50: note = LE
agtcttgacttttaatagttagactcgtattatatagtagtagtgtttaa

SEQ ID NO: 30860 - DNA, 50 bp, unidentified
  source 1..50: mol_type = unassigned DNA; note = donor_093b78e
  misc_feature 1..23: note = RE
  misc_feature 24..25: note = Core
  misc_feature 26..50: note = LE
tatcttgacttcatatagttagtcttgtataatgaactcatagtaaattc

SEQ ID NO: 30861 - DNA, 50 bp, unidentified; identical to SEQ ID NO: 30446
  source 1..50: mol_type = unassigned DNA; note = donor_0940796
  misc_feature 1..24: note = RE
  misc_feature 25: note = Core
  misc_feature 26..50: note = LE

SEQ ID NO: 30862 - DNA, 50 bp, unidentified
  source 1..50: mol_type = unassigned DNA; note = donor_094289b
  misc_feature 1..24: note = RE
  misc_feature 25: note = Core
  misc_feature 26..50: note = LE
tcgcaaacgggggacgttcatataatgatatgaacgtcccccacccgtaa

SEQ ID NO: 30863 - DNA, 50 bp, unidentified
  source 1..50: mol_type = unassigned DNA; note = donor_09475c8
  misc_feature 1..23: note = RE
  misc_feature 24..25: note = Core
  misc_feature 26..50: note = LE
agacttgacttttcttagcaagtttagtaccataaaagtgtaagtgtaag

SEQ ID NO: 30864 - DNA, 50 bp, unidentified
  source 1..50: mol_type = unassigned DNA; note = donor_094e3da
  misc_feature 1..22: note = RE
  misc_feature 23..25: note = Core
  misc_feature 26..50: note = LE
tgcaaacgggatgtgttcatataaatgtaatgaacacatccctccattaa

SEQ ID NO: 30865 - DNA, 50 bp, unidentified
  source 1..50: mol_type = unassigned DNA; note = donor_095e39a
  misc_feature 1..23: note = RE
  misc_feature 24..25: note = Core
  misc_feature 26..50: note = LE
caacgcgggagccatccacacaagatggggtggatggctcccgctcccgg

SEQ ID NO: 30866 - DNA, 50 bp, unidentified
  source 1..50: mol_type = unassigned DNA; note = donor_09620de
  misc_feature 1..24: note = RE
  misc_feature 25: note = Core
  misc_feature 26..50: note = LE
ttcttgacctcctagtagctggtatcgtattatgaggttagccagttata

SEQ ID NO: 30867 - DNA, 50 bp, unidentified
  source 1..50: mol_type = unassigned DNA; note = donor_0970db8
  misc_feature 1..24: note = RE
  misc_feature 25: note = Core
  misc_feature 26..50: note = LE
cttgcagacggggcgggccatacgtatgggatggcccgccccttttcccc

SEQ ID NO: 30868 - DNA, 50 bp, unidentified
  source 1..50: mol_type = unassigned DNA; note = donor_09808c5
  misc_feature 1..21: note = RE
  misc_feature 22..25: note = Core
  misc_feature 26..50: note = LE
ctcttgacttcttatagttggtcacgtataattaaaaccatctcgaaagg

SEQ ID NO: 30869 - DNA, 50 bp, unidentified
  source 1..50: mol_type = unassigned DNA; note = donor_0989c3d
  misc_feature 1..24: note = RE
  misc_feature 25: note = Core
  misc_feature 26..50: note = LE
tgcgacgcacggccggaccatacataatgggatggtccggccgtgctcct

SEQ ID NO: 30870 - DNA, 50 bp, unidentified
  source 1..50: mol_type = unassigned DNA; note = donor_0997e61
  misc_feature 1..24: note = RE
  misc_feature 25: note = Core
  misc_feature 26..50: note = LE
tggaattgttcgaaacctagaatacctttggtctaaagataataattaat

SEQ ID NO: 30871 - DNA, 50 bp, unidentified
  source 1..50: mol_type = unassigned DNA; note = donor_09a16a5
  misc_feature 1..23: note = RE
  misc_feature 24..25: note = Core
  misc_feature 26..50: note = LE
cctcttgacttcataccattggactcgtataataagtttcaaagttaata

SEQ ID NO: 30872 - DNA, 50 bp, unidentified
  source 1..50: mol_type = unassigned DNA; note = donor_09aa040
  misc_feature 1..23: note = RE
  misc_feature 24..25: note = Core
  misc_feature 26..50: note = LE
ccggataaccggcaagacggtatcttatgtcttgatcttatccgctccgg

SEQ ID NO: 30873 - DNA, 50 bp, unidentified
  source 1..50: mol_type = unassigned DNA; note = donor_09ae6fa
  misc_feature 1..24: note = RE
  misc_feature 25: note = Core
  misc_feature 26..50: note = LE
tgcagtctggcggcggaccatacataatgagatggtccgccgccgagtac

SEQ ID NO: 30874 - DNA, 50 bp, unidentified
  source 1..50: mol_type = unassigned DNA; note = donor_09b4eda
  misc_feature 1..24: note = RE
  misc_feature 25: note = Core
  misc_feature 26..50: note = LE
tgccaacagggagccgtccacacatgatgcagtggacggctcccacccgc

SEQ ID NO: 30875 - DNA, 50 bp, unidentified
  source 1..50: mol_type = unassigned DNA; note = donor_09b4f09
  misc_feature 1..23: note = RE
  misc_feature 24..25: note = Core
  misc_feature 26..50: note = LE
gcatccgcgggggcgtccacacacgatggggtggacgccccccgacggca

SEQ ID NO: 30876 - DNA, 50 bp, unidentified
  source 1..50: mol_type = unassigned DNA; note = donor_09b556e
  misc_feature 1..24: note = RE
  misc_feature 25: note = Core
  misc_feature 26..50: note = LE
atcttgacaagctattagctggtatcgtattataggttcaaccagatctt

SEQ ID NO: 30877 - DNA, 50 bp, unidentified
  source 1..50: mol_type = unassigned DNA; note = donor_09ba0df
  misc_feature 1..24: note = RE
  misc_feature 25: note = Core
  misc_feature 26..50: note = LE
acagaagaataataacatagaaagctctaagtttgcgacatgaaaaaaca

SEQ ID NO: 30878 - DNA, 50 bp, unidentified
  source 1..50: mol_type = unassigned DNA; note = donor_09c43cc
  misc_feature 1..23: note = RE
  misc_feature 24..25: note = Core
  misc_feature 26..50: note = LE
tctcttgaaaccggacacagttgcttgtatgtttattttggatgtatgaa

SEQ ID NO: 30879 - DNA, 50 bp, unidentified
  source 1..50: mol_type = unassigned DNA; note = donor_09c6b57
  misc_feature 1..24: note = RE
  misc_feature 25: note = Core
  misc_feature 26..50: note = LE
aatcttgacagctattagctggtatcgtattatgagatcagccagttatt

SEQ ID NO: 30880 - DNA, 50 bp, unidentified
  source 1..50: mol_type = unassigned DNA; note = donor_09db0de
  misc_feature 1..23: note = RE
  misc_feature 24..25: note = Core
  misc_feature 26..50: note = LE
acacttgactttttctttgcaggctactacaataggattatggataaggt

SEQ ID NO: 30881 - DNA, 50 bp, unidentified; identical to SEQ ID NO: 30507
  source 1..50: mol_type = unassigned DNA; note = donor_09ddd96
  misc_feature 1..23: note = RE
  misc_feature 24..25: note = Core
  misc_feature 26..50: note = LE

SEQ ID NO: 30882 - DNA, 50 bp, unidentified
  source 1..50: mol_type = unassigned DNA; note = donor_09e16fe
  misc_feature 1..23: note = RE
  misc_feature 24..25: note = Core
  misc_feature 26..50: note = LE
tcgccccatcaacataacagttgccctgtgtctggaaagtctgtcatgat

SEQ ID NO: 30883 - DNA, 50 bp, unidentified
  source 1..50: mol_type = unassigned DNA; note = donor_09e72c7
  misc_feature 1..18: note = RE
  misc_feature 19..25: note = Core
  misc_feature 26..50: note = LE
cgggttgacacaggatgtctcattggttaacctcagcggttatccacagg

SEQ ID NO: 30884 - DNA, 50 bp, unidentified
  source 1..50: mol_type = unassigned DNA; note = donor_09eff79
  misc_feature 1..23: note = RE
  misc_feature 24..25: note = Core
  misc_feature 26..50: note = LE
taacttgatttatatatagttagctggtatattgtaattgacttatttaa

SEQ ID NO: 30885 - DNA, 50 bp, unidentified
  source 1..50: mol_type = unassigned DNA; note = donor_09f1a10
  misc_feature 1..23: note = RE
  misc_feature 24..25: note = Core
  misc_feature 26..50: note = LE
agggttcccctgcaacatagaatcttgtatgtttagacttgaaggggtgg

SEQ ID NO: 30886 - DNA, 50 bp, unidentified
  source 1..50: mol_type = unassigned DNA; note = donor_09f1b8f
  misc_feature 1..24: note = RE
  misc_feature 25: note = Core
  misc_feature 26..50: note = LE
gctgcttgacaaatcacataggggcgttactttattgagagtccttcatc

SEQ ID NO: 30887 - DNA, 50 bp, unidentified
  source 1..50: mol_type = unassigned DNA; note = donor_0a0255b
  misc_feature 1..23: note = RE
  misc_feature 24..25: note = Core
  misc_feature 26..50: note = LE
acaaccgcgccactcttcatagaagatgggatgaagagtggcgtaccttt

SEQ ID NO: 30888 - DNA, 50 bp, unidentified
  source 1..50: mol_type = unassigned DNA; note = donor_0a0299b
  misc_feature 1..24: note = RE
  misc_feature 25: note = Core
  misc_feature 26..50: note = LE
tttgcttgactttttatttgtaggcctgttacaataaaattacggttgaa

SEQ ID NO: 30889 - DNA, 50 bp, unidentified
  source 1..50: mol_type = unassigned DNA; note = donor_0a0ae4b
  misc_feature 1..23: note = RE
  misc_feature 24..25: note = Core
  misc_feature 26..50: note = LE
aatcagcttgatcaaaacggatacttgtcttatgaaggatctggcttctg

SEQ ID NO: 30890 - DNA, 50 bp, unidentified
  source 1..50: mol_type = unassigned DNA; note = donor_0a0d538
  misc_feature 1..24: note = RE
  misc_feature 25: note = Core
  misc_feature 26..50: note = LE
aatgcttgtgcatttcctataatacttttatttttgcagtcggaaaagtt

SEQ ID NO: 30891 - DNA, 50 bp, unidentified
  source 1..50: mol_type = unassigned DNA; note = donor_0a1490e
  misc_feature 1..24: note = RE
  misc_feature 25: note = Core
  misc_feature 26..50: note = LE
tgcgacagcggggaagtccctatagaatgaaagggacttcccctactcga

SEQ ID NO: 30892 - DNA, 50 bp, unidentified
  source 1..50: mol_type = unassigned DNA; note = donor_0a16753
  misc_feature 1..22: note = RE
  misc_feature 23..25: note = Core
  misc_feature 26..50: note = LE
ttgccaagggggcgtccacatatgatgatgtggacgcccccgcactgacc

SEQ ID NO: 30893 - DNA, 50 bp, unidentified
  source 1..50: mol_type = unassigned DNA; note = donor_0a1ce01
  misc_feature 1..24: note = RE
  misc_feature 25: note = Core
  misc_feature 26..50: note = LE
ttggcaaactggggcgaccatgtataatggaatggtcgcccctttctgat

SEQ ID NO: 30894 - DNA, 50 bp, unidentified
  source 1..50: mol_type = unassigned DNA; note = donor_0a23330
  misc_feature 1..23: note = RE
  misc_feature 24..25: note = Core
  misc_feature 26..50: note = LE
gcaagatcgggggcgtccatacatgatggcatggacgccccctttttccg

SEQ ID NO: 30895 - DNA, 50 bp, unidentified
  source 1..50: mol_type = unassigned DNA; note = donor_0a29990
  misc_feature 1..23: note = RE
  misc_feature 24..25: note = Core
  misc_feature 26..50: note = LE
agggttgacttttgttagcaggtctattacaataaatttggttggaagtc

SEQ ID NO: 30896 - DNA, 50 bp, unidentified
  source 1..50: mol_type = unassigned DNA; note = donor_0a2c7b8
  misc_feature 1..24: note = RE
  misc_feature 25: note = Core
  misc_feature 26..50: note = LE
cttgcagacggggcgggccatacgtatgggatggcccgcccgtctttccg

SEQ ID NO: 30897 - DNA, 50 bp, unidentified
  source 1..50: mol_type = unassigned DNA; note = donor_0a41a91
  misc_feature 1..24: note = RE
  misc_feature 25: note = Core
  misc_feature 26..50: note = LE
tgcaaagacggagcggaccatacataatgggatggtccgctccgctcccc

SEQ ID NO: 30898 - DNA, 50 bp, unidentified
  source 1..50: mol_type = unassigned DNA; note = donor_0a48840
  misc_feature 1..24: note = RE
  misc_feature 25: note = Core
  misc_feature 26..50: note = LE
ataattgcaaattcccataggaagctttaactttgcagtctgaaataaga

SEQ ID NO: 30899 - DNA, 50 bp, unidentified
  source 1..50: mol_type = unassigned DNA; note = donor_0a5779e
  misc_feature 1..24: note = RE
  misc_feature 25: note = Core
  misc_feature 26..50: note = LE
atatttgcaaatttccataggaagctttaactttgcagctgattactaag

SEQ ID NO: 30900 - DNA, 50 bp, unidentified
  source 1..50: mol_type = unassigned DNA; note = donor_0a61720
  misc_feature 1..23: note = RE
  misc_feature 24..25: note = Core
  misc_feature 26..50: note = LE
gcatccagaggtgcgtccatatatgatgtgatggacgcacctcccttcta

SEQ ID NO: 30901 - DNA, 50 bp, unidentified
  source 1..50: mol_type = unassigned DNA; note = donor_0a6196c
  misc_feature 1..23: note = RE
  misc_feature 24..25: note = Core
  misc_feature 26..50: note = LE
gccaaatcggagccgtccacacatgatgctgtggacggctccaccgccgg

SEQ ID NO: 30902 - DNA, 50 bp, unidentified
  source 1..50: mol_type = unassigned DNA; note = donor_0a6791a
  misc_feature 1..23: note = RE
  misc_feature 24..25: note = Core
  misc_feature 26..50: note = LE
tgacaacgaaaaacataggatgtctaatgggttccgtcagcctgctggtg

SEQ ID NO: 30903 - DNA, 50 bp, unidentified
  source 1..50: mol_type = unassigned DNA; note = donor_0a68efc
  misc_feature 1..21: note = RE
  misc_feature 22..25: note = Core
  misc_feature 26..50: note = LE
ccgaccgggggccgtccatacatgatggggtggacggcccccgacggcat

SEQ ID NO: 30904 - DNA, 50 bp, unidentified
  source 1..50: mol_type = unassigned DNA; note = donor_0a6a89f
  misc_feature 1..24: note = RE
  misc_feature 25: note = Core
  misc_feature 26..50: note = LE
ttacttgttttttgccacagtacttcttaagtttacaattcattaaattt

SEQ ID NO: 30905 - DNA, 50 bp, unidentified
  source 1..50: mol_type = unassigned DNA; note = donor_0a7489d
  misc_feature 1..24: note = RE
  misc_feature 25: note = Core
  misc_feature 26..50: note = LE
gccgcttgacaaaccacataggggcgttaccttgttggtggttccgggaa

SEQ ID NO: 30906 - DNA, 50 bp, unidentified
  source 1..50: mol_type = unassigned DNA; note = donor_0a7991d
  misc_feature 1..24: note = RE
  misc_feature 25: note = Core
  misc_feature 26..50: note = LE
tgcaggaggtgggctgaccatacataatgagatggtcagcccagttcgag

SEQ ID NO: 30907 - DNA, 50 bp, unidentified
  source 1..50: mol_type = unassigned DNA; note = donor_0a870da
  misc_feature 1..21: note = RE
  misc_feature 22..25: note = Core
  misc_feature 26..50: note = LE
ccgaaagggggccgtccatacatgatggtgtggacggcccccgacggcat

SEQ ID NO: 30908 - DNA, 50 bp, unidentified
  source 1..50: mol_type = unassigned DNA; note = donor_0a87ca9
  misc_feature 1..23: note = RE
  misc_feature 24..25: note = Core
  misc_feature 26..50: note = LE
tggtcgggcccgattaatggttgcttgtattagcgcgatccattacactg

SEQ ID NO: 30909 - DNA, 50 bp, unidentified
  source 1..50: mol_type = unassigned DNA; note = donor_0a8d23e
  misc_feature 1..23: note = RE
  misc_feature 24..25: note = Core
  misc_feature 26..50: note = LE
gctaaccccaaggtgaccatatatgctgagatggtcacctcggtctcggc

SEQ ID NO: 30910 - DNA, 50 bp, unidentified
  source 1..50: mol_type = unassigned DNA; note = donor_0a8d320
  misc_feature 1..23: note = RE
  misc_feature 24..25: note = Core
  misc_feature 26..50: note = LE
atgcttgaccggagagacggtatcttgtatctttgtccgagtgatggtta

SEQ ID NO: 30911 - DNA, 50 bp, unidentified
  source 1..50: mol_type = unassigned DNA; note = donor_0a96117
  misc_feature 1..21: note = RE
  misc_feature 22..25: note = Core
  misc_feature 26..50: note = LE
ttgacgaaacccatagggacaccccgttaccttcttcgtgccctcgatga

SEQ ID NO: 30912 - DNA, 50 bp, unidentified
  source 1..50: mol_type = unassigned DNA; note = donor_0aa9795
  misc_feature 1..23: note = RE
  misc_feature 24..25: note = Core
  misc_feature 26..50: note = LE
gagctagtcattcaagatggttgcttatatgtctcagttggttcaaactt

SEQ ID NO: 30913 - DNA, 50 bp, unidentified
  source 1..50: mol_type = unassigned DNA; note = donor_0aa9e93
  misc_feature 1..23: note = RE
  misc_feature 24..25: note = Core
  misc_feature 26..50: note = LE
ttgcaaacgggacgcgttcatatagaatgaaatgaacgcgtcccacccga

SEQ ID NO: 30914 - DNA, 50 bp, unidentified
  source 1..50: mol_type = unassigned DNA; note = donor_0aaa310
  misc_feature 1..23: note = RE
  misc_feature 24..25: note = Core
  misc_feature 26..50: note = LE
caatcagccccacttaatggttgcttgtataagcgcgaaactgtatggtg

SEQ ID NO: 30915 - DNA, 50 bp, unidentified
  source 1..50: mol_type = unassigned DNA; note = donor_0aaa4ec
  misc_feature 1..24: note = RE
  misc_feature 25: note = Core
  misc_feature 26..50: note = LE
aatacttgatttttatatagttagcctggtataatgtaaaaaagactcat

SEQ ID NO: 30916 - DNA, 50 bp, unidentified
  source 1..50: mol_type = unassigned DNA; note = donor_0aaa64c
  misc_feature 1..22: note = RE
  misc_feature 23..25: note = Core
  misc_feature 26..50: note = LE
aatgttgacatcctattagctggttcgtattatgaggttaaccagttttt

SEQ ID NO: 30917 - DNA, 50 bp, unidentified
  source 1..50: mol_type = unassigned DNA; note = donor_0aab861
  misc_feature 1..24: note = RE
  misc_feature 25: note = Core
  misc_feature 26..50: note = LE
ccagggcttgacacaaagaggcttctgattcatgctgggggtgcgtttcg

SEQ ID NO: 30918 - DNA, 50 bp, unidentified
  source 1..50: mol_type = unassigned DNA; note = donor_0ab0f7a
  misc_feature 1..24: note = RE
  misc_feature 25: note = Core
  misc_feature 26..50: note = LE
tggcaaacgggaggcgtccatataatggaatggacgcctccccccgcaag

SEQ ID NO: 30919 - DNA, 50 bp, unidentified
  source 1..50: mol_type = unassigned DNA; note = donor_0ac0477
  misc_feature 1..23: note = RE
  misc_feature 24..25: note = Core
  misc_feature 26..50: note = LE
tgcaccgcgggccgttccacatatgatgaggtggaacggcccgctccgac

SEQ ID NO: 30920 - DNA, 50 bp, unidentified
  source 1..50: mol_type = unassigned DNA; note = donor_0ac6554
  misc_feature 1..23: note = RE
  misc_feature 24..25: note = Core
  misc_feature 26..50: note = LE
gacgcccaccggtcctggggtgtctaatgggagcgaccgggtctggtagg

SEQ ID NO: 30921 - DNA, 50 bp, unidentified
  source 1..50: mol_type = unassigned DNA; note = donor_0aca156
  misc_feature 1..24: note = RE
  misc_feature 25: note = Core
  misc_feature 26..50: note = LE
gcaaagtggggtggggtccatatacaatgggatggacccctccccactcc

SEQ ID NO: 30922 - DNA, 50 bp, unidentified
  source 1..50: mol_type = unassigned DNA; note = donor_0ad8151
  misc_feature 1..22: note = RE
  misc_feature 23..25: note = Core
  misc_feature 26..50: note = LE
ctattgacttctaatagtttgtcacgtataatccaatcatcggtgatggt

SEQ ID NO: 30923 - DNA, 50 bp, unidentified
  source 1..50: mol_type = unassigned DNA; note = donor_0af5e82
  misc_feature 1..23: note = RE
  misc_feature 24..25: note = Core
  misc_feature 26..50: note = LE
aaggcgcatgacggatacagttgcttctgtatctcggatctgctattttg

SEQ ID NO: 30924 - DNA, 50 bp, unidentified
  source 1..50: mol_type = unassigned DNA; note = donor_0afdb27
  misc_feature 1..24: note = RE
  misc_feature 25: note = Core
  misc_feature 26..50: note = LE
tgcaaaacgcgtcgggtccatacatactgagatggacccggcgccccttc

SEQ ID NO: 30925 - DNA, 50 bp, unidentified
  source 1..50: mol_type = unassigned DNA; note = donor_0afe3f8
  misc_feature 1..23: note = RE
  misc_feature 24..25: note = Core
  misc_feature 26..50: note = LE
aggcttcccctcaaccatagaatcttgtatgctaggacttgaagggagga

SEQ ID NO: 30926 - DNA, 50 bp, unidentified
  source 1..50: mol_type = unassigned DNA; note = donor_0affaab
  misc_feature 1..24: note = RE
  misc_feature 25: note = Core
  misc_feature 26..50: note = LE
tgcagcaaggcggcggaccatacataatgggatggtccgccgccttcatc

SEQ ID NO: 30927 - DNA, 50 bp, unidentified
  source 1..50: mol_type = unassigned DNA; note = donor_0b09eb4
  misc_feature 1..23: note = RE
  misc_feature 24..25: note = Core
  misc_feature 26..50: note = LE
aagaaacttgatcacaacggatacttgtcttatgcatttggggtcgctgc

SEQ ID NO: 30928 - DNA, 50 bp, unidentified
  source 1..50: mol_type = unassigned DNA; note = donor_0b0ad8d
  misc_feature 1..24: note = RE
  misc_feature 25: note = Core
  misc_feature 26..50: note = LE
tgcaaccggggaggagtccctatacaatgaaagggactcctcccctcctg

SEQ ID NO: 30929 - DNA, 50 bp, unidentified
  source 1..50: mol_type = unassigned DNA; note = donor_0b189c4
  misc_feature 1..22: note = RE
  misc_feature 23..25: note = Core
  misc_feature 26..50: note = LE
ccttgacaacaacatggggacacccttaccttgctcgtgggccctgggcg

SEQ ID NO: 30930 - DNA, 50 bp, unidentified
  source 1..50: mol_type = unassigned DNA; note = donor_0b28858
  misc_feature 1..24: note = RE
  misc_feature 25: note = Core
  misc_feature 26..50: note = LE
tgcaaaacgggaggagtccatatacaatgaaatggactcctcccacctga

SEQ ID NO: 30931 - DNA, 50 bp, unidentified
  source 1..50: mol_type = unassigned DNA; note = donor_0b2b237
  misc_feature 1..23: note = RE
  misc_feature 24..25: note = Core
  misc_feature 26..50: note = LE
atacttgactttttattagtagactcctaatataaaagtgtagtggctat

SEQ ID NO: 30932 - DNA, 50 bp, unidentified
  source 1..50: mol_type = unassigned DNA; note = donor_0b2d1b2
  misc_feature 1..24: note = RE
  misc_feature 25: note = Core
  misc_feature 26..50: note = LE
tgcaaaaatgggggtgaccatagataatgagatggtcaccccacaccctg

SEQ ID NO: 30933 - DNA, 50 bp, unidentified
  source 1..50: mol_type = unassigned DNA; note = donor_0b31164
  misc_feature 1..24: note = RE
  misc_feature 25: note = Core
  misc_feature 26..50: note = LE
ttgcacctttttttatatagttcgttgtatattaattttagttattataa

SEQ ID NO: 30934 - DNA, 50 bp, unidentified
  source 1..50: mol_type = unassigned DNA; note = donor_0b415e5
  misc_feature 1..23: note = RE
  misc_feature 24..25: note = Core
  misc_feature 26..50: note = LE
agggttgccctgcaacatagaatcttgtatgtttagacttgaaggggtgg

SEQ ID NO: 30935 - DNA, 50 bp, unidentified
  source 1..50: mol_type = unassigned DNA; note = donor_0b41ab1
  misc_feature 1..24: note = RE
  misc_feature 25: note = Core
  misc_feature 26..50: note = LE
ggcaaactgggtggagtccatatataatgaaatggactccaccctttatc

SEQ ID NO: 30936 - DNA, 50 bp, unidentified
  source 1..50: mol_type = unassigned DNA; note = donor_0b41c9a
  misc_feature 1..23: note = RE
  misc_feature 24..25: note = Core
  misc_feature 26..50: note = LE
ttgctaacggggcgggccatacgttatggaatggcccgcccctttcccca

SEQ ID NO: 30937 - DNA, 50 bp, unidentified
  source 1..50: mol_type = unassigned DNA; note = donor_0b50220
  misc_feature 1..23: note = RE
  misc_feature 24..25: note = Core
  misc_feature 26..50: note = LE
gcataacactgggcgtccatatatgatgtgatggacgccccttcccagcc

SEQ ID NO: 30938 - DNA, 50 bp, unidentified
  source 1..50: mol_type = unassigned DNA; note = donor_0b5873f
  misc_feature 1..24: note = RE
  misc_feature 25: note = Core
  misc_feature 26..50: note = LE
tgctatgcaagaggagtccatatacaatggtatggactcctcacctttga

SEQ ID NO: 30939 - DNA, 50 bp, unidentified
  source 1..50: mol_type = unassigned DNA; note = donor_0b5e62a
  misc_feature 1..22: note = RE
  misc_feature 23..25: note = Core
  misc_feature 26..50: note = LE
gccacgcaggcgccgtccacacatgatggagtggacggcgcctgctcccg

SEQ ID NO: 30940 - DNA, 50 bp, unidentified
  source 1..50: mol_type = unassigned DNA; note = donor_0b6128e
  misc_feature 1..23: note = RE
  misc_feature 24..25: note = Core
  misc_feature 26..50: note = LE
tctcctgttttcataatagttgacttctaccaaaaatttctgtaaaatac

SEQ ID NO: 30941 - DNA, 50 bp, unidentified
  source 1..50: mol_type = unassigned DNA; note = donor_0b685e2
  misc_feature 1..24: note = RE
  misc_feature 25: note = Core
  misc_feature 26..50: note = LE
ttggcaaacaggggcgaccatgtataatggaatggtcgccccttcctaac

SEQ ID NO: 30942 - DNA, 50 bp, unidentified
  source 1..50: mol_type = unassigned DNA; note = donor_0b787c0
  misc_feature 1..22: note = RE
  misc_feature 23..25: note = Core
  misc_feature 26..50: note = LE
tctcttgcatataaacacagttcatcctatgtttgcaaagaaaaataaat

SEQ ID NO: 30943 - DNA, 50 bp, unidentified
  source 1..50: mol_type = unassigned DNA; note = donor_0b887d9
  misc_feature 1..23: note = RE
  misc_feature 24..25: note = Core
  misc_feature 26..50: note = LE
aaggaggaattaaatatagttgactcctgccattaattcctgtataacta

SEQ ID NO: 30944 - DNA, 50 bp, unidentified
  source 1..50: mol_type = unassigned DNA; note = donor_0b8a2b4
  misc_feature 1..24: note = RE
  misc_feature 25: note = Core
  misc_feature 26..50: note = LE
tgccagacgggcgccatccagacatgatgtgatggatggcgccctgcttg

SEQ ID NO: 30945 - DNA, 50 bp, unidentified
  source 1..50: mol_type = unassigned DNA; note = donor_0b8b302
  misc_feature 1..22: note = RE
  misc_feature 23..25: note = Core
  misc_feature 26..50: note = LE
tatttggtttttaatatagttcgtcgtacatttgtacggttaaatgattt

SEQ ID NO: 30946 - DNA, 50 bp, unidentified
  source 1..50: mol_type = unassigned DNA; note = donor_0b922a5
  misc_feature 1..21: note = RE
  misc_feature 22..25: note = Core
  misc_feature 26..50: note = LE
gcaaacgggacgcgttcatataaaatgtaatgaacgcgtcccaattaact

SEQ ID NO: 30947 - DNA, 50 bp, unidentified
  source 1..50: mol_type = unassigned DNA; note = donor_0b9233d
  misc_feature 1..22: note = RE
  misc_feature 23..25: note = Core
  misc_feature 26..50: note = LE
cacgaaagggggcatccatacatgatggcgtggatgccccaacctgacgg

SEQ ID NO: 30948 - DNA, 50 bp, unidentified
  source 1..50: mol_type = unassigned DNA; note = donor_0b9adb8
  misc_feature 1..23: note = RE
  misc_feature 24..25: note = Core
  misc_feature 26..50: note = LE
cggcttgacaggaaagacggtatcttgtatcttgaacctcgtgatggtta

SEQ ID NO: 30949 - DNA, 50 bp, unidentified
  source 1..50: mol_type = unassigned DNA; note = donor_0b9ed85
  misc_feature 1..23: note = RE
  misc_feature 24..25: note = Core
  misc_feature 26..50: note = LE
cgcaggcgggggccgtccacatatgatggggtggacggcccccgctcccg

SEQ ID NO: 30950 - DNA, 50 bp, unidentified
  source 1..50: mol_type = unassigned DNA; note = donor_0bae753
  misc_feature 1..24: note = RE
  misc_feature 25: note = Core
  misc_feature 26..50: note = LE
tgcaaacgaggaggagtccatatacaatgggatggactcctcctcaccct

SEQ ID NO: 30951 - DNA, 50 bp, unidentified
  source 1..50: mol_type = unassigned DNA; note = donor_0bb5c45
  misc_feature 1..23: note = RE
  misc_feature 24..25: note = Core
  misc_feature 26..50: note = LE
atacttgacttcatatagttagtctcgtataatgaagatataaaaatctt

SEQ ID NO: 30952 - DNA, 50 bp, unidentified
  source 1..50: mol_type = unassigned DNA; note = donor_0bb75b0
  misc_feature 1..23: note = RE
  misc_feature 24..25: note = Core
  misc_feature 26..50: note = LE
ctcttgaacaaaaatatttagggagcattcctgtaattcataaataatgt

SEQ ID NO: 30953 - DNA, 50 bp, unidentified
  source 1..50: mol_type = unassigned DNA; note = donor_0bb783a
  misc_feature 1..24: note = RE
  misc_feature 25: note = Core
  misc_feature 26..50: note = LE
aatgcttggttaaaccatagaaaacctttagatttgcatttccaataaat

SEQ ID NO: 30954 - DNA, 50 bp, unidentified
  source 1..50: mol_type = unassigned DNA; note = donor_0bb88f8
  misc_feature 1..24: note = RE
  misc_feature 25: note = Core
  misc_feature 26..50: note = LE
aggtgtcttgacacagaggggagcctgcttgttccattgacctcaggacc

SEQ ID NO: 30955 - DNA, 50 bp, unidentified
  source 1..50: mol_type = unassigned DNA; note = donor_0bbb06c
  misc_feature 1..24: note = RE
  misc_feature 25: note = Core
  misc_feature 26..50: note = LE
ttgcaatcgggcggggtccatatacaatggtatggaccccgctctcccgg

SEQ ID NO: 30956 - DNA, 50 bp, unidentified
  source 1..50: mol_type = unassigned DNA; note = donor_0bc0077
  misc_feature 1..23: note = RE
  misc_feature 24..25: note = Core
  misc_feature 26..50: note = LE
aggcttcccctcaaccatagaatcttgtatggttagacttgttggggtgg

SEQ ID NO: 30957 - DNA, 50 bp, unidentified
  source 1..50: mol_type = unassigned DNA; note = donor_0bc314c
  misc_feature 1..22: note = RE
  misc_feature 23..25: note = Core
  misc_feature 26..50: note = LE
cattacgggcggcaaccacagaagatgggatggttgccgccctgccccga

SEQ ID NO: 30958 - DNA, 50 bp, unidentified
  source 1..50: mol_type = unassigned DNA; note = donor_0be06fe
  misc_feature 1..23: note = RE
  misc_feature 24..25: note = Core
  misc_feature 26..50: note = LE
gcgagccgggggccatccacacatgatggggtggatggccccctcgcggc

SEQ ID NO: 30959 - DNA, 50 bp, unidentified
  source 1..50: mol_type = unassigned DNA; note = donor_0be0f00
  misc_feature 1..24: note = RE
  misc_feature 25: note = Core
  misc_feature 26..50: note = LE
cagcgtcttgacacagaggggtgcctacgtgtttcattgacgtcaggatc

SEQ ID NO: 30960 - DNA, 50 bp, unidentified
  source 1..50: mol_type = unassigned DNA; note = donor_0be9037
  misc_feature 1..23: note = RE
  misc_feature 24..25: note = Core
  misc_feature 26..50: note = LE
gaccccgaacggccgattagagaagatggggtaatcggccgacgtagttg

SEQ ID NO: 30961 - DNA, 50 bp, unidentified
  source 1..50: mol_type = unassigned DNA; note = donor_0becb8d
  misc_feature 1..24: note = RE
  misc_feature 25: note = Core
  misc_feature 26..50: note = LE
gcggcttgacagccataggagcatctctcatactggtcaggtcctcgagc

SEQ ID NO: 30962 - DNA, 50 bp, unidentified
  source 1..50: mol_type = unassigned DNA; note = donor_0bf0396
  misc_feature 1..23: note = RE
  misc_feature 24..25: note = Core
  misc_feature 26..50: note = LE
gacaccttggacccctgggatgtctaatgggggtggatcggcttcctgtt

SEQ ID NO: 30963 - DNA, 50 bp, unidentified
  source 1..50: mol_type = unassigned DNA; note = donor_0c01c15
  misc_feature 1..24: note = RE
  misc_feature 25: note = Core
  misc_feature 26..50: note = LE
tgcagtcaggcggcggaccatacataatgagatggtccgccgccgaatag

SEQ ID NO: 30964 - DNA, 50 bp, unidentified; identical to SEQ ID NO: 30381
  source 1..50: mol_type = unassigned DNA; note = donor_0c02d1d
  misc_feature 1..24: note = RE
  misc_feature 25: note = Core
  misc_feature 26..50: note = LE

SEQ ID NO: 30965 - DNA, 50 bp, unidentified
  source 1..50: mol_type = unassigned DNA; note = donor_0c042d7
  misc_feature 1..23: note = RE
  misc_feature 24..25: note = Core
  misc_feature 26..50: note = LE
ctatgcaggagccatccacacaagatggggtggatggctcctgctccaac

SEQ ID NO: 30966 - DNA, 50 bp, unidentified
  source 1..50: mol_type = unassigned DNA; note = donor_0c0b84d
  misc_feature 1..23: note = RE
  misc_feature 24..25: note = Core
  misc_feature 26..50: note = LE
tctattgactttttatttgcaggctactacaatatatttatggttaatct

SEQ ID NO: 30967 - DNA, 50 bp, unidentified
  source 1..50: mol_type = unassigned DNA; note = donor_0c1dea4
  misc_feature 1..23: note = RE
  misc_feature 24..25: note = Core
  misc_feature 26..50: note = LE
gacaccgaacacccctgggatgtctaatgggggtggatcagcgttctgaa

SEQ ID NO: 30968 - DNA, 50 bp, unidentified
  source 1..50: mol_type = unassigned DNA; note = donor_0c27a6a
  misc_feature 1..24: note = RE
  misc_feature 25: note = Core
  misc_feature 26..50: note = LE
tcgcgtcttgacacagaggggagcctacttgttctatggccccaggatcg

SEQ ID NO: 30969 - DNA, 50 bp, unidentified
  source 1..50: mol_type = unassigned DNA; note = donor_0c28d42
  misc_feature 1..23: note = RE
  misc_feature 24..25: note = Core
  misc_feature 26..50: note = LE
ttatttgataactaacacagaatctcctatgtttgttatcaaagataaaa

SEQ ID NO: 30970 - DNA, 50 bp, unidentified
  source 1..50: mol_type = unassigned DNA; note = donor_0c2a7c8
  misc_feature 1..24: note = RE
  misc_feature 25: note = Core
  misc_feature 26..50: note = LE
ttacttgttttttaccacagtacttcttaagttagcattttaataaaaac

SEQ ID NO: 30971 - DNA, 50 bp, unidentified
  source 1..50: mol_type = unassigned DNA; note = donor_0c3430f
  misc_feature 1..24: note = RE
  misc_feature 25: note = Core
  misc_feature 26..50: note = LE
tgcaaaaataggggcgaccatagataatgagatggtcgccccgcctcccg

SEQ ID NO: 30972 - DNA, 50 bp, unidentified
  source 1..50: mol_type = unassigned DNA; note = donor_0c37a55
  misc_feature 1..22: note = RE
  misc_feature 23..25: note = Core
  misc_feature 26..50: note = LE
tctcttgcatataaacacagttcatcctatgtttgtataaataaaaagta

SEQ ID NO: 30973 - DNA, 50 bp, unidentified
  source 1..50: mol_type = unassigned DNA; note = donor_0c37f6a
  misc_feature 1..23: note = RE
  misc_feature 24..25: note = Core
  misc_feature 26..50: note = LE
cccactgagtgacaagacggtatcttgtatctcgactatcgtcccgtgag

SEQ ID NO: 30974 - DNA, 50 bp, unidentified
  source 1..50: mol_type = unassigned DNA; note = donor_0c48427
  misc_feature 1..21: note = RE
  misc_feature 22..25: note = Core
  misc_feature 26..50: note = LE
ggcttgactcagtcattgcgactccgtaaggcgttaggcggcccaggggg

SEQ ID NO: 30975 - DNA, 50 bp, unidentified
  source 1..50: mol_type = unassigned DNA; note = donor_0c4b7ea
  misc_feature 1..24: note = RE
  misc_feature 25: note = Core
  misc_feature 26..50: note = LE
tgcatctctgcggcggaccctacataatgggatggtccgccgcagaactc

SEQ ID NO: 30976 - DNA, 50 bp, unidentified
  source 1..50: mol_type = unassigned DNA; note = donor_0c4ddec
  misc_feature 1..24: note = RE
  misc_feature 25: note = Core
  misc_feature 26..50: note = LE
tgcatcgatgggggcgtccacacatgatggggtggacgccccctggcggc

SEQ ID NO: 30977 - DNA, 50 bp, unidentified
  source 1..50: mol_type = unassigned DNA; note = donor_0c4e94c
  misc_feature 1..24: note = RE
  misc_feature 25: note = Core
  misc_feature 26..50: note = LE
ttgcaaaagggaggcgtccatatagaatgtaatggacgcctcccgcttgt

SEQ ID NO: 30978 - DNA, 50 bp, unidentified
  source 1..50: mol_type = unassigned DNA; note = donor_0c50db2
  misc_feature 1..22: note = RE
  misc_feature 23..25: note = Core
  misc_feature 26..50: note = LE
aatcttgacaaactattagctggttcgtaatataaggttagccagatttt

SEQ ID NO: 30979 - DNA, 50 bp, unidentified
  source 1..50: mol_type = unassigned DNA; note = donor_0c55618
  misc_feature 1..21: note = RE
  misc_feature 22..25: note = Core
  misc_feature 26..50: note = LE
cctgaggttgacacagggagtgtcactaggccacactcctcattgtgagg

SEQ ID NO: 30980 - DNA, 50 bp, unidentified
  source 1..50: mol_type = unassigned DNA; note = donor_0c5b49d
  misc_feature 1..24: note = RE
  misc_feature 25: note = Core
  misc_feature 26..50: note = LE
tgcgtcgaaagatgggcgatactggcggtcggagctaacggaccacgcag

SEQ ID NO: 30981 - DNA, 50 bp, unidentified
  source 1..50: mol_type = unassigned DNA; note = donor_0c6a5a2
  misc_feature 1..23: note = RE
  misc_feature 24..25: note = Core
  misc_feature 26..50: note = LE
atgtttgactttaaagacggtatcttgtatctttctttccgtggtggtta

SEQ ID NO: 30982 - DNA, 50 bp, unidentified
  source 1..50: mol_type = unassigned DNA; note = donor_0c707a4
  misc_feature 1..24: note = RE
  misc_feature 25: note = Core
  misc_feature 26..50: note = LE
ttgcaaaagggggtggttcatatataatgtaatgaaccacccccacccac

SEQ ID NO: 30983 - DNA, 50 bp, unidentified
  source 1..50: mol_type = unassigned DNA; note = donor_0c7bf79
  misc_feature 1..22: note = RE
  misc_feature 23..25: note = Core
  misc_feature 26..50: note = LE
cataaaaggagccgtccacacatgatggtgtggacggctccacccaatcg

SEQ ID NO: 30984 - DNA, 50 bp, unidentified
  source 1..50: mol_type = unassigned DNA; note = donor_0c7c2a0
  misc_feature 1..23: note = RE
  misc_feature 24..25: note = Core
  misc_feature 26..50: note = LE
accagaccgcgctctaatggttgcttgtaatagcgaaatcgaatatcgtt

SEQ ID NO: 30985 - DNA, 50 bp, unidentified
  source 1..50: mol_type = unassigned DNA; note = donor_0ca8842
  misc_feature 1..23: note = RE
  misc_feature 24..25: note = Core
  misc_feature 26..50: note = LE
gcgcttggcaattaccatagaatcttgtatggtaggacttgaagggagga

SEQ ID NO: 30986 - DNA, 50 bp, unidentified
  source 1..50: mol_type = unassigned DNA; note = donor_0ca8a5f
  misc_feature 1..23: note = RE
  misc_feature 24..25: note = Core
  misc_feature 26..50: note = LE
ctcttgacagcgcgatatgggacctgatatagctcgttgacgcgggtccg

SEQ ID NO: 30987 - DNA, 50 bp, unidentified
  source 1..50: mol_type = unassigned DNA; note = donor_0caf534
  misc_feature 1..23: note = RE
  misc_feature 24..25: note = Core
  misc_feature 26..50: note = LE
gtcttgacaaggcgctatgggatctgatataccgcctcgtggaggtcgat

SEQ ID NO: 30988 - DNA, 50 bp, unidentified
  source 1..50: mol_type = unassigned DNA; note = donor_0cbb92a
  misc_feature 1..24: note = RE
  misc_feature 25: note = Core
  misc_feature 26..50: note = LE
tggcaaacgggaggcgtccatataaaatgtaatggacgcctcccaccccg

SEQ ID NO: 30989 - DNA, 50 bp, unidentified
  source 1..50: mol_type = unassigned DNA; note = donor_0cbbfa6
  misc_feature 1..24: note = RE
  misc_feature 25: note = Core
  misc_feature 26..50: note = LE
taaatttggctgaatcataagaataccttatatttgcaattgcaaaataa

SEQ ID NO: 30990 - DNA, 50 bp, unidentified
  source 1..50: mol_type = unassigned DNA; note = donor_0cbcae3
  misc_feature 1..23: note = RE
  misc_feature 24..25: note = Core
  misc_feature 26..50: note = LE
acacttgtgctcagacatagaatcttgtatgttctgcctcggcaagctgt

SEQ ID NO: 30991 - DNA, 50 bp, unidentified
  source 1..50: mol_type = unassigned DNA; note = donor_0cc0850
  misc_feature 1..24: note = RE
  misc_feature 25: note = Core
  misc_feature 26..50: note = LE
acttaaattacagtgtttcaaacttaatccgcctttctgcgaaaggcacc

SEQ ID NO: 30992 - DNA, 50 bp, unidentified
  source 1..50: mol_type = unassigned DNA; note = donor_0cc571d
  misc_feature 1..23: note = RE
  misc_feature 24..25: note = Core
  misc_feature 26..50: note = LE
gccaacggagagccgtccacacatgatgctgtggacggctctccacccct

SEQ ID NO: 30993 - DNA, 50 bp, unidentified
  source 1..50: mol_type = unassigned DNA; note = donor_0cc9741
  misc_feature 1..24: note = RE
  misc_feature 25: note = Core
  misc_feature 26..50: note = LE
ttgacagacggggaagcccttgtagaatgaaagggacttccccgtcccga

SEQ ID NO: 30994 - DNA, 50 bp, unidentified
  source 1..50: mol_type = unassigned DNA; note = donor_0ccc814
  misc_feature 1..23: note = RE
  misc_feature 24..25: note = Core
  misc_feature 26..50: note = LE
ttgcaggcggggcgggccatacgttatggatggcccgcccctactgaaag

SEQ ID NO: 30995 - DNA, 50 bp, unidentified
  source 1..50: mol_type = unassigned DNA; note = donor_0cd1dec
  misc_feature 1..22: note = RE
  misc_feature 23..25: note = Core
  misc_feature 26..50: note = LE
atgcttgacaaacattagctggtttcgtattattaggttagccagaaata

SEQ ID NO: 30996 - DNA, 50 bp, unidentified
  source 1..50: mol_type = unassigned DNA; note = donor_0cd7188
  misc_feature 1..22: note = RE
  misc_feature 23..25: note = Core
  misc_feature 26..50: note = LE
tctattgacttttcatagttggtcttgtatgataagtatatagaaatatc

SEQ ID NO: 30997 - DNA, 50 bp, unidentified
  source 1..50: mol_type = unassigned DNA; note = donor_0cde5f7
  misc_feature 1..23: note = RE
  misc_feature 24..25: note = Core
  misc_feature 26..50: note = LE
gggcttgacttaatatagtcagtctcgtataataagtgcagtcgttgaag

SEQ ID NO: 30998 - DNA, 50 bp, unidentified
  source 1..50: mol_type = unassigned DNA; note = donor_0ce2f77
  misc_feature 1..24: note = RE
  misc_feature 25: note = Core
  misc_feature 26..50: note = LE
tgacataccaggggcaaccatctataatggaatggtcgcccctacccaaa

SEQ ID NO: 30999 - DNA, 50 bp, unidentified; identical to SEQ ID NO: 30466
  source 1..50: mol_type = unassigned DNA; note = donor_0ce3597
  misc_feature 1..23: note = RE
  misc_feature 24..25: note = Core
  misc_feature 26..50: note = LE

SEQ ID NO: 31000 - DNA, 50 bp, unidentified
  source 1..50: mol_type = unassigned DNA; note = donor_0ce63ff
  misc_feature 1..24: note = RE
  misc_feature 25: note = Core
  misc_feature 26..50: note = LE
ttgacgaaaaacatagggacaccccgttacctttttagtagccccataaa

SEQ ID NO: 31001 - DNA, 50 bp, unidentified
  source 1..50: mol_type = unassigned DNA; note = donor_0cec75b
  misc_feature 1..20: note = RE
  misc_feature 21..25: note = Core
  misc_feature 26..50: note = LE
cttgcatattaaaacagtaccttttatatttacagactattgataaaagg

SEQ ID NO: 31002 - DNA, 50 bp, unidentified; identical to SEQ ID NO: 30631
  source 1..50: mol_type = unassigned DNA; note = donor_0cece2c
  misc_feature 1..23: note = RE
  misc_feature 24..25: note = Core
  misc_feature 26..50: note = LE

SEQ ID NO: 31003 - DNA, 50 bp, unidentified
  source 1..50: mol_type = unassigned DNA; note = donor_0cf53fe
  misc_feature 1..22: note = RE
  misc_feature 23..25: note = Core
  misc_feature 26..50: note = LE
gacaagttacgaccaaggggtgtctaatgggacccgacatcgtcttttag

SEQ ID NO: 31004 - DNA, 50 bp, unidentified
  source 1..50: mol_type = unassigned DNA; note = donor_0cfd883
  misc_feature 1..24: note = RE
  misc_feature 25: note = Core
  misc_feature 26..50: note = LE
ttgcaaacgggatgcgttcatatagaatgtaatgaacgcatcccaactat

SEQ ID NO: 31005 - DNA, 50 bp, unidentified
  source 1..50: mol_type = unassigned DNA; note = donor_0d05aa7
  misc_feature 1..23: note = RE
  misc_feature 24..25: note = Core
  misc_feature 26..50: note = LE
gcactacgggcggcaaccacagaagatggggtggttgccgccctccccag

SEQ ID NO: 31006 - DNA, 50 bp, unidentified
  source 1..50: mol_type = unassigned DNA; note = donor_0d0749a
  misc_feature 1..21: note = RE
  misc_feature 22..25: note = Core
  misc_feature 26..50: note = LE
ggcttgacttcatcattgagattccctaagaatggttggcggtccgggag

SEQ ID NO: 31007 - DNA, 50 bp, unidentified
  source 1..50: mol_type = unassigned DNA; note = donor_0d074ed
  misc_feature 1..20: note = RE
  misc_feature 21..25: note = Core
  misc_feature 26..50: note = LE
cttgactactcatagctggtctcctactatctacttatcgcgttttgact

SEQ ID NO: 31008 - DNA, 50 bp, unidentified; identical to SEQ ID NO: 30869
  source 1..50: mol_type = unassigned DNA; note = donor_0d0933b
  misc_feature 1..24: note = RE
  misc_feature 25: note = Core
  misc_feature 26..50: note = LE

SEQ ID NO: 31009 - DNA, 50 bp, unidentified
  source 1..50: mol_type = unassigned DNA; note = donor_0d0ae09
  misc_feature 1..20: note = RE
  misc_feature 21..25: note = Core
  misc_feature 26..50: note = LE
cttgacgggatcattgagagtccttaagttcgtaggtgcagttacttcgt

SEQ ID NO: 31010 - DNA, 50 bp, unidentified
  source 1..50: mol_type = unassigned DNA; note = donor_0d10b35
  misc_feature 1..23: note = RE
  misc_feature 24..25: note = Core
  misc_feature 26..50: note = LE
gccccttgacaaacatagaagcgtctgtgagtgtcgttcccggcggtcct

SEQ ID NO: 31011 - DNA, 50 bp, unidentified
  source 1..50: mol_type = unassigned DNA; note = donor_0d1c42e
  misc_feature 1..23: note = RE
  misc_feature 24..25: note = Core
  misc_feature 26..50: note = LE
agcttgacaaacaccattgggaagctctacgttctgccgcggggcagtcc

SEQ ID NO: 31012 - DNA, 50 bp, unidentified
  source 1..50: mol_type = unassigned DNA; note = donor_0d206cd
  misc_feature 1..23: note = RE
  misc_feature 24..25: note = Core
  misc_feature 26..50: note = LE
cacggacttgaccaatacggatacttgtcttatgtttatcccggctctca

SEQ ID NO: 31013 - DNA, 50 bp, unidentified
  source 1..50: mol_type = unassigned DNA; note = donor_0d21f6f
  misc_feature 1..23: note = RE
  misc_feature 24..25: note = Core
  misc_feature 26..50: note = LE
ccaaggacgttgacacagggtgtctcactggtgcaccttcggtctgtcgg

SEQ ID NO: 31014 - DNA, 50 bp, unidentified
  source 1..50: mol_type = unassigned DNA; note = donor_0d255f0
  misc_feature 1..22: note = RE
  misc_feature 23..25: note = Core
  misc_feature 26..50: note = LE
ttatttggttgggaacatagattactctaagtttgcgtaaagcaagaagc

SEQ ID NO: 31015 - DNA, 50 bp, unidentified
  source 1..50: mol_type = unassigned DNA; note = donor_0d28d7d
  misc_feature 1..23: note = RE
  misc_feature 24..25: note = Core
  misc_feature 26..50: note = LE
atacttgatttttcatagctggtcttgtatgataattccagaagcaaatt

SEQ ID NO: 31016 - DNA, 50 bp, unidentified
  source 1..50: mol_type = unassigned DNA; note = donor_0d2b80d
  misc_feature 1..24: note = RE
  misc_feature 25: note = Core
  misc_feature 26..50: note = LE
gaccctcttgacacagaggggagcctacttgttgacttgccctaggaccg

SEQ ID NO: 31017 - DNA, 50 bp, unidentified
  source 1..50: mol_type = unassigned DNA; note = donor_0d39aec
  misc_feature 1..23: note = RE
  misc_feature 24..25: note = Core
  misc_feature 26..50: note = LE
tgcaaacgggacgcgttcatatagaattaaatgaacgcgtcccaccccgt

SEQ ID NO: 31018 - DNA, 50 bp, unidentified
  source 1..50: mol_type = unassigned DNA; note = donor_0d43c03
  misc_feature 1..24: note = RE
  misc_feature 25: note = Core
  misc_feature 26..50: note = LE
tgctattgactttttatttgcaggcctgttactatatatttgggtgagga

SEQ ID NO: 31019 - DNA, 50 bp, unidentified
  source 1..50: mol_type = unassigned DNA; note = donor_0d47596
  misc_feature 1..24: note = RE
  misc_feature 25: note = Core
  misc_feature 26..50: note = LE
tgcagtcctgcaacggaccatacataatgagatggtccgccgcttgattt

SEQ ID NO: 31020 - DNA, 50 bp, unidentified
  source 1..50: mol_type = unassigned DNA; note = donor_0d5340c
  misc_feature 1..21: note = RE
  misc_feature 22..25: note = Core
  misc_feature 26..50: note = LE
ggcttgactccgtcattgagactccgtaagttgttgtgcggcccgggagg

SEQ ID NO: 31021 - DNA, 50 bp, unidentified
  source 1..50: mol_type = unassigned DNA; note = donor_0d58049
  misc_feature 1..23: note = RE
  misc_feature 24..25: note = Core
  misc_feature 26..50: note = LE
gacggtgggggtgagtccatacataattggatggactcaccctcaccgag

SEQ ID NO: 31022 - DNA, 50 bp, unidentified
  source 1..50: mol_type = unassigned DNA; note = donor_0d5b9e5
  misc_feature 1..23: note = RE
  misc_feature 24..25: note = Core
  misc_feature 26..50: note = LE
ggcttgaccatccaacatagaatcttgtatgtttgacctcggcaagcgag

SEQ ID NO: 31023 - DNA, 50 bp, unidentified
  source 1..50: mol_type = unassigned DNA; note = donor_0d6212a
  misc_feature 1..23: note = RE
  misc_feature 24..25: note = Core
  misc_feature 26..50: note = LE
gcgtcttgacaaatagagaggcaccgacttatatgtgtgtcacggcgtgg

SEQ ID NO: 31024 - DNA, 50 bp, unidentified
  source 1..50: mol_type = unassigned DNA; note = donor_0d692e7
  misc_feature 1..23: note = RE
  misc_feature 24..25: note = Core
  misc_feature 26..50: note = LE
gcaaaaaggagggggaccatagattaatgagatggtccccctccaccctg

SEQ ID NO: 31025 - DNA, 50 bp, unidentified
  source 1..50: mol_type = unassigned DNA; note = donor_0d6fd21
  misc_feature 1..23: note = RE
  misc_feature 24..25: note = Core
  misc_feature 26..50: note = LE
gtgccacggaggccgtccacatatgatggtgtggacggcccctacggcat

SEQ ID NO: 31026 - DNA, 50 bp, unidentified
  source 1..50: mol_type = unassigned DNA; note = donor_0d71c32
  misc_feature 1..23: note = RE
  misc_feature 24..25: note = Core
  misc_feature 26..50: note = LE
aggattgatttttatatagttagctggtatattgtaaatgactcatctaa

SEQ ID NO: 31027 - DNA, 50 bp, unidentified
  source 1..50: mol_type = unassigned DNA; note = donor_0d79312
  misc_feature 1..24: note = RE
  misc_feature 25: note = Core
  misc_feature 26..50: note = LE
ttgcaaacgggatgggtccatatataatggaatggacccatcccctttta

SEQ ID NO: 31028 - DNA, 50 bp, unidentified
  source 1..50: mol_type = unassigned DNA; note = donor_0d84758
  misc_feature 1..24: note = RE
  misc_feature 25: note = Core
  misc_feature 26..50: note = LE
tgcccgggcggggcaggccatacataatgagatgacctgccccgccctcc

SEQ ID NO: 31029 - DNA, 50 bp, unidentified
  source 1..50: mol_type = unassigned DNA; note = donor_0d90075
  misc_feature 1..23: note = RE
  misc_feature 24..25: note = Core
  misc_feature 26..50: note = LE
acggttgactgccaagacggtatcttgtatctttcctccggtggtgatta

SEQ ID NO: 31030 - DNA, 50 bp, unidentified
  source 1..50: mol_type = unassigned DNA; note = donor_0d94b95
  misc_feature 1..23: note = RE
  misc_feature 24..25: note = Core
  misc_feature 26..50: note = LE
aggaaatcaaaataaattgagggagcattcctgtatataaaaaaatatga

SEQ ID NO: 31031 - DNA, 50 bp, unidentified
  source 1..50: mol_type = unassigned DNA; note = donor_0d9dfec
  misc_feature 1..23: note = RE
  misc_feature 24..25: note = Core
  misc_feature 26..50: note = LE
ttatttgataattaacacagaatctcctatgtttgttgtcataatataag

SEQ ID NO: 31032 - DNA, 50 bp, unidentified
  source 1..50: mol_type = unassigned DNA; note = donor_0db045e
  misc_feature 1..23: note = RE
  misc_feature 24..25: note = Core
  misc_feature 26..50: note = LE
acacccacccgccccgatagagaagatggggtatcggggctggtcgccgc

SEQ ID NO: 31033 - DNA, 50 bp, unidentified
  source 1..50: mol_type = unassigned DNA; note = donor_0dc6e32
  misc_feature 1..24: note = RE
  misc_feature 25: note = Core
  misc_feature 26..50: note = LE
ttgcatcgcggggcgaaccatatataatggaatggttcgccccgctccct

SEQ ID NO: 31034 - DNA, 50 bp, unidentified
  source 1..50: mol_type = unassigned DNA; note = donor_0dcffd3
  misc_feature 1..24: note = RE
  misc_feature 25: note = Core
  misc_feature 26..50: note = LE
cgcaaacgggacgcgttcatatagattgaaatgaacgcgtcccaccccgt

SEQ ID NO: 31035 - DNA, 50 bp, unidentified
  source 1..50: mol_type = unassigned DNA; note = donor_0dd9b36
  misc_feature 1..22: note = RE
  misc_feature 23..25: note = Core
  misc_feature 26..50: note = LE
cttcttgatttttcttagcaggtttggtacgataaaagtgtaaatgcaag

SEQ ID NO: 31036 - DNA, 50 bp, unidentified
  source 1..50: mol_type = unassigned DNA; note = donor_0ddc166
  misc_feature 1..22: note = RE
  misc_feature 23..25: note = Core
  misc_feature 26..50: note = LE
aaatttgcttttatcttagaatgctattagatttgtattcaataacttta

SEQ ID NO: 31037 - DNA, 50 bp, unidentified
  source 1..50: mol_type = unassigned DNA; note = donor_0df55f2
  misc_feature 1..24: note = RE
  misc_feature 25: note = Core
  misc_feature 26..50: note = LE
tgacaaaccgggggcgtccatctataatggtatggacgccccctttctca

SEQ ID NO: 31038 - DNA, 50 bp, unidentified
  source 1..50: mol_type = unassigned DNA; note = donor_0dfd931
  misc_feature 1..20: note = RE
  misc_feature 21..25: note = Core
  misc_feature 26..50: note = LE
cgcggcttgacacagggctactcactggtccaccattggggtgttggagg

SEQ ID NO: 31039 - DNA, 50 bp, unidentified
  source 1..50: mol_type = unassigned DNA; note = donor_0e020ac
  misc_feature 1..23: note = RE
  misc_feature 24..25: note = Core
  misc_feature 26..50: note = LE
gcaccgcaggggccgtccacacatgatggggtggacggcccctgcaccag

SEQ ID NO: 31040 - DNA, 50 bp, unidentified; identical to SEQ ID NO: 30416
  source 1..50: mol_type = unassigned DNA; note = donor_0e033c8
  misc_feature 1..23: note = RE
  misc_feature 24..25: note = Core
  misc_feature 26..50: note = LE

SEQ ID NO: 31041 - DNA, 50 bp, unidentified
  source 1..50: mol_type = unassigned DNA; note = donor_0e05277
  misc_feature 1..23: note = RE
  misc_feature 24..25: note = Core
  misc_feature 26..50: note = LE
tttttcttgacttaacacggtagcttgtatgtaataacagtgtggtggtt

SEQ ID NO: 31042 - DNA, 50 bp, unidentified
  source 1..50: mol_type = unassigned DNA; note = donor_0e1d2b5
  misc_feature 1..24: note = RE
  misc_feature 25: note = Core
  misc_feature 26..50: note = LE
cccctgcgacacgatgacagttgcttgtatgacgggaaaagagcattgtg

SEQ ID NO: 31043 - DNA, 50 bp, unidentified
  source 1..50: mol_type = unassigned DNA; note = donor_0e1f539
  misc_feature 1..23: note = RE
  misc_feature 24..25: note = Core
  misc_feature 26..50: note = LE
ggcttgacaaggcgctatgggatctgacataactcctcgttgagggcccg

SEQ ID NO: 31044 - DNA, 50 bp, unidentified
  source 1..50: mol_type = unassigned DNA; note = donor_0e2671c
  misc_feature 1..23: note = RE
  misc_feature 24..25: note = Core
  misc_feature 26..50: note = LE
ggacttgacatcatgattgggaatccatacctttcttcctgggttgatcg

SEQ ID NO: 31045 - DNA, 50 bp, unidentified
  source 1..50: mol_type = unassigned DNA; note = donor_0e29e7c
  misc_feature 1..23: note = RE
  misc_feature 24..25: note = Core
  misc_feature 26..50: note = LE
ttacttgacttttcatagcacgtcttgtacaatagagtcgtacagggtgg

SEQ ID NO: 31046 - DNA, 50 bp, unidentified
  source 1..50: mol_type = unassigned DNA; note = donor_0e2ccd1
  misc_feature 1..24: note = RE
  misc_feature 25: note = Core
  misc_feature 26..50: note = LE
tttaagctattctttataggatggtcgtataatacatttatcaatcaaag

SEQ ID NO: 31047 - DNA, 50 bp, unidentified
  source 1..50: mol_type = unassigned DNA; note = donor_0e3cef1
  misc_feature 1..21: note = RE
  misc_feature 22..25: note = Core
  misc_feature 26..50: note = LE
atgcttgacttgaagcacagttcatcctatgcttgttgtcgttaggtttc

SEQ ID NO: 31048 - DNA, 50 bp, unidentified
  source 1..50: mol_type = unassigned DNA; note = donor_0e42b0a
  misc_feature 1..22: note = RE
  misc_feature 23..25: note = Core
  misc_feature 26..50: note = LE
tatcttgactattaatagttagtcttgtataatataaacatataatatag

SEQ ID NO: 31049 - DNA, 50 bp, unidentified; identical to SEQ ID NO: 30571
  source 1..50: mol_type = unassigned DNA; note = donor_0e45074
  misc_feature 1..23: note = RE
  misc_feature 24..25: note = Core
  misc_feature 26..50: note = LE

SEQ ID NO: 31050 - DNA, 50 bp, unidentified
  source 1..50: mol_type = unassigned DNA; note = donor_0e46636
  misc_feature 1..23: note = RE
  misc_feature 24..25: note = Core
  misc_feature 26..50: note = LE
aaggaggaattaaatatagttgactcctaccattaattcctgtataacta

SEQ ID NO: 31051 - DNA, 50 bp, unidentified
  source 1..50: mol_type = unassigned DNA; note = donor_0e4ce8d
  misc_feature 1..23: note = RE
  misc_feature 24..25: note = Core
  misc_feature 26..50: note = LE
gaatcaccgagggagtccatataagatgtatggactccctccccacaggg

SEQ ID NO: 31052 - DNA, 50 bp, unidentified
  source 1..50: mol_type = unassigned DNA; note = donor_0e5676c
  misc_feature 1..23: note = RE
  misc_feature 24..25: note = Core
  misc_feature 26..50: note = LE
gacacccctaactccagggatgtctaatgattcctgggagtaggtcatcc

SEQ ID NO: 31053 - DNA, 50 bp, unidentified
  source 1..50: mol_type = unassigned DNA; note = donor_0e586ba
  misc_feature 1..22: note = RE
  misc_feature 23..25: note = Core
  misc_feature 26..50: note = LE
taaagcccgtggattccatatacgatgtatggaatccactcatcttctgc

SEQ ID NO: 31054 - DNA, 50 bp, unidentified
  source 1..50: mol_type = unassigned DNA; note = donor_0e5f8de
  misc_feature 1..23: note = RE
  misc_feature 24..25: note = Core
  misc_feature 26..50: note = LE
gcaccaatgggggcatccatacatgatggcgtggatgcccccgaccaacc

SEQ ID NO: 31055 - DNA, 50 bp, unidentified
  source 1..50: mol_type = unassigned DNA; note = donor_0e607d4
  misc_feature 1..23: note = RE
  misc_feature 24..25: note = Core
  misc_feature 26..50: note = LE
tgacacttaagctcctgggatgtctaatgagacttatcgggtcggccatc

SEQ ID NO: 31056 - DNA, 50 bp, unidentified
  source 1..50: mol_type = unassigned DNA; note = donor_0e66052
  misc_feature 1..22: note = RE
  misc_feature 23..25: note = Core
  misc_feature 26..50: note = LE
gacggatggaatgcgattagacaacatggagtaatcgcggcgcgaccgcc

SEQ ID NO: 31057 - DNA, 50 bp, unidentified
  source 1..50: mol_type = unassigned DNA; note = donor_0e6963a
  misc_feature 1..23: note = RE
  misc_feature 24..25: note = Core
  misc_feature 26..50: note = LE
acgcttgacggtcaaaacggtatcttgtatcttggccactgtagtgatta

SEQ ID NO: 31058 - DNA, 50 bp, unidentified
  source 1..50: mol_type = unassigned DNA; note = donor_0e6f476
  misc_feature 1..23: note = RE
  misc_feature 24..25: note = Core
  misc_feature 26..50: note = LE
tgcagaaaagggggtaaccatagatgaaatggctacccccgccgcctcct

SEQ ID NO: 31059 - DNA, 50 bp, unidentified
  source 1..50: mol_type = unassigned DNA; note = donor_0e700c2
  misc_feature 1..23: note = RE
  misc_feature 24..25: note = Core
  misc_feature 26..50: note = LE
tatgcttgacttttgttagcaggttagtaccataaatagtgtaagaaagg

SEQ ID NO: 31060 - DNA, 50 bp, unidentified
  source 1..50: mol_type = unassigned DNA; note = donor_0e782cf
  misc_feature 1..22: note = RE
  misc_feature 23..25: note = Core
  misc_feature 26..50: note = LE
tgccatagggggcgtccacatatgatgatgtggacgcccctgcaccggtc

SEQ ID NO: 31061 - DNA, 50 bp, unidentified
  source 1..50: mol_type = unassigned DNA; note = donor_0e8ba70
  misc_feature 1..23: note = RE
  misc_feature 24..25: note = Core
  misc_feature 26..50: note = LE
acgcttgacgccaaagacggttacttgtatgtttagccatgaccggtgcg

SEQ ID NO: 31062 - DNA, 50 bp, unidentified
  source 1..50: mol_type = unassigned DNA; note = donor_0e8ea0b
  misc_feature 1..24: note = RE
  misc_feature 25: note = Core
  misc_feature 26..50: note = LE
tgcaaacgagggggagtccatatacaatgggatggactccccctcacctt

SEQ ID NO: 31063 - DNA, 50 bp, unidentified
  source 1..50: mol_type = unassigned DNA; note = donor_0e9c20d
  misc_feature 1..24: note = RE
  misc_feature 25: note = Core
  misc_feature 26..50: note = LE
tgcagtcgagcggcggaccatacataatgagatggtccgccggcttgatc

SEQ ID NO: 31064 - DNA, 50 bp, unidentified
  source 1..50: mol_type = unassigned DNA; note = donor_0e9ec31
  misc_feature 1..24: note = RE
  misc_feature 25: note = Core
  misc_feature 26..50: note = LE
gacgggttgacaacagaagggagcctactagaggattgtcggcaggaccg

SEQ ID NO: 31065 - DNA, 50 bp, unidentified
  source 1..50: mol_type = unassigned DNA; note = donor_0ea2bdd
  misc_feature 1..24: note = RE
  misc_feature 25: note = Core
  misc_feature 26..50: note = LE
gctgcttgacaaaatacataggggcgttaccttgttgatagctccctcac

SEQ ID NO: 31066 - DNA, 50 bp, unidentified
  source 1..50: mol_type = unassigned DNA; note = donor_0ea48f2
  misc_feature 1..23: note = RE
  misc_feature 24..25: note = Core
  misc_feature 26..50: note = LE
gcaaacgggatgcgttcatataaaaatgtgatgaacgcatcccactcttt

SEQ ID NO: 31067 - DNA, 50 bp, unidentified
  source 1..50: mol_type = unassigned DNA; note = donor_0eaf2d3
  misc_feature 1..24: note = RE
  misc_feature 25: note = Core
  misc_feature 26..50: note = LE
caccggttgacaacagaggggtgcctactagacgattccggcaggaccgg

SEQ ID NO: 31068 - DNA, 50 bp, unidentified
  source 1..50: mol_type = unassigned DNA; note = donor_0ec213a
  misc_feature 1..23: note = RE
  misc_feature 24..25: note = Core
  misc_feature 26..50: note = LE
agccggaggttgacagagggtgtctgatggctctaccttcccttcgcacg

SEQ ID NO: 31069 - DNA, 50 bp, unidentified; identical to SEQ ID NO: 30592
  source 1..50: mol_type = unassigned DNA; note = donor_0ec2872
  misc_feature 1..23: note = RE
  misc_feature 24..25: note = Core
  misc_feature 26..50: note = LE

SEQ ID NO: 31070 - DNA, 50 bp, unidentified
  source 1..50: mol_type = unassigned DNA; note = donor_0ecab58
  misc_feature 1..23: note = RE
  misc_feature 24..25: note = Core
  misc_feature 26..50: note = LE
cagggtatggagagagacggtatcttgtatctctccatgagtgctgatta

SEQ ID NO: 31071 - DNA, 50 bp, unidentified
  source 1..50: mol_type = unassigned DNA; note = donor_0ed13c7
  misc_feature 1..23: note = RE
  misc_feature 24..25: note = Core
  misc_feature 26..50: note = LE
gcgcttgacttccaagacggttgcttgtatctttggggctcggactggca

SEQ ID NO: 31072 - DNA, 50 bp, unidentified
  source 1..50: mol_type = unassigned DNA; note = donor_0edaf0f
  misc_feature 1..20: note = RE
  misc_feature 21..25: note = Core
  misc_feature 26..50: note = LE
cttgacaaacccatagccgactgctataaataagatgcgttgaatctctc

SEQ ID NO: 31073 - DNA, 50 bp, unidentified
  source 1..50: mol_type = unassigned DNA; note = donor_0edb3a2
  misc_feature 1..23: note = RE
  misc_feature 24..25: note = Core
  misc_feature 26..50: note = LE
tactgtaacatcataattttttcataaaaaaagctctaagtttgcagtcg

SEQ ID NO: 31074 - DNA, 50 bp, unidentified
  source 1..50: mol_type = unassigned DNA; note = donor_0edcd9a
  misc_feature 1..24: note = RE
  misc_feature 25: note = Core
  misc_feature 26..50: note = LE
catgtcttgacgcgagaggggagcctacttagcattggcgctagggcttg

SEQ ID NO: 31075 - DNA, 50 bp, unidentified
  source 1..50: mol_type = unassigned DNA; note = donor_0eee8a8
  misc_feature 1..24: note = RE
  misc_feature 25: note = Core
  misc_feature 26..50: note = LE
cttgccgacggggcgggccatacgtatggatggcccgccccttaccgaag

SEQ ID NO: 31076 - DNA, 50 bp, unidentified
  source 1..50: mol_type = unassigned DNA; note = donor_0eef9d7
  misc_feature 1..24: note = RE
  misc_feature 25: note = Core
  misc_feature 26..50: note = LE
cggcgccttgacataaaggggtgcctacttagaaactgttcgcaggatcg

SEQ ID NO: 31077 - DNA, 50 bp, unidentified
  source 1..50: mol_type = unassigned DNA; note = donor_0ef4e33
  misc_feature 1..23: note = RE
  misc_feature 24..25: note = Core
  misc_feature 26..50: note = LE
ctgcttgacatcctcattgggaagtcctaccttccaagcatgggtctgag

SEQ ID NO: 31078 - DNA, 50 bp, unidentified
  source 1..50: mol_type = unassigned DNA; note = donor_0ef6270
  misc_feature 1..24: note = RE
  misc_feature 25: note = Core
  misc_feature 26..50: note = LE
tgcattcagacggcggaccatacatactgagatggtccgccgcttaaacc

SEQ ID NO: 31079 - DNA, 50 bp, unidentified
  source 1..50: mol_type = unassigned DNA; note = donor_0f06cff
  misc_feature 1..23: note = RE
  misc_feature 24..25: note = Core
  misc_feature 26..50: note = LE
gcaaacggggaggagaccatatacgatgaaatggtctcctcccccctaac

SEQ ID NO: 31080 - DNA, 50 bp, unidentified
  source 1..50: mol_type = unassigned DNA; note = donor_0f070a8
  misc_feature 1..23: note = RE
  misc_feature 24..25: note = Core
  misc_feature 26..50: note = LE
cgcaggcgggggccgtccgcatatgatggggtggacggcccccgctcccg

SEQ ID NO: 31081 - DNA, 50 bp, unidentified
  source 1..50: mol_type = unassigned DNA; note = donor_0f0b090
  misc_feature 1..24: note = RE
  misc_feature 25: note = Core
  misc_feature 26..50: note = LE
aggacttgacgaacataggagcgtctgtgagtatgagcttgcggataccg

SEQ ID NO: 31082 - DNA, 50 bp, unidentified
  source 1..50: mol_type = unassigned DNA; note = donor_0f15383
  misc_feature 1..20: note = RE
  misc_feature 21..25: note = Core
  misc_feature 26..50: note = LE
tttggaatttataacagtaccttttatttttactgagaattttaaaaagg

SEQ ID NO: 31083 - DNA, 50 bp, unidentified
  source 1..50: mol_type = unassigned DNA; note = donor_0f1cc2e
  misc_feature 1..23: note = RE
  misc_feature 24..25: note = Core
  misc_feature 26..50: note = LE
actcttgacttgcaacagagaatcttgtatgtttcgttgagaggcgtgag

SEQ ID NO: 31084 - DNA, 50 bp, unidentified
  source 1..50: mol_type = unassigned DNA; note = donor_0f1f542
  misc_feature 1..24: note = RE
  misc_feature 25: note = Core
  misc_feature 26..50: note = LE
gcaaaaacgggcgtgaccatagattaatgagatggtcacccccaccctac

SEQ ID NO: 31085 - DNA, 50 bp, unidentified
  source 1..50: mol_type = unassigned DNA; note = donor_0f2101d
  misc_feature 1..23: note = RE
  misc_feature 24..25: note = Core
  misc_feature 26..50: note = LE
ggttgacgaaacccataggggcaccattaccttcttggtggccccgcaat

SEQ ID NO: 31086 - DNA, 50 bp, unidentified; identical to SEQ ID NO: 30488
  source 1..50: mol_type = unassigned DNA; note = donor_0f211b9
  misc_feature 1..24: note = RE
  misc_feature 25: note = Core
  misc_feature 26..50: note = LE

SEQ ID NO: 31087 - DNA, 50 bp, unidentified
  source 1..50: mol_type = unassigned DNA; note = donor_0f23c64
  misc_feature 1..23: note = RE
  misc_feature 24..25: note = Core
  misc_feature 26..50: note = LE
aaaacttgatttttcttagcaggttggtactctataagtgtagatacaaa

SEQ ID NO: 31088 - DNA, 50 bp, unidentified
  source 1..50: mol_type = unassigned DNA; note = donor_0f27e0d
  misc_feature 1..24: note = RE
  misc_feature 25: note = Core
  misc_feature 26..50: note = LE
acggcttgacaaaccacataggggcgttactttcttcgtgacccgttcag

SEQ ID NO: 31089 - DNA, 50 bp, unidentified
  source 1..50: mol_type = unassigned DNA; note = donor_0f29ec5
  misc_feature 1..24: note = RE
  misc_feature 25: note = Core
  misc_feature 26..50: note = LE
gactttcggggggaagcccttgtagaataaaagggacttccccgtcccga

SEQ ID NO: 31090 - DNA, 50 bp, unidentified
  source 1..50: mol_type = unassigned DNA; note = donor_0f2a312
  misc_feature 1..23: note = RE
  misc_feature 24..25: note = Core
  misc_feature 26..50: note = LE
gcgtcttaaggggcgtccacagatgatggggtggacgccccccggcggca

SEQ ID NO: 31091 - DNA, 50 bp, unidentified
  source 1..50: mol_type = unassigned DNA; note = donor_0f2f54d
  misc_feature 1..24: note = RE
  misc_feature 25: note = Core
  misc_feature 26..50: note = LE
ggcacggacggggcggaccatacataatggaatggtccgccccgtcctcc

SEQ ID NO: 31092 - DNA, 50 bp, unidentified
  source 1..50: mol_type = unassigned DNA; note = donor_0f2ffa4
  misc_feature 1..24: note = RE
  misc_feature 25: note = Core
  misc_feature 26..50: note = LE
gccgcttgacatccataggagcatcagtgatgatggtgtaggcgagtccc

SEQ ID NO: 31093 - DNA, 50 bp, unidentified
  source 1..50: mol_type = unassigned DNA; note = donor_0f34037
  misc_feature 1..22: note = RE
  misc_feature 23..25: note = Core
  misc_feature 26..50: note = LE
caaaccgggaggcgtccatataagatggtatggacgcctccctcccgccg

SEQ ID NO: 31094 - DNA, 50 bp, unidentified
  source 1..50: mol_type = unassigned DNA; note = donor_0f3f9e9
  misc_feature 1..24: note = RE
  misc_feature 25: note = Core
  misc_feature 26..50: note = LE
tgcagaagatgggctgaccatacataatgggatggtcagcccgcctagcc

SEQ ID NO: 31095 - DNA, 50 bp, unidentified
  source 1..50: mol_type = unassigned DNA; note = donor_0f479dc
  misc_feature 1..24: note = RE
  misc_feature 25: note = Core
  misc_feature 26..50: note = LE
ttgcaaaggggaggagtccatatacaatgggatggacgcctccccgccct

SEQ ID NO: 31096 - DNA, 50 bp, unidentified
  source 1..50: mol_type = unassigned DNA; note = donor_0f4c6a2
  misc_feature 1..23: note = RE
  misc_feature 24..25: note = Core
  misc_feature 26..50: note = LE
tctgttgacttttatatagttagctggtatattgttgaagactcataaaa

SEQ ID NO: 31097 - DNA, 50 bp, unidentified
  source 1..50: mol_type = unassigned DNA; note = donor_0f4c85c
  misc_feature 1..23: note = RE
  misc_feature 24..25: note = Core
  misc_feature 26..50: note = LE
gtacggcggggtagacatagaatcttgtatgtcgtaaggtgagtctgtcg

SEQ ID NO: 31098 - DNA, 50 bp, unidentified; identical to SEQ ID NO: 30885
  source 1..50: mol_type = unassigned DNA; note = donor_0f4e6f2
  misc_feature 1..23: note = RE
  misc_feature 24..25: note = Core
  misc_feature 26..50: note = LE

SEQ ID NO: 31099 - DNA, 50 bp, unidentified
  source 1..50: mol_type = unassigned DNA; note = donor_0f5a307
  misc_feature 1..24: note = RE
  misc_feature 25: note = Core
  misc_feature 26..50: note = LE
tgctacgcaccgccggaccatacataatgggatggtccggccgtgctcct

SEQ ID NO: 31100 - DNA, 50 bp, unidentified
  source 1..50: mol_type = unassigned DNA; note = donor_0f5ac62
  misc_feature 1..24: note = RE
  misc_feature 25: note = Core
  misc_feature 26..50: note = LE
tgcaacgacggggcggaccatacataatgggatggtccgccccgtctccc

SEQ ID NO: 31101 - DNA, 50 bp, unidentified
  source 1..50: mol_type = unassigned DNA; note = donor_0f5bd80
  misc_feature 1..24: note = RE
  misc_feature 25: note = Core
  misc_feature 26..50: note = LE
gcttgacgaacccatagggacacccaccccccggttacctttttgatcgt

SEQ ID NO: 31102 - DNA, 50 bp, unidentified
  source 1..50: mol_type = unassigned DNA; note = donor_0f5bef4
  misc_feature 1..22: note = RE
  misc_feature 23..25: note = Core
  misc_feature 26..50: note = LE
gctgcttgtttttgtcttagaatacctttagattagcatccagatttatt

SEQ ID NO: 31103 - DNA, 50 bp, unidentified
  source 1..50: mol_type = unassigned DNA; note = donor_0f65323
  misc_feature 1..23: note = RE
  misc_feature 24..25: note = Core
  misc_feature 26..50: note = LE
tgcaaaaacgggggcgatcatagatgagatggtcgcccccacccctgagc

SEQ ID NO: 31104 - DNA, 50 bp, unidentified
  source 1..50: mol_type = unassigned DNA; note = donor_0f778f4
  misc_feature 1..21: note = RE
  misc_feature 22..25: note = Core
  misc_feature 26..50: note = LE
cggcggcttgacacagggcaactcactggtccaccctccttgcgtccggg

SEQ ID NO: 31105 - DNA, 50 bp, unidentified
  source 1..50: mol_type = unassigned DNA; note = donor_0f79fc0
  misc_feature 1..23: note = RE
  misc_feature 24..25: note = Core
  misc_feature 26..50: note = LE
tgctaaccgggccgttccacatatgatggtgtggaacggcccttcgaacc

SEQ ID NO: 31106 - DNA, 50 bp, unidentified
  source 1..50: mol_type = unassigned DNA; note = donor_0f7f827
  misc_feature 1..23: note = RE
  misc_feature 24..25: note = Core
  misc_feature 26..50: note = LE
atacttgacttttcatagctagtcttgtatgatgtttatagaagcaaaaa

SEQ ID NO: 31107 - DNA, 50 bp, unidentified
  source 1..50: mol_type = unassigned DNA; note = donor_0f87743
  misc_feature 1..23: note = RE
  misc_feature 24..25: note = Core
  misc_feature 26..50: note = LE
tattgacaggtttaatacatatcagacataatgtattaaacctgtcctac

SEQ ID NO: 31108 - DNA, 50 bp, unidentified
  source 1..50: mol_type = unassigned DNA; note = donor_0f88dff
  misc_feature 1..23: note = RE
  misc_feature 24..25: note = Core
  misc_feature 26..50: note = LE
cggcttgactttcaagacagttgcttgtatctagatctcaaggaagattg

SEQ ID NO: 31109 - DNA, 50 bp, unidentified
  source 1..50: mol_type = unassigned DNA; note = donor_0f9da7a
  misc_feature 1..23: note = RE
  misc_feature 24..25: note = Core
  misc_feature 26..50: note = LE
gctttctgggagacgtccatataagatggtatggacgtctccaccctaca

SEQ ID NO: 31110 - DNA, 50 bp, unidentified
  source 1..50: mol_type = unassigned DNA; note = donor_0fa85e7
  misc_feature 1..24: note = RE
  misc_feature 25: note = Core
  misc_feature 26..50: note = LE
ctcgcttgacgaaagacatagaggcgtaatctttttcgcggtcctgcaag

SEQ ID NO: 31111 - DNA, 50 bp, unidentified
  source 1..50: mol_type = unassigned DNA; note = donor_0fb594a
  misc_feature 1..23: note = RE
  misc_feature 24..25: note = Core
  misc_feature 26..50: note = LE
ttgacaccatggcccattacagaagatacggtaatgggccgcagctccgg

SEQ ID NO: 31112 - DNA, 50 bp, unidentified
  source 1..50: mol_type = unassigned DNA; note = donor_0fd0470
  misc_feature 1..24: note = RE
  misc_feature 25: note = Core
  misc_feature 26..50: note = LE
aggtgtcttgacacagaggggagcctacttgttccattgacccaggaccg

SEQ ID NO: 31113 - DNA, 50 bp, unidentified
  source 1..50: mol_type = unassigned DNA; note = donor_0fd487a
  misc_feature 1..21: note = RE
  misc_feature 22..25: note = Core
  misc_feature 26..50: note = LE
tgacgaaatccatagggacacccccgttacctttctcgcggttcccggtt

SEQ ID NO: 31114 - DNA, 50 bp, unidentified
  source 1..50: mol_type = unassigned DNA; note = donor_0fdc33b
  misc_feature 1..24: note = RE
  misc_feature 25: note = Core
  misc_feature 26..50: note = LE
tggcaaaccgggggcgtccatgtacaatgggatggacgcccccccttgaa

SEQ ID NO: 31115 - DNA, 50 bp, unidentified
  source 1..50: mol_type = unassigned DNA; note = donor_0fe3303
  misc_feature 1..23: note = RE
  misc_feature 24..25: note = Core
  misc_feature 26..50: note = LE
gcaggtgaatttatgatagttgactcctaccatgaattagtatatagaat

SEQ ID NO: 31116 - DNA, 50 bp, unidentified
  source 1..50: mol_type = unassigned DNA; note = donor_0ff8474
  misc_feature 1..23: note = RE
  misc_feature 24..25: note = Core
  misc_feature 26..50: note = LE
gcaggcaggaggccgtccacacatgttggggtggacggcctccgaacggc

SEQ ID NO: 31117 - DNA, 50 bp, unidentified
  source 1..50: mol_type = unassigned DNA; note = donor_0ff8f05
  misc_feature 1..23: note = RE
  misc_feature 24..25: note = Core
  misc_feature 26..50: note = LE
acagctacgcccgttttcatagaagatgtaatgaaaagaaaaaaggcgtg

SEQ ID NO: 31118 - DNA, 50 bp, unidentified
  source 1..50: mol_type = unassigned DNA; note = donor_0ffe726
  misc_feature 1..21: note = RE
  misc_feature 22..25: note = Core
  misc_feature 26..50: note = LE
ttgacgaagaccatagggacaccccgttaccttcttcgtgtccccgatga

SEQ ID NO: 31119 - DNA, 50 bp, unidentified
  source 1..50: mol_type = unassigned DNA; note = donor_101866f
  misc_feature 1..20: note = RE
  misc_feature 21..25: note = Core
  misc_feature 26..50: note = LE
cttgacaggatcattgagagtccttaagttcgtaggtgcagttacttcgt

SEQ ID NO: 31120 - DNA, 50 bp, unidentified
  source 1..50: mol_type = unassigned DNA; note = donor_101c82b
  misc_feature 1..23: note = RE
  misc_feature 24..25: note = Core
  misc_feature 26..50: note = LE
acttgacaatctaagaggaatgttctaccatcggattctgtgcagtgacg

SEQ ID NO: 31121 - DNA, 50 bp, unidentified
  source 1..50: mol_type = unassigned DNA; note = donor_102077a
  misc_feature 1..22: note = RE
  misc_feature 23..25: note = Core
  misc_feature 26..50: note = LE
tttattgacaatctattagctggttcgtattataaggtcagccagagaga

SEQ ID NO: 31122 - DNA, 50 bp, unidentified
  source 1..50: mol_type = unassigned DNA; note = donor_10289b5
  misc_feature 1..23: note = RE
  misc_feature 24..25: note = Core
  misc_feature 26..50: note = LE
tgactagattggaagtccctctaaagaatgcaaagggacttcccactttc

SEQ ID NO: 31123 - DNA, 50 bp, unidentified
  source 1..50: mol_type = unassigned DNA; note = donor_1034807
  misc_feature 1..22: note = RE
  misc_feature 23..25: note = Core
  misc_feature 26..50: note = LE
ctgcttgacaaacattagcaagattcttaatatatgagtagaggctttca

SEQ ID NO: 31124 - DNA, 50 bp, unidentified
  source 1..50: mol_type = unassigned DNA; note = donor_1037342
  misc_feature 1..22: note = RE
  misc_feature 23..25: note = Core
  misc_feature 26..50: note = LE
caatacgggaggagaccatatatgatgtgatggtctcctcccaatacggc

SEQ ID NO: 31125 - DNA, 50 bp, unidentified
  source 1..50: mol_type = unassigned DNA; note = donor_103bbc3
  misc_feature 1..23: note = RE
  misc_feature 24..25: note = Core
  misc_feature 26..50: note = LE
aatcttgactccgaagagagaatcttgtatgtttcgttcagaagcgtgac

SEQ ID NO: 31126 - DNA, 50 bp, unidentified
  source 1..50: mol_type = unassigned DNA; note = donor_1041cb3
  misc_feature 1..22: note = RE
  misc_feature 23..25: note = Core
  misc_feature 26..50: note = LE
aatattgacaaactattggctggttcgtattataaggtcagccagatatt

SEQ ID NO: 31127 - DNA, 50 bp, unidentified
  source 1..50: mol_type = unassigned DNA; note = donor_1050eee
  misc_feature 1..20: note = RE
  misc_feature 21..25: note = Core
  misc_feature 26..50: note = LE
cttgacaaatccatagccgactgctataaataaaattctcccaaccatca

SEQ ID NO: 31128 - DNA, 50 bp, unidentified
  source 1..50: mol_type = unassigned DNA; note = donor_1052410
  misc_feature 1..23: note = RE
  misc_feature 24..25: note = Core
  misc_feature 26..50: note = LE
gcattaaccggggcgtccatatatgatgtgatggacgcccctccccattg

SEQ ID NO: 31129 - DNA, 50 bp, unidentified
  source 1..50: mol_type = unassigned DNA; note = donor_1056886
  misc_feature 1..23: note = RE
  misc_feature 24..25: note = Core
  misc_feature 26..50: note = LE
gaccgtggaggcgagtccatacataattggatggactcgcccacgccgag

SEQ ID NO: 31130 - DNA, 50 bp, unidentified
  source 1..50: mol_type = unassigned DNA; note = donor_105ef4c
  misc_feature 1..23: note = RE
  misc_feature 24..25: note = Core
  misc_feature 26..50: note = LE
aagctttcgcatgaacacagttgcctgtgtgttgttccgatggtatggtt

SEQ ID NO: 31131 - DNA, 50 bp, unidentified
  source 1..50: mol_type = unassigned DNA; note = donor_10610fb
  misc_feature 1..21: note = RE
  misc_feature 22..25: note = Core
  misc_feature 26..50: note = LE
ccaagggttgacacaggatgtctcactggactaccctccctcgggagatg

SEQ ID NO: 31132 - DNA, 50 bp, unidentified
  source 1..50: mol_type = unassigned DNA; note = donor_1061a2a
  misc_feature 1..23: note = RE
  misc_feature 24..25: note = Core
  misc_feature 26..50: note = LE
ccccttgcaatccaagagagaatcttgtatctttcgcaacgaggcgtaac

SEQ ID NO: 31133 - DNA, 50 bp, unidentified
  source 1..50: mol_type = unassigned DNA; note = donor_106a811
  misc_feature 1..23: note = RE
  misc_feature 24..25: note = Core
  misc_feature 26..50: note = LE
cattccaaacctgaacacagttgcctgtgtgtttgcaatgtgtcaggatg

SEQ ID NO: 31134 - DNA, 50 bp, unidentified
  source 1..50: mol_type = unassigned DNA; note = donor_107f99a
  misc_feature 1..21: note = RE
  misc_feature 22..25: note = Core
  misc_feature 26..50: note = LE
ggcttgactcagtcattgagactccgtaagttggtgggtggcccgggagg

SEQ ID NO: 31135 - DNA, 50 bp, unidentified
  source 1..50: mol_type = unassigned DNA; note = donor_1080728
  misc_feature 1..22: note = RE
  misc_feature 23..25: note = Core
  misc_feature 26..50: note = LE
tattgacattcatatagttagtctcgtataatgaacatgtagtccattat

SEQ ID NO: 31136 - DNA, 50 bp, unidentified
  source 1..50: mol_type = unassigned DNA; note = donor_1083a50
  misc_feature 1..23: note = RE
  misc_feature 24..25: note = Core
  misc_feature 26..50: note = LE
ccatgcaggagccatccacacaggatggggtggatggctccggctccccc

SEQ ID NO: 31137 - DNA, 50 bp, unidentified
  source 1..50: mol_type = unassigned DNA; note = donor_108bbe8
  misc_feature 1..24: note = RE
  misc_feature 25: note = Core
  misc_feature 26..50: note = LE
cttgcagacggggcgggccatacgtatgggatggcccgcccctctcgaag

SEQ ID NO: 31138 - DNA, 50 bp, unidentified; identical to SEQ ID NO: 30743
  source 1..50: mol_type = unassigned DNA; note = donor_1091333
  misc_feature 1..24: note = RE
  misc_feature 25: note = Core
  misc_feature 26..50: note = LE

SEQ ID NO: 31139 - DNA, 50 bp, unidentified; identical to SEQ ID NO: 30770
  source 1..50: mol_type = unassigned DNA; note = donor_1093e9a
  misc_feature 1..24: note = RE
  misc_feature 25: note = Core
  misc_feature 26..50: note = LE

SEQ ID NO: 31140 - DNA, 50 bp, unidentified
  source 1..50: mol_type = unassigned DNA; note = donor_10a6249
  misc_feature 1..21: note = RE
  misc_feature 22..25: note = Core
  misc_feature 26..50: note = LE
tattgacacaagttagcaggtttgctataatggtgttggttctgaaagtt

SEQ ID NO: 31141 - DNA, 50 bp, unidentified
  source 1..50: mol_type = unassigned DNA; note = donor_10bba37
  misc_feature 1..23: note = RE
  misc_feature 24..25: note = Core
  misc_feature 26..50: note = LE
cggacttggctttgtcatagaaatcctttagatttgttattggctaaatt

SEQ ID NO: 31142 - DNA, 50 bp, unidentified
  source 1..50: mol_type = unassigned DNA; note = donor_10c031d
  misc_feature 1..23: note = RE
  misc_feature 24..25: note = Core
  misc_feature 26..50: note = LE
tcaaagcctgaacaacacagttgcctgtgtgtcgagcttgtggttagatg

SEQ ID NO: 31143 - DNA, 50 bp, unidentified
  source 1..50: mol_type = unassigned DNA; note = donor_10c2b37
  misc_feature 1..22: note = RE
  misc_feature 23..25: note = Core
  misc_feature 26..50: note = LE
gggttgacacttaatagttaatcttgtattataaagtagtagttattaaa

SEQ ID NO: 31144 - DNA, 50 bp, unidentified
  source 1..50: mol_type = unassigned DNA; note = donor_10c47f3
  misc_feature 1..23: note = RE
  misc_feature 24..25: note = Core
  misc_feature 26..50: note = LE
ttgcgatccgggagcgtccatatataatgagatggacgctccagatttta

SEQ ID NO: 31145 - DNA, 50 bp, unidentified
  source 1..50: mol_type = unassigned DNA; note = donor_10cdb04
  misc_feature 1..24: note = RE
  misc_feature 25: note = Core
  misc_feature 26..50: note = LE
accttgaaggtttattttcaagcttataattcatccctttcgcttcgctc

SEQ ID NO: 31146 - DNA, 50 bp, unidentified
  source 1..50: mol_type = unassigned DNA; note = donor_10ce261
  misc_feature 1..24: note = RE
  misc_feature 25: note = Core
  misc_feature 26..50: note = LE
aggcctcttgacacagaagggagcctacttgtttcattgacctcaggacg

SEQ ID NO: 31147 - DNA, 50 bp, unidentified
  source 1..50: mol_type = unassigned DNA; note = donor_10d93eb
  misc_feature 1..23: note = RE
  misc_feature 24..25: note = Core
  misc_feature 26..50: note = LE
tgctaatcaggccgttccacatatgatggtgtggaacggcccttcgcacc

SEQ ID NO: 31148 - DNA, 50 bp, unidentified
  source 1..50: mol_type = unassigned DNA; note = donor_10d95d6
  misc_feature 1..24: note = RE
  misc_feature 25: note = Core
  misc_feature 26..50: note = LE
ttacttgttttttaccacagtacttcttaagtttacaatctattaatttt

SEQ ID NO: 31149 - DNA, 50 bp, unidentified
  source 1..50: mol_type = unassigned DNA; note = donor_10d9fc3
  misc_feature 1..23: note = RE
  misc_feature 24..25: note = Core
  misc_feature 26..50: note = LE
gcatccacgggggcgtccacacatgatggggtggacgccccctcgacggc

SEQ ID NO: 31150 - DNA, 50 bp, unidentified
  source 1..50: mol_type = unassigned DNA; note = donor_10de82c
  misc_feature 1..23: note = RE
  misc_feature 24..25: note = Core
  misc_feature 26..50: note = LE
ttgcaaacggggcgggccatacgttatggatggcccgcccctcccgccgg

SEQ ID NO: 31151 - DNA, 50 bp, unidentified
  source 1..50: mol_type = unassigned DNA; note = donor_10de86f
  misc_feature 1..22: note = RE
  misc_feature 23..25: note = Core
  misc_feature 26..50: note = LE
aatgttgacaaactattagctggttcgtaatataaggttagccagatatt

SEQ ID NO: 31152 - DNA, 50 bp, unidentified
  source 1..50: mol_type = unassigned DNA; note = donor_10e4d01
  misc_feature 1..24: note = RE
  misc_feature 25: note = Core
  misc_feature 26..50: note = LE
accttgacaagatattagctggtttcgtattatgaggtcagccagtacaa

SEQ ID NO: 31153 - DNA, 50 bp, unidentified
  source 1..50: mol_type = unassigned DNA; note = donor_10f31e0
  misc_feature 1..24: note = RE
  misc_feature 25: note = Core
  misc_feature 26..50: note = LE
tgccaacggggtgccgtccacacatgatgctgtggacggcatccatcacc

SEQ ID NO: 31154 - DNA, 50 bp, unidentified
  source 1..50: mol_type = unassigned DNA; note = donor_10fe246
  misc_feature 1..23: note = RE
  misc_feature 24..25: note = Core
  misc_feature 26..50: note = LE
ggtcttgacttttaatagttagtcttgtattatagagtagtagtttttag

SEQ ID NO: 31155 - DNA, 50 bp, unidentified
  source 1..50: mol_type = unassigned DNA; note = donor_11016dd
  misc_feature 1..23: note = RE
  misc_feature 24..25: note = Core
  misc_feature 26..50: note = LE
ggcttgacagacggcattaggaatccctacgttttcctgtgggaggcggt

SEQ ID NO: 31156 - DNA, 50 bp, unidentified
  source 1..50: mol_type = unassigned DNA; note = donor_110b84e
  misc_feature 1..21: note = RE
  misc_feature 22..25: note = Core
  misc_feature 26..50: note = LE
ctattgactttttatagttagtcacgtataattaaaaccatcacgaaagg

SEQ ID NO: 31157 - DNA, 50 bp, unidentified
  source 1..50: mol_type = unassigned DNA; note = donor_110ee93
  misc_feature 1..23: note = RE
  misc_feature 24..25: note = Core
  misc_feature 26..50: note = LE
gcaccacgggcggcaaccacagaagatggagtggttgccgccctcccctg

SEQ ID NO: 31158 - DNA, 50 bp, unidentified
  source 1..50: mol_type = unassigned DNA; note = donor_11121a3
  misc_feature 1..24: note = RE
  misc_feature 25: note = Core
  misc_feature 26..50: note = LE
ttgactttctttaatagttagtcttactattatataaagtcatagtcttt

SEQ ID NO: 31159 - DNA, 50 bp, unidentified
  source 1..50: mol_type = unassigned DNA; note = donor_111c272
  misc_feature 1..23: note = RE
  misc_feature 24..25: note = Core
  misc_feature 26..50: note = LE
agacttgacttttaatagttagtctcgtattatatagtcatagcttttct

SEQ ID NO: 31160 - DNA, 50 bp, unidentified
  source 1..50: mol_type = unassigned DNA; note = donor_111fd91
  misc_feature 1..22: note = RE
  misc_feature 23..25: note = Core
  misc_feature 26..50: note = LE
cacattgggggacatccacacatgatggggtggatgcccccatcccggcg

SEQ ID NO: 31161 - DNA, 50 bp, unidentified
  source 1..50: mol_type = unassigned DNA; note = donor_112135c
  misc_feature 1..24: note = RE
  misc_feature 25: note = Core
  misc_feature 26..50: note = LE
tgcggcaaggcggcggaccatacataatgggatggtccgccgctctgttc

SEQ ID NO: 31162 - DNA, 50 bp, unidentified; identical to SEQ ID NO: 30770
  source 1..50: mol_type = unassigned DNA; note = donor_113f5a2
  misc_feature 1..24: note = RE
  misc_feature 25: note = Core
  misc_feature 26..50: note = LE

SEQ ID NO: 31163 - DNA, 50 bp, unidentified
  source 1..50: mol_type = unassigned DNA; note = donor_113f8e3
  misc_feature 1..24: note = RE
  misc_feature 25: note = Core
  misc_feature 26..50: note = LE
tggttatatcaatgtcttagaatacctttggactaaatgaatataaaatt

SEQ ID NO: 31164 - DNA, 50 bp, unidentified; identical to SEQ ID NO: 30868
  source 1..50: mol_type = unassigned DNA; note = donor_113ffbd
  misc_feature 1..21: note = RE
  misc_feature 22..25: note = Core
  misc_feature 26..50: note = LE

SEQ ID NO: 31165 - DNA, 50 bp, unidentified
  source 1..50: mol_type = unassigned DNA; note = donor_114901e
  misc_feature 1..23: note = RE
  misc_feature 24..25: note = Core
  misc_feature 26..50: note = LE
cgcaggcgagggccgtccacatatgatggggtggacggcccccgctgccg

SEQ ID NO: 31166 - DNA, 50 bp, unidentified
  source 1..50: mol_type = unassigned DNA; note = donor_114ad43
  misc_feature 1..23: note = RE
  misc_feature 24..25: note = Core
  misc_feature 26..50: note = LE
gctttcagagggccgtccatacatgatggtgtggacggcccccacaaatc

SEQ ID NO: 31167 - DNA, 50 bp, unidentified
  source 1..50: mol_type = unassigned DNA; note = donor_114f071
  misc_feature 1..23: note = RE
  misc_feature 24..25: note = Core
  misc_feature 26..50: note = LE
gcactatcggccgctattagacgacatggggtaatcgcgggagcgagtcg

SEQ ID NO: 31168 - DNA, 50 bp, unidentified
  source 1..50: mol_type = unassigned DNA; note = donor_11598ae
  misc_feature 1..23: note = RE
  misc_feature 24..25: note = Core
  misc_feature 26..50: note = LE
cccttgacaagaacatggggacaccttaccttgctcgtgagccctgaggg

SEQ ID NO: 31169 - DNA, 50 bp, unidentified
  source 1..50: mol_type = unassigned DNA; note = donor_115ca27
  misc_feature 1..23: note = RE
  misc_feature 24..25: note = Core
  misc_feature 26..50: note = LE
ttcgcccttgaccaagacggatacttgtcttatgagaattcccggctcct

SEQ ID NO: 31170 - DNA, 50 bp, unidentified
  source 1..50: mol_type = unassigned DNA; note = donor_116103d
  misc_feature 1..23: note = RE
  misc_feature 24..25: note = Core
  misc_feature 26..50: note = LE
ctgcttgacatcccgattaggaatccctaccttgttgaccgggatgagcg

SEQ ID NO: 31171 - DNA, 50 bp, unidentified
  source 1..50: mol_type = unassigned DNA; note = donor_117bf5b
  misc_feature 1..24: note = RE
  misc_feature 25: note = Core
  misc_feature 26..50: note = LE
ttacttgttttttaccacagtacttcttaagtttgttttttgttaaatta

SEQ ID NO: 31172 - DNA, 50 bp, unidentified
  source 1..50: mol_type = unassigned DNA; note = donor_1185ef0
  misc_feature 1..23: note = RE
  misc_feature 24..25: note = Core
  misc_feature 26..50: note = LE
tcccttgactttttatagctggtctcgtataatagatttacggtgttttt

SEQ ID NO: 31173 - DNA, 50 bp, unidentified
  source 1..50: mol_type = unassigned DNA; note = donor_1186ff5
  misc_feature 1..23: note = RE
  misc_feature 24..25: note = Core
  misc_feature 26..50: note = LE
ctatgcaggagccatccacacaagatggggtggatggctcctgctccacc

SEQ ID NO: 31174 - DNA, 50 bp, unidentified
  source 1..50: mol_type = unassigned DNA; note = donor_1188495
  misc_feature 1..23: note = RE
  misc_feature 24..25: note = Core
  misc_feature 26..50: note = LE
gttgacagaggggagtccacataagataattggactcccctcaccctcac

SEQ ID NO: 31175 - DNA, 50 bp, unidentified
  source 1..50: mol_type = unassigned DNA; note = donor_118978e
  misc_feature 1..24: note = RE
  misc_feature 25: note = Core
  misc_feature 26..50: note = LE
attacttgaattttatatagttagcctggtatattgtaattgactcttct

SEQ ID NO: 31176 - DNA, 50 bp, unidentified; identical to SEQ ID NO: 30867
  source 1..50: mol_type = unassigned DNA; note = donor_118d4d3
  misc_feature 1..24: note = RE
  misc_feature 25: note = Core
  misc_feature 26..50: note = LE

SEQ ID NO: 31177 - DNA, 50 bp, unidentified
  source 1..50: mol_type = unassigned DNA; note = donor_118fc42
  misc_feature 1..22: note = RE
  misc_feature 23..25: note = Core
  misc_feature 26..50: note = LE
ctaagtaggagccatccacacaggatgggatggatggctcctgcgcccat

SEQ ID NO: 31178 - DNA, 50 bp, unidentified
  source 1..50: mol_type = unassigned DNA; note = donor_1193a2d
  misc_feature 1..24: note = RE
  misc_feature 25: note = Core
  misc_feature 26..50: note = LE
tggcaaatagggggcgaccatgtataatgggatggtcgccccctccctaa

SEQ ID NO: 31179 - DNA, 50 bp, unidentified
  source 1..50: mol_type = unassigned DNA; note = donor_11971aa
  misc_feature 1..21: note = RE
  misc_feature 22..25: note = Core
  misc_feature 26..50: note = LE
ttgacgaaacagataggggcaccccgttacctttctcgtggccccgcaac

SEQ ID NO: 31180 - DNA, 50 bp, unidentified
  source 1..50: mol_type = unassigned DNA; note = donor_11981b8
  misc_feature 1..23: note = RE
  misc_feature 24..25: note = Core
  misc_feature 26..50: note = LE
cagcttgatccggaccatagaatcttgtatggtgtgggtgcgccttccac

SEQ ID NO: 31181 - DNA, 50 bp, unidentified
  source 1..50: mol_type = unassigned DNA; note = donor_11a23e2
  misc_feature 1..23: note = RE
  misc_feature 24..25: note = Core
  misc_feature 26..50: note = LE
gtgattgatgggagagatggtatcttgtatctctcccgggtaatgggatt

SEQ ID NO: 31182 - DNA, 50 bp, unidentified
  source 1..50: mol_type = unassigned DNA; note = donor_11b8c3a
  misc_feature 1..24: note = RE
  misc_feature 25: note = Core
  misc_feature 26..50: note = LE
actacttgacgaacatagaagcatctgtgagagtgagctccgtgtcgtct

SEQ ID NO: 31183 - DNA, 50 bp, unidentified
  source 1..50: mol_type = unassigned DNA; note = donor_11cc11f
  misc_feature 1..23: note = RE
  misc_feature 24..25: note = Core
  misc_feature 26..50: note = LE
gacgaccccatcgcaattagacaacatggggtaattgcgggagcgaagcc

SEQ ID NO: 31184 - DNA, 50 bp, unidentified
  source 1..50: mol_type = unassigned DNA; note = donor_11d4d6a
  misc_feature 1..23: note = RE
  misc_feature 24..25: note = Core
  misc_feature 26..50: note = LE
tcccttgtggggagacatagaatcttgtatgtttaccccggcaagtcaaa

SEQ ID NO: 31185 - DNA, 50 bp, unidentified
  source 1..50: mol_type = unassigned DNA; note = donor_11df1f9
  misc_feature 1..24: note = RE
  misc_feature 25: note = Core
  misc_feature 26..50: note = LE
tgacaaaccgggggcgtccatctataatggtatggacgcccccttcccga

SEQ ID NO: 31186 - DNA, 50 bp, unidentified
  source 1..50: mol_type = unassigned DNA; note = donor_11e375a
  misc_feature 1..23: note = RE
  misc_feature 24..25: note = Core
  misc_feature 26..50: note = LE
gcatccgtgggggcgtccacacacgatggggtggacgccccccgacggca

SEQ ID NO: 31187 - DNA, 50 bp, unidentified
  source 1..50: mol_type = unassigned DNA; note = donor_11ef5aa
  misc_feature 1..24: note = RE
  misc_feature 25: note = Core
  misc_feature 26..50: note = LE
tgcaccgcgcggccgggccatacataatgggatggcccggccgtgctcag

SEQ ID NO: 31188 - DNA, 50 bp, unidentified
  source 1..50: mol_type = unassigned DNA; note = donor_11f4746
  misc_feature 1..22: note = RE
  misc_feature 23..25: note = Core
  misc_feature 26..50: note = LE
tttatttggattttaatatagttcggtcgtacatttgcacagttcaatat

SEQ ID NO: 31189 - DNA, 50 bp, unidentified
  source 1..50: mol_type = unassigned DNA; note = donor_11f4a39
  misc_feature 1..22: note = RE
  misc_feature 23..25: note = Core
  misc_feature 26..50: note = LE
ggtattgactataactagctggtctggtatgatgtagtcatagaccaata

SEQ ID NO: 31190 - DNA, 50 bp, unidentified
  source 1..50: mol_type = unassigned DNA; note = donor_121986e
  misc_feature 1..24: note = RE
  misc_feature 25: note = Core
  misc_feature 26..50: note = LE
tgcaaaggtggggaagcccttgtagaatgaaagggacttccccgtcccga

SEQ ID NO: 31191 - DNA, 50 bp, unidentified
  source 1..50: mol_type = unassigned DNA; note = donor_121c72d
  misc_feature 1..24: note = RE
  misc_feature 25: note = Core
  misc_feature 26..50: note = LE
acgaaaaccatagaggcaccctcccgttacctttttcgtagccttggtcc

SEQ ID NO: 31192 - DNA, 50 bp, unidentified
  source 1..50: mol_type = unassigned DNA; note = donor_122be24
  misc_feature 1..24: note = RE
  misc_feature 25: note = Core
  misc_feature 26..50: note = LE
ttggcatgtaggggcgtccatgtataatggaatggacgcccctactctgt

SEQ ID NO: 31193 - DNA, 50 bp, unidentified
  source 1..50: mol_type = unassigned DNA; note = donor_1232619
  misc_feature 1..22: note = RE
  misc_feature 23..25: note = Core
  misc_feature 26..50: note = LE
attgacttttcttatagtttgtcttatattatatttaacgcagttagcta

SEQ ID NO: 31194 - DNA, 50 bp, unidentified
  source 1..50: mol_type = unassigned DNA; note = donor_123a990
  misc_feature 1..23: note = RE
  misc_feature 24..25: note = Core
  misc_feature 26..50: note = LE
gcgtcacgcggggcgtctacacatgatggggtagacgccccccaacggcc

SEQ ID NO: 31195 - DNA, 50 bp, unidentified
  source 1..50: mol_type = unassigned DNA; note = donor_123d04a
  misc_feature 1..24: note = RE
  misc_feature 25: note = Core
  misc_feature 26..50: note = LE
gaaccccttgacacaaagaggcttctgattaacactgctggtggacgttg

SEQ ID NO: 31196 - DNA, 50 bp, unidentified
  source 1..50: mol_type = unassigned DNA; note = donor_1243a01
  misc_feature 1..24: note = RE
  misc_feature 25: note = Core
  misc_feature 26..50: note = LE
cttgcggacggggcgggccatacgtatgggatggcccgcccctctctgga

SEQ ID NO: 31197 - DNA, 50 bp, unidentified
  source 1..50: mol_type = unassigned DNA; note = donor_12473d9
  misc_feature 1..23: note = RE
  misc_feature 24..25: note = Core
  misc_feature 26..50: note = LE
aaccgagcggcatccacaaaagaagatggggtggatgccgctctccccag

SEQ ID NO: 31198 - DNA, 50 bp, unidentified
  source 1..50: mol_type = unassigned DNA; note = donor_1247da0
  misc_feature 1..23: note = RE
  misc_feature 24..25: note = Core
  misc_feature 26..50: note = LE
gcaaaatgggaggagaccatatacgatgaaatggtctcctcccgatccta

SEQ ID NO: 31199 - DNA, 50 bp, unidentified
  source 1..50: mol_type = unassigned DNA; note = donor_124a0d8
  misc_feature 1..23: note = RE
  misc_feature 24..25: note = Core
  misc_feature 26..50: note = LE
gcattacgggcggcaaccacagaagatggggtggttgccgccctcccaga

SEQ ID NO: 31200 - DNA, 50 bp, unidentified
  source 1..50: mol_type = unassigned DNA; note = donor_1259b9d
  misc_feature 1..23: note = RE
  misc_feature 24..25: note = Core
  misc_feature 26..50: note = LE
gcgcttggcaaaaaccatagaatcttgtatggtaggacttgaagggagga

SEQ ID NO: 31201 - DNA, 50 bp, unidentified
  source 1..50: mol_type = unassigned DNA; note = donor_12638d1
  misc_feature 1..21: note = RE
  misc_feature 22..25: note = Core
  misc_feature 26..50: note = LE
cttgacgaatccatagggacaccccgttaccttcttcgtagccctgcaac

SEQ ID NO: 31202 - DNA, 50 bp, unidentified
  source 1..50: mol_type = unassigned DNA; note = donor_12655c8
  misc_feature 1..24: note = RE
  misc_feature 25: note = Core
  misc_feature 26..50: note = LE
ttgacaacgactgcaaagaggactctaattgagatcgaggcggatgttgc

SEQ ID NO: 31203 - DNA, 50 bp, unidentified
  source 1..50: mol_type = unassigned DNA; note = donor_126a6e0
  misc_feature 1..23: note = RE
  misc_feature 24..25: note = Core
  misc_feature 26..50: note = LE
taaaatgaggggcaacacggtatcttatatcttgatcattaccccataaa

SEQ ID NO: 31204 - DNA, 50 bp, unidentified
  source 1..50: mol_type = unassigned DNA; note = donor_126bd8f
  misc_feature 1..22: note = RE
  misc_feature 23..25: note = Core
  misc_feature 26..50: note = LE
acccgtgggcgccgtccacacatgatgcggtggacggcgcccactctgcg

SEQ ID NO: 31205 - DNA, 50 bp, unidentified
  source 1..50: mol_type = unassigned DNA; note = donor_1281f19
  misc_feature 1..23: note = RE
  misc_feature 24..25: note = Core
  misc_feature 26..50: note = LE
gcgttaatcggggcgtccacagatgatggggtggacgccccccgacggca

SEQ ID NO: 31206 - DNA, 50 bp, unidentified
  source 1..50: mol_type = unassigned DNA; note = donor_129069c
  misc_feature 1..23: note = RE
  misc_feature 24..25: note = Core
  misc_feature 26..50: note = LE
ggcggtctatttcagcacagttgcttgtgtccgcaaaatctgccagaatg

SEQ ID NO: 31207 - DNA, 50 bp, unidentified
  source 1..50: mol_type = unassigned DNA; note = donor_129ae6e
  misc_feature 1..23: note = RE
  misc_feature 24..25: note = Core
  misc_feature 26..50: note = LE
gggcttgacttttgatagttagtctcgtattataaagtagtagtagaatt

SEQ ID NO: 31208 - DNA, 50 bp, unidentified
  source 1..50: mol_type = unassigned DNA; note = donor_12a37c6
  misc_feature 1..23: note = RE
  misc_feature 24..25: note = Core
  misc_feature 26..50: note = LE
tttgttgtaaattaacacagaatctcctatgtttataaaggaagttaatt

SEQ ID NO: 31209 - DNA, 50 bp, unidentified; identical to SEQ ID NO: 30838
  source 1..50: mol_type = unassigned DNA; note = donor_12b41dd
  misc_feature 1..23: note = RE
  misc_feature 24..25: note = Core
  misc_feature 26..50: note = LE

SEQ ID NO: 31210 - DNA, 50 bp, unidentified
  source 1..50: mol_type = unassigned DNA; note = donor_12b9d36
  misc_feature 1..23: note = RE
  misc_feature 24..25: note = Core
  misc_feature 26..50: note = LE
gacagtggaggcgagtccatacataattggatggactcgcccaggccgag

SEQ ID NO: 31211 - DNA, 50 bp, unidentified
  source 1..50: mol_type = unassigned DNA; note = donor_12bf355
  misc_feature 1..24: note = RE
  misc_feature 25: note = Core
  misc_feature 26..50: note = LE
tgcggcttgacaaaaacatacgggcgttactttcttcgtagcccttgttc

SEQ ID NO: 31212 - DNA, 50 bp, unidentified
  source 1..50: mol_type = unassigned DNA; note = donor_12d66ed
  misc_feature 1..24: note = RE
  misc_feature 25: note = Core
  misc_feature 26..50: note = LE
tgccacacgggaggcgtccatataatggtatggacgcctcccccctcgct

SEQ ID NO: 31213 - DNA, 50 bp, unidentified; identical to SEQ ID NO: 31029
  source 1..50: mol_type = unassigned DNA; note = donor_12d916c
  misc_feature 1..23: note = RE
  misc_feature 24..25: note = Core
  misc_feature 26..50: note = LE

SEQ ID NO: 31214 - DNA, 50 bp, unidentified
  source 1..50: mol_type = unassigned DNA; note = donor_12dc666
  misc_feature 1..24: note = RE
  misc_feature 25: note = Core
  misc_feature 26..50: note = LE
gcaaaccgaggaggagtccatatacaatgggatggactcctcctccccta

SEQ ID NO: 31215 - DNA, 50 bp, unidentified
  source 1..50: mol_type = unassigned DNA; note = donor_12dd1fd
  misc_feature 1..23: note = RE
  misc_feature 24..25: note = Core
  misc_feature 26..50: note = LE
gccacacgggaggtgtccatgtaagatggcatggacacctcccacccgaa

SEQ ID NO: 31216 - DNA, 50 bp, unidentified
  source 1..50: mol_type = unassigned DNA; note = donor_12f56cb
  misc_feature 1..24: note = RE
  misc_feature 25: note = Core
  misc_feature 26..50: note = LE
ttgcaatgcgggacggtccatatataatgggatggtccgtcccgctcatc

SEQ ID NO: 31217 - DNA, 50 bp, unidentified
  source 1..50: mol_type = unassigned DNA; note = donor_12f6856
  misc_feature 1..23: note = RE
  misc_feature 24..25: note = Core
  misc_feature 26..50: note = LE
cccgctcgctagagacacggtatcttgtatgtcgactagcccgcatcagt

SEQ ID NO: 31218 - DNA, 50 bp, unidentified
  source 1..50: mol_type = unassigned DNA; note = donor_1308ee0
  misc_feature 1..24: note = RE
  misc_feature 25: note = Core
  misc_feature 26..50: note = LE
ttgccatcgggaggcgtccatataatggtatggacgcctcccaccttagg

SEQ ID NO: 31219 - DNA, 50 bp, unidentified
  source 1..50: mol_type = unassigned DNA; note = donor_1310de4
  misc_feature 1..23: note = RE
  misc_feature 24..25: note = Core
  misc_feature 26..50: note = LE
gttgacaagggggagtccacataagataattggactcccccagctcatag

SEQ ID NO: 31220 - DNA, 50 bp, unidentified
  source 1..50: mol_type = unassigned DNA; note = donor_1311286
  misc_feature 1..23: note = RE
  misc_feature 24..25: note = Core
  misc_feature 26..50: note = LE
atgcttgacggacgagacggtatcttgtatcttgatcgagttgatggtta

SEQ ID NO: 31221 - DNA, 50 bp, unidentified
  source 1..50: mol_type = unassigned DNA; note = donor_13182e8
  misc_feature 1..21: note = RE
  misc_feature 22..25: note = Core
  misc_feature 26..50: note = LE
ggcttgacaacatcattgagattccgtaggactgagcacggcccgggagg

SEQ ID NO: 31222 - DNA, 50 bp, unidentified
  source 1..50: mol_type = unassigned DNA; note = donor_131f871
  misc_feature 1..24: note = RE
  misc_feature 25: note = Core
  misc_feature 26..50: note = LE
tggcaaacagggggcgtccatgtacaatgggatggacgcccccgcccata

SEQ ID NO: 31223 - DNA, 50 bp, unidentified
  source 1..50: mol_type = unassigned DNA; note = donor_1320b3f
  misc_feature 1..23: note = RE
  misc_feature 24..25: note = Core
  misc_feature 26..50: note = LE
gcacccagggggccgtccacacacgttggggtggacggccccgcggcatc

SEQ ID NO: 31224 - DNA, 50 bp, unidentified
  source 1..50: mol_type = unassigned DNA; note = donor_132ab26
  misc_feature 1..24: note = RE
  misc_feature 25: note = Core
  misc_feature 26..50: note = LE
acgacttgacgaacataggagcgtctgtgagtgtgggcatgtcggtaccg

SEQ ID NO: 31225 - DNA, 50 bp, unidentified
  source 1..50: mol_type = unassigned DNA; note = donor_132b9dc
  misc_feature 1..24: note = RE
  misc_feature 25: note = Core
  misc_feature 26..50: note = LE
tgtcgttaaagggaagtccttatagaatgaaagggacttccccagctcgg

SEQ ID NO: 31226 - DNA, 50 bp, unidentified
  source 1..50: mol_type = unassigned DNA; note = donor_132ecd4
  misc_feature 1..22: note = RE
  misc_feature 23..25: note = Core
  misc_feature 26..50: note = LE
tttgacaaagtcgtttaacaggcatataaaagaagtagtcccaaataaag

SEQ ID NO: 31227 - DNA, 50 bp, unidentified
  source 1..50: mol_type = unassigned DNA; note = donor_1334c3b
  misc_feature 1..23: note = RE
  misc_feature 24..25: note = Core
  misc_feature 26..50: note = LE
tcgcttgacattcaagacagtcgcttgtatattgaaagaagtggtagacc

SEQ ID NO: 31228 - DNA, 50 bp, unidentified
  source 1..50: mol_type = unassigned DNA; note = donor_133bb8f
  misc_feature 1..22: note = RE
  misc_feature 23..25: note = Core
  misc_feature 26..50: note = LE
gatcagcgggcgcgtccagacatgatggtgtgaacggcacccgcgcggcg

SEQ ID NO: 31229 - DNA, 50 bp, unidentified
  source 1..50: mol_type = unassigned DNA; note = donor_133d057
  misc_feature 1..23: note = RE
  misc_feature 24..25: note = Core
  misc_feature 26..50: note = LE
aacaatattcaccaatacagttgcctgtgtattggctttgtgatataagg

SEQ ID NO: 31230 - DNA, 50 bp, unidentified
  source 1..50: mol_type = unassigned DNA; note = donor_133d458
  misc_feature 1..22: note = RE
  misc_feature 23..25: note = Core
  misc_feature 26..50: note = LE
ccttccgtggggcgtccacagatgatggggtggacgccccccggcggcat

SEQ ID NO: 31231 - DNA, 50 bp, unidentified
  source 1..50: mol_type = unassigned DNA; note = donor_133edb5
  misc_feature 1..17: note = RE
  misc_feature 18..25: note = Core
  misc_feature 26..50: note = LE
tacttgactgtttatagtttgacacgtataatccaatcatcggtgatggt

SEQ ID NO: 31232 - DNA, 50 bp, unidentified
  source 1..50: mol_type = unassigned DNA; note = donor_133f57d
  misc_feature 1..23: note = RE
  misc_feature 24..25: note = Core
  misc_feature 26..50: note = LE
gtggttgacttttaatagttaatcttgtattatagagtagtagttattag

SEQ ID NO: 31233 - DNA, 50 bp, unidentified
  source 1..50: mol_type = unassigned DNA; note = donor_13401e9
  misc_feature 1..22: note = RE
  misc_feature 23..25: note = Core
  misc_feature 26..50: note = LE
aagcttgacaagtattagctggtttcgtattatcaggttagccagtaatt

SEQ ID NO: 31234 - DNA, 50 bp, unidentified
  source 1..50: mol_type = unassigned DNA; note = donor_134e291
  misc_feature 1..23: note = RE
  misc_feature 24..25: note = Core
  misc_feature 26..50: note = LE
acaggtgcggcccttttcatagaagatgggatgaaaagtgggcgtacctt

SEQ ID NO: 31235 - DNA, 50 bp, unidentified
  source 1..50: mol_type = unassigned DNA; note = donor_134fd5f
  misc_feature 1..23: note = RE
  misc_feature 24..25: note = Core
  misc_feature 26..50: note = LE
tttggaaatatcataatcctagaatttcctttgtattaataaacagatta

SEQ ID NO: 31236 - DNA, 50 bp, unidentified
  source 1..50: mol_type = unassigned DNA; note = donor_1353ebf
  misc_feature 1..20: note = RE
  misc_feature 21..25: note = Core
  misc_feature 26..50: note = LE
cttgacacgatcattgagattccctaagaatgtgaggcggtccgggagga

SEQ ID NO: 31237 - DNA, 50 bp, unidentified
  source 1..50: mol_type = unassigned DNA; note = donor_135d152
  misc_feature 1..22: note = RE
  misc_feature 23..25: note = Core
  misc_feature 26..50: note = LE
ttttgctattgacatagaaggtcttatctgttaaactcaacccagggagc

SEQ ID NO: 31238 - DNA, 50 bp, unidentified
  source 1..50: mol_type = unassigned DNA; note = donor_135e79b
  misc_feature 1..24: note = RE
  misc_feature 25: note = Core
  misc_feature 26..50: note = LE
tgcagtcgcgcggcggaccatacataatgagatggtccgccgcttgattc

SEQ ID NO: 31239 - DNA, 50 bp, unidentified
  source 1..50: mol_type = unassigned DNA; note = donor_1360a04
  misc_feature 1..24: note = RE
  misc_feature 25: note = Core
  misc_feature 26..50: note = LE
ttggcaaaccagggcgtccatgtacaatgggatggacgcccccacccgta

SEQ ID NO: 31240 - DNA, 50 bp, unidentified
  source 1..50: mol_type = unassigned DNA; note = donor_1360bd2
  misc_feature 1..23: note = RE
  misc_feature 24..25: note = Core
  misc_feature 26..50: note = LE
actattgacttttaatagttagtctcgtattataaaatagtagtgtttat

SEQ ID NO: 31241 - DNA, 50 bp, unidentified
  source 1..50: mol_type = unassigned DNA; note = donor_136435d
  misc_feature 1..22: note = RE
  misc_feature 23..25: note = Core
  misc_feature 26..50: note = LE
tatttgactttttatagctggtcttgtatattaatgttcatcagagtcgt

SEQ ID NO: 31242 - DNA, 50 bp, unidentified
  source 1..50: mol_type = unassigned DNA; note = donor_136a903
  misc_feature 1..23: note = RE
  misc_feature 24..25: note = Core
  misc_feature 26..50: note = LE
gcccgccacttgacatagaagcgtctactggtccaccatggtgggtgtcg

SEQ ID NO: 31243 - DNA, 50 bp, unidentified
  source 1..50: mol_type = unassigned DNA; note = donor_1372b12
  misc_feature 1..23: note = RE
  misc_feature 24..25: note = Core
  misc_feature 26..50: note = LE
gcaataacgaggcgaaccatacattaattagatggttcgcctcacctcta

SEQ ID NO: 31244 - DNA, 50 bp, unidentified
  source 1..50: mol_type = unassigned DNA; note = donor_137416e
  misc_feature 1..24: note = RE
  misc_feature 25: note = Core
  misc_feature 26..50: note = LE
tgctagactgggggagtccatatactatgtatggactcccccaacccagt

SEQ ID NO: 31245 - DNA, 50 bp, unidentified
  source 1..50: mol_type = unassigned DNA; note = donor_137dcfd
  misc_feature 1..24: note = RE
  misc_feature 25: note = Core
  misc_feature 26..50: note = LE
tgcaatacggcggcggaccatacatactggtatggtccgccgtctagacc

SEQ ID NO: 31246 - DNA, 50 bp, unidentified
  source 1..50: mol_type = unassigned DNA; note = donor_13862ac
  misc_feature 1..22: note = RE
  misc_feature 23..25: note = Core
  misc_feature 26..50: note = LE
aaaaaaatcctcacagacagttgcttgtgtcttcaagggctcttaaactg

SEQ ID NO: 31247 - DNA, 50 bp, unidentified
  source 1..50: mol_type = unassigned DNA; note = donor_1386a6f
  misc_feature 1..23: note = RE
  misc_feature 24..25: note = Core
  misc_feature 26..50: note = LE
gacagaaccttgccgaatagagaagatgggatattcggcaggagcccaca

SEQ ID NO: 31248 - DNA, 50 bp, unidentified
  source 1..50: mol_type = unassigned DNA; note = donor_1388813
  misc_feature 1..22: note = RE
  misc_feature 23..25: note = Core
  misc_feature 26..50: note = LE
ggccttgacttttaatagttagactcgtattataaagtagtagtgtttat

SEQ ID NO: 31249 - DNA, 50 bp, unidentified; identical to SEQ ID NO: 30838
  source 1..50: mol_type = unassigned DNA; note = donor_1389fac
  misc_feature 1..23: note = RE
  misc_feature 24..25: note = Core
  misc_feature 26..50: note = LE

SEQ ID NO: 31250 - DNA, 50 bp, unidentified
  source 1..50: mol_type = unassigned DNA; note = donor_139013d
  misc_feature 1..23: note = RE
  misc_feature 24..25: note = Core
  misc_feature 26..50: note = LE
aggcggtggttgacaaagggtgtctgatggctctaccctcccccctcgag

SEQ ID NO: 31251 - DNA, 50 bp, unidentified
  source 1..50: mol_type = unassigned DNA; note = donor_1393442
  misc_feature 1..23: note = RE
  misc_feature 24..25: note = Core
  misc_feature 26..50: note = LE
caatgcaggagccatctacacaagatgaggtggatggttcctgcaccacc

SEQ ID NO: 31252 - DNA, 50 bp, unidentified
  source 1..50: mol_type = unassigned DNA; note = donor_1396495
  misc_feature 1..23: note = RE
  misc_feature 24..25: note = Core
  misc_feature 26..50: note = LE
tgacacccaagctccagggatgtctaatgggagttaccgggtcacctgat

SEQ ID NO: 31253 - DNA, 50 bp, unidentified
  source 1..50: mol_type = unassigned DNA; note = donor_13a040e
  misc_feature 1..24: note = RE
  misc_feature 25: note = Core
  misc_feature 26..50: note = LE
ttgacaaccgggggaatccatgtagaatgacatggattccccctaccgag

SEQ ID NO: 31254 - DNA, 50 bp, unidentified
  source 1..50: mol_type = unassigned DNA; note = donor_13a5d49
  misc_feature 1..24: note = RE
  misc_feature 25: note = Core
  misc_feature 26..50: note = LE
acttaaattacaatgtttcaaccttatgaccattcctttccgctgcgctc

SEQ ID NO: 31255 - DNA, 50 bp, unidentified
  source 1..50: mol_type = unassigned DNA; note = donor_13a7449
  misc_feature 1..24: note = RE
  misc_feature 25: note = Core
  misc_feature 26..50: note = LE
tgcaaaaacgggggtgaccatagataatgagatggtcacccccgacaccc

SEQ ID NO: 31256 - DNA, 50 bp, unidentified
  source 1..50: mol_type = unassigned DNA; note = donor_13b77d2
  misc_feature 1..24: note = RE
  misc_feature 25: note = Core
  misc_feature 26..50: note = LE
gcccttgacacgctatagaagcgtctgtgagtcttggtagtggctggccc

SEQ ID NO: 31257 - DNA, 50 bp, unidentified
  source 1..50: mol_type = unassigned DNA; note = donor_13bc6ef
  misc_feature 1..23: note = RE
  misc_feature 24..25: note = Core
  misc_feature 26..50: note = LE
tccaattgacttttaatagttagtcgtattatatagtcatacccattctt

SEQ ID NO: 31258 - DNA, 50 bp, unidentified
  source 1..50: mol_type = unassigned DNA; note = donor_13be86d
  misc_feature 1..24: note = RE
  misc_feature 25: note = Core
  misc_feature 26..50: note = LE
tgcaaaacggggcgtaccatacattaattagatggtacgctccacccatt

SEQ ID NO: 31259 - DNA, 50 bp, unidentified
  source 1..50: mol_type = unassigned DNA; note = donor_13c4e78
  misc_feature 1..23: note = RE
  misc_feature 24..25: note = Core
  misc_feature 26..50: note = LE
gcaggaggtgggctgaccatacattaatgagatggtcagcccggtacgag

SEQ ID NO: 31260 - DNA, 50 bp, unidentified
  source 1..50: mol_type = unassigned DNA; note = donor_13d4cbe
  misc_feature 1..23: note = RE
  misc_feature 24..25: note = Core
  misc_feature 26..50: note = LE
tatgcttgaaatcaagacagttacttgtatcttctttaacgggatcctga

SEQ ID NO: 31261 - DNA, 50 bp, unidentified; identical to SEQ ID NO: 30631
  source 1..50: mol_type = unassigned DNA; note = donor_13db70e
  misc_feature 1..23: note = RE
  misc_feature 24..25: note = Core
  misc_feature 26..50: note = LE

SEQ ID NO: 31262 - DNA, 50 bp, unidentified
  source 1..50: mol_type = unassigned DNA; note = donor_13e1b9f
  misc_feature 1..23: note = RE
  misc_feature 24..25: note = Core
  misc_feature 26..50: note = LE
ggggttgacttttaatagttaatcttgtattatagagtagtagtttttaa

SEQ ID NO: 31263 - DNA, 50 bp, unidentified
  source 1..50: mol_type = unassigned DNA; note = donor_13e1e2d
  misc_feature 1..23: note = RE
  misc_feature 24..25: note = Core
  misc_feature 26..50: note = LE
gccacgcggaggccgtccatacatgatgtggtggacggcctccgctcccg

SEQ ID NO: 31264 - DNA, 50 bp, unidentified
  source 1..50: mol_type = unassigned DNA; note = donor_13e7327
  misc_feature 1..24: note = RE
  misc_feature 25: note = Core
  misc_feature 26..50: note = LE
attctcttgactgtttatagtttgtcacgtataatccaattatcttagat

SEQ ID NO: 31265 - DNA, 50 bp, unidentified
  source 1..50: mol_type = unassigned DNA; note = donor_13f04ea
  misc_feature 1..23: note = RE
  misc_feature 24..25: note = Core
  misc_feature 26..50: note = LE
tgaagccttgcttataacggatacttgtcttatgaaggaagtgtccattg

SEQ ID NO: 31266 - DNA, 50 bp, unidentified
  source 1..50: mol_type = unassigned DNA; note = donor_13f6c22
  misc_feature 1..23: note = RE
  misc_feature 24..25: note = Core
  misc_feature 26..50: note = LE
tttcttgattttttatttgcaggctactacaatagatttatggttaatat

SEQ ID NO: 31267 - DNA, 50 bp, unidentified
  source 1..50: mol_type = unassigned DNA; note = donor_13fff77
  misc_feature 1..24: note = RE
  misc_feature 25: note = Core
  misc_feature 26..50: note = LE
ttgacaccggcagcaaagaggactctaatagaacccgagagcgctgcggt

SEQ ID NO: 31268 - DNA, 50 bp, unidentified
  source 1..50: mol_type = unassigned DNA; note = donor_1403abf
  misc_feature 1..23: note = RE
  misc_feature 24..25: note = Core
  misc_feature 26..50: note = LE
acattccttgaccaagacggatacttgtcttatgactttccgtcgtttcg

SEQ ID NO: 31269 - DNA, 50 bp, unidentified
  source 1..50: mol_type = unassigned DNA; note = donor_140ee8b
  misc_feature 1..23: note = RE
  misc_feature 24..25: note = Core
  misc_feature 26..50: note = LE
accgttgtttacaaccatagaatcttgtatggtaggactcgaaggggtgg

SEQ ID NO: 31270 - DNA, 50 bp, unidentified
  source 1..50: mol_type = unassigned DNA; note = donor_1414e0c
  misc_feature 1..23: note = RE
  misc_feature 24..25: note = Core
  misc_feature 26..50: note = LE
gggcttgacatctaatagttagtctcgtattatatagtagtagtgtttat

SEQ ID NO: 31271 - DNA, 50 bp, unidentified
  source 1..50: mol_type = unassigned DNA; note = donor_14158f2
  misc_feature 1..23: note = RE
  misc_feature 24..25: note = Core
  misc_feature 26..50: note = LE
gacaagatgcagacctggggtgtctaatgggggtccatcgtgatctccct

SEQ ID NO: 31272 - DNA, 50 bp, unidentified
  source 1..50: mol_type = unassigned DNA; note = donor_141727f
  misc_feature 1..24: note = RE
  misc_feature 25: note = Core
  misc_feature 26..50: note = LE
tggcaaaccgggggcgtccatgtacaatgggatggacgcccccacccgta

SEQ ID NO: 31273 - DNA, 50 bp, unidentified
  source 1..50: mol_type = unassigned DNA; note = donor_1418c57
  misc_feature 1..22: note = RE
  misc_feature 23..25: note = Core
  misc_feature 26..50: note = LE
ggagccactgaaaaagacagttgcttgtgtcttcgtgcgggggtaggctt

SEQ ID NO: 31274 - DNA, 50 bp, unidentified; identical to SEQ ID NO: 30779
  source 1..50: mol_type = unassigned DNA; note = donor_142a225
  misc_feature 1..24: note = RE
  misc_feature 25: note = Core
  misc_feature 26..50: note = LE

SEQ ID NO: 31275 - DNA, 50 bp, unidentified
  source 1..50: mol_type = unassigned DNA; note = donor_144030e
  misc_feature 1..23: note = RE
  misc_feature 24..25: note = Core
  misc_feature 26..50: note = LE
gacacacgggggccgtccacacatgatgaggtggacggccccttccttgc

SEQ ID NO: 31276 - DNA, 50 bp, unidentified
  source 1..50: mol_type = unassigned DNA; note = donor_1442ef9
  misc_feature 1..24: note = RE
  misc_feature 25: note = Core
  misc_feature 26..50: note = LE
ctcgcttgacgaaagacatagaggcgttatcttcttcgcggtcctgcaag

SEQ ID NO: 31277 - DNA, 50 bp, unidentified
  source 1..50: mol_type = unassigned DNA; note = donor_14454ab
  misc_feature 1..24: note = RE
  misc_feature 25: note = Core
  misc_feature 26..50: note = LE
tacccccttgactcaaagaggattctgattgagactggtggcagacgttg

SEQ ID NO: 31278 - DNA, 50 bp, unidentified
  source 1..50: mol_type = unassigned DNA; note = donor_1454c47
  misc_feature 1..23: note = RE
  misc_feature 24..25: note = Core
  misc_feature 26..50: note = LE
cccttgacaaaaacatagggacaccgttaccttggagctatccccgataa

SEQ ID NO: 31279 - DNA, 50 bp, unidentified
  source 1..50: mol_type = unassigned DNA; note = donor_145b206
  misc_feature 1..23: note = RE
  misc_feature 24..25: note = Core
  misc_feature 26..50: note = LE
gcaatcacgggggcgtccatagatgatgggatggacgccccctatcgcgg

SEQ ID NO: 31280 - DNA, 50 bp, unidentified
  source 1..50: mol_type = unassigned DNA; note = donor_14676d6
  misc_feature 1..22: note = RE
  misc_feature 23..25: note = Core
  misc_feature 26..50: note = LE
gggcttgacaaacattagctggtttcgtattatcaggtcagccagaattt

SEQ ID NO: 31281 - DNA, 50 bp, unidentified
  source 1..50: mol_type = unassigned DNA; note = donor_146f219
  misc_feature 1..24: note = RE
  misc_feature 25: note = Core
  misc_feature 26..50: note = LE
gccgccgcttgacataggagcgtcactcagtctaagatcgcttctgaacg

SEQ ID NO: 31282 - DNA, 50 bp, unidentified
  source 1..50: mol_type = unassigned DNA; note = donor_14718f1
  misc_feature 1..23: note = RE
  misc_feature 24..25: note = Core
  misc_feature 26..50: note = LE
gacacttacggcccgtgggatgtctaatggcttccgagcagcccacagac

SEQ ID NO: 31283 - DNA, 50 bp, unidentified
  source 1..50: mol_type = unassigned DNA; note = donor_1477aec
  misc_feature 1..23: note = RE
  misc_feature 24..25: note = Core
  misc_feature 26..50: note = LE
aggcttgcaggcgataacagtatcttgtattatcctctctgtgcagagag

SEQ ID NO: 31284 - DNA, 50 bp, unidentified
  source 1..50: mol_type = unassigned DNA; note = donor_1478591
  misc_feature 1..24: note = RE
  misc_feature 25: note = Core
  misc_feature 26..50: note = LE
cttgacgaaaaccatagaggcacccgttacctttttcccagctcttccgt

SEQ ID NO: 31285 - DNA, 50 bp, unidentified
  source 1..50: mol_type = unassigned DNA; note = donor_147c029
  misc_feature 1..24: note = RE
  misc_feature 25: note = Core
  misc_feature 26..50: note = LE
ggcaaaaaagtgggcgtccatgtataatggaatggacgcccacttcccca

SEQ ID NO: 31286 - DNA, 50 bp, unidentified
  source 1..50: mol_type = unassigned DNA; note = donor_147f2c4
  misc_feature 1..22: note = RE
  misc_feature 23..25: note = Core
  misc_feature 26..50: note = LE
atgcttgacaagtattagctggtttcgtattatcaggttagccagttatt

SEQ ID NO: 31287 - DNA, 50 bp, unidentified
  source 1..50: mol_type = unassigned DNA; note = donor_147f618
  misc_feature 1..24: note = RE
  misc_feature 25: note = Core
  misc_feature 26..50: note = LE
tgcagggggtgggctgaccatacataatgagatggtcagcccggcacggg

SEQ ID NO: 31288 - DNA, 50 bp, unidentified; identical to SEQ ID NO: 30383
  source 1..50: mol_type = unassigned DNA; note = donor_14a67f6
  misc_feature 1..23: note = RE
  misc_feature 24..25: note = Core
  misc_feature 26..50: note = LE

SEQ ID NO: 31289 - DNA, 50 bp, unidentified
  source 1..50: mol_type = unassigned DNA; note = donor_14a9e9d
  misc_feature 1..23: note = RE
  misc_feature 24..25: note = Core
  misc_feature 26..50: note = LE
tgcttgacagctcaagacagttgcttgtatcttgcgccgagggcggcaat

SEQ ID NO: 31290 - DNA, 50 bp, unidentified
  source 1..50: mol_type = unassigned DNA; note = donor_14afd79
  misc_feature 1..23: note = RE
  misc_feature 24..25: note = Core
  misc_feature 26..50: note = LE
catcttgacaattattagcaaggttcgtactatataagagtagagattaa

SEQ ID NO: 31291 - DNA, 50 bp, unidentified; identical to SEQ ID NO: 30358
  source 1..50: mol_type = unassigned DNA; note = donor_14b89d6
  misc_feature 1..23: note = RE
  misc_feature 24..25: note = Core
  misc_feature 26..50: note = LE

SEQ ID NO: 31292 - DNA, 50 bp, unidentified
  source 1..50: mol_type = unassigned DNA; note = donor_14bd26d
  misc_feature 1..23: note = RE
  misc_feature 24..25: note = Core
  misc_feature 26..50: note = LE
gccacgatgtcttgacatagaatcttgtatggcgttagggtaggaacctg

SEQ ID NO: 31293 - DNA, 50 bp, unidentified
  source 1..50: mol_type = unassigned DNA; note = donor_14c1328
  misc_feature 1..23: note = RE
  misc_feature 24..25: note = Core
  misc_feature 26..50: note = LE
agtcttgattcttaatagttagtctcgtattattgtgtcatagccttttc

SEQ ID NO: 31294 - DNA, 50 bp, unidentified
  source 1..50: mol_type = unassigned DNA; note = donor_14c1c55
  misc_feature 1..23: note = RE
  misc_feature 24..25: note = Core
  misc_feature 26..50: note = LE
tgcggacggggcgggccatacgtttatggaatggcccgcccctcacttac

SEQ ID NO: 31295 - DNA, 50 bp, unidentified
  source 1..50: mol_type = unassigned DNA; note = donor_14c8d28
  misc_feature 1..23: note = RE
  misc_feature 24..25: note = Core
  misc_feature 26..50: note = LE
gactaaccaaggcccgttacagaagatggggtaacgggccggccgaagca

SEQ ID NO: 31296 - DNA, 50 bp, unidentified
  source 1..50: mol_type = unassigned DNA; note = donor_14c9055
  misc_feature 1..21: note = RE
  misc_feature 22..25: note = Core
  misc_feature 26..50: note = LE
ttgacgaagaccatagggacaccccgttacctttttggtgggccttgaat

SEQ ID NO: 31297 - DNA, 50 bp, unidentified; identical to SEQ ID NO: 31078
  source 1..50: mol_type = unassigned DNA; note = donor_14ce709
  misc_feature 1..24: note = RE
  misc_feature 25: note = Core
  misc_feature 26..50: note = LE

SEQ ID NO: 31298 - DNA, 50 bp, unidentified
  source 1..50: mol_type = unassigned DNA; note = donor_14d2386
  misc_feature 1..24: note = RE
  misc_feature 25: note = Core
  misc_feature 26..50: note = LE
ttgcaatcgggcggggtccatatacaatggtatggaccccgccctcccgg

SEQ ID NO: 31299 - DNA, 50 bp, unidentified
  source 1..50: mol_type = unassigned DNA; note = donor_14d2615
  misc_feature 1..23: note = RE
  misc_feature 24..25: note = Core
  misc_feature 26..50: note = LE
ccgcttgacaacatagaaggtctggcgtatgaaatcccccggtgggttcc

SEQ ID NO: 31300 - DNA, 50 bp, unidentified
  source 1..50: mol_type = unassigned DNA; note = donor_14d7e78
  misc_feature 1..24: note = RE
  misc_feature 25: note = Core
  misc_feature 26..50: note = LE
ccgcttgacaggtcactccatatcagtcagaatggagtgaccggctccat

SEQ ID NO: 31301 - DNA, 50 bp, unidentified
  source 1..50: mol_type = unassigned DNA; note = donor_14d9e61
  misc_feature 1..23: note = RE
  misc_feature 24..25: note = Core
  misc_feature 26..50: note = LE
gacatccctaacccctgggatgtctaatgaggggtaacgggtcggctgcg

SEQ ID NO: 31302 - DNA, 50 bp, unidentified
  source 1..50: mol_type = unassigned DNA; note = donor_14e832f
  misc_feature 1..22: note = RE
  misc_feature 23..25: note = Core
  misc_feature 26..50: note = LE
gacccaaacacccaattagagaagcatgcgtaattgggctaccctctatt

SEQ ID NO: 31303 - DNA, 50 bp, unidentified
  source 1..50: mol_type = unassigned DNA; note = donor_14f2639
  misc_feature 1..24: note = RE
  misc_feature 25: note = Core
  misc_feature 26..50: note = LE
ggacaaagtgggggcgtccatgtacaatgggatggacgcccccactctct

SEQ ID NO: 31304 - DNA, 50 bp, unidentified
  source 1..50: mol_type = unassigned DNA; note = donor_14f443c
  misc_feature 1..24: note = RE
  misc_feature 25: note = Core
  misc_feature 26..50: note = LE
cgcttgacacaccacataggagcaccgttaccttggtggtggtcgcaggg

SEQ ID NO: 31305 - DNA, 50 bp, unidentified
  source 1..50: mol_type = unassigned DNA; note = donor_14f74b2
  misc_feature 1..23: note = RE
  misc_feature 24..25: note = Core
  misc_feature 26..50: note = LE
gacacgctaagcccctgggatgtctaataggggttatcgggttcgtcgat

SEQ ID NO: 31306 - DNA, 50 bp, unidentified
  source 1..50: mol_type = unassigned DNA; note = donor_14f7b59
  misc_feature 1..24: note = RE
  misc_feature 25: note = Core
  misc_feature 26..50: note = LE
ttgcttgttttttaactcagttcttcttaagtttgtaattcactaaattt

SEQ ID NO: 31307 - DNA, 50 bp, unidentified
  source 1..50: mol_type = unassigned DNA; note = donor_14f8b13
  misc_feature 1..23: note = RE
  misc_feature 24..25: note = Core
  misc_feature 26..50: note = LE
gacaccgaaaggcccattacagaagatgccgtaatgggccggctgcctgg

SEQ ID NO: 31308 - DNA, 50 bp, unidentified
  source 1..50: mol_type = unassigned DNA; note = donor_14f8d4c
  misc_feature 1..24: note = RE
  misc_feature 25: note = Core
  misc_feature 26..50: note = LE
ttggcaaaagggggcgtccatgtataatgggatggacgcccccttcctaa

SEQ ID NO: 31309 - DNA, 50 bp, unidentified
  source 1..50: mol_type = unassigned DNA; note = donor_14fccc0
  misc_feature 1..24: note = RE
  misc_feature 25: note = Core
  misc_feature 26..50: note = LE
ggcgcaaaaggggccgttcatatagaatgatatgaacggccccggccttc

SEQ ID NO: 31310 - DNA, 50 bp, unidentified
  source 1..50: mol_type = unassigned DNA; note = donor_14fefed
  misc_feature 1..23: note = RE
  misc_feature 24..25: note = Core
  misc_feature 26..50: note = LE
aaacttgacccacaccatagaatcttgtatggtgtgggtgcgccttccac

SEQ ID NO: 31311 - DNA, 50 bp, unidentified
  source 1..50: mol_type = unassigned DNA; note = donor_150d1f4
  misc_feature 1..24: note = RE
  misc_feature 25: note = Core
  misc_feature 26..50: note = LE
tggcaaaacgggggcgtccatgtataatggaatggacgcccccgtccgaa

SEQ ID NO: 31312 - DNA, 50 bp, unidentified
  source 1..50: mol_type = unassigned DNA; note = donor_1511a7c
  misc_feature 1..23: note = RE
  misc_feature 24..25: note = Core
  misc_feature 26..50: note = LE
gccaacggagagccgtccacacatgatgccgtggacggctctccatcacc

SEQ ID NO: 31313 - DNA, 50 bp, unidentified
  source 1..50: mol_type = unassigned DNA; note = donor_15198d1
  misc_feature 1..24: note = RE
  misc_feature 25: note = Core
  misc_feature 26..50: note = LE
cgggcttgactttttatttgcaggcctgttactatatatttgccccggat

SEQ ID NO: 31314 - DNA, 50 bp, unidentified
  source 1..50: mol_type = unassigned DNA; note = donor_151e696
  misc_feature 1..23: note = RE
  misc_feature 24..25: note = Core
  misc_feature 26..50: note = LE
ctacttgacttctaatagttagtctcgtattatattgacatacccattct

SEQ ID NO: 31315 - DNA, 50 bp, unidentified
  source 1..50: mol_type = unassigned DNA; note = donor_152a6ac
  misc_feature 1..21: note = RE
  misc_feature 22..25: note = Core
  misc_feature 26..50: note = LE
cggggggttgacacagggtgtctcactggactaccctccaattcatgttg

SEQ ID NO: 31316 - DNA, 50 bp, unidentified
  source 1..50: mol_type = unassigned DNA; note = donor_152b0eb
  misc_feature 1..24: note = RE
  misc_feature 25: note = Core
  misc_feature 26..50: note = LE
gcgtccttgacaacaaagaggcttctgatggatgctcgggcgggcgttga

SEQ ID NO: 31317 - DNA, 50 bp, unidentified
  source 1..50: mol_type = unassigned DNA; note = donor_1532e66
  misc_feature 1..23: note = RE
  misc_feature 24..25: note = Core
  misc_feature 26..50: note = LE
tcacttgacttcacatagttagtcttgtatattgaactcatagggaagtt

SEQ ID NO: 31318 - DNA, 50 bp, unidentified
  source 1..50: mol_type = unassigned DNA; note = donor_153cff7
  misc_feature 1..24: note = RE
  misc_feature 25: note = Core
  misc_feature 26..50: note = LE
ccacgtcttgacctaaaggggtgcctacttagagactggttgcaggatcg

SEQ ID NO: 31319 - DNA, 50 bp, unidentified
  source 1..50: mol_type = unassigned DNA; note = donor_153e511
  misc_feature 1..23: note = RE
  misc_feature 24..25: note = Core
  misc_feature 26..50: note = LE
ggggttgatttttaatagttaatcttgtattatagagtagtagttattag

SEQ ID NO: 31320 - DNA, 50 bp, unidentified
  source 1..50: mol_type = unassigned DNA; note = donor_15435e5
  misc_feature 1..24: note = RE
  misc_feature 25: note = Core
  misc_feature 26..50: note = LE
tgcaaaactggaggcgaccatataatggaatggtcgcctcccccgaaggg

SEQ ID NO: 31321 - DNA, 50 bp, unidentified
  source 1..50: mol_type = unassigned DNA; note = donor_154c2a1
  misc_feature 1..24: note = RE
  misc_feature 25: note = Core
  misc_feature 26..50: note = LE
ttgcaagcagggggccgtccacatatgttggggtggacggcccccgcacg

SEQ ID NO: 31322 - DNA, 50 bp, unidentified
  source 1..50: mol_type = unassigned DNA; note = donor_156daba
  misc_feature 1..23: note = RE
  misc_feature 24..25: note = Core
  misc_feature 26..50: note = LE
tcgcttgacggcgaacacggttacttgtatgttcagactagaccggcgcg

SEQ ID NO: 31323 - DNA, 50 bp, unidentified
  source 1..50: mol_type = unassigned DNA; note = donor_1570bf4
  misc_feature 1..23: note = RE
  misc_feature 24..25: note = Core
  misc_feature 26..50: note = LE
ggggttgacttttaatagttaatcttgtattatagagtagtagttattag

SEQ ID NO: 31324 - DNA, 50 bp, unidentified
  source 1..50: mol_type = unassigned DNA; note = donor_157bf85
  misc_feature 1..23: note = RE
  misc_feature 24..25: note = Core
  misc_feature 26..50: note = LE
cggtttaaagcgaaagacagttgcttgtatctttaatctggtttatgctg

SEQ ID NO: 31325 - DNA, 50 bp, unidentified
  source 1..50: mol_type = unassigned DNA; note = donor_1589681
  misc_feature 1..23: note = RE
  misc_feature 24..25: note = Core
  misc_feature 26..50: note = LE
gacaacttccacccgtgggatgtctaatgggcgcggatcggtttcgtgtt

SEQ ID NO: 31326 - DNA, 50 bp, unidentified
  source 1..50: mol_type = unassigned DNA; note = donor_1592ec7
  misc_feature 1..24: note = RE
  misc_feature 25: note = Core
  misc_feature 26..50: note = LE
ccgttgatatataagcatttatagaaggagcattcctgttagaaattttt

SEQ ID NO: 31327 - DNA, 50 bp, unidentified
  source 1..50: mol_type = unassigned DNA; note = donor_1593422
  misc_feature 1..23: note = RE
  misc_feature 24..25: note = Core
  misc_feature 26..50: note = LE
gaaccccaggggccgtccacacatgttggggtggacggccccacggcatc

SEQ ID NO: 31328 - DNA, 50 bp, unidentified
  source 1..50: mol_type = unassigned DNA; note = donor_159bdb5
  misc_feature 1..23: note = RE
  misc_feature 24..25: note = Core
  misc_feature 26..50: note = LE
gcgccagagggggcgtccacacatgatggggtggacgccccccgacggca

SEQ ID NO: 31329 - DNA, 50 bp, unidentified
  source 1..50: mol_type = unassigned DNA; note = donor_15a47dd
  misc_feature 1..24: note = RE
  misc_feature 25: note = Core
  misc_feature 26..50: note = LE
aatgtttggattaaccatagaaaacctttagatttgcattttaattaaat

SEQ ID NO: 31330 - DNA, 50 bp, unidentified
  source 1..50: mol_type = unassigned DNA; note = donor_15ac9bd
  misc_feature 1..23: note = RE
  misc_feature 24..25: note = Core
  misc_feature 26..50: note = LE
acaagtggggggccgtccacatctgttggtgtggacggcctctcatccca

SEQ ID NO: 31331 - DNA, 50 bp, unidentified
  source 1..50: mol_type = unassigned DNA; note = donor_15b288d
  misc_feature 1..21: note = RE
  misc_feature 22..25: note = Core
  misc_feature 26..50: note = LE
ggcttgacacgatcattgagattccctaagaatgtgaggcggtccgggag

SEQ ID NO: 31332 - DNA, 50 bp, unidentified
  source 1..50: mol_type = unassigned DNA; note = donor_15c38ef
  misc_feature 1..23: note = RE
  misc_feature 24..25: note = Core
  misc_feature 26..50: note = LE
gcgctgaagggggcgtccacagatgatggggtggacgccccccgacggca

SEQ ID NO: 31333 - DNA, 50 bp, unidentified
  source 1..50: mol_type = unassigned DNA; note = donor_15cd353
  misc_feature 1..23: note = RE
  misc_feature 24..25: note = Core
  misc_feature 26..50: note = LE
gcaaagcaggagccatccacacatgatggggtggatggttcctgctccca

SEQ ID NO: 31334 - DNA, 50 bp, unidentified
  source 1..50: mol_type = unassigned DNA; note = donor_15d0c10
  misc_feature 1..24: note = RE
  misc_feature 25: note = Core
  misc_feature 26..50: note = LE
gcgctcaacggggaagcccttgtagaatgaaaggacttccccgtcctgag

SEQ ID NO: 31335 - DNA, 50 bp, unidentified
  source 1..50: mol_type = unassigned DNA; note = donor_15df0ae
  misc_feature 1..20: note = RE
  misc_feature 21..25: note = Core
  misc_feature 26..50: note = LE
cttgactactcatagctggtctcctacaatctacttatcgtgttttgact

SEQ ID NO: 31336 - DNA, 50 bp, unidentified
  source 1..50: mol_type = unassigned DNA; note = donor_15e2113
  misc_feature 1..23: note = RE
  misc_feature 24..25: note = Core
  misc_feature 26..50: note = LE
gagcttcccctcaaccatagaatcttgtatggtaggacttgaagggagga

SEQ ID NO: 31337 - DNA, 50 bp, unidentified
  source 1..50: mol_type = unassigned DNA; note = donor_15e56df
  misc_feature 1..21: note = RE
  misc_feature 22..25: note = Core
  misc_feature 26..50: note = LE
gtcttgacttttgttagcaggttttagtaccatataagtgtaagagataa

SEQ ID NO: 31338 - DNA, 50 bp, unidentified
  source 1..50: mol_type = unassigned DNA; note = donor_15e84ad
  misc_feature 1..20: note = RE
  misc_feature 21..25: note = Core
  misc_feature 26..50: note = LE
tgacatccgacatagggacacccccgttacctttctggtggcccttgagg

SEQ ID NO: 31339 - DNA, 50 bp, unidentified
  source 1..50: mol_type = unassigned DNA; note = donor_15f3fcc
  misc_feature 1..23: note = RE
  misc_feature 24..25: note = Core
  misc_feature 26..50: note = LE
ggtattgacttattatactaagtcttgtataatatgtttaggctatagaa

SEQ ID NO: 31340 - DNA, 50 bp, unidentified
  source 1..50: mol_type = unassigned DNA; note = donor_15fc173
  misc_feature 1..23: note = RE
  misc_feature 24..25: note = Core
  misc_feature 26..50: note = LE
cgaaagcctgataaacacagttgcctgtgtgtctgacctgtggttatata

SEQ ID NO: 31341 - DNA, 50 bp, unidentified
  source 1..50: mol_type = unassigned DNA; note = donor_15ff9ca
  misc_feature 1..23: note = RE
  misc_feature 24..25: note = Core
  misc_feature 26..50: note = LE
ctctgcaggagccatccacacaggatgggatggatggctcctgctccatc

SEQ ID NO: 31342 - DNA, 50 bp, unidentified
  source 1..50: mol_type = unassigned DNA; note = donor_1618b90
  misc_feature 1..23: note = RE
  misc_feature 24..25: note = Core
  misc_feature 26..50: note = LE
gcattcgaaggggcgtccacacacgatggggtggacgccccccgacggca

SEQ ID NO: 31343 - DNA, 50 bp, unidentified
  source 1..50: mol_type = unassigned DNA; note = donor_1619f4c
  misc_feature 1..22: note = RE
  misc_feature 23..25: note = Core
  misc_feature 26..50: note = LE
ccaaatgggcgtcatccagacatgatgtagtggatggcgccctccagcgg

SEQ ID NO: 31344 - DNA, 50 bp, unidentified
  source 1..50: mol_type = unassigned DNA; note = donor_1621dab
  misc_feature 1..23: note = RE
  misc_feature 24..25: note = Core
  misc_feature 26..50: note = LE
gcaaaagtgggggtgaccatagattaatgagatggtcacccccacaccct

SEQ ID NO: 31345 - DNA, 50 bp, unidentified
  source 1..50: mol_type = unassigned DNA; note = donor_162cfa0
  misc_feature 1..24: note = RE
  misc_feature 25: note = Core
  misc_feature 26..50: note = LE
cttgcgaacggggcgggccatacgtatgggatggcccgcccctcagccgc

SEQ ID NO: 31346 - DNA, 50 bp, unidentified
  source 1..50: mol_type = unassigned DNA; note = donor_162dc96
  misc_feature 1..24: note = RE
  misc_feature 25: note = Core
  misc_feature 26..50: note = LE
gtcgcttttgcttttctacatagcagtaattatgtaagaaaagcatagcg

SEQ ID NO: 31347 - DNA, 50 bp, unidentified
  source 1..50: mol_type = unassigned DNA; note = donor_1633490
  misc_feature 1..23: note = RE
  misc_feature 24..25: note = Core
  misc_feature 26..50: note = LE
gcgatccgggggtcgcccatataagatggtatgggcgaccccctcctaac

SEQ ID NO: 31348 - DNA, 50 bp, unidentified
  source 1..50: mol_type = unassigned DNA; note = donor_163b31a
  misc_feature 1..24: note = RE
  misc_feature 25: note = Core
  misc_feature 26..50: note = LE
tggcataacaggggcgtccatgtataatggcatggacgcccccactctgc

SEQ ID NO: 31349 - DNA, 50 bp, unidentified
  source 1..50: mol_type = unassigned DNA; note = donor_1645d67
  misc_feature 1..23: note = RE
  misc_feature 24..25: note = Core
  misc_feature 26..50: note = LE
aatcttgacgtccaacagagtatcttgtatgtttaagtcagatgaattga

SEQ ID NO: 31350 - DNA, 50 bp, unidentified
  source 1..50: mol_type = unassigned DNA; note = donor_1647d14
  misc_feature 1..24: note = RE
  misc_feature 25: note = Core
  misc_feature 26..50: note = LE
ggcaaaccaggatgcgtccatgtataatggaatggacgcatccttcctaa

SEQ ID NO: 31351 - DNA, 50 bp, unidentified
  source 1..50: mol_type = unassigned DNA; note = donor_16500c0
  misc_feature 1..23: note = RE
  misc_feature 24..25: note = Core
  misc_feature 26..50: note = LE
tgcaatatggggaagaccatatacgatgagatggtcttccccctccttca

SEQ ID NO: 31352 - DNA, 50 bp, unidentified
  source 1..50: mol_type = unassigned DNA; note = donor_165187c
  misc_feature 1..20: note = RE
  misc_feature 21..25: note = Core
  misc_feature 26..50: note = LE
cttgacttcatatagctggtctcctatcttttagttgttgcatttgggag

SEQ ID NO: 31353 - DNA, 50 bp, unidentified
  source 1..50: mol_type = unassigned DNA; note = donor_165c4cb
  misc_feature 1..23: note = RE
  misc_feature 24..25: note = Core
  misc_feature 26..50: note = LE
ttgacacacgggcccattacagaagatacggtaatgggccgcgcttccag

SEQ ID NO: 31354 - DNA, 50 bp, unidentified
  source 1..50: mol_type = unassigned DNA; note = donor_1662f3c
  misc_feature 1..22: note = RE
  misc_feature 23..25: note = Core
  misc_feature 26..50: note = LE
ggggttgactttttatagttagtcacgtataatgaaaaccatctcgaaag

SEQ ID NO: 31355 - DNA, 50 bp, unidentified
  source 1..50: mol_type = unassigned DNA; note = donor_166334c
  misc_feature 1..24: note = RE
  misc_feature 25: note = Core
  misc_feature 26..50: note = LE
cttgcagacggggcgagccatacgtatggaatggctcgcccctccctccc

SEQ ID NO: 31356 - DNA, 50 bp, unidentified
  source 1..50: mol_type = unassigned DNA; note = donor_1664766
  misc_feature 1..23: note = RE
  misc_feature 24..25: note = Core
  misc_feature 26..50: note = LE
tctattgactattcatagttggtcttgtatgatgtatttaagtccaaata

SEQ ID NO: 31357 - DNA, 50 bp, unidentified
  source 1..50: mol_type = unassigned DNA; note = donor_1664818
  misc_feature 1..23: note = RE
  misc_feature 24..25: note = Core
  misc_feature 26..50: note = LE
gtcaggcgggggccgtccacatatgttggtgtggacggcctccaaacggc

SEQ ID NO: 31358 - DNA, 50 bp, unidentified
  source 1..50: mol_type = unassigned DNA; note = donor_166907f
  misc_feature 1..24: note = RE
  misc_feature 25: note = Core
  misc_feature 26..50: note = LE
aatatttgttttaaccataggatactttagatttgccttatagataaaat

SEQ ID NO: 31359 - DNA, 50 bp, unidentified
  source 1..50: mol_type = unassigned DNA; note = donor_1674312
  misc_feature 1..22: note = RE
  misc_feature 23..25: note = Core
  misc_feature 26..50: note = LE
gctattgactttttatagttagtcacgtataattaaaccatctcgaaagt

SEQ ID NO: 31360 - DNA, 50 bp, unidentified
  source 1..50: mol_type = unassigned DNA; note = donor_16761d3
  misc_feature 1..24: note = RE
  misc_feature 25: note = Core
  misc_feature 26..50: note = LE
tgcgacaaagcggcggaccatacataatgggatggtccgccgcctctgcc

SEQ ID NO: 31361 - DNA, 50 bp, unidentified; identical to SEQ ID NO: 30423
  source 1..50: mol_type = unassigned DNA; note = donor_16782f5
  misc_feature 1..23: note = RE
  misc_feature 24..25: note = Core
  misc_feature 26..50: note = LE

SEQ ID NO: 31362 - DNA, 50 bp, unidentified
  source 1..50: mol_type = unassigned DNA; note = donor_1678df7
  misc_feature 1..23: note = RE
  misc_feature 24..25: note = Core
  misc_feature 26..50: note = LE
cagcttgcaacttaagacggtatctcgtatgatgatcacgtcgacttttg

SEQ ID NO: 31363 - DNA, 50 bp, unidentified
  source 1..50: mol_type = unassigned DNA; note = donor_168784a
  misc_feature 1..23: note = RE
  misc_feature 24..25: note = Core
  misc_feature 26..50: note = LE
tctgcttgaaaacaacacagttacttgtatcttggatttgccatctttgt

SEQ ID NO: 31364 - DNA, 50 bp, unidentified
  source 1..50: mol_type = unassigned DNA; note = donor_1694f91
  misc_feature 1..23: note = RE
  misc_feature 24..25: note = Core
  misc_feature 26..50: note = LE
ttggtattgacaaattagaaagtcatgtatatgatgaaggagacgaaagg

SEQ ID NO: 31365 - DNA, 50 bp, unidentified
  source 1..50: mol_type = unassigned DNA; note = donor_1695f6f
  misc_feature 1..23: note = RE
  misc_feature 24..25: note = Core
  misc_feature 26..50: note = LE
tgacatttcagctcctgggatgtctaatcagttctgggagtgagctatcc

SEQ ID NO: 31366 - DNA, 50 bp, unidentified
  source 1..50: mol_type = unassigned DNA; note = donor_169fdd6
  misc_feature 1..21: note = RE
  misc_feature 22..25: note = Core
  misc_feature 26..50: note = LE
catgaggttgacacagagggtgtcactggtccaccctctgtggtgcaggg

SEQ ID NO: 31367 - DNA, 50 bp, unidentified
  source 1..50: mol_type = unassigned DNA; note = donor_16a2653
  misc_feature 1..22: note = RE
  misc_feature 23..25: note = Core
  misc_feature 26..50: note = LE
cacaacgggcggcaaccacagaagatggggtggttgccgccctccccaga

SEQ ID NO: 31368 - DNA, 50 bp, unidentified
  source 1..50: mol_type = unassigned DNA; note = donor_16a2bef
  misc_feature 1..23: note = RE
  misc_feature 24..25: note = Core
  misc_feature 26..50: note = LE
cttgacaagaaacgccccatacaagatgctatggggcgagcggcgaggac

SEQ ID NO: 31369 - DNA, 50 bp, unidentified
  source 1..50: mol_type = unassigned DNA; note = donor_16a778d
  misc_feature 1..23: note = RE
  misc_feature 24..25: note = Core
  misc_feature 26..50: note = LE
gacgtggaggtgccgaatagagaagatggggtattcggcttgagccccat

SEQ ID NO: 31370 - DNA, 50 bp, unidentified; identical to SEQ ID NO: 31263
  source 1..50: mol_type = unassigned DNA; note = donor_16aacc0
  misc_feature 1..23: note = RE
  misc_feature 24..25: note = Core
  misc_feature 26..50: note = LE

SEQ ID NO: 31371 - DNA, 50 bp, unidentified
  source 1..50: mol_type = unassigned DNA; note = donor_16be2e2
  misc_feature 1..23: note = RE
  misc_feature 24..25: note = Core
  misc_feature 26..50: note = LE
agacttgacttttaatagttagtctcgtattataaagtagtagtgtttac

SEQ ID NO: 31372 - DNA, 50 bp, unidentified
  source 1..50: mol_type = unassigned DNA; note = donor_16c137b
  misc_feature 1..23: note = RE
  misc_feature 24..25: note = Core
  misc_feature 26..50: note = LE
tgaccccaacggccgattagagaagatggggtaatcggccggcgagcttg

SEQ ID NO: 31373 - DNA, 50 bp, unidentified
  source 1..50: mol_type = unassigned DNA; note = donor_16c2f82
  misc_feature 1..24: note = RE
  misc_feature 25: note = Core
  misc_feature 26..50: note = LE
agagttgttttttagctcagttcttcttaagtttgttttttaataaatta

SEQ ID NO: 31374 - DNA, 50 bp, unidentified
  source 1..50: mol_type = unassigned DNA; note = donor_16c8a5a
  misc_feature 1..23: note = RE
  misc_feature 24..25: note = Core
  misc_feature 26..50: note = LE
gttcttgacttcaaatagcaggtctcgtatattgttttcgccacttctcg

SEQ ID NO: 31375 - DNA, 50 bp, unidentified
  source 1..50: mol_type = unassigned DNA; note = donor_16cf76b
  misc_feature 1..24: note = RE
  misc_feature 25: note = Core
  misc_feature 26..50: note = LE
tgctacgcacggccggaccatacataatggaatggtccggccgtgctcct

SEQ ID NO: 31376 - DNA, 50 bp, unidentified
  source 1..50: mol_type = unassigned DNA; note = donor_16d868b
  misc_feature 1..22: note = RE
  misc_feature 23..25: note = Core
  misc_feature 26..50: note = LE
tgtcctctactttctttcacagtaatctccattccgccgcctttcagttg

SEQ ID NO: 31377 - DNA, 50 bp, unidentified
  source 1..50: mol_type = unassigned DNA; note = donor_16d951b
  misc_feature 1..23: note = RE
  misc_feature 24..25: note = Core
  misc_feature 26..50: note = LE
gacccaaaccggccgattagagaagatggggtaatcggcctgcgtttgtt

SEQ ID NO: 31378 - DNA, 50 bp, unidentified
  source 1..50: mol_type = unassigned DNA; note = donor_16d9c88
  misc_feature 1..23: note = RE
  misc_feature 24..25: note = Core
  misc_feature 26..50: note = LE
ttcttgacggaggagtccagatacgatggaatggactcctcctgccgatg

SEQ ID NO: 31379 - DNA, 50 bp, unidentified
  source 1..50: mol_type = unassigned DNA; note = donor_16e8fe9
  misc_feature 1..22: note = RE
  misc_feature 23..25: note = Core
  misc_feature 26..50: note = LE
tgacaaactatataggaacacccccattacgttgttagcagttccgtttg

SEQ ID NO: 31380 - DNA, 50 bp, unidentified
  source 1..50: mol_type = unassigned DNA; note = donor_16edf85
  misc_feature 1..24: note = RE
  misc_feature 25: note = Core
  misc_feature 26..50: note = LE
taatttggtaaatatcataggaagctttaactttgcagctgtaaactaag

SEQ ID NO: 31381 - DNA, 50 bp, unidentified
  source 1..50: mol_type = unassigned DNA; note = donor_16f7998
  misc_feature 1..23: note = RE
  misc_feature 24..25: note = Core
  misc_feature 26..50: note = LE
ctgcgggacttgacaaagcgtgtcctattagctatacttgtgaggagtca

SEQ ID NO: 31382 - DNA, 50 bp, unidentified
  source 1..50: mol_type = unassigned DNA; note = donor_1700337
  misc_feature 1..23: note = RE
  misc_feature 24..25: note = Core
  misc_feature 26..50: note = LE
ttgacagaagggcccattacagaagatacggtaatgggccgcgcctctgg

SEQ ID NO: 31383 - DNA, 50 bp, unidentified
  source 1..50: mol_type = unassigned DNA; note = donor_170469d
  misc_feature 1..19: note = RE
  misc_feature 20..25: note = Core
  misc_feature 26..50: note = LE
ttaaaaggaacgtccctaagtgccggcagagacgatatgagcaggacata

SEQ ID NO: 31384 - DNA, 50 bp, unidentified
  source 1..50: mol_type = unassigned DNA; note = donor_170d925
  misc_feature 1..24: note = RE
  misc_feature 25: note = Core
  misc_feature 26..50: note = LE
ttgcaatccggccgggtccatatacaatggtgtggaccccgccctcccga

SEQ ID NO: 31385 - DNA, 50 bp, unidentified
  source 1..50: mol_type = unassigned DNA; note = donor_1714965
  misc_feature 1..23: note = RE
  misc_feature 24..25: note = Core
  misc_feature 26..50: note = LE
cttaaaagccggagtttctggagagcagtggccaccccgtcggcgtggtt

SEQ ID NO: 31386 - DNA, 50 bp, unidentified
  source 1..50: mol_type = unassigned DNA; note = donor_171b8a0
  misc_feature 1..23: note = RE
  misc_feature 24..25: note = Core
  misc_feature 26..50: note = LE
aaccgagcggcatccaccaaagaagatggggtggatgccgctctcccctg

SEQ ID NO: 31387 - DNA, 50 bp, unidentified
  source 1..50: mol_type = unassigned DNA; note = donor_171ce46
  misc_feature 1..22: note = RE
  misc_feature 23..25: note = Core
  misc_feature 26..50: note = LE
cagaaacggcgccgtccacacatgatggtgtggacggccccgacctccgg

SEQ ID NO: 31388 - DNA, 50 bp, unidentified
  source 1..50: mol_type = unassigned DNA; note = donor_171f8a0
  misc_feature 1..23: note = RE
  misc_feature 24..25: note = Core
  misc_feature 26..50: note = LE
tggcctcgacttgacttagagaactcagtggggaagtatcgaggatgcgg

SEQ ID NO: 31389 - DNA, 50 bp, unidentified
  source 1..50: mol_type = unassigned DNA; note = donor_1724235
  misc_feature 1..23: note = RE
  misc_feature 24..25: note = Core
  misc_feature 26..50: note = LE
gcttgaaattcccagcgggatgatctaccatcggaatttagcaggtagcg

SEQ ID NO: 31390 - DNA, 50 bp, unidentified
  source 1..50: mol_type = unassigned DNA; note = donor_172e9cf
  misc_feature 1..23: note = RE
  misc_feature 24..25: note = Core
  misc_feature 26..50: note = LE
tgccagggagcgccgtccacatatgatgatgtggacggcctctcctcaac

SEQ ID NO: 31391 - DNA, 50 bp, unidentified
  source 1..50: mol_type = unassigned DNA; note = donor_174074f
  misc_feature 1..24: note = RE
  misc_feature 25: note = Core
  misc_feature 26..50: note = LE
tgcgacccacggccggtccatacataatgggatggaccggccgtgcttac

SEQ ID NO: 31392 - DNA, 50 bp, unidentified
  source 1..50: mol_type = unassigned DNA; note = donor_17569f7
  misc_feature 1..23: note = RE
  misc_feature 24..25: note = Core
  misc_feature 26..50: note = LE
aatgttgacatcctattagctggttcgtattataaggttaaccagttttt

SEQ ID NO: 31393 - DNA, 50 bp, unidentified
  source 1..50: mol_type = unassigned DNA; note = donor_175a0e4
  misc_feature 1..24: note = RE
  misc_feature 25: note = Core
  misc_feature 26..50: note = LE
ggcaaaacgggaggagtccatatacaatgggatggactcctcccttctca

SEQ ID NO: 31394 - DNA, 50 bp, unidentified
  source 1..50: mol_type = unassigned DNA; note = donor_176a64d
  misc_feature 1..23: note = RE
  misc_feature 24..25: note = Core
  misc_feature 26..50: note = LE
tgatgggtggagggagatggtatcttgtatctctctcgatatactgttta

SEQ ID NO: 31395 - DNA, 50 bp, unidentified
  source 1..50: mol_type = unassigned DNA; note = donor_176febc
  misc_feature 1..24: note = RE
  misc_feature 25: note = Core
  misc_feature 26..50: note = LE
tcttgccgacgggcgggccatacgtatggaatggcccgccctcctttgcg

SEQ ID NO: 31396 - DNA, 50 bp, unidentified
  source 1..50: mol_type = unassigned DNA; note = donor_17773e5
  misc_feature 1..23: note = RE
  misc_feature 24..25: note = Core
  misc_feature 26..50: note = LE
ccgcttgacagccataggagcatcattgatgatggtcaagcgccctgacc

SEQ ID NO: 31397 - DNA, 50 bp, unidentified
  source 1..50: mol_type = unassigned DNA; note = donor_177fbd6
  misc_feature 1..23: note = RE
  misc_feature 24..25: note = Core
  misc_feature 26..50: note = LE
ggcttgacatacagcattaggaatccctaccttgttgcacgggtccgggc

SEQ ID NO: 31398 - DNA, 50 bp, unidentified
  source 1..50: mol_type = unassigned DNA; note = donor_1781545
  misc_feature 1..24: note = RE
  misc_feature 25: note = Core
  misc_feature 26..50: note = LE
taacacttgacttagagtagaaaaatactaatctagtgttggatgattac

SEQ ID NO: 31399 - DNA, 50 bp, unidentified
  source 1..50: mol_type = unassigned DNA; note = donor_178db32
  misc_feature 1..24: note = RE
  misc_feature 25: note = Core
  misc_feature 26..50: note = LE
tgcaaaagaggaggagtccatacacaatgggatggactcctcctcacctc

SEQ ID NO: 31400 - DNA, 50 bp, unidentified
  source 1..50: mol_type = unassigned DNA; note = donor_17912cd
  misc_feature 1..23: note = RE
  misc_feature 24..25: note = Core
  misc_feature 26..50: note = LE
atgcttgactttttattagcaggctactacaataaaattatggttaatac

SEQ ID NO: 31401 - DNA, 50 bp, unidentified
  source 1..50: mol_type = unassigned DNA; note = donor_1792e12
  misc_feature 1..23: note = RE
  misc_feature 24..25: note = Core
  misc_feature 26..50: note = LE
caacgcgggagccatccacacaggatggggtggatggctcccgctcccgg

SEQ ID NO: 31402 - DNA, 50 bp, unidentified
  source 1..50: mol_type = unassigned DNA; note = donor_1796245
  misc_feature 1..22: note = RE
  misc_feature 23..25: note = Core
  misc_feature 26..50: note = LE
gactaaggcaatgcgattagacaacatggggtaatcgcggcgcgatcatc

SEQ ID NO: 31403 - DNA, 50 bp, unidentified
  source 1..50: mol_type = unassigned DNA; note = donor_17a24c3
  misc_feature 1..20: note = RE
  misc_feature 21..25: note = Core
  misc_feature 26..50: note = LE
ggcggcttgacatagggcttctcactgggccaccattctcgtgttgaggc

SEQ ID NO: 31404 - DNA, 50 bp, unidentified
  source 1..50: mol_type = unassigned DNA; note = donor_17ac832
  misc_feature 1..24: note = RE
  misc_feature 25: note = Core
  misc_feature 26..50: note = LE
ttacttgcatattaacatagattgcactaagtttgcagcgagttccgacg

SEQ ID NO: 31405 - DNA, 50 bp, unidentified
  source 1..50: mol_type = unassigned DNA; note = donor_17aeb3f
  misc_feature 1..23: note = RE
  misc_feature 24..25: note = Core
  misc_feature 26..50: note = LE
gcttgaaatttgcagcgggatgatctacgatcggaatttgcaggtgacag

SEQ ID NO: 31406 - DNA, 50 bp, unidentified
  source 1..50: mol_type = unassigned DNA; note = donor_17b9f06
  misc_feature 1..23: note = RE
  misc_feature 24..25: note = Core
  misc_feature 26..50: note = LE
tggcttgacttttatttgcaggtctgttacaataagtatagtcggtaaat

SEQ ID NO: 31407 - DNA, 50 bp, unidentified
  source 1..50: mol_type = unassigned DNA; note = donor_17bd441
  misc_feature 1..23: note = RE
  misc_feature 24..25: note = Core
  misc_feature 26..50: note = LE
aggcttgacttttaatagttagtctcgtattatatagtcatagccaattc

SEQ ID NO: 31408 - DNA, 50 bp, unidentified
  source 1..50: mol_type = unassigned DNA; note = donor_17bf5a0
  misc_feature 1..24: note = RE
  misc_feature 25: note = Core
  misc_feature 26..50: note = LE
tgcgaaaacggggaagtccttatagaatgaaagggacttcccctactcga

SEQ ID NO: 31409 - DNA, 50 bp, unidentified
  source 1..50: mol_type = unassigned DNA; note = donor_17d8d1a
  misc_feature 1..24: note = RE
  misc_feature 25: note = Core
  misc_feature 26..50: note = LE
tgcacaaaatggggcgtccatagataatgaaatggacgccccttctatac

SEQ ID NO: 31410 - DNA, 50 bp, unidentified
  source 1..50: mol_type = unassigned DNA; note = donor_17d9073
  misc_feature 1..23: note = RE
  misc_feature 24..25: note = Core
  misc_feature 26..50: note = LE
gcaatacgggggaagaccatatacgatgagatggtcttccccctccttca

SEQ ID NO: 31411 - DNA, 50 bp, unidentified
  source 1..50: mol_type = unassigned DNA; note = donor_17da502
  misc_feature 1..23: note = RE
  misc_feature 24..25: note = Core
  misc_feature 26..50: note = LE
gacgaccgaaggcccattacagaagatgccgtaatgggccggcaccagga

SEQ ID NO: 31412 - DNA, 50 bp, unidentified
  source 1..50: mol_type = unassigned DNA; note = donor_17e017a
  misc_feature 1..23: note = RE
  misc_feature 24..25: note = Core
  misc_feature 26..50: note = LE
aaaaatgaattgatgatagttgactcctaccatcaattcatagtataaag

SEQ ID NO: 31413 - DNA, 50 bp, unidentified
  source 1..50: mol_type = unassigned DNA; note = donor_17e7f82
  misc_feature 1..24: note = RE
  misc_feature 25: note = Core
  misc_feature 26..50: note = LE
tgcatcacgggagccatccacacatgatgaggtggatggctccctcttcc

SEQ ID NO: 31414 - DNA, 50 bp, unidentified
  source 1..50: mol_type = unassigned DNA; note = donor_17f6ef4
  misc_feature 1..23: note = RE
  misc_feature 24..25: note = Core
  misc_feature 26..50: note = LE
ggtcttgacttttaatagttagactcgtattataaagtagtagtgtttac

SEQ ID NO: 31415 - DNA, 50 bp, unidentified
  source 1..50: mol_type = unassigned DNA; note = donor_17f717d
  misc_feature 1..23: note = RE
  misc_feature 24..25: note = Core
  misc_feature 26..50: note = LE
gcacgaacgggggcatccatacatgatggattggatgccccctcccaacg

SEQ ID NO: 31416 - DNA, 50 bp, unidentified
  source 1..50: mol_type = unassigned DNA; note = donor_17f81c0
  misc_feature 1..23: note = RE
  misc_feature 24..25: note = Core
  misc_feature 26..50: note = LE
tgaatccagggccgttccacacatgttggggtggaacggcccacggcatc

SEQ ID NO: 31417 - DNA, 50 bp, unidentified
  source 1..50: mol_type = unassigned DNA; note = donor_17fbc0e
  misc_feature 1..23: note = RE
  misc_feature 24..25: note = Core
  misc_feature 26..50: note = LE
agggttgacttttaatagttaatcttgtattatagagtagtagttattag

SEQ ID NO: 31418 - DNA, 50 bp, unidentified
  source 1..50: mol_type = unassigned DNA; note = donor_1801629
  misc_feature 1..23: note = RE
  misc_feature 24..25: note = Core
  misc_feature 26..50: note = LE
gcaggcggggggccgtccacatatgttggggtggacggcccccgacggca

SEQ ID NO: 31419 - DNA, 50 bp, unidentified
  source 1..50: mol_type = unassigned DNA; note = donor_1801d83
  misc_feature 1..23: note = RE
  misc_feature 24..25: note = Core
  misc_feature 26..50: note = LE
cggcttgacaacttcattgagaatccttacctttcttgaagggtggtttt

SEQ ID NO: 31420 - DNA, 50 bp, unidentified
  source 1..50: mol_type = unassigned DNA; note = donor_18020d6
  misc_feature 1..19: note = RE
  misc_feature 20..25: note = Core
  misc_feature 26..50: note = LE
cttgacttcttcattgagagtccttaagttcgtaggtgcagttacttcgt

SEQ ID NO: 31421 - DNA, 50 bp, unidentified
  source 1..50: mol_type = unassigned DNA; note = donor_180757b
  misc_feature 1..23: note = RE
  misc_feature 24..25: note = Core
  misc_feature 26..50: note = LE
agaaccggtgtgagaagacagttgccgcttgtgtcttggcttgccgttag

SEQ ID NO: 31422 - DNA, 50 bp, unidentified
  source 1..50: mol_type = unassigned DNA; note = donor_1808287
  misc_feature 1..22: note = RE
  misc_feature 23..25: note = Core
  misc_feature 26..50: note = LE
tgccaaaggcggcgtccacatatgatgatgtggacgccgctgccagcgca

SEQ ID NO: 31423 - DNA, 50 bp, unidentified
  source 1..50: mol_type = unassigned DNA; note = donor_180b40e
  misc_feature 1..23: note = RE
  misc_feature 24..25: note = Core
  misc_feature 26..50: note = LE
tgacttttcagcccgtgggatgtctaataggggtagagcggctcaagata

SEQ ID NO: 31424 - DNA, 50 bp, unidentified
  source 1..50: mol_type = unassigned DNA; note = donor_1813a6e
  misc_feature 1..24: note = RE
  misc_feature 25: note = Core
  misc_feature 26..50: note = LE
cacaccttgacacgagaggggagcctacttaagacttgatggcagggctc

SEQ ID NO: 31425 - DNA, 50 bp, unidentified
  source 1..50: mol_type = unassigned DNA; note = donor_181dc08
  misc_feature 1..23: note = RE
  misc_feature 24..25: note = Core
  misc_feature 26..50: note = LE
gcaccgaaggctgggtccatatataatgacatggccccagccttcttccc

SEQ ID NO: 31426 - DNA, 50 bp, unidentified
  source 1..50: mol_type = unassigned DNA; note = donor_1820274
  misc_feature 1..22: note = RE
  misc_feature 23..25: note = Core
  misc_feature 26..50: note = LE
aaaattggaaatcaacacagaatctcctatgtttgcaaagttaatttaga

SEQ ID NO: 31427 - DNA, 50 bp, unidentified
  source 1..50: mol_type = unassigned DNA; note = donor_1824463
  misc_feature 1..22: note = RE
  misc_feature 23..25: note = Core
  misc_feature 26..50: note = LE
ttgccagggcgccgtccacacgtgatgctgtggacggcgcccactctacg

SEQ ID NO: 31428 - DNA, 50 bp, unidentified
  source 1..50: mol_type = unassigned DNA; note = donor_1829bde
  misc_feature 1..22: note = RE
  misc_feature 23..25: note = Core
  misc_feature 26..50: note = LE
catgaacgggggcatccatacatgatggagtggatgccccctcccgacgg

SEQ ID NO: 31429 - DNA, 50 bp, unidentified
  source 1..50: mol_type = unassigned DNA; note = donor_1832472
  misc_feature 1..23: note = RE
  misc_feature 24..25: note = Core
  misc_feature 26..50: note = LE
tatcaacgctaacaaaacagttgcctgtgtgtggcgcctatggcatgatg

SEQ ID NO: 31430 - DNA, 50 bp, unidentified
  source 1..50: mol_type = unassigned DNA; note = donor_183ad02
  misc_feature 1..24: note = RE
  misc_feature 25: note = Core
  misc_feature 26..50: note = LE
tgcagtcaaacggcggaccatacataatgagatggtccgcctcttgatca

SEQ ID NO: 31431 - DNA, 50 bp, unidentified
  source 1..50: mol_type = unassigned DNA; note = donor_183ed6e
  misc_feature 1..24: note = RE
  misc_feature 25: note = Core
  misc_feature 26..50: note = LE
ccacttgacgatctatacgagcatcagtgaagattggacgggtcctgatc

SEQ ID NO: 31432 - DNA, 50 bp, unidentified
  source 1..50: mol_type = unassigned DNA; note = donor_1844399
  misc_feature 1..24: note = RE
  misc_feature 25: note = Core
  misc_feature 26..50: note = LE
cttgcggacggggcgggccatacgtatggatggcccgcccctcaccgggc

SEQ ID NO: 31433 - DNA, 50 bp, unidentified
  source 1..50: mol_type = unassigned DNA; note = donor_1849135
  misc_feature 1..23: note = RE
  misc_feature 24..25: note = Core
  misc_feature 26..50: note = LE
acggtcttcttccaacccagttgcttgtgtccccgaaatctgccagaatg

SEQ ID NO: 31434 - DNA, 50 bp, unidentified
  source 1..50: mol_type = unassigned DNA; note = donor_1849e95
  misc_feature 1..24: note = RE
  misc_feature 25: note = Core
  misc_feature 26..50: note = LE
tgcagaaacgggggtgaccatagataatgagatggtcacctccacaccct

SEQ ID NO: 31435 - DNA, 50 bp, unidentified
  source 1..50: mol_type = unassigned DNA; note = donor_184fe4a
  misc_feature 1..24: note = RE
  misc_feature 25: note = Core
  misc_feature 26..50: note = LE
ggggcttgactttttatttgcaggcctgttacaataaaattgtccctaag

SEQ ID NO: 31436 - DNA, 50 bp, unidentified
  source 1..50: mol_type = unassigned DNA; note = donor_1860e04
  misc_feature 1..23: note = RE
  misc_feature 24..25: note = Core
  misc_feature 26..50: note = LE
agggttgacttttaatagttaatcttgtattataaagtagtagttatcag

SEQ ID NO: 31437 - DNA, 50 bp, unidentified
  source 1..50: mol_type = unassigned DNA; note = donor_186877e
  misc_feature 1..23: note = RE
  misc_feature 24..25: note = Core
  misc_feature 26..50: note = LE
aagccgcttgaccacaacggatacttgtcttatgcattccgtgtcgcggc

SEQ ID NO: 31438 - DNA, 50 bp, unidentified
  source 1..50: mol_type = unassigned DNA; note = donor_186a74e
  misc_feature 1..23: note = RE
  misc_feature 24..25: note = Core
  misc_feature 26..50: note = LE
tcgcttgacgcaaaacatagaaccttgtatgtttacaggtgtcggggtga

SEQ ID NO: 31439 - DNA, 50 bp, unidentified
  source 1..50: mol_type = unassigned DNA; note = donor_186ebc5
  misc_feature 1..23: note = RE
  misc_feature 24..25: note = Core
  misc_feature 26..50: note = LE
agacttgacatattattagcaggctactactatggttatagggagatata

SEQ ID NO: 31440 - DNA, 50 bp, unidentified
  source 1..50: mol_type = unassigned DNA; note = donor_187539f
  misc_feature 1..22: note = RE
  misc_feature 23..25: note = Core
  misc_feature 26..50: note = LE
atatttgtttttaaacacagttcatcctatgtttgcaaacagacaagtat

SEQ ID NO: 31441 - DNA, 50 bp, unidentified
  source 1..50: mol_type = unassigned DNA; note = donor_18762e6
  misc_feature 1..22: note = RE
  misc_feature 23..25: note = Core
  misc_feature 26..50: note = LE
gtttctcttgactaatcgtaggaaacatactaagattagagggacgaatc

SEQ ID NO: 31442 - DNA, 50 bp, unidentified
  source 1..50: mol_type = unassigned DNA; note = donor_18773ba
  misc_feature 1..22: note = RE
  misc_feature 23..25: note = Core
  misc_feature 26..50: note = LE
ctacttgacttttcttagcaggtctattacaattattttggttggaagtc

SEQ ID NO: 31443 - DNA, 50 bp, unidentified
  source 1..50: mol_type = unassigned DNA; note = donor_18832ec
  misc_feature 1..23: note = RE
  misc_feature 24..25: note = Core
  misc_feature 26..50: note = LE
gacggggaacggcccattacagaagatgccgtaatgggccgggcctcgcg

SEQ ID NO: 31444 - DNA, 50 bp, unidentified
  source 1..50: mol_type = unassigned DNA; note = donor_18854b4
  misc_feature 1..24: note = RE
  misc_feature 25: note = Core
  misc_feature 26..50: note = LE
tttacttgtttttatcatagaatacctttagattagcaaaatgaaataat

SEQ ID NO: 31445 - DNA, 50 bp, unidentified
  source 1..50: mol_type = unassigned DNA; note = donor_188a338
  misc_feature 1..23: note = RE
  misc_feature 24..25: note = Core
  misc_feature 26..50: note = LE
ctacttgacttttcttagcaggtctattacaataaatttggacaggaaag

SEQ ID NO: 31446 - DNA, 50 bp, unidentified
  source 1..50: mol_type = unassigned DNA; note = donor_188b65d
  misc_feature 1..24: note = RE
  misc_feature 25: note = Core
  misc_feature 26..50: note = LE
tgcaaacgaggaggagtccatacacaatgggatggactcctcctcatccc

SEQ ID NO: 31447 - DNA, 50 bp, unidentified
  source 1..50: mol_type = unassigned DNA; note = donor_188df72
  misc_feature 1..23: note = RE
  misc_feature 24..25: note = Core
  misc_feature 26..50: note = LE
gcatcgacgggggcatccacacatgatggcgtggatgccccctcccgacg

SEQ ID NO: 31448 - DNA, 50 bp, unidentified
  source 1..50: mol_type = unassigned DNA; note = donor_189363c
  misc_feature 1..24: note = RE
  misc_feature 25: note = Core
  misc_feature 26..50: note = LE
accaaccccttgacagaggggtgcctacttaaagagaattgatgtacgac

SEQ ID NO: 31449 - DNA, 50 bp, unidentified
  source 1..50: mol_type = unassigned DNA; note = donor_1896d27
  misc_feature 1..21: note = RE
  misc_feature 22..25: note = Core
  misc_feature 26..50: note = LE
tgatttgacaaaacttagataatcacgtataatattgaacataaagattt

SEQ ID NO: 31450 - DNA, 50 bp, unidentified
  source 1..50: mol_type = unassigned DNA; note = donor_189a07a
  misc_feature 1..24: note = RE
  misc_feature 25: note = Core
  misc_feature 26..50: note = LE
tgcaaatgagggggagtccatatacaatgggatggactccctctccccga

SEQ ID NO: 31451 - DNA, 50 bp, unidentified
  source 1..50: mol_type = unassigned DNA; note = donor_189d446
  misc_feature 1..23: note = RE
  misc_feature 24..25: note = Core
  misc_feature 26..50: note = LE
tgccaagcgggtcgttccacatatgatgaggtggaacgacccgctaccac

SEQ ID NO: 31452 - DNA, 50 bp, unidentified
  source 1..50: mol_type = unassigned DNA; note = donor_18a0108
  misc_feature 1..23: note = RE
  misc_feature 24..25: note = Core
  misc_feature 26..50: note = LE
gataactatagggagtccatataagatgtatggactccctatcctcacca

SEQ ID NO: 31453 - DNA, 50 bp, unidentified
  source 1..50: mol_type = unassigned DNA; note = donor_18a10f6
  misc_feature 1..24: note = RE
  misc_feature 25: note = Core
  misc_feature 26..50: note = LE
tgccaaaaacggggcgtccatagataatgagatggacgcccttctatact

SEQ ID NO: 31454 - DNA, 50 bp, unidentified
  source 1..50: mol_type = unassigned DNA; note = donor_18ae8b2
  misc_feature 1..23: note = RE
  misc_feature 24..25: note = Core
  misc_feature 26..50: note = LE
cttgatccgaacatgcccatgtgagatcccatgggtgtgtggatggcgac

SEQ ID NO: 31455 - DNA, 50 bp, unidentified
  source 1..50: mol_type = unassigned DNA; note = donor_18b4efd
  misc_feature 1..22: note = RE
  misc_feature 23..25: note = Core
  misc_feature 26..50: note = LE
ttaattggaaatcaacacagaatctcctatgtttgcgaagttattgatta

SEQ ID NO: 31456 - DNA, 50 bp, unidentified
  source 1..50: mol_type = unassigned DNA; note = donor_18bb14b
  misc_feature 1..24: note = RE
  misc_feature 25: note = Core
  misc_feature 26..50: note = LE
ttgcaatgaggaggagtccatatacaatgggatggactcctcctccccta

SEQ ID NO: 31457 - DNA, 50 bp, unidentified
  source 1..50: mol_type = unassigned DNA; note = donor_18c1a26
  misc_feature 1..21: note = RE
  misc_feature 22..25: note = Core
  misc_feature 26..50: note = LE
ctgggggttgacttagggctactcactggtgcaccctgagggagtcgcgg

SEQ ID NO: 31458 - DNA, 50 bp, unidentified
  source 1..50: mol_type = unassigned DNA; note = donor_18c38ed
  misc_feature 1..20: note = RE
  misc_feature 21..25: note = Core
  misc_feature 26..50: note = LE
tgacaaccagatagggacaccccccgttacctttttcgtggttcctgatc

SEQ ID NO: 31459 - DNA, 50 bp, unidentified
  source 1..50: mol_type = unassigned DNA; note = donor_18caeef
  misc_feature 1..24: note = RE
  misc_feature 25: note = Core
  misc_feature 26..50: note = LE
tggcaaaccgggggcgtccatgtacaatggaatggacgcccccgccctat

SEQ ID NO: 31460 - DNA, 50 bp, unidentified
  source 1..50: mol_type = unassigned DNA; note = donor_18caef2
  misc_feature 1..22: note = RE
  misc_feature 23..25: note = Core
  misc_feature 26..50: note = LE
catgcacggagccatccacacatgatggggtggatggcccccacccggcc

SEQ ID NO: 31461 - DNA, 50 bp, unidentified
  source 1..50: mol_type = unassigned DNA; note = donor_18cc6b9
  misc_feature 1..24: note = RE
  misc_feature 25: note = Core
  misc_feature 26..50: note = LE
ttgcaaactgggggcgtccatgtataatggaatggacgccccctttcact

SEQ ID NO: 31462 - DNA, 50 bp, unidentified
  source 1..50: mol_type = unassigned DNA; note = donor_18ce1b6
  misc_feature 1..23: note = RE
  misc_feature 24..25: note = Core
  misc_feature 26..50: note = LE
gcgccgaagggggcgtccacacatgatggcgtggacggcccctgcactag

SEQ ID NO: 31463 - DNA, 50 bp, unidentified
  source 1..50: mol_type = unassigned DNA; note = donor_18d1ec5
  misc_feature 1..23: note = RE
  misc_feature 24..25: note = Core
  misc_feature 26..50: note = LE
gcaataacggggcggaccatacattaattatatggtccgcctcactctca

SEQ ID NO: 31464 - DNA, 50 bp, unidentified
  source 1..50: mol_type = unassigned DNA; note = donor_18d3806
  misc_feature 1..23: note = RE
  misc_feature 24..25: note = Core
  misc_feature 26..50: note = LE
tctattgacatttgatagctggtctcgtataataatgttgtagttaaaac

SEQ ID NO: 31465 - DNA, 50 bp, unidentified
  source 1..50: mol_type = unassigned DNA; note = donor_18ec16f
  misc_feature 1..24: note = RE
  misc_feature 25: note = Core
  misc_feature 26..50: note = LE
tcggtctgaaaaaagacagttgctcttgtgtcttcgctttggcctagcgt

SEQ ID NO: 31466 - DNA, 50 bp, unidentified
  source 1..50: mol_type = unassigned DNA; note = donor_18f4ffb
  misc_feature 1..22: note = RE
  misc_feature 23..25: note = Core
  misc_feature 26..50: note = LE
cacttagggcggcaaccacagaagatggaatggttgccgccctcccgaga

SEQ ID NO: 31467 - DNA, 50 bp, unidentified
  source 1..50: mol_type = unassigned DNA; note = donor_18f6aa1
  misc_feature 1..23: note = RE
  misc_feature 24..25: note = Core
  misc_feature 26..50: note = LE
atccagcttgaccaatacggatacttgtcttatgattttggcagtttcta

SEQ ID NO: 31468 - DNA, 50 bp, unidentified; identical to SEQ ID NO: 30504
  source 1..50: mol_type = unassigned DNA; note = donor_18f99ba
  misc_feature 1..23: note = RE
  misc_feature 24..25: note = Core
  misc_feature 26..50: note = LE

SEQ ID NO: 31469 - DNA, 50 bp, unidentified
  source 1..50: mol_type = unassigned DNA; note = donor_1909d95
  misc_feature 1..23: note = RE
  misc_feature 24..25: note = Core
  misc_feature 26..50: note = LE
acaggtgggggcgagtccatacataatcagatggactcgccctcgccgag

SEQ ID NO: 31470 - DNA, 50 bp, unidentified
  source 1..50: mol_type = unassigned DNA; note = donor_19103ba
  misc_feature 1..23: note = RE
  misc_feature 24..25: note = Core
  misc_feature 26..50: note = LE
tgccagggagggccgtccacatatgatggtgtggacggcctctcctcaac

SEQ ID NO: 31471 - DNA, 50 bp, unidentified
  source 1..50: mol_type = unassigned DNA; note = donor_191bfd2
  misc_feature 1..23: note = RE
  misc_feature 24..25: note = Core
  misc_feature 26..50: note = LE
gagtggcttgaccaagacggatacttgtcttatgacttttcgtgccgatt

SEQ ID NO: 31472 - DNA, 50 bp, unidentified
  source 1..50: mol_type = unassigned DNA; note = donor_191f2de
  misc_feature 1..22: note = RE
  misc_feature 23..25: note = Core
  misc_feature 26..50: note = LE
acttcttaccgacgtgggatgtctaatagggtaggaacaagatccaccga

SEQ ID NO: 31473 - DNA, 50 bp, unidentified
  source 1..50: mol_type = unassigned DNA; note = donor_1924743
  misc_feature 1..23: note = RE
  misc_feature 24..25: note = Core
  misc_feature 26..50: note = LE
atgcttgacgcggaagagagaatcttgtatcttgcgaactgaggcgtgac

SEQ ID NO: 31474 - DNA, 50 bp, unidentified
  source 1..50: mol_type = unassigned DNA; note = donor_192a5fc
  misc_feature 1..24: note = RE
  misc_feature 25: note = Core
  misc_feature 26..50: note = LE
gaaaaaaacagcgcctgacggcgctcgggccttgggttctaacctgttgc

SEQ ID NO: 31475 - DNA, 50 bp, unidentified
  source 1..50: mol_type = unassigned DNA; note = donor_19446eb
  misc_feature 1..23: note = RE
  misc_feature 24..25: note = Core
  misc_feature 26..50: note = LE
tctcttgactttttatagctggtctcgtataatgaatttacggtgttttt

SEQ ID NO: 31476 - DNA, 50 bp, unidentified
  source 1..50: mol_type = unassigned DNA; note = donor_19538f6
  misc_feature 1..22: note = RE
  misc_feature 23..25: note = Core
  misc_feature 26..50: note = LE
aactaatgggaagtttcttagaagcgccggacagataaaacctgtcaaac

SEQ ID NO: 31477 - DNA, 50 bp, unidentified
  source 1..50: mol_type = unassigned DNA; note = donor_195b9b4
  misc_feature 1..23: note = RE
  misc_feature 24..25: note = Core
  misc_feature 26..50: note = LE
tgacatctaacctcctgggatgtctaatcagttcagggagtggtgccatc

SEQ ID NO: 31478 - DNA, 50 bp, unidentified
  source 1..50: mol_type = unassigned DNA; note = donor_195edf7
  misc_feature 1..23: note = RE
  misc_feature 24..25: note = Core
  misc_feature 26..50: note = LE
cggctctctgacagatacagttgcttctgtatctgctctctggtaaactt

SEQ ID NO: 31479 - DNA, 50 bp, unidentified
  source 1..50: mol_type = unassigned DNA; note = donor_1964f65
  misc_feature 1..24: note = RE
  misc_feature 25: note = Core
  misc_feature 26..50: note = LE
ccggtgttgacaacgacatagaggcgttaccttcttcccgtcccaggtat

SEQ ID NO: 31480 - DNA, 50 bp, unidentified
  source 1..50: mol_type = unassigned DNA; note = donor_1968b26
  misc_feature 1..24: note = RE
  misc_feature 25: note = Core
  misc_feature 26..50: note = LE
gcatccgttgacacagaggggtgcctactaggagacttccggcagggtcg

SEQ ID NO: 31481 - DNA, 50 bp, unidentified
  source 1..50: mol_type = unassigned DNA; note = donor_196a83c
  misc_feature 1..22: note = RE
  misc_feature 23..25: note = Core
  misc_feature 26..50: note = LE
tgtcaaaggcggcgtccacatatgatgatgtggacgccgctgccaccgca

SEQ ID NO: 31482 - DNA, 50 bp, unidentified
  source 1..50: mol_type = unassigned DNA; note = donor_1970a98
  misc_feature 1..24: note = RE
  misc_feature 25: note = Core
  misc_feature 26..50: note = LE
gcggcttgacaaagaacataggggccccacgttactttcttcgtgacccg

SEQ ID NO: 31483 - DNA, 50 bp, unidentified
  source 1..50: mol_type = unassigned DNA; note = donor_1972316
  misc_feature 1..23: note = RE
  misc_feature 24..25: note = Core
  misc_feature 26..50: note = LE
acacttgacttttcatagcaggtcttgtatgatgttttcagaagctaaaa

SEQ ID NO: 31484 - DNA, 50 bp, unidentified
  source 1..50: mol_type = unassigned DNA; note = donor_1978234
  misc_feature 1..23: note = RE
  misc_feature 24..25: note = Core
  misc_feature 26..50: note = LE
gactggcttgaccaagacggatacttgtcttgtgacttttcgagctgatt

SEQ ID NO: 31485 - DNA, 50 bp, unidentified
  source 1..50: mol_type = unassigned DNA; note = donor_197e3f0
  misc_feature 1..22: note = RE
  misc_feature 23..25: note = Core
  misc_feature 26..50: note = LE
ccccttgacaatcgacacagaacatggtatgttgaaggtgtaagaattga

SEQ ID NO: 31486 - DNA, 50 bp, unidentified
  source 1..50: mol_type = unassigned DNA; note = donor_1990dee
  misc_feature 1..21: note = RE
  misc_feature 22..25: note = Core
  misc_feature 26..50: note = LE
cttgacaaaaacatagggacaccccgttacctttttagtaggccccgcgt

SEQ ID NO: 31487 - DNA, 50 bp, unidentified
  source 1..50: mol_type = unassigned DNA; note = donor_1991336
  misc_feature 1..23: note = RE
  misc_feature 24..25: note = Core
  misc_feature 26..50: note = LE
gaccccaacgggccgtccacgcatgttggggtggacggcccaaaggcatc

SEQ ID NO: 31488 - DNA, 50 bp, unidentified
  source 1..50: mol_type = unassigned DNA; note = donor_1999177
  misc_feature 1..23: note = RE
  misc_feature 24..25: note = Core
  misc_feature 26..50: note = LE
ttgacacggcacccctacatatcagacggtatgacgtagctgcggcatcg

SEQ ID NO: 31489 - DNA, 50 bp, unidentified
  source 1..50: mol_type = unassigned DNA; note = donor_19a3446
  misc_feature 1..23: note = RE
  misc_feature 24..25: note = Core
  misc_feature 26..50: note = LE
taatttgactttgaacagagtatcttgtatgattaattttaagacctatt

SEQ ID NO: 31490 - DNA, 50 bp, unidentified
  source 1..50: mol_type = unassigned DNA; note = donor_19ace54
  misc_feature 1..23: note = RE
  misc_feature 24..25: note = Core
  misc_feature 26..50: note = LE
gcatgaacgggggcatccatacatgatggaatggatgccccctaccgacg

SEQ ID NO: 31491 - DNA, 50 bp, unidentified
  source 1..50: mol_type = unassigned DNA; note = donor_19bf819
  misc_feature 1..21: note = RE
  misc_feature 22..25: note = Core
  misc_feature 26..50: note = LE
tgacaatggggagtccacataagataattggactccccaaccctaagtcc

SEQ ID NO: 31492 - DNA, 50 bp, unidentified
  source 1..50: mol_type = unassigned DNA; note = donor_19c0264
  misc_feature 1..22: note = RE
  misc_feature 23..25: note = Core
  misc_feature 26..50: note = LE
cagcgcaggggccatccacagatgatgaggtggatggcccctgtgtccaa

SEQ ID NO: 31493 - DNA, 50 bp, unidentified
  source 1..50: mol_type = unassigned DNA; note = donor_19c0492
  misc_feature 1..23: note = RE
  misc_feature 24..25: note = Core
  misc_feature 26..50: note = LE
ccacttgatttcgaagacagttgcttgtatcttcatttttaagtatacat

SEQ ID NO: 31494 - DNA, 50 bp, unidentified
  source 1..50: mol_type = unassigned DNA; note = donor_19c11ae
  misc_feature 1..21: note = RE
  misc_feature 22..25: note = Core
  misc_feature 26..50: note = LE
gggcggcttgacatagggcttctcactggtccaccatcctcaggtcggcg

SEQ ID NO: 31495 - DNA, 50 bp, unidentified
  source 1..50: mol_type = unassigned DNA; note = donor_19ca83a
  misc_feature 1..23: note = RE
  misc_feature 24..25: note = Core
  misc_feature 26..50: note = LE
ttgcttgacagttaagacggtatcttgtatcttgttctttgtagtgatta

SEQ ID NO: 31496 - DNA, 50 bp, unidentified
  source 1..50: mol_type = unassigned DNA; note = donor_19d25d6
  misc_feature 1..23: note = RE
  misc_feature 24..25: note = Core
  misc_feature 26..50: note = LE
atgccacttgatcgacacggatacttgtcttatgacttcccccggctccc

SEQ ID NO: 31497 - DNA, 50 bp, unidentified
  source 1..50: mol_type = unassigned DNA; note = donor_19d3a00
  misc_feature 1..21: note = RE
  misc_feature 22..25: note = Core
  misc_feature 26..50: note = LE
tcgggggttgacacagggtgtctcactggcctaccctccgttccctggat

SEQ ID NO: 31498 - DNA, 50 bp, unidentified
  source 1..50: mol_type = unassigned DNA; note = donor_19d4c27
  misc_feature 1..22: note = RE
  misc_feature 23..25: note = Core
  misc_feature 26..50: note = LE
ttgcttgactttttatttgcagactacaatgtatttggtcgatgtccccg

SEQ ID NO: 31499 - DNA, 50 bp, unidentified; identical to SEQ ID NO: 31193
  source 1..50: mol_type = unassigned DNA; note = donor_19ecd44
  misc_feature 1..22: note = RE
  misc_feature 23..25: note = Core
  misc_feature 26..50: note = LE

SEQ ID NO: 31500 - DNA, 50 bp, unidentified
  source 1..50: mol_type = unassigned DNA; note = donor_19f0ffe
  misc_feature 1..22: note = RE
  misc_feature 23..25: note = Core
  misc_feature 26..50: note = LE
cagcttgactcggtcattgaaactccgtaagttgtttggtggcccgggag

SEQ ID NO: 31501 - DNA, 50 bp, unidentified
  source 1..50: mol_type = unassigned DNA; note = donor_19f34f6
  misc_feature 1..22: note = RE
  misc_feature 23..25: note = Core
  misc_feature 26..50: note = LE
ccaggcgggggccatccacacatgatggggtggatggccccctcgcggca

SEQ ID NO: 31502 - DNA, 50 bp, unidentified
  source 1..50: mol_type = unassigned DNA; note = donor_19f4962
  misc_feature 1..23: note = RE
  misc_feature 24..25: note = Core
  misc_feature 26..50: note = LE
gcattttatcgcgcgattagacgacatggggtaatcgcgggagcgagtcg

SEQ ID NO: 31503 - DNA, 50 bp, unidentified
  source 1..50: mol_type = unassigned DNA; note = donor_19fb58f
  misc_feature 1..21: note = RE
  misc_feature 22..25: note = Core
  misc_feature 26..50: note = LE
caacctacggtcctgggatgtctaatgggaattgatcggcgagccttcaa

SEQ ID NO: 31504 - DNA, 50 bp, unidentified
  source 1..50: mol_type = unassigned DNA; note = donor_19fc1ec
  misc_feature 1..24: note = RE
  misc_feature 25: note = Core
  misc_feature 26..50: note = LE
tggcaaaagggaggcgtccatatagaatgtaatggacgcctcccacctac

SEQ ID NO: 31505 - DNA, 50 bp, unidentified
  source 1..50: mol_type = unassigned DNA; note = donor_19fe4a8
  misc_feature 1..23: note = RE
  misc_feature 24..25: note = Core
  misc_feature 26..50: note = LE
gcaataacgaggcggaccatacattaattagatggtccgcctcaactcta

SEQ ID NO: 31506 - DNA, 50 bp, unidentified
  source 1..50: mol_type = unassigned DNA; note = donor_1a0927f
  misc_feature 1..23: note = RE
  misc_feature 24..25: note = Core
  misc_feature 26..50: note = LE
gcaatataggggcggaccatacattaattatatggtccgcctcactctca

SEQ ID NO: 31507 - DNA, 50 bp, unidentified
  source 1..50: mol_type = unassigned DNA; note = donor_1a0d0b4
  misc_feature 1..22: note = RE
  misc_feature 23..25: note = Core
  misc_feature 26..50: note = LE
cggcttgacacggtcattgagattccttaagaattagtgccggtccggga

SEQ ID NO: 31508 - DNA, 50 bp, unidentified
  source 1..50: mol_type = unassigned DNA; note = donor_1a16fc0
  misc_feature 1..24: note = RE
  misc_feature 25: note = Core
  misc_feature 26..50: note = LE
tgcaaaacgggaggtgtccatatacaatggtatggacccctcccacctaa

SEQ ID NO: 31509 - DNA, 50 bp, unidentified
  source 1..50: mol_type = unassigned DNA; note = donor_1a183f2
  misc_feature 1..23: note = RE
  misc_feature 24..25: note = Core
  misc_feature 26..50: note = LE
tcgttgacaggtcaaaacatatcagacatgatgttttgacctgccctacc

SEQ ID NO: 31510 - DNA, 50 bp, unidentified
  source 1..50: mol_type = unassigned DNA; note = donor_1a195d6
  misc_feature 1..23: note = RE
  misc_feature 24..25: note = Core
  misc_feature 26..50: note = LE
gccaactaggagccgtccacacatgatgctgtggacggctcctccaccgg

SEQ ID NO: 31511 - DNA, 50 bp, unidentified
  source 1..50: mol_type = unassigned DNA; note = donor_1a1a586
  misc_feature 1..24: note = RE
  misc_feature 25: note = Core
  misc_feature 26..50: note = LE
atgttgacaagctattagctggtatcgtattatgaggtcagccagtttta

SEQ ID NO: 31512 - DNA, 50 bp, unidentified
  source 1..50: mol_type = unassigned DNA; note = donor_1a239a6
  misc_feature 1..23: note = RE
  misc_feature 24..25: note = Core
  misc_feature 26..50: note = LE
gactaaccagggcccgttacagaagatggggtaacgggccccggcggcct

SEQ ID NO: 31513 - DNA, 50 bp, unidentified
  source 1..50: mol_type = unassigned DNA; note = donor_1a2abdf
  misc_feature 1..23: note = RE
  misc_feature 24..25: note = Core
  misc_feature 26..50: note = LE
caatgcgggagccatccacacaggatggggtggatggctcccgctcccgg

SEQ ID NO: 31514 - DNA, 50 bp, unidentified
  source 1..50: mol_type = unassigned DNA; note = donor_1a2de84
  misc_feature 1..23: note = RE
  misc_feature 24..25: note = Core
  misc_feature 26..50: note = LE
ccccttgactttttatagttagtctcgtataataaatgtagtagttttta

SEQ ID NO: 31515 - DNA, 50 bp, unidentified
  source 1..50: mol_type = unassigned DNA; note = donor_1a30312
  misc_feature 1..24: note = RE
  misc_feature 25: note = Core
  misc_feature 26..50: note = LE
ttgcaaagaggaggagtccatatacaatgggatggactcctcctcaccca

SEQ ID NO: 31516 - DNA, 50 bp, unidentified
  source 1..50: mol_type = unassigned DNA; note = donor_1a37236
  misc_feature 1..23: note = RE
  misc_feature 24..25: note = Core
  misc_feature 26..50: note = LE
tggcttgacttttatttgcaggtctactataataatatttagtcgtataa

SEQ ID NO: 31517 - DNA, 50 bp, unidentified
  source 1..50: mol_type = unassigned DNA; note = donor_1a3c8b0
  misc_feature 1..21: note = RE
  misc_feature 22..25: note = Core
  misc_feature 26..50: note = LE
gcaaacgggatgcgttcatataaaatgtaatgaacgcatcccacacaatt

SEQ ID NO: 31518 - DNA, 50 bp, unidentified
  source 1..50: mol_type = unassigned DNA; note = donor_1a3e16d
  misc_feature 1..24: note = RE
  misc_feature 25: note = Core
  misc_feature 26..50: note = LE
tgcaaaggtggggaagcccttgtagaatgaaagggacttccccgtcccaa

SEQ ID NO: 31519 - DNA, 50 bp, unidentified
  source 1..50: mol_type = unassigned DNA; note = donor_1a40847
  misc_feature 1..23: note = RE
  misc_feature 24..25: note = Core
  misc_feature 26..50: note = LE
aggcttgatttttaatagttagtcttgtattatagagtagtagttattaa

SEQ ID NO: 31520 - DNA, 50 bp, unidentified
  source 1..50: mol_type = unassigned DNA; note = donor_1a532f1
  misc_feature 1..23: note = RE
  misc_feature 24..25: note = Core
  misc_feature 26..50: note = LE
gcctccgcctgacaagacagttgcttatctcttccgactctggcacctta

SEQ ID NO: 31521 - DNA, 50 bp, unidentified
  source 1..50: mol_type = unassigned DNA; note = donor_1a5d881
  misc_feature 1..24: note = RE
  misc_feature 25: note = Core
  misc_feature 26..50: note = LE
tgcaaaaatggggcggaccatagataatgggatggtccgccccgccttag

SEQ ID NO: 31522 - DNA, 50 bp, unidentified
  source 1..50: mol_type = unassigned DNA; note = donor_1a6aca5
  misc_feature 1..23: note = RE
  misc_feature 24..25: note = Core
  misc_feature 26..50: note = LE
gtggcacgggggccgtccacatatgatggggtggacggccccctacggca

SEQ ID NO: 31523 - DNA, 50 bp, unidentified
  source 1..50: mol_type = unassigned DNA; note = donor_1a80d1d
  misc_feature 1..23: note = RE
  misc_feature 24..25: note = Core
  misc_feature 26..50: note = LE
gtaagcgggaggccgtccacatatgttggtgtggacggcctcccaacggc

SEQ ID NO: 31524 - DNA, 50 bp, unidentified
  source 1..50: mol_type = unassigned DNA; note = donor_1a83d9f
  misc_feature 1..20: note = RE
  misc_feature 21..25: note = Core
  misc_feature 26..50: note = LE
cttgacagacaccatagggacacccgttaccttctaggtagccccgatgg

SEQ ID NO: 31525 - DNA, 50 bp, unidentified; identical to SEQ ID NO: 30383
  source 1..50: mol_type = unassigned DNA; note = donor_1a857ff
  misc_feature 1..23: note = RE
  misc_feature 24..25: note = Core
  misc_feature 26..50: note = LE

SEQ ID NO: 31526 - DNA, 50 bp, unidentified
  source 1..50: mol_type = unassigned DNA; note = donor_1a8ff85
  misc_feature 1..23: note = RE
  misc_feature 24..25: note = Core
  misc_feature 26..50: note = LE
cttcgccgcatgaaacacagttgcctgtgtgtcgtgactgtgcaatgttg

SEQ ID NO: 31527 - DNA, 50 bp, unidentified
  source 1..50: mol_type = unassigned DNA; note = donor_1a983b3
  misc_feature 1..23: note = RE
  misc_feature 24..25: note = Core
  misc_feature 26..50: note = LE
gcatccaacggggcgtccacacacgatggggtggacgcccctccgacggc

SEQ ID NO: 31528 - DNA, 50 bp, unidentified
  source 1..50: mol_type = unassigned DNA; note = donor_1aa33ae
  misc_feature 1..23: note = RE
  misc_feature 24..25: note = Core
  misc_feature 26..50: note = LE
acttgaaaatttaagagggatgttctaccattgcattttgcacggagacg

SEQ ID NO: 31529 - DNA, 50 bp, unidentified
  source 1..50: mol_type = unassigned DNA; note = donor_1aa90cc
  misc_feature 1..23: note = RE
  misc_feature 24..25: note = Core
  misc_feature 26..50: note = LE
aatttttacgttcaagacagttgcttgtatcttgaaaataatttaaaata

SEQ ID NO: 31530 - DNA, 50 bp, unidentified
  source 1..50: mol_type = unassigned DNA; note = donor_1aaf2a5
  misc_feature 1..24: note = RE
  misc_feature 25: note = Core
  misc_feature 26..50: note = LE
gccaaaccgggaggcgtccatataatgttatggacgcctccctcccgccg

SEQ ID NO: 31531 - DNA, 50 bp, unidentified
  source 1..50: mol_type = unassigned DNA; note = donor_1ab2f0c
  misc_feature 1..23: note = RE
  misc_feature 24..25: note = Core
  misc_feature 26..50: note = LE
gcactccttgggcggaccatgtaagatggcacggtccgcccacctacagc

SEQ ID NO: 31532 - DNA, 50 bp, unidentified
  source 1..50: mol_type = unassigned DNA; note = donor_1ab5560
  misc_feature 1..23: note = RE
  misc_feature 24..25: note = Core
  misc_feature 26..50: note = LE
gcttgacgagaaacatagggacaccgttacctttctggtgaccccgtagg

SEQ ID NO: 31533 - DNA, 50 bp, unidentified
  source 1..50: mol_type = unassigned DNA; note = donor_1ac1e9a
  misc_feature 1..23: note = RE
  misc_feature 24..25: note = Core
  misc_feature 26..50: note = LE
agtcttgacttttaatagttagtctcgtattataaagtagtagtgtttat

SEQ ID NO: 31534 - DNA, 50 bp, unidentified
  source 1..50: mol_type = unassigned DNA; note = donor_1aca842
  misc_feature 1..23: note = RE
  misc_feature 24..25: note = Core
  misc_feature 26..50: note = LE
gcaagcggggggccgtccacatatgttggggtggacggcccccaagcggc

SEQ ID NO: 31535 - DNA, 50 bp, unidentified
  source 1..50: mol_type = unassigned DNA; note = donor_1ad01b4
  misc_feature 1..23: note = RE
  misc_feature 24..25: note = Core
  misc_feature 26..50: note = LE
ccctcgcctgaacaacacagttgcttgtgtgttgggaatcggccaaagtg

SEQ ID NO: 31536 - DNA, 50 bp, unidentified
  source 1..50: mol_type = unassigned DNA; note = donor_1aed8a5
  misc_feature 1..23: note = RE
  misc_feature 24..25: note = Core
  misc_feature 26..50: note = LE
aggcttgacttttaatagttaatcttgtattatagagtggtagtttatga

SEQ ID NO: 31537 - DNA, 50 bp, unidentified
  source 1..50: mol_type = unassigned DNA; note = donor_1af5af1
  misc_feature 1..23: note = RE
  misc_feature 24..25: note = Core
  misc_feature 26..50: note = LE
agacttgacttttaatagttagtctcgtattataaagtagtagtgtttat

SEQ ID NO: 31538 - DNA, 50 bp, unidentified
  source 1..50: mol_type = unassigned DNA; note = donor_1b06edb
  misc_feature 1..24: note = RE
  misc_feature 25: note = Core
  misc_feature 26..50: note = LE
tggcaaaaccggggcgaccatatataatggaatggtcgcccctccctaaa

SEQ ID NO: 31539 - DNA, 50 bp, unidentified
  source 1..50: mol_type = unassigned DNA; note = donor_1b0a640
  misc_feature 1..23: note = RE
  misc_feature 24..25: note = Core
  misc_feature 26..50: note = LE
ggtgcttgaccactaacaccgttgccttatacattagaggccggaacacc

SEQ ID NO: 31540 - DNA, 50 bp, unidentified
  source 1..50: mol_type = unassigned DNA; note = donor_1b0adcd
  misc_feature 1..23: note = RE
  misc_feature 24..25: note = Core
  misc_feature 26..50: note = LE
gacgaacgatggcccattacagaagatgccgtaatgggccggccttcgcg

SEQ ID NO: 31541 - DNA, 50 bp, unidentified
  source 1..50: mol_type = unassigned DNA; note = donor_1b2c54c
  misc_feature 1..23: note = RE
  misc_feature 24..25: note = Core
  misc_feature 26..50: note = LE
gtgcttgacattagatagctggtctagtatattgatgttacgtactccaa

SEQ ID NO: 31542 - DNA, 50 bp, unidentified
  source 1..50: mol_type = unassigned DNA; note = donor_1b35686
  misc_feature 1..23: note = RE
  misc_feature 24..25: note = Core
  misc_feature 26..50: note = LE
ttgtcgattctgaaagatggtatcttgtatcttgaggttttggatgatta

SEQ ID NO: 31543 - DNA, 50 bp, unidentified
  source 1..50: mol_type = unassigned DNA; note = donor_1b3d345
  misc_feature 1..23: note = RE
  misc_feature 24..25: note = Core
  misc_feature 26..50: note = LE
tgacatccaaattcctgggatgtctaatgagagttaacgggtccgctgtc

SEQ ID NO: 31544 - DNA, 50 bp, unidentified
  source 1..50: mol_type = unassigned DNA; note = donor_1b42c6c
  misc_feature 1..23: note = RE
  misc_feature 24..25: note = Core
  misc_feature 26..50: note = LE
atacttgaattttatatagttagctggtatattgtaattgacccatctag

SEQ ID NO: 31545 - DNA, 50 bp, unidentified
  source 1..50: mol_type = unassigned DNA; note = donor_1b4da17
  misc_feature 1..24: note = RE
  misc_feature 25: note = Core
  misc_feature 26..50: note = LE
aaagttgttttttacctcagttcttcttaagtttgtcttttaataaattt

SEQ ID NO: 31546 - DNA, 50 bp, unidentified
  source 1..50: mol_type = unassigned DNA; note = donor_1b4e15a
  misc_feature 1..22: note = RE
  misc_feature 23..25: note = Core
  misc_feature 26..50: note = LE
gcacacgggaggcgtccatataagatggtatggacgcctcccactcttcg

SEQ ID NO: 31547 - DNA, 50 bp, unidentified
  source 1..50: mol_type = unassigned DNA; note = donor_1b50e91
  misc_feature 1..21: note = RE
  misc_feature 22..25: note = Core
  misc_feature 26..50: note = LE
caatgcgggcgccgtccacacatgatgaggtggacgacgcccgctccggc

SEQ ID NO: 31548 - DNA, 50 bp, unidentified
  source 1..50: mol_type = unassigned DNA; note = donor_1b529da
  misc_feature 1..24: note = RE
  misc_feature 25: note = Core
  misc_feature 26..50: note = LE
tgcaatgcggcggcggaccatacatactggcatggtccgccgccttaacc

SEQ ID NO: 31549 - DNA, 50 bp, unidentified
  source 1..50: mol_type = unassigned DNA; note = donor_1b6c328
  misc_feature 1..22: note = RE
  misc_feature 23..25: note = Core
  misc_feature 26..50: note = LE
gcaaatgggaggcgaccatataagatggaatggtcgcctcccgccttaac

SEQ ID NO: 31550 - DNA, 50 bp, unidentified
  source 1..50: mol_type = unassigned DNA; note = donor_1b6cbbd
  misc_feature 1..23: note = RE
  misc_feature 24..25: note = Core
  misc_feature 26..50: note = LE
aagtgttgatttttcttagcaggttggtactgtataagtgtaggtgtaaa

SEQ ID NO: 31551 - DNA, 50 bp, unidentified
  source 1..50: mol_type = unassigned DNA; note = donor_1b78105
  misc_feature 1..24: note = RE
  misc_feature 25: note = Core
  misc_feature 26..50: note = LE
ccgcgtcttgacacagaggggtgcctacttgtttgattgacggtaggacc

SEQ ID NO: 31552 - DNA, 50 bp, unidentified
  source 1..50: mol_type = unassigned DNA; note = donor_1b7b21d
  misc_feature 1..22: note = RE
  misc_feature 23..25: note = Core
  misc_feature 26..50: note = LE
aaatttggaaaaaaacacagttcatcctgtgtttgcaaaaggaagttctt

SEQ ID NO: 31553 - DNA, 50 bp, unidentified
  source 1..50: mol_type = unassigned DNA; note = donor_1b7b2de
  misc_feature 1..23: note = RE
  misc_feature 24..25: note = Core
  misc_feature 26..50: note = LE
gagccactccaacaacacagttgcttatctgttcggattctgccagtctg

SEQ ID NO: 31554 - DNA, 50 bp, unidentified
  source 1..50: mol_type = unassigned DNA; note = donor_1b84263
  misc_feature 1..24: note = RE
  misc_feature 25: note = Core
  misc_feature 26..50: note = LE
tgcaagccgggaggagtccatatacaatgggatggactcctccctcccga

SEQ ID NO: 31555 - DNA, 50 bp, unidentified
  source 1..50: mol_type = unassigned DNA; note = donor_1ba8093
  misc_feature 1..24: note = RE
  misc_feature 25: note = Core
  misc_feature 26..50: note = LE
tgcaatgacggggcggaccatacataatgggatggtccgccccgcctctt

SEQ ID NO: 31556 - DNA, 50 bp, unidentified
  source 1..50: mol_type = unassigned DNA; note = donor_1bafd5b
  misc_feature 1..24: note = RE
  misc_feature 25: note = Core
  misc_feature 26..50: note = LE
cccgcttgacgaaggacatagaggccgttatcttcttcgcggtcctgcaa

SEQ ID NO: 31557 - DNA, 50 bp, unidentified
  source 1..50: mol_type = unassigned DNA; note = donor_1bb6fa9
  misc_feature 1..22: note = RE
  misc_feature 23..25: note = Core
  misc_feature 26..50: note = LE
ctattgacaattgatagttagtcttgtataatatatttaggtttttaaaa

SEQ ID NO: 31558 - DNA, 50 bp, unidentified
  source 1..50: mol_type = unassigned DNA; note = donor_1bb8097
  misc_feature 1..22: note = RE
  misc_feature 23..25: note = Core
  misc_feature 26..50: note = LE
agaaaataaaagataatagagggagcattcctgtaatgaataaaaaacaa

SEQ ID NO: 31559 - DNA, 50 bp, unidentified
  source 1..50: mol_type = unassigned DNA; note = donor_1bc4f08
  misc_feature 1..23: note = RE
  misc_feature 24..25: note = Core
  misc_feature 26..50: note = LE
gcaccgacgggggcatccacacatgatggcgtggatgccccctcccgacg

SEQ ID NO: 31560 - DNA, 50 bp, unidentified
  source 1..50: mol_type = unassigned DNA; note = donor_1bd6e5a
  misc_feature 1..23: note = RE
  misc_feature 24..25: note = Core
  misc_feature 26..50: note = LE
aacccgcttgatcaaaacggatacttgtcttatgactttctgcgccgctg

SEQ ID NO: 31561 - DNA, 50 bp, unidentified
  source 1..50: mol_type = unassigned DNA; note = donor_1bd7dbb
  misc_feature 1..22: note = RE
  misc_feature 23..25: note = Core
  misc_feature 26..50: note = LE
agatatggtcatcaagacagttgcttgtgtcttgagacaggattaagctg

SEQ ID NO: 31562 - DNA, 50 bp, unidentified
  source 1..50: mol_type = unassigned DNA; note = donor_1bd9ec2
  misc_feature 1..24: note = RE
  misc_feature 25: note = Core
  misc_feature 26..50: note = LE
caaggaaaaaagacttgactatataaggagcttcttgtataattcaaata

SEQ ID NO: 31563 - DNA, 50 bp, unidentified
  source 1..50: mol_type = unassigned DNA; note = donor_1be0fb5
  misc_feature 1..23: note = RE
  misc_feature 24..25: note = Core
  misc_feature 26..50: note = LE
atctacttgacttttaatagttggtataatgtatttaggttgttcaaggg

SEQ ID NO: 31564 - DNA, 50 bp, unidentified
  source 1..50: mol_type = unassigned DNA; note = donor_1be82b1
  misc_feature 1..23: note = RE
  misc_feature 24..25: note = Core
  misc_feature 26..50: note = LE
ttgccaacagcgccgtccacacatgatgctgtggacggcgctccaccgag

SEQ ID NO: 31565 - DNA, 50 bp, unidentified
  source 1..50: mol_type = unassigned DNA; note = donor_1be89bd
  misc_feature 1..23: note = RE
  misc_feature 24..25: note = Core
  misc_feature 26..50: note = LE
gccccttgcgttctttcattggagaggtggcatgaaagagaccgcgtccg

SEQ ID NO: 31566 - DNA, 50 bp, unidentified
  source 1..50: mol_type = unassigned DNA; note = donor_1bf3f29
  misc_feature 1..24: note = RE
  misc_feature 25: note = Core
  misc_feature 26..50: note = LE
tgcagttccggggaagtccttatagaatgaaagggacttcccctgctccg

SEQ ID NO: 31567 - DNA, 50 bp, unidentified
  source 1..50: mol_type = unassigned DNA; note = donor_1bf7310
  misc_feature 1..22: note = RE
  misc_feature 23..25: note = Core
  misc_feature 26..50: note = LE
caaaaggcttgacatagagagtcttatacagtaaactaagaacaagccct

SEQ ID NO: 31568 - DNA, 50 bp, unidentified
  source 1..50: mol_type = unassigned DNA; note = donor_1bfc2cf
  misc_feature 1..20: note = RE
  misc_feature 21..25: note = Core
  misc_feature 26..50: note = LE
cttgacatttaatagctggtctcctaatattatattatcgcaagacataa

SEQ ID NO: 31569 - DNA, 50 bp, unidentified
  source 1..50: mol_type = unassigned DNA; note = donor_1c01ac9
  misc_feature 1..22: note = RE
  misc_feature 23..25: note = Core
  misc_feature 26..50: note = LE
ggcttgacatcgtcattgagattccctaagtttgtggctgtctggggttg

SEQ ID NO: 31570 - DNA, 50 bp, unidentified
  source 1..50: mol_type = unassigned DNA; note = donor_1c0c7fd
  misc_feature 1..23: note = RE
  misc_feature 24..25: note = Core
  misc_feature 26..50: note = LE
gacaccaccggaacctgggatgtctaatgggttttagccgggcttctggc

SEQ ID NO: 31571 - DNA, 50 bp, unidentified
  source 1..50: mol_type = unassigned DNA; note = donor_1c127d5
  misc_feature 1..24: note = RE
  misc_feature 25: note = Core
  misc_feature 26..50: note = LE
tgcaaacggggaggagtccatacacaatgggatggactcctccccacccg

SEQ ID NO: 31572 - DNA, 50 bp, unidentified
  source 1..50: mol_type = unassigned DNA; note = donor_1c1399a
  misc_feature 1..23: note = RE
  misc_feature 24..25: note = Core
  misc_feature 26..50: note = LE
gcttctttgggggcgtccacagatgatggggtggacgccccccggcggca

SEQ ID NO: 31573 - DNA, 50 bp, unidentified
  source 1..50: mol_type = unassigned DNA; note = donor_1c18a13
  misc_feature 1..23: note = RE
  misc_feature 24..25: note = Core
  misc_feature 26..50: note = LE
aatattgacattctattagctggttcgtattatatggttagccagaaatt

SEQ ID NO: 31574 - DNA, 50 bp, unidentified
  source 1..50: mol_type = unassigned DNA; note = donor_1c2497b
  misc_feature 1..23: note = RE
  misc_feature 24..25: note = Core
  misc_feature 26..50: note = LE
cgtgttgacaagcaagacggttacttgtatcttagaccctgtggtgatta

SEQ ID NO: 31575 - DNA, 50 bp, unidentified
  source 1..50: mol_type = unassigned DNA; note = donor_1c28c75
  misc_feature 1..23: note = RE
  misc_feature 24..25: note = Core
  misc_feature 26..50: note = LE
acagcttgactttatcataatattccattagacttatattgtaattaata

SEQ ID NO: 31576 - DNA, 50 bp, unidentified
  source 1..50: mol_type = unassigned DNA; note = donor_1c2d134
  misc_feature 1..24: note = RE
  misc_feature 25: note = Core
  misc_feature 26..50: note = LE
gtcgcttgacaaacagaagggcgtcagtcagaagatgatagccagttccc

SEQ ID NO: 31577 - DNA, 50 bp, unidentified
  source 1..50: mol_type = unassigned DNA; note = donor_1c2fdfe
  misc_feature 1..23: note = RE
  misc_feature 24..25: note = Core
  misc_feature 26..50: note = LE
agggttgcccagggacatagaatcttgtatgtttccgcacggcaggtcag

SEQ ID NO: 31578 - DNA, 50 bp, unidentified
  source 1..50: mol_type = unassigned DNA; note = donor_1c43d32
  misc_feature 1..24: note = RE
  misc_feature 25: note = Core
  misc_feature 26..50: note = LE
tgcaaaacggggcgtaccatacattaattagatggcacgccccacacctt

SEQ ID NO: 31579 - DNA, 50 bp, unidentified
  source 1..50: mol_type = unassigned DNA; note = donor_1c45549
  misc_feature 1..21: note = RE
  misc_feature 22..25: note = Core
  misc_feature 26..50: note = LE
catgaggttgacacagggagtgtcactagggcaccatctttctcatgggt

SEQ ID NO: 31580 - DNA, 50 bp, unidentified
  source 1..50: mol_type = unassigned DNA; note = donor_1c4f211
  misc_feature 1..24: note = RE
  misc_feature 25: note = Core
  misc_feature 26..50: note = LE
tggcatcaaaggggcgtccatgtataatggcatggacgcccctgctttta

SEQ ID NO: 31581 - DNA, 50 bp, unidentified
  source 1..50: mol_type = unassigned DNA; note = donor_1c4f403
  misc_feature 1..23: note = RE
  misc_feature 24..25: note = Core
  misc_feature 26..50: note = LE
gacaacagggagtcgtccatacatgatgtgatggacgactcccgcccttc

SEQ ID NO: 31582 - DNA, 50 bp, unidentified
  source 1..50: mol_type = unassigned DNA; note = donor_1c59a2d
  misc_feature 1..23: note = RE
  misc_feature 24..25: note = Core
  misc_feature 26..50: note = LE
ttctattgacttttatttgcaggctactacaatgtatttatggttatagt

SEQ ID NO: 31583 - DNA, 50 bp, unidentified
  source 1..50: mol_type = unassigned DNA; note = donor_1c6255d
  misc_feature 1..23: note = RE
  misc_feature 24..25: note = Core
  misc_feature 26..50: note = LE
atacttgattttggacacggttgcttgtatgtttactttgctggacaagg

SEQ ID NO: 31584 - DNA, 50 bp, unidentified
  source 1..50: mol_type = unassigned DNA; note = donor_1c63dd7
  misc_feature 1..24: note = RE
  misc_feature 25: note = Core
  misc_feature 26..50: note = LE
tgcggcgaagcggcggaccatacataatgggatggtccgccgcttttacc

SEQ ID NO: 31585 - DNA, 50 bp, unidentified
  source 1..50: mol_type = unassigned DNA; note = donor_1c678cd
  misc_feature 1..24: note = RE
  misc_feature 25: note = Core
  misc_feature 26..50: note = LE
gttgcaaacgggacgcgttcatataattgaaatgaacgcgtcccacccac

SEQ ID NO: 31586 - DNA, 50 bp, unidentified
  source 1..50: mol_type = unassigned DNA; note = donor_1c68ffd
  misc_feature 1..24: note = RE
  misc_feature 25: note = Core
  misc_feature 26..50: note = LE
tggcaaacgggaggcgtccatataatggtatgggcgcctcccacttgagc

SEQ ID NO: 31587 - DNA, 50 bp, unidentified; identical to SEQ ID NO: 30766
  source 1..50: mol_type = unassigned DNA; note = donor_1c83ea4
  misc_feature 1..23: note = RE
  misc_feature 24..25: note = Core
  misc_feature 26..50: note = LE

SEQ ID NO: 31588 - DNA, 50 bp, unidentified
  source 1..50: mol_type = unassigned DNA; note = donor_1c85c26
  misc_feature 1..24: note = RE
  misc_feature 25: note = Core
  misc_feature 26..50: note = LE
ggcttgacaggaaccatagggacaccgttaccgtttaggtggtccttaac

SEQ ID NO: 31589 - DNA, 50 bp, unidentified
  source 1..50: mol_type = unassigned DNA; note = donor_1c980ff
  misc_feature 1..24: note = RE
  misc_feature 25: note = Core
  misc_feature 26..50: note = LE
tgcaaaaatgggagggaccatagataatgagatggtccctcccgcctcgc

SEQ ID NO: 31590 - DNA, 50 bp, unidentified
  source 1..50: mol_type = unassigned DNA; note = donor_1ca7c68
  misc_feature 1..23: note = RE
  misc_feature 24..25: note = Core
  misc_feature 26..50: note = LE
gaccccgaacggccgattagagaagatggggtaatcggccggcccagctt

SEQ ID NO: 31591 - DNA, 50 bp, unidentified
  source 1..50: mol_type = unassigned DNA; note = donor_1ca97e6
  misc_feature 1..23: note = RE
  misc_feature 24..25: note = Core
  misc_feature 26..50: note = LE
gcatcacgggcggcaaccacagaagatggggtggttgccgccctccccag

SEQ ID NO: 31592 - DNA, 50 bp, unidentified
  source 1..50: mol_type = unassigned DNA; note = donor_1caaaac
  misc_feature 1..23: note = RE
  misc_feature 24..25: note = Core
  misc_feature 26..50: note = LE
cggcttgacaacatcattgggaagctctacctttctgatcatgggttggc

SEQ ID NO: 31593 - DNA, 50 bp, unidentified
  source 1..50: mol_type = unassigned DNA; note = donor_1cb2511
  misc_feature 1..24: note = RE
  misc_feature 25: note = Core
  misc_feature 26..50: note = LE
atcatttgcttatatcatagcaatcctttagatttgttgaatgagaaaat

SEQ ID NO: 31594 - DNA, 50 bp, unidentified
  source 1..50: mol_type = unassigned DNA; note = donor_1cb6eff
  misc_feature 1..23: note = RE
  misc_feature 24..25: note = Core
  misc_feature 26..50: note = LE
ccgcttgacatcctcattgggaagtcctaccttccaagcgtgggtctgag

SEQ ID NO: 31595 - DNA, 50 bp, unidentified
  source 1..50: mol_type = unassigned DNA; note = donor_1cb6f5c
  misc_feature 1..23: note = RE
  misc_feature 24..25: note = Core
  misc_feature 26..50: note = LE
ttgtcatcatcaccttttcaagaggagcattcctgtttggttagtggaac

SEQ ID NO: 31596 - DNA, 50 bp, unidentified
  source 1..50: mol_type = unassigned DNA; note = donor_1cbf0c4
  misc_feature 1..24: note = RE
  misc_feature 25: note = Core
  misc_feature 26..50: note = LE
ttacttgctttttaccacagtacttcttaagtttacaatctattatattt

SEQ ID NO: 31597 - DNA, 50 bp, unidentified
  source 1..50: mol_type = unassigned DNA; note = donor_1cc1400
  misc_feature 1..23: note = RE
  misc_feature 24..25: note = Core
  misc_feature 26..50: note = LE
gcatttcagacggcaaccacagaagatggggtggttgccgtcctccccta

SEQ ID NO: 31598 - DNA, 50 bp, unidentified
  source 1..50: mol_type = unassigned DNA; note = donor_1cc3c24
  misc_feature 1..24: note = RE
  misc_feature 25: note = Core
  misc_feature 26..50: note = LE
agcaagtggggaggggtccatatacaatgggatggacccctccccactcc

SEQ ID NO: 31599 - DNA, 50 bp, unidentified
  source 1..50: mol_type = unassigned DNA; note = donor_1cc65b0
  misc_feature 1..23: note = RE
  misc_feature 24..25: note = Core
  misc_feature 26..50: note = LE
atacttgacttttcatagctggtcttgtatgatgtatttagaagcaaata

SEQ ID NO: 31600 - DNA, 50 bp, unidentified
  source 1..50: mol_type = unassigned DNA; note = donor_1cc76f2
  misc_feature 1..23: note = RE
  misc_feature 24..25: note = Core
  misc_feature 26..50: note = LE
ttgcttgactttttatttgcaggctactacaatatatttataggttataa

SEQ ID NO: 31601 - DNA, 50 bp, unidentified
  source 1..50: mol_type = unassigned DNA; note = donor_1cc89a3
  misc_feature 1..23: note = RE
  misc_feature 24..25: note = Core
  misc_feature 26..50: note = LE
gggcttgacttttattagcgggtctattacaatataatttggttggaacc

SEQ ID NO: 31602 - DNA, 50 bp, unidentified; identical to SEQ ID NO: 30465
  source 1..50: mol_type = unassigned DNA; note = donor_1cd2841
  misc_feature 1..23: note = RE
  misc_feature 24..25: note = Core
  misc_feature 26..50: note = LE

SEQ ID NO: 31603 - DNA, 50 bp, unidentified
  source 1..50: mol_type = unassigned DNA; note = donor_1cd3abb
  misc_feature 1..23: note = RE
  misc_feature 24..25: note = Core
  misc_feature 26..50: note = LE
aattttatcgttcaagacagttgcttgtatcttgaaatttaattagcatg

SEQ ID NO: 31604 - DNA, 50 bp, unidentified
  source 1..50: mol_type = unassigned DNA; note = donor_1ce4651
  misc_feature 1..23: note = RE
  misc_feature 24..25: note = Core
  misc_feature 26..50: note = LE
gcctctaaccctgaacacagttgcctgtctgttgttgatgaggtagcatc

SEQ ID NO: 31605 - DNA, 50 bp, unidentified
  source 1..50: mol_type = unassigned DNA; note = donor_1cf52aa
  misc_feature 1..24: note = RE
  misc_feature 25: note = Core
  misc_feature 26..50: note = LE
cttgcggacggggcgggccatacgtatgggatggcccgcccctctcgccg

SEQ ID NO: 31606 - DNA, 50 bp, unidentified
  source 1..50: mol_type = unassigned DNA; note = donor_1cfdd96
  misc_feature 1..22: note = RE
  misc_feature 23..25: note = Core
  misc_feature 26..50: note = LE
agcttgactttttatagctggtcttgtatattcatatttgtcagttccgt

SEQ ID NO: 31607 - DNA, 50 bp, unidentified
  source 1..50: mol_type = unassigned DNA; note = donor_1d0daa8
  misc_feature 1..23: note = RE
  misc_feature 24..25: note = Core
  misc_feature 26..50: note = LE
gcaaggagggggccgtccacatatgttggtatggacggccccccgacggc

SEQ ID NO: 31608 - DNA, 50 bp, unidentified
  source 1..50: mol_type = unassigned DNA; note = donor_1d11003
  misc_feature 1..23: note = RE
  misc_feature 24..25: note = Core
  misc_feature 26..50: note = LE
gccaaacgagctgcgattagacgacatggggtaatcgcgggaagcgagtc

SEQ ID NO: 31609 - DNA, 50 bp, unidentified
  source 1..50: mol_type = unassigned DNA; note = donor_1d13dd9
  misc_feature 1..21: note = RE
  misc_feature 22..25: note = Core
  misc_feature 26..50: note = LE
cgagccgggggccatccacacatgatggggtggatggcccccttacggca

SEQ ID NO: 31610 - DNA, 50 bp, unidentified; identical to SEQ ID NO: 30919
  source 1..50: mol_type = unassigned DNA; note = donor_1d1859f
  misc_feature 1..23: note = RE
  misc_feature 24..25: note = Core
  misc_feature 26..50: note = LE

SEQ ID NO: 31611 - DNA, 50 bp, unidentified
  source 1..50: mol_type = unassigned DNA; note = donor_1d223da
  misc_feature 1..22: note = RE
  misc_feature 23..25: note = Core
  misc_feature 26..50: note = LE
acccgtgggcgtcgtccacacatgatgtggtggacggcgcccactctgcg

SEQ ID NO: 31612 - DNA, 50 bp, unidentified; identical to SEQ ID NO: 30838
  source 1..50: mol_type = unassigned DNA; note = donor_1d28783
  misc_feature 1..23: note = RE
  misc_feature 24..25: note = Core
  misc_feature 26..50: note = LE

SEQ ID NO: 31613 - DNA, 50 bp, unidentified
  source 1..50: mol_type = unassigned DNA; note = donor_1d2c8ff
  misc_feature 1..23: note = RE
  misc_feature 24..25: note = Core
  misc_feature 26..50: note = LE
tgacatcaaacggcatgggatgtctaataagagataccggatcggttctg

SEQ ID NO: 31614 - DNA, 50 bp, unidentified
  source 1..50: mol_type = unassigned DNA; note = donor_1d2d873
  misc_feature 1..22: note = RE
  misc_feature 23..25: note = Core
  misc_feature 26..50: note = LE
cccttgactttaaagacagttgcttgtatcttgtcagcggtcgtaaaatc

SEQ ID NO: 31615 - DNA, 50 bp, unidentified
  source 1..50: mol_type = unassigned DNA; note = donor_1d34506
  misc_feature 1..23: note = RE
  misc_feature 24..25: note = Core
  misc_feature 26..50: note = LE
gcaaaaacggaggggaccatagattaatgagatggtcccctccaccctac

SEQ ID NO: 31616 - DNA, 50 bp, unidentified
  source 1..50: mol_type = unassigned DNA; note = donor_1d662b6
  misc_feature 1..24: note = RE
  misc_feature 25: note = Core
  misc_feature 26..50: note = LE
tggaaatatcatgaacctagaatacctttggtctaacaaaggacgttttt

SEQ ID NO: 31617 - DNA, 50 bp, unidentified
  source 1..50: mol_type = unassigned DNA; note = donor_1d67d37
  misc_feature 1..24: note = RE
  misc_feature 25: note = Core
  misc_feature 26..50: note = LE
atattttgaaatttctataggaagctttaattttgcagagtgaatgaagg

SEQ ID NO: 31618 - DNA, 50 bp, unidentified
  source 1..50: mol_type = unassigned DNA; note = donor_1d6eac4
  misc_feature 1..23: note = RE
  misc_feature 24..25: note = Core
  misc_feature 26..50: note = LE
atcatttgcttttatcatagtaatcctttagatttgtaaagagagaatat

SEQ ID NO: 31619 - DNA, 50 bp, unidentified
  source 1..50: mol_type = unassigned DNA; note = donor_1d70a0f
  misc_feature 1..23: note = RE
  misc_feature 24..25: note = Core
  misc_feature 26..50: note = LE
gcgagccgggggccatccacacatgatggggtggatggccccctcacggc

SEQ ID NO: 31620 - DNA, 50 bp, unidentified
  source 1..50: mol_type = unassigned DNA; note = donor_1d75879
  misc_feature 1..22: note = RE
  misc_feature 23..25: note = Core
  misc_feature 26..50: note = LE
accccaccacgccgattagagaagatggggtaatcggcttagagcccatt

SEQ ID NO: 31621 - DNA, 50 bp, unidentified
  source 1..50: mol_type = unassigned DNA; note = donor_1d78830
  misc_feature 1..23: note = RE
  misc_feature 24..25: note = Core
  misc_feature 26..50: note = LE
gttgacaagggagagtccacataagataattggactcccccacattgagc

SEQ ID NO: 31622 - DNA, 50 bp, unidentified
  source 1..50: mol_type = unassigned DNA; note = donor_1d7ea49
  misc_feature 1..24: note = RE
  misc_feature 25: note = Core
  misc_feature 26..50: note = LE
caccggttgacaacaaaggggagcctactagagacttctcgcagggccgg

SEQ ID NO: 31623 - DNA, 50 bp, unidentified
  source 1..50: mol_type = unassigned DNA; note = donor_1d88daa
  misc_feature 1..23: note = RE
  misc_feature 24..25: note = Core
  misc_feature 26..50: note = LE
ccacttgacaactccattaggaatccctaccttgttgatcgggaggagcg

SEQ ID NO: 31624 - DNA, 50 bp, unidentified
  source 1..50: mol_type = unassigned DNA; note = donor_1d8df51
  misc_feature 1..23: note = RE
  misc_feature 24..25: note = Core
  misc_feature 26..50: note = LE
aaatagcttgatcaagacggatacttgtcttatgacttttttgtcgcggt

SEQ ID NO: 31625 - DNA, 50 bp, unidentified
  source 1..50: mol_type = unassigned DNA; note = donor_1d8f3cd
  misc_feature 1..21: note = RE
  misc_feature 22..25: note = Core
  misc_feature 26..50: note = LE
agcttgactattgatagttaatttcgtatcattaatttaagtcagaatta

SEQ ID NO: 31626 - DNA, 50 bp, unidentified
  source 1..50: mol_type = unassigned DNA; note = donor_1d90911
  misc_feature 1..22: note = RE
  misc_feature 23..25: note = Core
  misc_feature 26..50: note = LE
cttgacttcgaagtccccatacaagatgctatggggcggcagcggggaga

SEQ ID NO: 31627 - DNA, 50 bp, unidentified
  source 1..50: mol_type = unassigned DNA; note = donor_1d937c2
  misc_feature 1..23: note = RE
  misc_feature 24..25: note = Core
  misc_feature 26..50: note = LE
gcggcttgacaaatagagaggcaccgacttatatgagtgtcagcggcgtg

SEQ ID NO: 31628 - DNA, 50 bp, unidentified
  source 1..50: mol_type = unassigned DNA; note = donor_1d9adb1
  misc_feature 1..24: note = RE
  misc_feature 25: note = Core
  misc_feature 26..50: note = LE
ccacgccgcttgacatagaagcatctattggtgcagggtgatcaaggccg

SEQ ID NO: 31629 - DNA, 50 bp, unidentified
  source 1..50: mol_type = unassigned DNA; note = donor_1d9c6f0
  misc_feature 1..24: note = RE
  misc_feature 25: note = Core
  misc_feature 26..50: note = LE
ccgccgcttgacacagaagggagcctactagttccattggcggtaggacc

SEQ ID NO: 31630 - DNA, 50 bp, unidentified
  source 1..50: mol_type = unassigned DNA; note = donor_1dab636
  misc_feature 1..23: note = RE
  misc_feature 24..25: note = Core
  misc_feature 26..50: note = LE
gcgcttgactccaaacacggttacttgtatgttcagccatgatcagcgcg

SEQ ID NO: 31631 - DNA, 50 bp, unidentified
  source 1..50: mol_type = unassigned DNA; note = donor_1daf255
  misc_feature 1..22: note = RE
  misc_feature 23..25: note = Core
  misc_feature 26..50: note = LE
attattgacaaactattagctggttcgtattataaggtcatccagtttaa

SEQ ID NO: 31632 - DNA, 50 bp, unidentified
  source 1..50: mol_type = unassigned DNA; note = donor_1db0ac8
  misc_feature 1..24: note = RE
  misc_feature 25: note = Core
  misc_feature 26..50: note = LE
tgcaaaaacgggggttaccatagataatgagatggtcacccccaccctgt

SEQ ID NO: 31633 - DNA, 50 bp, unidentified
  source 1..50: mol_type = unassigned DNA; note = donor_1db31d1
  misc_feature 1..24: note = RE
  misc_feature 25: note = Core
  misc_feature 26..50: note = LE
tgccacacgggaggcgtccatataatggtatggacgcctcccaccctcgc

SEQ ID NO: 31634 - DNA, 50 bp, unidentified
  source 1..50: mol_type = unassigned DNA; note = donor_1db59ea
  misc_feature 1..23: note = RE
  misc_feature 24..25: note = Core
  misc_feature 26..50: note = LE
caccgcgggagccatccacagaagatggggtggatggctcccgctcccgt

SEQ ID NO: 31635 - DNA, 50 bp, unidentified
  source 1..50: mol_type = unassigned DNA; note = donor_1db6bc1
  misc_feature 1..24: note = RE
  misc_feature 25: note = Core
  misc_feature 26..50: note = LE
tgctattgactttttatttgcaggcctgttacaatatatttggtggaaga

SEQ ID NO: 31636 - DNA, 50 bp, unidentified
  source 1..50: mol_type = unassigned DNA; note = donor_1dbcebd
  misc_feature 1..24: note = RE
  misc_feature 25: note = Core
  misc_feature 26..50: note = LE
ggggcttgactttttatttgcaggcctgttacaataaatttgccccttga

SEQ ID NO: 31637 - DNA, 50 bp, unidentified
  source 1..50: mol_type = unassigned DNA; note = donor_1dc07da
  misc_feature 1..24: note = RE
  misc_feature 25: note = Core
  misc_feature 26..50: note = LE
ttgcaaaaacgggagtgaccatagaatgagatggtcactccctcctttca

SEQ ID NO: 31638 - DNA, 50 bp, unidentified
  source 1..50: mol_type = unassigned DNA; note = donor_1dc183d
  misc_feature 1..24: note = RE
  misc_feature 25: note = Core
  misc_feature 26..50: note = LE
ccgcctcttgacacagaagggagcctactaagagacttccggtcaggacc

SEQ ID NO: 31639 - DNA, 50 bp, unidentified
  source 1..50: mol_type = unassigned DNA; note = donor_1dc83ab
  misc_feature 1..23: note = RE
  misc_feature 24..25: note = Core
  misc_feature 26..50: note = LE
cgaaggtggttgacaaagggtgtctgatggctctaccctcagtccttggg

SEQ ID NO: 31640 - DNA, 50 bp, unidentified
  source 1..50: mol_type = unassigned DNA; note = donor_1dca04e
  misc_feature 1..24: note = RE
  misc_feature 25: note = Core
  misc_feature 26..50: note = LE
tggcaaacagggggcgtccatgtacaatgggatggacgcccccacccgaa

SEQ ID NO: 31641 - DNA, 50 bp, unidentified
  source 1..50: mol_type = unassigned DNA; note = donor_1dcbeb0
  misc_feature 1..23: note = RE
  misc_feature 24..25: note = Core
  misc_feature 26..50: note = LE
tatctgcttgatcaagacggatacttgtcttatgatttccgagcttcatc

SEQ ID NO: 31642 - DNA, 50 bp, unidentified
  source 1..50: mol_type = unassigned DNA; note = donor_1dcc5ad
  misc_feature 1..23: note = RE
  misc_feature 24..25: note = Core
  misc_feature 26..50: note = LE
aagtattgacttttattagcaggttggtactgtataagtgtaagtattaa

SEQ ID NO: 31643 - DNA, 50 bp, unidentified
  source 1..50: mol_type = unassigned DNA; note = donor_1de6fc3
  misc_feature 1..24: note = RE
  misc_feature 25: note = Core
  misc_feature 26..50: note = LE
cttgccgacggggcgggccatacgtatggaatggcccgcccctcttctcc

SEQ ID NO: 31644 - DNA, 50 bp, unidentified
  source 1..50: mol_type = unassigned DNA; note = donor_1de70c2
  misc_feature 1..23: note = RE
  misc_feature 24..25: note = Core
  misc_feature 26..50: note = LE
ggacttgtgctttaagagagtatcttgtatattaaacccatctcttaaac

SEQ ID NO: 31645 - DNA, 50 bp, unidentified
  source 1..50: mol_type = unassigned DNA; note = donor_1df236d
  misc_feature 1..24: note = RE
  misc_feature 25: note = Core
  misc_feature 26..50: note = LE
cttacctctactttctttcacactatctccattccgcgggcaagccgcgg

SEQ ID NO: 31646 - DNA, 50 bp, unidentified
  source 1..50: mol_type = unassigned DNA; note = donor_1dfefc1
  misc_feature 1..24: note = RE
  misc_feature 25: note = Core
  misc_feature 26..50: note = LE
ttgccatcgggaggcgtccatataatggaatggacgcctcccgctcactg

SEQ ID NO: 31647 - DNA, 50 bp, unidentified
  source 1..50: mol_type = unassigned DNA; note = donor_1e0d369
  misc_feature 1..23: note = RE
  misc_feature 24..25: note = Core
  misc_feature 26..50: note = LE
gttgacagaggggagtccacataagataattggactcccctcgcccctga

SEQ ID NO: 31648 - DNA, 50 bp, unidentified; identical to SEQ ID NO: 31463
  source 1..50: mol_type = unassigned DNA; note = donor_1e1c2bd
  misc_feature 1..23: note = RE
  misc_feature 24..25: note = Core
  misc_feature 26..50: note = LE

SEQ ID NO: 31649 - DNA, 50 bp, unidentified
  source 1..50: mol_type = unassigned DNA; note = donor_1e23987
  misc_feature 1..24: note = RE
  misc_feature 25: note = Core
  misc_feature 26..50: note = LE
atcttgacaagctattagctggtatcgtattatgagataaaccagttctt

SEQ ID NO: 31650 - DNA, 50 bp, unidentified
  source 1..50: mol_type = unassigned DNA; note = donor_1e26b49
  misc_feature 1..24: note = RE
  misc_feature 25: note = Core
  misc_feature 26..50: note = LE
cttgcagacggggcgggccatacgtatgggatggcccgccccttttccct

SEQ ID NO: 31651 - DNA, 50 bp, unidentified
  source 1..50: mol_type = unassigned DNA; note = donor_1e2e5d6
  misc_feature 1..23: note = RE
  misc_feature 24..25: note = Core
  misc_feature 26..50: note = LE
tgacatcaaacgtccagggatgtctaatgggaagtaccaagtccaccgga

SEQ ID NO: 31652 - DNA, 50 bp, unidentified
  source 1..50: mol_type = unassigned DNA; note = donor_1e49d52
  misc_feature 1..23: note = RE
  misc_feature 24..25: note = Core
  misc_feature 26..50: note = LE
ggggttgacagggtagacggtatcttgtatctttaggtttgtcgtggtta

SEQ ID NO: 31653 - DNA, 50 bp, unidentified
  source 1..50: mol_type = unassigned DNA; note = donor_1e536da
  misc_feature 1..22: note = RE
  misc_feature 23..25: note = Core
  misc_feature 26..50: note = LE
tttgccctattgacatagagggtcttatacggtaacatgttcccaaccct

SEQ ID NO: 31654 - DNA, 50 bp, unidentified
  source 1..50: mol_type = unassigned DNA; note = donor_1e5807d
  misc_feature 1..23: note = RE
  misc_feature 24..25: note = Core
  misc_feature 26..50: note = LE
gattttcacgttcaagacagttgcttgtatcttaaaaaatggttaaaata

SEQ ID NO: 31655 - DNA, 50 bp, unidentified
  source 1..50: mol_type = unassigned DNA; note = donor_1e5ba06
  misc_feature 1..24: note = RE
  misc_feature 25: note = Core
  misc_feature 26..50: note = LE
cgcaacgcgcggcctgaccatacataatgggatgatccggccgtgatcct

SEQ ID NO: 31656 - DNA, 50 bp, unidentified
  source 1..50: mol_type = unassigned DNA; note = donor_1e64e5c
  misc_feature 1..23: note = RE
  misc_feature 24..25: note = Core
  misc_feature 26..50: note = LE
gcaatcaggggggagaccatatacgatgaaatggtctccccccgcttcac

SEQ ID NO: 31657 - DNA, 50 bp, unidentified
  source 1..50: mol_type = unassigned DNA; note = donor_1e66b8d
  misc_feature 1..23: note = RE
  misc_feature 24..25: note = Core
  misc_feature 26..50: note = LE
attcttgacttttcatagctggtcttgtatgatgtttacgaagcagtaaa

SEQ ID NO: 31658 - DNA, 50 bp, unidentified
  source 1..50: mol_type = unassigned DNA; note = donor_1e67120
  misc_feature 1..21: note = RE
  misc_feature 22..25: note = Core
  misc_feature 26..50: note = LE
cttgacaaccccatagagacaccccgttaccttcttgatcaagcccgatg

SEQ ID NO: 31659 - DNA, 50 bp, unidentified
  source 1..50: mol_type = unassigned DNA; note = donor_1e67259
  misc_feature 1..23: note = RE
  misc_feature 24..25: note = Core
  misc_feature 26..50: note = LE
ccatgcctgacacaacacagttgcctgtgtgtctgagacgtgtcaggatg

SEQ ID NO: 31660 - DNA, 50 bp, unidentified
  source 1..50: mol_type = unassigned DNA; note = donor_1e6a87c
  misc_feature 1..23: note = RE
  misc_feature 24..25: note = Core
  misc_feature 26..50: note = LE
gccaacagggtgccgtccacacatgatgctgtggacggcatccgcctagc

SEQ ID NO: 31661 - DNA, 50 bp, unidentified
  source 1..50: mol_type = unassigned DNA; note = donor_1e6bdf8
  misc_feature 1..23: note = RE
  misc_feature 24..25: note = Core
  misc_feature 26..50: note = LE
tattgactttgcttaattggtctacggtacaatgtcatcgatgaaacaaa

SEQ ID NO: 31662 - DNA, 50 bp, unidentified
  source 1..50: mol_type = unassigned DNA; note = donor_1e7257c
  misc_feature 1..24: note = RE
  misc_feature 25: note = Core
  misc_feature 26..50: note = LE
ttgcaataggagagggtccatatataatggtatggaccctctccactcca

SEQ ID NO: 31663 - DNA, 50 bp, unidentified
  source 1..50: mol_type = unassigned DNA; note = donor_1e7695a
  misc_feature 1..23: note = RE
  misc_feature 24..25: note = Core
  misc_feature 26..50: note = LE
tgacacctaagctcctgggacgtctaaccactcttaacgagtctgtcgct

SEQ ID NO: 31664 - DNA, 50 bp, unidentified
  source 1..50: mol_type = unassigned DNA; note = donor_1e769b6
  misc_feature 1..23: note = RE
  misc_feature 24..25: note = Core
  misc_feature 26..50: note = LE
tgcaagagggggccgtccacatatgttggggtggacgactcccaacggca

SEQ ID NO: 31665 - DNA, 50 bp, unidentified
  source 1..50: mol_type = unassigned DNA; note = donor_1e7f5ee
  misc_feature 1..23: note = RE
  misc_feature 24..25: note = Core
  misc_feature 26..50: note = LE
ttacttgacttcatatagttagtcttgtataatgaacatgtagtcaagct

SEQ ID NO: 31666 - DNA, 50 bp, unidentified
  source 1..50: mol_type = unassigned DNA; note = donor_1e8664c
  misc_feature 1..23: note = RE
  misc_feature 24..25: note = Core
  misc_feature 26..50: note = LE
tctattgactattcatagttggtcttgtatgatgtatttacactgaaata

SEQ ID NO: 31667 - DNA, 50 bp, unidentified
  source 1..50: mol_type = unassigned DNA; note = donor_1e8eb84
  misc_feature 1..23: note = RE
  misc_feature 24..25: note = Core
  misc_feature 26..50: note = LE
gcaccgcaggggccgtccacacatgatggggtggacggcccctgctctcc

SEQ ID NO: 31668 - DNA, 50 bp, unidentified
  source 1..50: mol_type = unassigned DNA; note = donor_1e92874
  misc_feature 1..24: note = RE
  misc_feature 25: note = Core
  misc_feature 26..50: note = LE
tgcaaaacgggaggggtccatatacaatggtatggacccctcccacctaa

SEQ ID NO: 31669 - DNA, 50 bp, unidentified; identical to SEQ ID NO: 30838
  source 1..50: mol_type = unassigned DNA; note = donor_1e9764f
  misc_feature 1..23: note = RE
  misc_feature 24..25: note = Core
  misc_feature 26..50: note = LE

SEQ ID NO: 31670 - DNA, 50 bp, unidentified
  source 1..50: mol_type = unassigned DNA; note = donor_1ea3463
  misc_feature 1..21: note = RE
  misc_feature 22..25: note = Core
  misc_feature 26..50: note = LE
ccttgacttcatatagctggtctcctatctttaagtcgttgcatttttag

SEQ ID NO: 31671 - DNA, 50 bp, unidentified
  source 1..50: mol_type = unassigned DNA; note = donor_1ea3669
  misc_feature 1..23: note = RE
  misc_feature 24..25: note = Core
  misc_feature 26..50: note = LE
gattaaggggcgccgtccagacatgatggggtggacggcgccccgaacgg

SEQ ID NO: 31672 - DNA, 50 bp, unidentified
  source 1..50: mol_type = unassigned DNA; note = donor_1eab27e
  misc_feature 1..23: note = RE
  misc_feature 24..25: note = Core
  misc_feature 26..50: note = LE
tgaatcccgggccgttccacacatgttggggtggaacggcccacggcatc

SEQ ID NO: 31673 - DNA, 50 bp, unidentified
  source 1..50: mol_type = unassigned DNA; note = donor_1eaf80d
  misc_feature 1..23: note = RE
  misc_feature 24..25: note = Core
  misc_feature 26..50: note = LE
cggcttgacaacgtcattgggaatccataccttccttgatgtgggtctga

SEQ ID NO: 31674 - DNA, 50 bp, unidentified
  source 1..50: mol_type = unassigned DNA; note = donor_1eb1ba9
  misc_feature 1..22: note = RE
  misc_feature 23..25: note = Core
  misc_feature 26..50: note = LE
tcaacccttgatcaaaacggatacttgtcttaagatttcccccggttccc

SEQ ID NO: 31675 - DNA, 50 bp, unidentified
  source 1..50: mol_type = unassigned DNA; note = donor_1ebdc39
  misc_feature 1..23: note = RE
  misc_feature 24..25: note = Core
  misc_feature 26..50: note = LE
ccgcttgacaaaagcattagacagccctaccttcatgacgtgccgccggt

SEQ ID NO: 31676 - DNA, 50 bp, unidentified
  source 1..50: mol_type = unassigned DNA; note = donor_1ec558c
  misc_feature 1..21: note = RE
  misc_feature 22..25: note = Core
  misc_feature 26..50: note = LE
aagggggttgacacagggtgtctcactggactacctttcggctgttagtg

SEQ ID NO: 31677 - DNA, 50 bp, unidentified
  source 1..50: mol_type = unassigned DNA; note = donor_1ec872b
  misc_feature 1..23: note = RE
  misc_feature 24..25: note = Core
  misc_feature 26..50: note = LE
agcaagcttgactaagacggatacttgtcttatgactttgtctcgtttta

SEQ ID NO: 31678 - DNA, 50 bp, unidentified
  source 1..50: mol_type = unassigned DNA; note = donor_1eceaab
  misc_feature 1..23: note = RE
  misc_feature 24..25: note = Core
  misc_feature 26..50: note = LE
tgacattcaagctcctgggatgtctaatgagatttgggagtaagccatcc

SEQ ID NO: 31679 - DNA, 50 bp, unidentified
  source 1..50: mol_type = unassigned DNA; note = donor_1ecf22a
  misc_feature 1..23: note = RE
  misc_feature 24..25: note = Core
  misc_feature 26..50: note = LE
gcaagccgggggccgtccacatatgttggggtggacggcccccgaacggc

SEQ ID NO: 31680 - DNA, 50 bp, unidentified
  source 1..50: mol_type = unassigned DNA; note = donor_1ee7960
  misc_feature 1..23: note = RE
  misc_feature 24..25: note = Core
  misc_feature 26..50: note = LE
gacaaggggcgccgtccagacaggatggggtggacggcgccccgacggca

SEQ ID NO: 31681 - DNA, 50 bp, unidentified
  source 1..50: mol_type = unassigned DNA; note = donor_1ef014a
  misc_feature 1..23: note = RE
  misc_feature 24..25: note = Core
  misc_feature 26..50: note = LE
gggcttgacaatttatatggcttctcatatactaattggtagcgagcaga

SEQ ID NO: 31682 - DNA, 50 bp, unidentified
  source 1..50: mol_type = unassigned DNA; note = donor_1ef5e1a
  misc_feature 1..24: note = RE
  misc_feature 25: note = Core
  misc_feature 26..50: note = LE
atcttgacaagctattagctggtatcgtattatgagatcaaccagttctt

SEQ ID NO: 31683 - DNA, 50 bp, unidentified; identical to SEQ ID NO: 30472
  source 1..50: mol_type = unassigned DNA; note = donor_1ef8417
  misc_feature 1..24: note = RE
  misc_feature 25: note = Core
  misc_feature 26..50: note = LE

SEQ ID NO: 31684 - DNA, 50 bp, unidentified
  source 1..50: mol_type = unassigned DNA; note = donor_1eff8c3
  misc_feature 1..23: note = RE
  misc_feature 24..25: note = Core
  misc_feature 26..50: note = LE
cctattgacttttaatagttagtctcgtataataaatgtagtagttttta

SEQ ID NO: 31685 - DNA, 50 bp, unidentified
  source 1..50: mol_type = unassigned DNA; note = donor_1f036ab
  misc_feature 1..23: note = RE
  misc_feature 24..25: note = Core
  misc_feature 26..50: note = LE
cggcttgacaacgtcattgagattccttacctttcttgcagggtggttgt

SEQ ID NO: 31686 - DNA, 50 bp, unidentified
  source 1..50: mol_type = unassigned DNA; note = donor_1f0637c
  misc_feature 1..24: note = RE
  misc_feature 25: note = Core
  misc_feature 26..50: note = LE
cggcttgacaaccgcataggggcacgttaccttcttcgggtcgctgagag

SEQ ID NO: 31687 - DNA, 50 bp, unidentified
  source 1..50: mol_type = unassigned DNA; note = donor_1f149ad
  misc_feature 1..24: note = RE
  misc_feature 25: note = Core
  misc_feature 26..50: note = LE
tgcgacaaagcggcggaccatacataatgggatggtccgccgccctttac

SEQ ID NO: 31688 - DNA, 50 bp, unidentified
  source 1..50: mol_type = unassigned DNA; note = donor_1f1629f
  misc_feature 1..24: note = RE
  misc_feature 25: note = Core
  misc_feature 26..50: note = LE
gggttgacctcttattagctggtatcgtattatgaggtcaatcagaattt

SEQ ID NO: 31689 - DNA, 50 bp, unidentified
  source 1..50: mol_type = unassigned DNA; note = donor_1f162fc
  misc_feature 1..24: note = RE
  misc_feature 25: note = Core
  misc_feature 26..50: note = LE
aaaatttgttttaaccataggatacctttagatttgtattataaatataa

SEQ ID NO: 31690 - DNA, 50 bp, unidentified
  source 1..50: mol_type = unassigned DNA; note = donor_1f1840e
  misc_feature 1..23: note = RE
  misc_feature 24..25: note = Core
  misc_feature 26..50: note = LE
cttgacaggcccgaccccatgggtgacgctatgtgggtcgggcccccgtc

SEQ ID NO: 31691 - DNA, 50 bp, unidentified
  source 1..50: mol_type = unassigned DNA; note = donor_1f20002
  misc_feature 1..23: note = RE
  misc_feature 24..25: note = Core
  misc_feature 26..50: note = LE
gacgatcaaaggcccattacagaagatgccgtaatgggccggcgcttcaa

SEQ ID NO: 31692 - DNA, 50 bp, unidentified
  source 1..50: mol_type = unassigned DNA; note = donor_1f213f6
  misc_feature 1..24: note = RE
  misc_feature 25: note = Core
  misc_feature 26..50: note = LE
gccgcttgacacaccacataggggcgttaccttgttggtggtcccgggtg

SEQ ID NO: 31693 - DNA, 50 bp, unidentified
  source 1..50: mol_type = unassigned DNA; note = donor_1f30a9b
  misc_feature 1..23: note = RE
  misc_feature 24..25: note = Core
  misc_feature 26..50: note = LE
gcgatcacggaggcgtccacagatgatggggtggacgcctccccgacggc

SEQ ID NO: 31694 - DNA, 50 bp, unidentified
  source 1..50: mol_type = unassigned DNA; note = donor_1f31585
  misc_feature 1..23: note = RE
  misc_feature 24..25: note = Core
  misc_feature 26..50: note = LE
gccatgcaggagccaaccatacatgatggtgtggatggctcctgctcccg

SEQ ID NO: 31695 - DNA, 50 bp, unidentified
  source 1..50: mol_type = unassigned DNA; note = donor_1f3ee24
  misc_feature 1..21: note = RE
  misc_feature 22..25: note = Core
  misc_feature 26..50: note = LE
ttgacaagaaacatagggacaccccgttaccttcttcgtagctcctgatc

SEQ ID NO: 31696 - DNA, 50 bp, unidentified
  source 1..50: mol_type = unassigned DNA; note = donor_1f47fb7
  misc_feature 1..23: note = RE
  misc_feature 24..25: note = Core
  misc_feature 26..50: note = LE
atgcttgcactacaagagagaatcttgtatgttgcgttcagaggcgtgac

SEQ ID NO: 31697 - DNA, 50 bp, unidentified
  source 1..50: mol_type = unassigned DNA; note = donor_1f610b9
  misc_feature 1..23: note = RE
  misc_feature 24..25: note = Core
  misc_feature 26..50: note = LE
gcgtcttacggggcgtccacagatgatggggtggacgccccccggcggca

SEQ ID NO: 31698 - DNA, 50 bp, unidentified
  source 1..50: mol_type = unassigned DNA; note = donor_1f643d4
  misc_feature 1..24: note = RE
  misc_feature 25: note = Core
  misc_feature 26..50: note = LE
cttgcagacggggcgggccatacgtatggaatggcccgcccctccacccg

SEQ ID NO: 31699 - DNA, 50 bp, unidentified
  source 1..50: mol_type = unassigned DNA; note = donor_1f6fa4d
  misc_feature 1..24: note = RE
  misc_feature 25: note = Core
  misc_feature 26..50: note = LE
ttgcaaaaacgaggagtccatatataatggtatggactcctctccttccc

SEQ ID NO: 31700 - DNA, 50 bp, unidentified
  source 1..50: mol_type = unassigned DNA; note = donor_1f767de
  misc_feature 1..23: note = RE
  misc_feature 24..25: note = Core
  misc_feature 26..50: note = LE
gacaacagggagtcgtccatacatgatgtgatggacgactcccgctacgc

SEQ ID NO: 31701 - DNA, 50 bp, unidentified
  source 1..50: mol_type = unassigned DNA; note = donor_1f77684
  misc_feature 1..23: note = RE
  misc_feature 24..25: note = Core
  misc_feature 26..50: note = LE
cggcttgacaacgtcattgggaatccatacctttcttcgtgggttgatcg

SEQ ID NO: 31702 - DNA, 50 bp, unidentified
  source 1..50: mol_type = unassigned DNA; note = donor_1f77847
  misc_feature 1..22: note = RE
  misc_feature 23..25: note = Core
  misc_feature 26..50: note = LE
cgccgcagcggtcgtccacacatgatggtgtggacgaccgctgctcccgg

SEQ ID NO: 31703 - DNA, 50 bp, unidentified
  source 1..50: mol_type = unassigned DNA; note = donor_1f7df43
  misc_feature 1..24: note = RE
  misc_feature 25: note = Core
  misc_feature 26..50: note = LE
tgcaaaaggcgtcgggtccatacatactgagatggacccgacgccaccat

SEQ ID NO: 31704 - DNA, 50 bp, unidentified
  source 1..50: mol_type = unassigned DNA; note = donor_1f7f250
  misc_feature 1..24: note = RE
  misc_feature 25: note = Core
  misc_feature 26..50: note = LE
tgttatacaagaggagtccatatacaatggtatggactcctcacttccac

SEQ ID NO: 31705 - DNA, 50 bp, unidentified
  source 1..50: mol_type = unassigned DNA; note = donor_1f8cf49
  misc_feature 1..23: note = RE
  misc_feature 24..25: note = Core
  misc_feature 26..50: note = LE
tggatttggctttgtcatagaaatcctttagacttgtattatctttatag

SEQ ID NO: 31706 - DNA, 50 bp, unidentified
  source 1..50: mol_type = unassigned DNA; note = donor_1f8db74
  misc_feature 1..22: note = RE
  misc_feature 23..25: note = Core
  misc_feature 26..50: note = LE
ccaatccggagccgtccacacatgatgctgtggacggctcctccaccggc

SEQ ID NO: 31707 - DNA, 50 bp, unidentified
  source 1..50: mol_type = unassigned DNA; note = donor_1f9405c
  misc_feature 1..22: note = RE
  misc_feature 23..25: note = Core
  misc_feature 26..50: note = LE
gatagacttgacaaatggtagaaaacatactaagattagtagtgaagaaa

SEQ ID NO: 31708 - DNA, 50 bp, unidentified
  source 1..50: mol_type = unassigned DNA; note = donor_1f95b5b
  misc_feature 1..23: note = RE
  misc_feature 24..25: note = Core
  misc_feature 26..50: note = LE
aatcttgctaacacagacggtatcttgtatcttacttgcgtgatgattag

SEQ ID NO: 31709 - DNA, 50 bp, unidentified
  source 1..50: mol_type = unassigned DNA; note = donor_1f999b9
  misc_feature 1..23: note = RE
  misc_feature 24..25: note = Core
  misc_feature 26..50: note = LE
tgacatttaagctcctgggatgtctaatgagtattagcgggtccggcctt

SEQ ID NO: 31710 - DNA, 50 bp, unidentified
  source 1..50: mol_type = unassigned DNA; note = donor_1fa4817
  misc_feature 1..23: note = RE
  misc_feature 24..25: note = Core
  misc_feature 26..50: note = LE
aaggggcttgatcaagacggatacttgtcttatgactttgggagcttttg

SEQ ID NO: 31711 - DNA, 50 bp, unidentified
  source 1..50: mol_type = unassigned DNA; note = donor_1fa8855
  misc_feature 1..24: note = RE
  misc_feature 25: note = Core
  misc_feature 26..50: note = LE
gccgcttgacaaacgacataggggccgttactttcttcgtagcccggatg

SEQ ID NO: 31712 - DNA, 50 bp, unidentified
  source 1..50: mol_type = unassigned DNA; note = donor_1fac60b
  misc_feature 1..23: note = RE
  misc_feature 24..25: note = Core
  misc_feature 26..50: note = LE
gtacttgactttttattagtaggctcctaatatataagttgtagggaata

SEQ ID NO: 31713 - DNA, 50 bp, unidentified
  source 1..50: mol_type = unassigned DNA; note = donor_1fb68eb
  misc_feature 1..23: note = RE
  misc_feature 24..25: note = Core
  misc_feature 26..50: note = LE
gagcttgacgggaaccatagaaccttgtatggtttagctcccatcaacca

SEQ ID NO: 31714 - DNA, 50 bp, unidentified
  source 1..50: mol_type = unassigned DNA; note = donor_1fbd82d
  misc_feature 1..23: note = RE
  misc_feature 24..25: note = Core
  misc_feature 26..50: note = LE
gcaaaagtcaggctgaccatagattaatgagatggtcagcctgaccgaaa

SEQ ID NO: 31715 - DNA, 50 bp, unidentified
  source 1..50: mol_type = unassigned DNA; note = donor_1fc74e7
  misc_feature 1..21: note = RE
  misc_feature 22..25: note = Core
  misc_feature 26..50: note = LE
cctgaggttgacacagagggtgtcactggtgaacactccttgatgcgggc

SEQ ID NO: 31716 - DNA, 50 bp, unidentified
  source 1..50: mol_type = unassigned DNA; note = donor_1fd09aa
  misc_feature 1..23: note = RE
  misc_feature 24..25: note = Core
  misc_feature 26..50: note = LE
gcgaggcggaggccgtccacatatgttggtgtggacggcctccgatcgag

SEQ ID NO: 31717 - DNA, 50 bp, unidentified
  source 1..50: mol_type = unassigned DNA; note = donor_1fd2090
  misc_feature 1..22: note = RE
  misc_feature 23..25: note = Core
  misc_feature 26..50: note = LE
tgcggacggggcgggccatacgttatgggatggcccgcccctctcgcggc

SEQ ID NO: 31718 - DNA, 50 bp, unidentified
  source 1..50: mol_type = unassigned DNA; note = donor_1fd2d55
  misc_feature 1..23: note = RE
  misc_feature 24..25: note = Core
  misc_feature 26..50: note = LE
tgacatcaaaacccctgggatgtctaataagagttaacgggtcggcctac

SEQ ID NO: 31719 - DNA, 50 bp, unidentified
  source 1..50: mol_type = unassigned DNA; note = donor_1fd8334
  misc_feature 1..21: note = RE
  misc_feature 22..25: note = Core
  misc_feature 26..50: note = LE
cggcagcttgacacagggcttctcactggtgcaccatccttgagtcagtg

SEQ ID NO: 31720 - DNA, 50 bp, unidentified
  source 1..50: mol_type = unassigned DNA; note = donor_1fda3ef
  misc_feature 1..24: note = RE
  misc_feature 25: note = Core
  misc_feature 26..50: note = LE
tgcagtcgcgcggcggaccatacataatgagatggtccgccgcttgattt

SEQ ID NO: 31721 - DNA, 50 bp, unidentified
  source 1..50: mol_type = unassigned DNA; note = donor_1fde3dc
  misc_feature 1..23: note = RE
  misc_feature 24..25: note = Core
  misc_feature 26..50: note = LE
ggcttgacatcaggcattgggaagctctaccttcctgcgtgggtcgtccc

SEQ ID NO: 31722 - DNA, 50 bp, unidentified
  source 1..50: mol_type = unassigned DNA; note = donor_1fed8cd
  misc_feature 1..24: note = RE
  misc_feature 25: note = Core
  misc_feature 26..50: note = LE
tggcaaaacgggggcgaccatctataatggaatggtcgcccctacccgaa

SEQ ID NO: 31723 - DNA, 50 bp, unidentified
  source 1..50: mol_type = unassigned DNA; note = donor_1fefaf3
  misc_feature 1..23: note = RE
  misc_feature 24..25: note = Core
  misc_feature 26..50: note = LE
gccggtctacttcaacacagttgcttgtgtctgcaaaatctgccagaatg

SEQ ID NO: 31724 - DNA, 50 bp, unidentified
  source 1..50: mol_type = unassigned DNA; note = donor_20035fc
  misc_feature 1..23: note = RE
  misc_feature 24..25: note = Core
  misc_feature 26..50: note = LE
gcaggtaaattcatgatagttgactcctaccatgaattcatatatagaat

SEQ ID NO: 31725 - DNA, 50 bp, unidentified
  source 1..50: mol_type = unassigned DNA; note = donor_201a03a
  misc_feature 1..22: note = RE
  misc_feature 23..25: note = Core
  misc_feature 26..50: note = LE
ttaggacttgacaatagagggtcttatacgttaaactaaaaccaagccct

SEQ ID NO: 31726 - DNA, 50 bp, unidentified
  source 1..50: mol_type = unassigned DNA; note = donor_201be81
  misc_feature 1..23: note = RE
  misc_feature 24..25: note = Core
  misc_feature 26..50: note = LE
atacttgacttttcatagctggtcttgtatgatgatttcagaagctaaat

SEQ ID NO: 31727 - DNA, 50 bp, unidentified
  source 1..50: mol_type = unassigned DNA; note = donor_2024963
  misc_feature 1..23: note = RE
  misc_feature 24..25: note = Core
  misc_feature 26..50: note = LE
accgcttggaattgtcatagaaatcctttagacttgtattgttattttta

SEQ ID NO: 31728 - DNA, 50 bp, unidentified
  source 1..50: mol_type = unassigned DNA; note = donor_202c74b
  misc_feature 1..24: note = RE
  misc_feature 25: note = Core
  misc_feature 26..50: note = LE
tctccttgactttttatttgtaggcctgttattatatatttgccccttga

SEQ ID NO: 31729 - DNA, 50 bp, unidentified
  source 1..50: mol_type = unassigned DNA; note = donor_202ea97
  misc_feature 1..24: note = RE
  misc_feature 25: note = Core
  misc_feature 26..50: note = LE
cttgaattaagtcggtgtccatatatgggcacctccccaaaacggcttca

SEQ ID NO: 31730 - DNA, 50 bp, unidentified
  source 1..50: mol_type = unassigned DNA; note = donor_203168e
  misc_feature 1..23: note = RE
  misc_feature 24..25: note = Core
  misc_feature 26..50: note = LE
gcaaagaccgggctgaccatagattaatgagatggtcagcccggtccgtc

SEQ ID NO: 31731 - DNA, 50 bp, unidentified
  source 1..50: mol_type = unassigned DNA; note = donor_20322fc
  misc_feature 1..23: note = RE
  misc_feature 24..25: note = Core
  misc_feature 26..50: note = LE
gcggcacgggggccgtccacatatgatggtgtggacggccccctacggca

SEQ ID NO: 31732 - DNA, 50 bp, unidentified
  source 1..50: mol_type = unassigned DNA; note = donor_2033f11
  misc_feature 1..23: note = RE
  misc_feature 24..25: note = Core
  misc_feature 26..50: note = LE
atgcttgaccggcaagacggtatcttgtatcttgttccctgtggtggtta

SEQ ID NO: 31733 - DNA, 50 bp, unidentified
  source 1..50: mol_type = unassigned DNA; note = donor_203b277
  misc_feature 1..23: note = RE
  misc_feature 24..25: note = Core
  misc_feature 26..50: note = LE
gaatgtgggggcgagtccatacataattgaatggactcgcccaagccgag

SEQ ID NO: 31734 - DNA, 50 bp, unidentified
  source 1..50: mol_type = unassigned DNA; note = donor_203c970
  misc_feature 1..22: note = RE
  misc_feature 23..25: note = Core
  misc_feature 26..50: note = LE
agatttggaatttaccttggaatgccttaagtttgcattttcataaaact

SEQ ID NO: 31735 - DNA, 50 bp, unidentified
  source 1..50: mol_type = unassigned DNA; note = donor_203c99b
  misc_feature 1..24: note = RE
  misc_feature 25: note = Core
  misc_feature 26..50: note = LE
ggcggcggcttgacataggagcaactcagtgtcagggtggacacgcaggg

SEQ ID NO: 31736 - DNA, 50 bp, unidentified
  source 1..50: mol_type = unassigned DNA; note = donor_2044d42
  misc_feature 1..24: note = RE
  misc_feature 25: note = Core
  misc_feature 26..50: note = LE
gacttgacataccattagctggtttcgtattattaggtcaaccagagatt

SEQ ID NO: 31737 - DNA, 50 bp, unidentified
  source 1..50: mol_type = unassigned DNA; note = donor_2047757
  misc_feature 1..23: note = RE
  misc_feature 24..25: note = Core
  misc_feature 26..50: note = LE
gccaacggagggccgtccacacatgatgacgtggacggctctccacccct

SEQ ID NO: 31738 - DNA, 50 bp, unidentified
  source 1..50: mol_type = unassigned DNA; note = donor_2049118
  misc_feature 1..24: note = RE
  misc_feature 25: note = Core
  misc_feature 26..50: note = LE
gcaaaaacgggggtgaccatagattaatgagatggtcacccccacacctt

SEQ ID NO: 31739 - DNA, 50 bp, unidentified
  source 1..50: mol_type = unassigned DNA; note = donor_204d61d
  misc_feature 1..23: note = RE
  misc_feature 24..25: note = Core
  misc_feature 26..50: note = LE
cttgacgaaacccatagggacacccgttaccttcttcatggcctcgttaa

SEQ ID NO: 31740 - DNA, 50 bp, unidentified
  source 1..50: mol_type = unassigned DNA; note = donor_2051b04
  misc_feature 1..22: note = RE
  misc_feature 23..25: note = Core
  misc_feature 26..50: note = LE
caccgcgggcggcaaccacagaagatggggtggttgccgccctccccaga

SEQ ID NO: 31741 - DNA, 50 bp, unidentified
  source 1..50: mol_type = unassigned DNA; note = donor_2054311
  misc_feature 1..24: note = RE
  misc_feature 25: note = Core
  misc_feature 26..50: note = LE
cttgcagacggagcgggccatacgtatggaatggcccgccccaccccctc

SEQ ID NO: 31742 - DNA, 50 bp, unidentified
  source 1..50: mol_type = unassigned DNA; note = donor_2056796
  misc_feature 1..24: note = RE
  misc_feature 25: note = Core
  misc_feature 26..50: note = LE
aggggacttgacacaaagaggattctgcttgagacttcctgcagacgttg

SEQ ID NO: 31743 - DNA, 50 bp, unidentified
  source 1..50: mol_type = unassigned DNA; note = donor_20576b5
  misc_feature 1..23: note = RE
  misc_feature 24..25: note = Core
  misc_feature 26..50: note = LE
gcgagcccggcgcaatcagtgggtgtagttgaccacccgctgcgcggacc

SEQ ID NO: 31744 - DNA, 50 bp, unidentified
  source 1..50: mol_type = unassigned DNA; note = donor_206067d
  misc_feature 1..23: note = RE
  misc_feature 24..25: note = Core
  misc_feature 26..50: note = LE
acccgggggttgacaaagggtgtctgatggcattaccttcgttcatcaga

SEQ ID NO: 31745 - DNA, 50 bp, unidentified
  source 1..50: mol_type = unassigned DNA; note = donor_206cb48
  misc_feature 1..23: note = RE
  misc_feature 24..25: note = Core
  misc_feature 26..50: note = LE
cgcaaaagggacgcgttcatatagaatgaaatgaacgcgtcccacccctg

SEQ ID NO: 31746 - DNA, 50 bp, unidentified
  source 1..50: mol_type = unassigned DNA; note = donor_2072438
  misc_feature 1..23: note = RE
  misc_feature 24..25: note = Core
  misc_feature 26..50: note = LE
ggcgtcacgggggcgtccatagatgatggaatggacgccccctcccggca

SEQ ID NO: 31747 - DNA, 50 bp, unidentified
  source 1..50: mol_type = unassigned DNA; note = donor_2078869
  misc_feature 1..23: note = RE
  misc_feature 24..25: note = Core
  misc_feature 26..50: note = LE
cctcttgacttttatttgcaggtctactataataatacttggtcgtataa

SEQ ID NO: 31748 - DNA, 50 bp, unidentified
  source 1..50: mol_type = unassigned DNA; note = donor_208930d
  misc_feature 1..23: note = RE
  misc_feature 24..25: note = Core
  misc_feature 26..50: note = LE
atcgggcgctgctttaatggttgcttgtattagcgcatcggtataggatt

SEQ ID NO: 31749 - DNA, 50 bp, unidentified
  source 1..50: mol_type = unassigned DNA; note = donor_208c55a
  misc_feature 1..24: note = RE
  misc_feature 25: note = Core
  misc_feature 26..50: note = LE
gactttttgggggaagcccttgtagaatgaaagggacttccccgtcccga

SEQ ID NO: 31750 - DNA, 50 bp, unidentified
  source 1..50: mol_type = unassigned DNA; note = donor_208d0da
  misc_feature 1..23: note = RE
  misc_feature 24..25: note = Core
  misc_feature 26..50: note = LE
ggggttgacttttaatagttaatcttgtattataaagtagtagttattaa

SEQ ID NO: 31751 - DNA, 50 bp, unidentified
  source 1..50: mol_type = unassigned DNA; note = donor_208d841
  misc_feature 1..24: note = RE
  misc_feature 25: note = Core
  misc_feature 26..50: note = LE
tttaagctattctttataggatggtcgtataatacatttatcgttcaatt

SEQ ID NO: 31752 - DNA, 50 bp, unidentified
  source 1..50: mol_type = unassigned DNA; note = donor_2090fa9
  misc_feature 1..23: note = RE
  misc_feature 24..25: note = Core
  misc_feature 26..50: note = LE
aagcttgaccgggaacagagtatcttgtatgttctcaccacacccttgcg

SEQ ID NO: 31753 - DNA, 50 bp, unidentified
  source 1..50: mol_type = unassigned DNA; note = donor_2091438
  misc_feature 1..24: note = RE
  misc_feature 25: note = Core
  misc_feature 26..50: note = LE
ggggcttgattttttatttgcaggcctgttactatatacttgccccggat

SEQ ID NO: 31754 - DNA, 50 bp, unidentified
  source 1..50: mol_type = unassigned DNA; note = donor_209d6c4
  misc_feature 1..23: note = RE
  misc_feature 24..25: note = Core
  misc_feature 26..50: note = LE
aatgttgacaagctattagctggttcgtattatgaggtcagccagttatt

SEQ ID NO: 31755 - DNA, 50 bp, unidentified
  source 1..50: mol_type = unassigned DNA; note = donor_209ecee
  misc_feature 1..23: note = RE
  misc_feature 24..25: note = Core
  misc_feature 26..50: note = LE
gacatcaccgggcccattagagaagatgccgtaatgggcccggcccagac

SEQ ID NO: 31756 - DNA, 50 bp, unidentified
  source 1..50: mol_type = unassigned DNA; note = donor_20a1c66
  misc_feature 1..24: note = RE
  misc_feature 25: note = Core
  misc_feature 26..50: note = LE
cttgacaaagggggagtccatgtagaatgatatggactccccactcaatt

SEQ ID NO: 31757 - DNA, 50 bp, unidentified
  source 1..50: mol_type = unassigned DNA; note = donor_20a23d6
  misc_feature 1..24: note = RE
  misc_feature 25: note = Core
  misc_feature 26..50: note = LE
tgcgacaaggcggcggaccatacataattggatggtccgccgctttcagc

SEQ ID NO: 31758 - DNA, 50 bp, unidentified
  source 1..50: mol_type = unassigned DNA; note = donor_20b8662
  misc_feature 1..24: note = RE
  misc_feature 25: note = Core
  misc_feature 26..50: note = LE
gcggcttgacaaaagtaataggggcgttaccttgttcgtagccctttcca

SEQ ID NO: 31759 - DNA, 50 bp, unidentified
  source 1..50: mol_type = unassigned DNA; note = donor_20bc353
  misc_feature 1..23: note = RE
  misc_feature 24..25: note = Core
  misc_feature 26..50: note = LE
gctattgacttttgtttgcaggactcctacaataataaataaggtttaag

SEQ ID NO: 31760 - DNA, 50 bp, unidentified
  source 1..50: mol_type = unassigned DNA; note = donor_20beca2
  misc_feature 1..23: note = RE
  misc_feature 24..25: note = Core
  misc_feature 26..50: note = LE
tgacttgacttttaatagttagtctcgtataataaagtagtagtttttag

SEQ ID NO: 31761 - DNA, 50 bp, unidentified
  source 1..50: mol_type = unassigned DNA; note = donor_20c3430
  misc_feature 1..21: note = RE
  misc_feature 22..25: note = Core
  misc_feature 26..50: note = LE
aggcggcttgacacagggcttctcactggtctaccttccttgtatcagcg

SEQ ID NO: 31762 - DNA, 50 bp, unidentified
  source 1..50: mol_type = unassigned DNA; note = donor_20cbf21
  misc_feature 1..23: note = RE
  misc_feature 24..25: note = Core
  misc_feature 26..50: note = LE
caatgcgggagccatccacagaagatgatgtggatggctcccgctgccgg

SEQ ID NO: 31763 - DNA, 50 bp, unidentified
  source 1..50: mol_type = unassigned DNA; note = donor_20ceee8
  misc_feature 1..23: note = RE
  misc_feature 24..25: note = Core
  misc_feature 26..50: note = LE
gccggtttacttcagcacagttgcttgtgtccaaaaaatttggcagaatg

SEQ ID NO: 31764 - DNA, 50 bp, unidentified
  source 1..50: mol_type = unassigned DNA; note = donor_20d7f37
  misc_feature 1..23: note = RE
  misc_feature 24..25: note = Core
  misc_feature 26..50: note = LE
aacatggtgctgagagatggtatcttgtatctctcaatctgatatatttg

SEQ ID NO: 31765 - DNA, 50 bp, unidentified
  source 1..50: mol_type = unassigned DNA; note = donor_20e54c3
  misc_feature 1..24: note = RE
  misc_feature 25: note = Core
  misc_feature 26..50: note = LE
gctggcatagggggcgttcatgtacaatgggatgaacgcccccacccgta

SEQ ID NO: 31766 - DNA, 50 bp, unidentified
  source 1..50: mol_type = unassigned DNA; note = donor_20e81b5
  misc_feature 1..24: note = RE
  misc_feature 25: note = Core
  misc_feature 26..50: note = LE
ttgtttggtttttaactcagttcttcttaagtttacaatccattaaattt

SEQ ID NO: 31767 - DNA, 50 bp, unidentified
  source 1..50: mol_type = unassigned DNA; note = donor_20faa72
  misc_feature 1..23: note = RE
  misc_feature 24..25: note = Core
  misc_feature 26..50: note = LE
gcaccgcggaggccatccacacatgatgaggtggatggcctccgctctcg

SEQ ID NO: 31768 - DNA, 50 bp, unidentified
  source 1..50: mol_type = unassigned DNA; note = donor_20ff04a
  misc_feature 1..23: note = RE
  misc_feature 24..25: note = Core
  misc_feature 26..50: note = LE
ggcatgaggttgacggaggatgtctgatggcagtaccttccttcgtcatc

SEQ ID NO: 31769 - DNA, 50 bp, unidentified
  source 1..50: mol_type = unassigned DNA; note = donor_21072e4
  misc_feature 1..24: note = RE
  misc_feature 25: note = Core
  misc_feature 26..50: note = LE
ttgcatcgcgaggaggaccatatataatggaatggtccgccccgctccta

SEQ ID NO: 31770 - DNA, 50 bp, unidentified
  source 1..50: mol_type = unassigned DNA; note = donor_210d265
  misc_feature 1..24: note = RE
  misc_feature 25: note = Core
  misc_feature 26..50: note = LE
cctcttgactttttatagttagtcacgtataatagaaaccatcctgaaag

SEQ ID NO: 31771 - DNA, 50 bp, unidentified
  source 1..50: mol_type = unassigned DNA; note = donor_211274e
  misc_feature 1..23: note = RE
  misc_feature 24..25: note = Core
  misc_feature 26..50: note = LE
aggcttgacgcgcaagacggtatcttgtatcttgatcatattggtggtta

SEQ ID NO: 31772 - DNA, 50 bp, unidentified
  source 1..50: mol_type = unassigned DNA; note = donor_21184a8
  misc_feature 1..22: note = RE
  misc_feature 23..25: note = Core
  misc_feature 26..50: note = LE
attcttgacaagtattagctggtttcgtattattaggtcagccagaaact

SEQ ID NO: 31773 - DNA, 50 bp, unidentified
  source 1..50: mol_type = unassigned DNA; note = donor_2120405
  misc_feature 1..24: note = RE
  misc_feature 25: note = Core
  misc_feature 26..50: note = LE
cttgcagacggggcgggccatacgtatggaatggcccgcccctccttccg

SEQ ID NO: 31774 - DNA, 50 bp, unidentified
  source 1..50: mol_type = unassigned DNA; note = donor_2128407
  misc_feature 1..23: note = RE
  misc_feature 24..25: note = Core
  misc_feature 26..50: note = LE
cctattgactttttatttgtaggctactacaatgtatttatggttatagt

SEQ ID NO: 31775 - DNA, 50 bp, unidentified
  source 1..50: mol_type = unassigned DNA; note = donor_212dfd4
  misc_feature 1..24: note = RE
  misc_feature 25: note = Core
  misc_feature 26..50: note = LE
tgcgacaaggcggcggaccatacataatgggatggtccgccgcctcaccc

SEQ ID NO: 31776 - DNA, 50 bp, unidentified
  source 1..50: mol_type = unassigned DNA; note = donor_2144f1a
  misc_feature 1..23: note = RE
  misc_feature 24..25: note = Core
  misc_feature 26..50: note = LE
ccttgaccaaacccatagaggcaccattaccttttggttgtccccgcaac

SEQ ID NO: 31777 - DNA, 50 bp, unidentified
  source 1..50: mol_type = unassigned DNA; note = donor_21496fe
  misc_feature 1..24: note = RE
  misc_feature 25: note = Core
  misc_feature 26..50: note = LE
ccacttgacgatccataggagcatcagtgaggatgtgggcgagccccgca

SEQ ID NO: 31778 - DNA, 50 bp, unidentified
  source 1..50: mol_type = unassigned DNA; note = donor_215b3d9
  misc_feature 1..23: note = RE
  misc_feature 24..25: note = Core
  misc_feature 26..50: note = LE
actcgtacgcctgttttcatagaagatgtaatgaaaaccaaaaaagcgtg

SEQ ID NO: 31779 - DNA, 50 bp, unidentified
  source 1..50: mol_type = unassigned DNA; note = donor_215da85
  misc_feature 1..23: note = RE
  misc_feature 24..25: note = Core
  misc_feature 26..50: note = LE
cattgctgctgcatgacagttgacttgtgtctaacgcgggtatatcgttg

SEQ ID NO: 31780 - DNA, 50 bp, unidentified
  source 1..50: mol_type = unassigned DNA; note = donor_216d2ad
  misc_feature 1..24: note = RE
  misc_feature 25: note = Core
  misc_feature 26..50: note = LE
tcaccccttgacacaaagaggcttctgattgatgatggaggggcgttgcg

SEQ ID NO: 31781 - DNA, 50 bp, unidentified
  source 1..50: mol_type = unassigned DNA; note = donor_216e140
  misc_feature 1..24: note = RE
  misc_feature 25: note = Core
  misc_feature 26..50: note = LE
cttgccgacggggcgggccatacgtatggatggcccgcccctcaaccgaa

SEQ ID NO: 31782 - DNA, 50 bp, unidentified
  source 1..50: mol_type = unassigned DNA; note = donor_217694a
  misc_feature 1..24: note = RE
  misc_feature 25: note = Core
  misc_feature 26..50: note = LE
cttgccgacggggcgggccatacgtatggaatggcccgcccctcaccgtc

SEQ ID NO: 31783 - DNA, 50 bp, unidentified
  source 1..50: mol_type = unassigned DNA; note = donor_217c9cc
  misc_feature 1..23: note = RE
  misc_feature 24..25: note = Core
  misc_feature 26..50: note = LE
cctattgacttttatttgcaggtctactataatatatttagacgttaaat

SEQ ID NO: 31784 - DNA, 50 bp, unidentified
  source 1..50: mol_type = unassigned DNA; note = donor_2184a43
  misc_feature 1..22: note = RE
  misc_feature 23..25: note = Core
  misc_feature 26..50: note = LE
aatgttgacaaactattagctggttcgtattataaggtcaactagaaatg

SEQ ID NO: 31785 - DNA, 50 bp, unidentified
  source 1..50: mol_type = unassigned DNA; note = donor_2188b9a
  misc_feature 1..23: note = RE
  misc_feature 24..25: note = Core
  misc_feature 26..50: note = LE
gagcttgacttttaatagttagtctcgtattatagagtagtagttattaa

SEQ ID NO: 31786 - DNA, 50 bp, unidentified
  source 1..50: mol_type = unassigned DNA; note = donor_2190e62
  misc_feature 1..23: note = RE
  misc_feature 24..25: note = Core
  misc_feature 26..50: note = LE
agtaaattgaattaaactgagggagcattcctgtagtgcgttaatttcga

SEQ ID NO: 31787 - DNA, 50 bp, unidentified
  source 1..50: mol_type = unassigned DNA; note = donor_219df7d
  misc_feature 1..22: note = RE
  misc_feature 23..25: note = Core
  misc_feature 26..50: note = LE
cgccacgggcggcaaccacagaagatggagtggttgccgccctccccaga

SEQ ID NO: 31788 - DNA, 50 bp, unidentified
  source 1..50: mol_type = unassigned DNA; note = donor_21a4d98
  misc_feature 1..23: note = RE
  misc_feature 24..25: note = Core
  misc_feature 26..50: note = LE
aaaaaagacttgactatatagggagcttcctgtataattcaaatataggg

SEQ ID NO: 31789 - DNA, 50 bp, unidentified
  source 1..50: mol_type = unassigned DNA; note = donor_21ab5a9
  misc_feature 1..21: note = RE
  misc_feature 22..25: note = Core
  misc_feature 26..50: note = LE
tcttgacatctatttgcaggtttgctacaatgagtttgaccctggaaaga

SEQ ID NO: 31790 - DNA, 50 bp, unidentified
  source 1..50: mol_type = unassigned DNA; note = donor_21af8e6
  misc_feature 1..23: note = RE
  misc_feature 24..25: note = Core
  misc_feature 26..50: note = LE
cacaaccgggggacgtccatatatgatgtgatggacgtccccctcttcag

SEQ ID NO: 31791 - DNA, 50 bp, unidentified
  source 1..50: mol_type = unassigned DNA; note = donor_21b08ed
  misc_feature 1..23: note = RE
  misc_feature 24..25: note = Core
  misc_feature 26..50: note = LE
agccagtggttgacaaagggtgtctgatggctctaccatccttgggcata

SEQ ID NO: 31792 - DNA, 50 bp, unidentified
  source 1..50: mol_type = unassigned DNA; note = donor_21b67a9
  misc_feature 1..22: note = RE
  misc_feature 23..25: note = Core
  misc_feature 26..50: note = LE
cttttccgggggcgtccacagatgatggggtggacgccccctcgacggca

SEQ ID NO: 31793 - DNA, 50 bp, unidentified
  source 1..50: mol_type = unassigned DNA; note = donor_21be954
  misc_feature 1..22: note = RE
  misc_feature 23..25: note = Core
  misc_feature 26..50: note = LE
attcatttttattattatagttcattgtatattgtttttttttattatct

SEQ ID NO: 31794 - DNA, 50 bp, unidentified
  source 1..50: mol_type = unassigned DNA; note = donor_21c2491
  misc_feature 1..23: note = RE
  misc_feature 24..25: note = Core
  misc_feature 26..50: note = LE
tgcaagagggagccgtccacatatgttgggttggacggctcccaacggca

SEQ ID NO: 31795 - DNA, 50 bp, unidentified
  source 1..50: mol_type = unassigned DNA; note = donor_21c6f0b
  misc_feature 1..23: note = RE
  misc_feature 24..25: note = Core
  misc_feature 26..50: note = LE
aatgtgcttgatcacaacggaaacttgttttatgacctttccgctggttt

SEQ ID NO: 31796 - DNA, 50 bp, unidentified
  source 1..50: mol_type = unassigned DNA; note = donor_21cf5d1
  misc_feature 1..21: note = RE
  misc_feature 22..25: note = Core
  misc_feature 26..50: note = LE
cggcagcttgacatagggctactcactggtccaccctatgagggtcggtg

SEQ ID NO: 31797 - DNA, 50 bp, unidentified
  source 1..50: mol_type = unassigned DNA; note = donor_21d9038
  misc_feature 1..22: note = RE
  misc_feature 23..25: note = Core
  misc_feature 26..50: note = LE
aaatattgacaactattagctggttcgtattataaggttaaccagaaatt

SEQ ID NO: 31798 - DNA, 50 bp, unidentified
  source 1..50: mol_type = unassigned DNA; note = donor_21df889
  misc_feature 1..23: note = RE
  misc_feature 24..25: note = Core
  misc_feature 26..50: note = LE
cttgccaaggggccgtccacatatgatgatgtggacggccccgcttcggg

SEQ ID NO: 31799 - DNA, 50 bp, unidentified
  source 1..50: mol_type = unassigned DNA; note = donor_21e136b
  misc_feature 1..24: note = RE
  misc_feature 25: note = Core
  misc_feature 26..50: note = LE
ttgacagcaccagcaaagaggactctaattgtgactgaggatgctgcggt

SEQ ID NO: 31800 - DNA, 50 bp, unidentified
  source 1..50: mol_type = unassigned DNA; note = donor_21eb556
  misc_feature 1..23: note = RE
  misc_feature 24..25: note = Core
  misc_feature 26..50: note = LE
gccaactcggagccgtccacacatgatgctgtggacggctcctccacccg

SEQ ID NO: 31801 - DNA, 50 bp, unidentified
  source 1..50: mol_type = unassigned DNA; note = donor_21f3e85
  misc_feature 1..23: note = RE
  misc_feature 24..25: note = Core
  misc_feature 26..50: note = LE
gactaaccgaggcccgttacagaagatggggtaacgggccggccaggccg

SEQ ID NO: 31802 - DNA, 50 bp, unidentified
  source 1..50: mol_type = unassigned DNA; note = donor_220461c
  misc_feature 1..22: note = RE
  misc_feature 23..25: note = Core
  misc_feature 26..50: note = LE
caccaaaggggccgtccacacatgatggggtggacggccccgaccgccgg

SEQ ID NO: 31803 - DNA, 50 bp, unidentified
  source 1..50: mol_type = unassigned DNA; note = donor_2208727
  misc_feature 1..23: note = RE
  misc_feature 24..25: note = Core
  misc_feature 26..50: note = LE
tgtaagcggaggccgtccacatatgttggggtggacggcctccgacggca

SEQ ID NO: 31804 - DNA, 50 bp, unidentified
  source 1..50: mol_type = unassigned DNA; note = donor_220ae29
  misc_feature 1..24: note = RE
  misc_feature 25: note = Core
  misc_feature 26..50: note = LE
atccttgacttttacttagcaggctcctacaataaagatgtaggtaacag

SEQ ID NO: 31805 - DNA, 50 bp, unidentified
  source 1..50: mol_type = unassigned DNA; note = donor_220b174
  misc_feature 1..20: note = RE
  misc_feature 21..25: note = Core
  misc_feature 26..50: note = LE
tttgtttgatgagagcgggccccgctcccacaggtttcgagcaggcttga

SEQ ID NO: 31806 - DNA, 50 bp, unidentified
  source 1..50: mol_type = unassigned DNA; note = donor_220d30c
  misc_feature 1..23: note = RE
  misc_feature 24..25: note = Core
  misc_feature 26..50: note = LE
gcattcaaagggccgtccacacacgttggggtggacggcccccgcggcat

SEQ ID NO: 31807 - DNA, 50 bp, unidentified
  source 1..50: mol_type = unassigned DNA; note = donor_220d90b
  misc_feature 1..23: note = RE
  misc_feature 24..25: note = Core
  misc_feature 26..50: note = LE
gcataaccgggaacgtccatatatgatgtgatggacgttccctttttcag

SEQ ID NO: 31808 - DNA, 50 bp, unidentified
  source 1..50: mol_type = unassigned DNA; note = donor_22151eb
  misc_feature 1..23: note = RE
  misc_feature 24..25: note = Core
  misc_feature 26..50: note = LE
atagtttggcggtgtcatagaaatcctttagatttgtaatcgataaaatt

SEQ ID NO: 31809 - DNA, 50 bp, unidentified
  source 1..50: mol_type = unassigned DNA; note = donor_221db8a
  misc_feature 1..23: note = RE
  misc_feature 24..25: note = Core
  misc_feature 26..50: note = LE
gaccccgaacggccgattagagaagatggggtaatcggccggcgatcttg

SEQ ID NO: 31810 - DNA, 50 bp, unidentified
  source 1..50: mol_type = unassigned DNA; note = donor_2224950
  misc_feature 1..23: note = RE
  misc_feature 24..25: note = Core
  misc_feature 26..50: note = LE
tggtttattgggagcgtccatatataatgaaatggacgctccaactttta

SEQ ID NO: 31811 - DNA, 50 bp, unidentified; identical to SEQ ID NO: 31393
  source 1..50: mol_type = unassigned DNA; note = donor_2225afa
  misc_feature 1..24: note = RE
  misc_feature 25: note = Core
  misc_feature 26..50: note = LE

SEQ ID NO: 31812 - DNA, 50 bp, unidentified
  source 1..50: mol_type = unassigned DNA; note = donor_2225cc1
  misc_feature 1..24: note = RE
  misc_feature 25: note = Core
  misc_feature 26..50: note = LE
actacttgatttttatatagttagcctgatatattgtaaatgactcacct

SEQ ID NO: 31813 - DNA, 50 bp, unidentified
  source 1..50: mol_type = unassigned DNA; note = donor_222712a
  misc_feature 1..24: note = RE
  misc_feature 25: note = Core
  misc_feature 26..50: note = LE
gaccggttgacaacaaaggggagcctactagagacttcctcccaggatcg

SEQ ID NO: 31814 - DNA, 50 bp, unidentified
  source 1..50: mol_type = unassigned DNA; note = donor_2227aa0
  misc_feature 1..24: note = RE
  misc_feature 25: note = Core
  misc_feature 26..50: note = LE
ttgcaaaccgggggcgtccatgtacaatgggatggacgcccccacccgca

SEQ ID NO: 31815 - DNA, 50 bp, unidentified
  source 1..50: mol_type = unassigned DNA; note = donor_22320d8
  misc_feature 1..23: note = RE
  misc_feature 24..25: note = Core
  misc_feature 26..50: note = LE
atgcttgactttttattagtagactcctaatatataggtgtagtggttag

SEQ ID NO: 31816 - DNA, 50 bp, unidentified
  source 1..50: mol_type = unassigned DNA; note = donor_22389b4
  misc_feature 1..24: note = RE
  misc_feature 25: note = Core
  misc_feature 26..50: note = LE
ttgcaaacgggaggagtccatatacaatgggatggactcctcccccttac

SEQ ID NO: 31817 - DNA, 50 bp, unidentified
  source 1..50: mol_type = unassigned DNA; note = donor_223d1ca
  misc_feature 1..24: note = RE
  misc_feature 25: note = Core
  misc_feature 26..50: note = LE
tgacaaaccgggggcgtccatctataatgggatggacgccccctttccga

SEQ ID NO: 31818 - DNA, 50 bp, unidentified
  source 1..50: mol_type = unassigned DNA; note = donor_2243b6b
  misc_feature 1..23: note = RE
  misc_feature 24..25: note = Core
  misc_feature 26..50: note = LE
tgcactggggcggcaaccacagaagatggagtggttgccgctctacccat

SEQ ID NO: 31819 - DNA, 50 bp, unidentified
  source 1..50: mol_type = unassigned DNA; note = donor_2249b85
  misc_feature 1..23: note = RE
  misc_feature 24..25: note = Core
  misc_feature 26..50: note = LE
gggcttgacttttaatagttagtcttgtattatgaagtagtagtttttat

SEQ ID NO: 31820 - DNA, 50 bp, unidentified
  source 1..50: mol_type = unassigned DNA; note = donor_224aa21
  misc_feature 1..23: note = RE
  misc_feature 24..25: note = Core
  misc_feature 26..50: note = LE
gcaaaattaatttgtttcaaacttataatccgcctttctgcgaaaggcac

SEQ ID NO: 31821 - DNA, 50 bp, unidentified
  source 1..50: mol_type = unassigned DNA; note = donor_225511e
  misc_feature 1..24: note = RE
  misc_feature 25: note = Core
  misc_feature 26..50: note = LE
tgcaaacgggggtgggtccatatataatggaatggacccatccctacttt

SEQ ID NO: 31822 - DNA, 50 bp, unidentified
  source 1..50: mol_type = unassigned DNA; note = donor_225f309
  misc_feature 1..23: note = RE
  misc_feature 24..25: note = Core
  misc_feature 26..50: note = LE
ggtcttgacttttaatagttagtctcgtattatatagtagtagtgtttaa

SEQ ID NO: 31823 - DNA, 50 bp, unidentified
  source 1..50: mol_type = unassigned DNA; note = donor_22611ef
  misc_feature 1..23: note = RE
  misc_feature 24..25: note = Core
  misc_feature 26..50: note = LE
acttgacaggtttaatacatatcagacataatgtattaaacctgtccaac

SEQ ID NO: 31824 - DNA, 50 bp, unidentified
  source 1..50: mol_type = unassigned DNA; note = donor_2262fc2
  misc_feature 1..22: note = RE
  misc_feature 23..25: note = Core
  misc_feature 26..50: note = LE
tcaatcaggcgccgtccacacatgatgctgtgggcggcgcccactctgcg

SEQ ID NO: 31825 - DNA, 50 bp, unidentified
  source 1..50: mol_type = unassigned DNA; note = donor_22676fe
  misc_feature 1..23: note = RE
  misc_feature 24..25: note = Core
  misc_feature 26..50: note = LE
gcaagcggggggccgtccacatctgttggtgtggacggcctctcatccca

SEQ ID NO: 31826 - DNA, 50 bp, unidentified
  source 1..50: mol_type = unassigned DNA; note = donor_2271351
  misc_feature 1..23: note = RE
  misc_feature 24..25: note = Core
  misc_feature 26..50: note = LE
ctcactagaaatcaagacggtatcttgtatctcgactaaatacctccaca

SEQ ID NO: 31827 - DNA, 50 bp, unidentified
  source 1..50: mol_type = unassigned DNA; note = donor_227ec4d
  misc_feature 1..23: note = RE
  misc_feature 24..25: note = Core
  misc_feature 26..50: note = LE
gtgcgaccgggggcatccatacatgatggagtggatgccccctcccgacg

SEQ ID NO: 31828 - DNA, 50 bp, unidentified
  source 1..50: mol_type = unassigned DNA; note = donor_2287628
  misc_feature 1..20: note = RE
  misc_feature 21..25: note = Core
  misc_feature 26..50: note = LE
cttgctttttaaaacagtaccttttatttttactgagaatttaaaaaagg

SEQ ID NO: 31829 - DNA, 50 bp, unidentified
  source 1..50: mol_type = unassigned DNA; note = donor_229aa51
  misc_feature 1..24: note = RE
  misc_feature 25: note = Core
  misc_feature 26..50: note = LE
ttgacagatgggcaagcccttgtagaatgaaagggacttccccgtcccga

SEQ ID NO: 31830 - DNA, 50 bp, unidentified
  source 1..50: mol_type = unassigned DNA; note = donor_22a6bb4
  misc_feature 1..24: note = RE
  misc_feature 25: note = Core
  misc_feature 26..50: note = LE
tggcaaacaggaggcgaccatctataatggaatggtcgccccctacatct

SEQ ID NO: 31831 - DNA, 50 bp, unidentified
  source 1..50: mol_type = unassigned DNA; note = donor_22a7618
  misc_feature 1..23: note = RE
  misc_feature 24..25: note = Core
  misc_feature 26..50: note = LE
aggcttgatctcgaacataggatcttgtatgttcctcccggctcctacga

SEQ ID NO: 31832 - DNA, 50 bp, unidentified; identical to SEQ ID NO: 31427
  source 1..50: mol_type = unassigned DNA; note = donor_22aa809
  misc_feature 1..22: note = RE
  misc_feature 23..25: note = Core
  misc_feature 26..50: note = LE

SEQ ID NO: 31833 - DNA, 50 bp, unidentified
  source 1..50: mol_type = unassigned DNA; note = donor_22bbece
  misc_feature 1..24: note = RE
  misc_feature 25: note = Core
  misc_feature 26..50: note = LE
accacttgacctccctcggaacatcagtgaggatggtgggggtgggtcgc

SEQ ID NO: 31834 - DNA, 50 bp, unidentified
  source 1..50: mol_type = unassigned DNA; note = donor_22bcdf7
  misc_feature 1..23: note = RE
  misc_feature 24..25: note = Core
  misc_feature 26..50: note = LE
gcatctgatcggagagatggtatcttgtatctctccagggcaatgaggtt

SEQ ID NO: 31835 - DNA, 50 bp, unidentified
  source 1..50: mol_type = unassigned DNA; note = donor_22c4c10
  misc_feature 1..24: note = RE
  misc_feature 25: note = Core
  misc_feature 26..50: note = LE
ccgcctcttgacacagaggggtgcctacctattggctggtggtacgaccg

SEQ ID NO: 31836 - DNA, 50 bp, unidentified
  source 1..50: mol_type = unassigned DNA; note = donor_22c9564
  misc_feature 1..23: note = RE
  misc_feature 24..25: note = Core
  misc_feature 26..50: note = LE
gcaacaacgaggcggaccatacattaattagatggtccgcctcacctcca

SEQ ID NO: 31837 - DNA, 50 bp, unidentified
  source 1..50: mol_type = unassigned DNA; note = donor_22c9e41
  misc_feature 1..22: note = RE
  misc_feature 23..25: note = Core
  misc_feature 26..50: note = LE
cggaaagggggccgtccacacatgatggggtggacggccccgctcgcggc

SEQ ID NO: 31838 - DNA, 50 bp, unidentified
  source 1..50: mol_type = unassigned DNA; note = donor_22cd656
  misc_feature 1..23: note = RE
  misc_feature 24..25: note = Core
  misc_feature 26..50: note = LE
ggcttgacaacgtcattgagagtccctcaagttcgtagttgcagttactt

SEQ ID NO: 31839 - DNA, 50 bp, unidentified; identical to SEQ ID NO: 31000
  source 1..50: mol_type = unassigned DNA; note = donor_22d5403
  misc_feature 1..24: note = RE
  misc_feature 25: note = Core
  misc_feature 26..50: note = LE

SEQ ID NO: 31840 - DNA, 50 bp, unidentified
  source 1..50: mol_type = unassigned DNA; note = donor_22d543c
  misc_feature 1..24: note = RE
  misc_feature 25: note = Core
  misc_feature 26..50: note = LE
gacccccttgacacaaagaggcttctgattgatactggtggcatgcgttg

SEQ ID NO: 31841 - DNA, 50 bp, unidentified
  source 1..50: mol_type = unassigned DNA; note = donor_22d9e83
  misc_feature 1..23: note = RE
  misc_feature 24..25: note = Core
  misc_feature 26..50: note = LE
ttgccgacggggcgggccatacgttatggatggcccgcccctcctcgcga

SEQ ID NO: 31842 - DNA, 50 bp, unidentified
  source 1..50: mol_type = unassigned DNA; note = donor_22dbe2e
  misc_feature 1..23: note = RE
  misc_feature 24..25: note = Core
  misc_feature 26..50: note = LE
gcattcaggcgacggaccatacataatgggatggtccgtcgtcttcaact

SEQ ID NO: 31843 - DNA, 50 bp, unidentified
  source 1..50: mol_type = unassigned DNA; note = donor_22dd421
  misc_feature 1..22: note = RE
  misc_feature 23..25: note = Core
  misc_feature 26..50: note = LE
agttgacaaaactataggaacacccattacagtttgagacgcggttaatc

SEQ ID NO: 31844 - DNA, 50 bp, unidentified
  source 1..50: mol_type = unassigned DNA; note = donor_22e612c
  misc_feature 1..22: note = RE
  misc_feature 23..25: note = Core
  misc_feature 26..50: note = LE
ccaaacgggcgccatccagacatgatgtcgtggatggcgccctccaccag

SEQ ID NO: 31845 - DNA, 50 bp, unidentified
  source 1..50: mol_type = unassigned DNA; note = donor_22e868f
  misc_feature 1..23: note = RE
  misc_feature 24..25: note = Core
  misc_feature 26..50: note = LE
gcttcctaaggggcgtccacacacgatggggtggacgccccctgacggca

SEQ ID NO: 31846 - DNA, 50 bp, unidentified
  source 1..50: mol_type = unassigned DNA; note = donor_2300364
  misc_feature 1..23: note = RE
  misc_feature 24..25: note = Core
  misc_feature 26..50: note = LE
gcggggagcgggccgtccacatatgatggtgtggacggcccccgacggca

SEQ ID NO: 31847 - DNA, 50 bp, unidentified
  source 1..50: mol_type = unassigned DNA; note = donor_2301037
  misc_feature 1..24: note = RE
  misc_feature 25: note = Core
  misc_feature 26..50: note = LE
tccccacttgactcaaagaggattctggttgagatttcctggcagatgct

SEQ ID NO: 31848 - DNA, 50 bp, unidentified
  source 1..50: mol_type = unassigned DNA; note = donor_2305488
  misc_feature 1..23: note = RE
  misc_feature 24..25: note = Core
  misc_feature 26..50: note = LE
ttacttgtaaaaacttagaaagtcatgtatactttaagatgtaaatcaat

SEQ ID NO: 31849 - DNA, 50 bp, unidentified
  source 1..50: mol_type = unassigned DNA; note = donor_230a2f0
  misc_feature 1..24: note = RE
  misc_feature 25: note = Core
  misc_feature 26..50: note = LE
tgcaaaacgggaggtgtccatatacaatgggatggacccctcccacctat

SEQ ID NO: 31850 - DNA, 50 bp, unidentified
  source 1..50: mol_type = unassigned DNA; note = donor_230ea1b
  misc_feature 1..24: note = RE
  misc_feature 25: note = Core
  misc_feature 26..50: note = LE
ttgcaatcgggcggggtccatatacaatggtatggaccccgcccgtccag

SEQ ID NO: 31851 - DNA, 50 bp, unidentified
  source 1..50: mol_type = unassigned DNA; note = donor_230efe5
  misc_feature 1..23: note = RE
  misc_feature 24..25: note = Core
  misc_feature 26..50: note = LE
gcattacgggcggcaaccacagaagatggcgtggttgccgctctacccac

SEQ ID NO: 31852 - DNA, 50 bp, unidentified
  source 1..50: mol_type = unassigned DNA; note = donor_2325626
  misc_feature 1..20: note = RE
  misc_feature 21..25: note = Core
  misc_feature 26..50: note = LE
aggttaaattattttcacagaaaaacattcatgagtttttaacacccaac

SEQ ID NO: 31853 - DNA, 50 bp, unidentified
  source 1..50: mol_type = unassigned DNA; note = donor_2326bdf
  misc_feature 1..24: note = RE
  misc_feature 25: note = Core
  misc_feature 26..50: note = LE
ttgacagcagccgcaaagaggactctaattgttcctgagggcgctgcggt

SEQ ID NO: 31854 - DNA, 50 bp, unidentified
  source 1..50: mol_type = unassigned DNA; note = donor_23298da
  misc_feature 1..24: note = RE
  misc_feature 25: note = Core
  misc_feature 26..50: note = LE
ttgcaatggggaggagtccatatacaatgggatggagtcctcctcaccct

SEQ ID NO: 31855 - DNA, 50 bp, unidentified
  source 1..50: mol_type = unassigned DNA; note = donor_232a33e
  misc_feature 1..24: note = RE
  misc_feature 25: note = Core
  misc_feature 26..50: note = LE
tgcaatatcgaggcggaccatacataataagatggtccgcctcccctaat

SEQ ID NO: 31856 - DNA, 50 bp, unidentified
  source 1..50: mol_type = unassigned DNA; note = donor_232ede8
  misc_feature 1..23: note = RE
  misc_feature 24..25: note = Core
  misc_feature 26..50: note = LE
gtgcttgactttttattagcaggctcctaatatataagtgtagggtttca

SEQ ID NO: 31857 - DNA, 50 bp, unidentified
  source 1..50: mol_type = unassigned DNA; note = donor_2333df3
  misc_feature 1..24: note = RE
  misc_feature 25: note = Core
  misc_feature 26..50: note = LE
tgccttacagggggagtccatatacaatggtatggactccccacctttgt

SEQ ID NO: 31858 - DNA, 50 bp, unidentified
  source 1..50: mol_type = unassigned DNA; note = donor_2338a53
  misc_feature 1..24: note = RE
  misc_feature 25: note = Core
  misc_feature 26..50: note = LE
tgcaacaaggcggcggaccatacataatggaatggtctgccgccttcggg

SEQ ID NO: 31859 - DNA, 50 bp, unidentified
  source 1..50: mol_type = unassigned DNA; note = donor_233ac0a
  misc_feature 1..23: note = RE
  misc_feature 24..25: note = Core
  misc_feature 26..50: note = LE
tctattgactttttatttgcaggctcctacaataaaaacatggatatata

SEQ ID NO: 31860 - DNA, 50 bp, unidentified
  source 1..50: mol_type = unassigned DNA; note = donor_233bd7f
  misc_feature 1..23: note = RE
  misc_feature 24..25: note = Core
  misc_feature 26..50: note = LE
aaacacttgacaaatcatagttggtataatatatttaggttgataaaggt

SEQ ID NO: 31861 - DNA, 50 bp, unidentified
  source 1..50: mol_type = unassigned DNA; note = donor_233db5c
  misc_feature 1..21: note = RE
  misc_feature 22..25: note = Core
  misc_feature 26..50: note = LE
ggcttgacacggtcattgagagtccctaagtttgtggtgtctggggtttg

SEQ ID NO: 31862 - DNA, 50 bp, unidentified
  source 1..50: mol_type = unassigned DNA; note = donor_2344dba
  misc_feature 1..20: note = RE
  misc_feature 21..25: note = Core
  misc_feature 26..50: note = LE
cttgacttcatatagctggtctcctacattaaatacgttgcatttctcag

SEQ ID NO: 31863 - DNA, 50 bp, unidentified
  source 1..50: mol_type = unassigned DNA; note = donor_2349268
  misc_feature 1..24: note = RE
  misc_feature 25: note = Core
  misc_feature 26..50: note = LE
ttgcaaaagggaggcgtccatatagaatgaaatggacgcctcccatctct

SEQ ID NO: 31864 - DNA, 50 bp, unidentified
  source 1..50: mol_type = unassigned DNA; note = donor_23580da
  misc_feature 1..24: note = RE
  misc_feature 25: note = Core
  misc_feature 26..50: note = LE
ttgcaatcgggcggggtccatatacaatggtatggaccccgccctcgcgg

SEQ ID NO: 31865 - DNA, 50 bp, unidentified
  source 1..50: mol_type = unassigned DNA; note = donor_23630c4
  misc_feature 1..21: note = RE
  misc_feature 22..25: note = Core
  misc_feature 26..50: note = LE
ttgaccagaaccatagggacaccccgttactttgttcgtgcctgccgtta

SEQ ID NO: 31866 - DNA, 50 bp, unidentified
  source 1..50: mol_type = unassigned DNA; note = donor_2371467
  misc_feature 1..23: note = RE
  misc_feature 24..25: note = Core
  misc_feature 26..50: note = LE
tgacaactttcgacttgggatgtctaatgagagttaccgggtcagccgct

SEQ ID NO: 31867 - DNA, 50 bp, unidentified
  source 1..50: mol_type = unassigned DNA; note = donor_2371d6d
  misc_feature 1..22: note = RE
  misc_feature 23..25: note = Core
  misc_feature 26..50: note = LE
atgcttgacaaacattagctggtttcgtattattaggtcagccagaatat

SEQ ID NO: 31868 - DNA, 50 bp, unidentified
  source 1..50: mol_type = unassigned DNA; note = donor_2382586
  misc_feature 1..23: note = RE
  misc_feature 24..25: note = Core
  misc_feature 26..50: note = LE
gccctgatgggggcgtccacagatgatggggtggacgccccccgacggca

SEQ ID NO: 31869 - DNA, 50 bp, unidentified
  source 1..50: mol_type = unassigned DNA; note = donor_238a0c1
  misc_feature 1..24: note = RE
  misc_feature 25: note = Core
  misc_feature 26..50: note = LE
ttagttgttttttaccacagttcttcttaagtttacaatctcttatattt

SEQ ID NO: 31870 - DNA, 50 bp, unidentified
  source 1..50: mol_type = unassigned DNA; note = donor_238e6b3
  misc_feature 1..21: note = RE
  misc_feature 22..25: note = Core
  misc_feature 26..50: note = LE
ttaactgagcatccacggttgcttgtgtggacgtaatatggtttactgga

SEQ ID NO: 31871 - DNA, 50 bp, unidentified
  source 1..50: mol_type = unassigned DNA; note = donor_23a029f
  misc_feature 1..24: note = RE
  misc_feature 25: note = Core
  misc_feature 26..50: note = LE
caggggttgacaacaaagaggcttctgattgagactggtggtgcgttgcg

SEQ ID NO: 31872 - DNA, 50 bp, unidentified
  source 1..50: mol_type = unassigned DNA; note = donor_23a6b14
  misc_feature 1..23: note = RE
  misc_feature 24..25: note = Core
  misc_feature 26..50: note = LE
tcccttgacttttatttgcaggtctgatacaatataattgaccgagaaag

SEQ ID NO: 31873 - DNA, 50 bp, unidentified
  source 1..50: mol_type = unassigned DNA; note = donor_23a8e03
  misc_feature 1..22: note = RE
  misc_feature 23..25: note = Core
  misc_feature 26..50: note = LE
caaaaaaacggtcaagacagttgcttgtgtctggcgtcagggttagactg

SEQ ID NO: 31874 - DNA, 50 bp, unidentified
  source 1..50: mol_type = unassigned DNA; note = donor_23ac6c3
  misc_feature 1..23: note = RE
  misc_feature 24..25: note = Core
  misc_feature 26..50: note = LE
accggtctattccagcacagttgcttgtgtccagaaaatttggcagaatg

SEQ ID NO: 31875 - DNA, 50 bp, unidentified
  source 1..50: mol_type = unassigned DNA; note = donor_23ad36f
  misc_feature 1..24: note = RE
  misc_feature 25: note = Core
  misc_feature 26..50: note = LE
ctcgcttgacgaaagacatagaggcgttatgttttctgcggtcctgcaag

SEQ ID NO: 31876 - DNA, 50 bp, unidentified
  source 1..50: mol_type = unassigned DNA; note = donor_23aefb4
  misc_feature 1..24: note = RE
  misc_feature 25: note = Core
  misc_feature 26..50: note = LE
gccccttgacaaccaaagaggcttctgattgagtcgagggtgcgttgcgg

SEQ ID NO: 31877 - DNA, 50 bp, unidentified
  source 1..50: mol_type = unassigned DNA; note = donor_23b8915
  misc_feature 1..20: note = RE
  misc_feature 21..25: note = Core
  misc_feature 26..50: note = LE
cttgacacactttagcaggtttgctacaattgtgttggttctgagaagtt

SEQ ID NO: 31878 - DNA, 50 bp, unidentified
  source 1..50: mol_type = unassigned DNA; note = donor_23ba56a
  misc_feature 1..23: note = RE
  misc_feature 24..25: note = Core
  misc_feature 26..50: note = LE
gcgagctgggggccgtccacatatgatggggtggacggcccccgaacggc

SEQ ID NO: 31879 - DNA, 50 bp, unidentified
  source 1..50: mol_type = unassigned DNA; note = donor_23babaf
  misc_feature 1..23: note = RE
  misc_feature 24..25: note = Core
  misc_feature 26..50: note = LE
gacaacttaacgccgtgggatgtctaataggggctaaccgggttcgatgc

SEQ ID NO: 31880 - DNA, 50 bp, unidentified
  source 1..50: mol_type = unassigned DNA; note = donor_23cd9f7
  misc_feature 1..23: note = RE
  misc_feature 24..25: note = Core
  misc_feature 26..50: note = LE
agacttgacttttaatagttagtctcgtattatagagtcataccccttct

SEQ ID NO: 31881 - DNA, 50 bp, unidentified
  source 1..50: mol_type = unassigned DNA; note = donor_23ce3fb
  misc_feature 1..22: note = RE
  misc_feature 23..25: note = Core
  misc_feature 26..50: note = LE
tacttgacatattcatagctggtcttgtatgatacaaatgtaccttgtcg

SEQ ID NO: 31882 - DNA, 50 bp, unidentified; identical to SEQ ID NO: 30847
  source 1..50: mol_type = unassigned DNA; note = donor_23cfad1
  misc_feature 1..24: note = RE
  misc_feature 25: note = Core
  misc_feature 26..50: note = LE

SEQ ID NO: 31883 - DNA, 50 bp, unidentified
  source 1..50: mol_type = unassigned DNA; note = donor_23d6b5f
  misc_feature 1..24: note = RE
  misc_feature 25: note = Core
  misc_feature 26..50: note = LE
tggcaaaccgggggcgtccatgtacaatggaatggacgcccccacctttc

SEQ ID NO: 31884 - DNA, 50 bp, unidentified
  source 1..50: mol_type = unassigned DNA; note = donor_23dfcb2
  misc_feature 1..22: note = RE
  misc_feature 23..25: note = Core
  misc_feature 26..50: note = LE
caccaagggcggcaaccagagaagatgggatggttgccgccctccccaga

SEQ ID NO: 31885 - DNA, 50 bp, unidentified
  source 1..50: mol_type = unassigned DNA; note = donor_23e3f87
  misc_feature 1..21: note = RE
  misc_feature 22..25: note = Core
  misc_feature 26..50: note = LE
tcgacggttgacacagggcaactcactggtgcaccatcctcaggtcggtg

SEQ ID NO: 31886 - DNA, 50 bp, unidentified
  source 1..50: mol_type = unassigned DNA; note = donor_23e6ff1
  misc_feature 1..23: note = RE
  misc_feature 24..25: note = Core
  misc_feature 26..50: note = LE
cccttgacttactacatagttgtctggtatatctttattgacccatccaa

SEQ ID NO: 31887 - DNA, 50 bp, unidentified
  source 1..50: mol_type = unassigned DNA; note = donor_23efca8
  misc_feature 1..23: note = RE
  misc_feature 24..25: note = Core
  misc_feature 26..50: note = LE
gccaaacgggcggcaaccacagaagatggggtggttgccgccctccccca

SEQ ID NO: 31888 - DNA, 50 bp, unidentified
  source 1..50: mol_type = unassigned DNA; note = donor_23f4a91
  misc_feature 1..23: note = RE
  misc_feature 24..25: note = Core
  misc_feature 26..50: note = LE
gcaccacgggcggcaaccacagaagatggagtggttgccgccctccccag

SEQ ID NO: 31889 - DNA, 50 bp, unidentified
  source 1..50: mol_type = unassigned DNA; note = donor_23f87d7
  misc_feature 1..22: note = RE
  misc_feature 23..25: note = Core
  misc_feature 26..50: note = LE
aaaaaagtcctcgaagacagttgcttgtgtcttcaggacctcttaaaatc

SEQ ID NO: 31890 - DNA, 50 bp, unidentified
  source 1..50: mol_type = unassigned DNA; note = donor_24004a8
  misc_feature 1..23: note = RE
  misc_feature 24..25: note = Core
  misc_feature 26..50: note = LE
cttgacaaaccaccgcccatatcagacggtatggggcggtgttgatgccg

SEQ ID NO: 31891 - DNA, 50 bp, unidentified
  source 1..50: mol_type = unassigned DNA; note = donor_241594e
  misc_feature 1..23: note = RE
  misc_feature 24..25: note = Core
  misc_feature 26..50: note = LE
tgacatgtcagctcctgggatgtctaatgatgtcgtgggagccagccgtc

SEQ ID NO: 31892 - DNA, 50 bp, unidentified
  source 1..50: mol_type = unassigned DNA; note = donor_24250bb
  misc_feature 1..23: note = RE
  misc_feature 24..25: note = Core
  misc_feature 26..50: note = LE
gggcttgacttttaatagttagtctcgtattataaagtagtagtgtttat

SEQ ID NO: 31893 - DNA, 50 bp, unidentified
  source 1..50: mol_type = unassigned DNA; note = donor_2425265
  misc_feature 1..23: note = RE
  misc_feature 24..25: note = Core
  misc_feature 26..50: note = LE
cgcttgacaagacaatatgggatctgatataacaccctgcggaggtcata

SEQ ID NO: 31894 - DNA, 50 bp, unidentified
  source 1..50: mol_type = unassigned DNA; note = donor_2437058
  misc_feature 1..23: note = RE
  misc_feature 24..25: note = Core
  misc_feature 26..50: note = LE
cttgttgacttttaatagttagtctcgtattatatagtcatatccattct

SEQ ID NO: 31895 - DNA, 50 bp, unidentified
  source 1..50: mol_type = unassigned DNA; note = donor_243c761
  misc_feature 1..23: note = RE
  misc_feature 24..25: note = Core
  misc_feature 26..50: note = LE
tctattgacacattatagttggtcttgtataatataatcagttcttattt

SEQ ID NO: 31896 - DNA, 50 bp, unidentified
  source 1..50: mol_type = unassigned DNA; note = donor_244236b
  misc_feature 1..23: note = RE
  misc_feature 24..25: note = Core
  misc_feature 26..50: note = LE
tgacacttaagctcctgggatgtctaatgagtctcagggagccggccgtc

SEQ ID NO: 31897 - DNA, 50 bp, unidentified
  source 1..50: mol_type = unassigned DNA; note = donor_2444310
  misc_feature 1..24: note = RE
  misc_feature 25: note = Core
  misc_feature 26..50: note = LE
tgcaaaagaggaggagtccatacacaatgggatggactcctcctcaccct

SEQ ID NO: 31898 - DNA, 50 bp, unidentified
  source 1..50: mol_type = unassigned DNA; note = donor_24520ad
  misc_feature 1..22: note = RE
  misc_feature 23..25: note = Core
  misc_feature 26..50: note = LE
gacgggagaaacgcgactagacaacatggggtaatcgcggcgcaattcgc

SEQ ID NO: 31899 - DNA, 50 bp, unidentified
  source 1..50: mol_type = unassigned DNA; note = donor_246ad7d
  misc_feature 1..23: note = RE
  misc_feature 24..25: note = Core
  misc_feature 26..50: note = LE
accccgaggttgacaaagggtgtctgatgggactaccttccccggtcata

SEQ ID NO: 31900 - DNA, 50 bp, unidentified
  source 1..50: mol_type = unassigned DNA; note = donor_246b3fc
  misc_feature 1..23: note = RE
  misc_feature 24..25: note = Core
  misc_feature 26..50: note = LE
gttgacaacggggagtccacataagataattggactcccctcctcataag

SEQ ID NO: 31901 - DNA, 50 bp, unidentified
  source 1..50: mol_type = unassigned DNA; note = donor_248160f
  misc_feature 1..24: note = RE
  misc_feature 25: note = Core
  misc_feature 26..50: note = LE
gggcttgacattctatagatagtcacgtataataaaaaccatcctgaaag

SEQ ID NO: 31902 - DNA, 50 bp, unidentified
  source 1..50: mol_type = unassigned DNA; note = donor_248280d
  misc_feature 1..23: note = RE
  misc_feature 24..25: note = Core
  misc_feature 26..50: note = LE
tgacgaagctcgccatgggatgtctaatgagagctaccggctccgccgtt

SEQ ID NO: 31903 - DNA, 50 bp, unidentified
  source 1..50: mol_type = unassigned DNA; note = donor_24873a9
  misc_feature 1..22: note = RE
  misc_feature 23..25: note = Core
  misc_feature 26..50: note = LE
ctcttgacttcgaagacagttgcttgtatcttggttttggtcgtagaatc

SEQ ID NO: 31904 - DNA, 50 bp, unidentified
  source 1..50: mol_type = unassigned DNA; note = donor_2493997
  misc_feature 1..21: note = RE
  misc_feature 22..25: note = Core
  misc_feature 26..50: note = LE
ttccttgattatgccatagaaatccattaggtttgttttatatttaaaga

SEQ ID NO: 31905 - DNA, 50 bp, unidentified
  source 1..50: mol_type = unassigned DNA; note = donor_2496618
  misc_feature 1..21: note = RE
  misc_feature 22..25: note = Core
  misc_feature 26..50: note = LE
caatgcaggagccgtccacacatgatggggtggacggctcctgtcccggc

SEQ ID NO: 31906 - DNA, 50 bp, unidentified
  source 1..50: mol_type = unassigned DNA; note = donor_249839d
  misc_feature 1..21: note = RE
  misc_feature 22..25: note = Core
  misc_feature 26..50: note = LE
agcttgactcgctcattgagactccgtaagttgttcggcggtccgggagg

SEQ ID NO: 31907 - DNA, 50 bp, unidentified
  source 1..50: mol_type = unassigned DNA; note = donor_249a6da
  misc_feature 1..23: note = RE
  misc_feature 24..25: note = Core
  misc_feature 26..50: note = LE
gcatccgaaggggcgtccacacacgatggggtggacgccccccgacggca

SEQ ID NO: 31908 - DNA, 50 bp, unidentified
  source 1..50: mol_type = unassigned DNA; note = donor_249b225
  misc_feature 1..22: note = RE
  misc_feature 23..25: note = Core
  misc_feature 26..50: note = LE
ctcattgacttttattagcaggtttgctactatttatttggaagcagact

SEQ ID NO: 31909 - DNA, 50 bp, unidentified
  source 1..50: mol_type = unassigned DNA; note = donor_24a0886
  misc_feature 1..23: note = RE
  misc_feature 24..25: note = Core
  misc_feature 26..50: note = LE
ttacttgacttcatatagttagtcttgtataatgaactaagtcaactata

SEQ ID NO: 31910 - DNA, 50 bp, unidentified
  source 1..50: mol_type = unassigned DNA; note = donor_24ad066
  misc_feature 1..23: note = RE
  misc_feature 24..25: note = Core
  misc_feature 26..50: note = LE
gcactccaggggccgtccacacatgttggggtggacggccccgcggcatc

SEQ ID NO: 31911 - DNA, 50 bp, unidentified
  source 1..50: mol_type = unassigned DNA; note = donor_24af800
  misc_feature 1..24: note = RE
  misc_feature 25: note = Core
  misc_feature 26..50: note = LE
ctattgacatttcttagctggacttagtataataatggtgtagtcaagaa

SEQ ID NO: 31912 - DNA, 50 bp, unidentified
  source 1..50: mol_type = unassigned DNA; note = donor_24b7c11
  misc_feature 1..22: note = RE
  misc_feature 23..25: note = Core
  misc_feature 26..50: note = LE
ggcttgacaggatcattgagagtccttaagttcgtaggtgcagttacttc

SEQ ID NO: 31913 - DNA, 50 bp, unidentified
  source 1..50: mol_type = unassigned DNA; note = donor_24bb925
  misc_feature 1..22: note = RE
  misc_feature 23..25: note = Core
  misc_feature 26..50: note = LE
gacgaatgggctgcgattagacaacatggggtaatcgcggcgcgatcgtc

SEQ ID NO: 31914 - DNA, 50 bp, unidentified
  source 1..50: mol_type = unassigned DNA; note = donor_24c7d51
  misc_feature 1..23: note = RE
  misc_feature 24..25: note = Core
  misc_feature 26..50: note = LE
ctatgcaggagctatccacacaagatggggtggatagctcctgctccacc

SEQ ID NO: 31915 - DNA, 50 bp, unidentified
  source 1..50: mol_type = unassigned DNA; note = donor_24ca97d
  misc_feature 1..23: note = RE
  misc_feature 24..25: note = Core
  misc_feature 26..50: note = LE
gcagcacgggggccgtccacatatgatggtgtggacggccccctacggca

SEQ ID NO: 31916 - DNA, 50 bp, unidentified
  source 1..50: mol_type = unassigned DNA; note = donor_24cd1db
  misc_feature 1..22: note = RE
  misc_feature 23..25: note = Core
  misc_feature 26..50: note = LE
ttgctatgcttttctacatagcagtaattatgtaagaaaagcatagcgca

SEQ ID NO: 31917 - DNA, 50 bp, unidentified
  source 1..50: mol_type = unassigned DNA; note = donor_24d9a31
  misc_feature 1..23: note = RE
  misc_feature 24..25: note = Core
  misc_feature 26..50: note = LE
tgacagttccgcccccggggtgtctaatggggggcgaacggtctgatatg

SEQ ID NO: 31918 - DNA, 50 bp, unidentified
  source 1..50: mol_type = unassigned DNA; note = donor_24df675
  misc_feature 1..22: note = RE
  misc_feature 23..25: note = Core
  misc_feature 26..50: note = LE
caccgcgggcgccgtccatacatgatgaggtggacggcgcccgctcccgg

SEQ ID NO: 31919 - DNA, 50 bp, unidentified
  source 1..50: mol_type = unassigned DNA; note = donor_24e4c04
  misc_feature 1..23: note = RE
  misc_feature 24..25: note = Core
  misc_feature 26..50: note = LE
cttgccaaggggccatccatacatgatggtgtggatggccccatcaaacg

SEQ ID NO: 31920 - DNA, 50 bp, unidentified; identical to SEQ ID NO: 31193
  source 1..50: mol_type = unassigned DNA; note = donor_24f6b81
  misc_feature 1..22: note = RE
  misc_feature 23..25: note = Core
  misc_feature 26..50: note = LE

SEQ ID NO: 31921 - DNA, 50 bp, unidentified
  source 1..50: mol_type = unassigned DNA; note = donor_250426d
  misc_feature 1..23: note = RE
  misc_feature 24..25: note = Core
  misc_feature 26..50: note = LE
ttacttgacttcatatagttagtcttgtataatgaacatatagtaaaaat

SEQ ID NO: 31922 - DNA, 50 bp, unidentified
  source 1..50: mol_type = unassigned DNA; note = donor_250fc27
  misc_feature 1..23: note = RE
  misc_feature 24..25: note = Core
  misc_feature 26..50: note = LE
gaatccgatggggcgtccacacacgttggggtggacgccccctgacggca

SEQ ID NO: 31923 - DNA, 50 bp, unidentified
  source 1..50: mol_type = unassigned DNA; note = donor_2515e0e
  misc_feature 1..24: note = RE
  misc_feature 25: note = Core
  misc_feature 26..50: note = LE
aggggtcttgactcaaagaggattctgattgagactttgggcagacggta

SEQ ID NO: 31924 - DNA, 50 bp, unidentified
  source 1..50: mol_type = unassigned DNA; note = donor_2519b7a
  misc_feature 1..22: note = RE
  misc_feature 23..25: note = Core
  misc_feature 26..50: note = LE
tttgactcttgacatagagggtcttatatgttactattttcccagaccct

SEQ ID NO: 31925 - DNA, 50 bp, unidentified
  source 1..50: mol_type = unassigned DNA; note = donor_253007f
  misc_feature 1..21: note = RE
  misc_feature 22..25: note = Core
  misc_feature 26..50: note = LE
ttgacgaaccccatagggacaccccgttaccttcttcgtgccctcgatga

SEQ ID NO: 31926 - DNA, 50 bp, unidentified
  source 1..50: mol_type = unassigned DNA; note = donor_2537ca6
  misc_feature 1..23: note = RE
  misc_feature 24..25: note = Core
  misc_feature 26..50: note = LE
gacctcaaccggccgattagagaagatggggtaatcggccggaccagctt

SEQ ID NO: 31927 - DNA, 50 bp, unidentified
  source 1..50: mol_type = unassigned DNA; note = donor_25399f5
  misc_feature 1..23: note = RE
  misc_feature 24..25: note = Core
  misc_feature 26..50: note = LE
tgccagttcactcaagacagttgcttgtgtctggaatttccattataggc

SEQ ID NO: 31928 - DNA, 50 bp, unidentified
  source 1..50: mol_type = unassigned DNA; note = donor_25440c0
  misc_feature 1..23: note = RE
  misc_feature 24..25: note = Core
  misc_feature 26..50: note = LE
tgcctaaagggccgttccacatatgatgaggtggaacggcccgctaccgc

SEQ ID NO: 31929 - DNA, 50 bp, unidentified
  source 1..50: mol_type = unassigned DNA; note = donor_25454f5
  misc_feature 1..23: note = RE
  misc_feature 24..25: note = Core
  misc_feature 26..50: note = LE
gacgacttgcgaccgtgggatgtctaatggggctgcatccggtgatctcc

SEQ ID NO: 31930 - DNA, 50 bp, unidentified
  source 1..50: mol_type = unassigned DNA; note = donor_2554cda
  misc_feature 1..23: note = RE
  misc_feature 24..25: note = Core
  misc_feature 26..50: note = LE
ttacttgacatttaatagctggtctcgtataataatgttgtagttaataa

SEQ ID NO: 31931 - DNA, 50 bp, unidentified
  source 1..50: mol_type = unassigned DNA; note = donor_255c9e6
  misc_feature 1..22: note = RE
  misc_feature 23..25: note = Core
  misc_feature 26..50: note = LE
atccttgacaagtattagctggtttcgtattattaggtcagccagaaact

SEQ ID NO: 31932 - DNA, 50 bp, unidentified
  source 1..50: mol_type = unassigned DNA; note = donor_255f5be
  misc_feature 1..23: note = RE
  misc_feature 24..25: note = Core
  misc_feature 26..50: note = LE
gcccttgacgcccgtcttatagaggtttatcataaggcggtctcctcctg

SEQ ID NO: 31933 - DNA, 50 bp, unidentified
  source 1..50: mol_type = unassigned DNA; note = donor_256071b
  misc_feature 1..22: note = RE
  misc_feature 23..25: note = Core
  misc_feature 26..50: note = LE
attcgattttcttattatagttcattgtatattatttattcgttataaat

SEQ ID NO: 31934 - DNA, 50 bp, unidentified
  source 1..50: mol_type = unassigned DNA; note = donor_256ee3b
  misc_feature 1..24: note = RE
  misc_feature 25: note = Core
  misc_feature 26..50: note = LE
ttgcgagcagggggccgtccacatatgttggtgtggacggcccccgaacg

SEQ ID NO: 31935 - DNA, 50 bp, unidentified
  source 1..50: mol_type = unassigned DNA; note = donor_2573ae7
  misc_feature 1..22: note = RE
  misc_feature 23..25: note = Core
  misc_feature 26..50: note = LE
gtccctttgctttatacatagcagtaattatgtaataaagcatagcgcag

SEQ ID NO: 31936 - DNA, 50 bp, unidentified
  source 1..50: mol_type = unassigned DNA; note = donor_2575610
  misc_feature 1..23: note = RE
  misc_feature 24..25: note = Core
  misc_feature 26..50: note = LE
cttgcaaatctcgctattagacgacatggtgtaatcgcgggcacgaggcc

SEQ ID NO: 31937 - DNA, 50 bp, unidentified
  source 1..50: mol_type = unassigned DNA; note = donor_25799bd
  misc_feature 1..22: note = RE
  misc_feature 23..25: note = Core
  misc_feature 26..50: note = LE
tgccatagggggcgtccacatatgatgatgtggacgcccccgcactgacc

SEQ ID NO: 31938 - DNA, 50 bp, unidentified
  source 1..50: mol_type = unassigned DNA; note = donor_257ec1a
  misc_feature 1..22: note = RE
  misc_feature 23..25: note = Core
  misc_feature 26..50: note = LE
acgggacgaatgcgattagacaacatggggtaatcgtgggatcgagtcgc

SEQ ID NO: 31939 - DNA, 50 bp, unidentified
  source 1..50: mol_type = unassigned DNA; note = donor_2594669
  misc_feature 1..22: note = RE
  misc_feature 23..25: note = Core
  misc_feature 26..50: note = LE
gatattgacatcctattagctggttcgtattataaggttagccagttttt

SEQ ID NO: 31940 - DNA, 50 bp, unidentified
  source 1..50: mol_type = unassigned DNA; note = donor_25968f8
  misc_feature 1..23: note = RE
  misc_feature 24..25: note = Core
  misc_feature 26..50: note = LE
ttgtgcttgacttgggacatcagagactgtatgtccctccacaaatgagg

SEQ ID NO: 31941 - DNA, 50 bp, unidentified
  source 1..50: mol_type = unassigned DNA; note = donor_259a3d2
  misc_feature 1..23: note = RE
  misc_feature 24..25: note = Core
  misc_feature 26..50: note = LE
cgtcgtgggggccgtccacacaagatgcggtggacggcccctacttcgcg

SEQ ID NO: 31942 - DNA, 50 bp, unidentified
  source 1..50: mol_type = unassigned DNA; note = donor_259dbd9
  misc_feature 1..22: note = RE
  misc_feature 23..25: note = Core
  misc_feature 26..50: note = LE
tacttgacttttaatagttagtcttatataatatatttaagttgatagag

SEQ ID NO: 31943 - DNA, 50 bp, unidentified
  source 1..50: mol_type = unassigned DNA; note = donor_25a16a6
  misc_feature 1..23: note = RE
  misc_feature 24..25: note = Core
  misc_feature 26..50: note = LE
atgcttgacctgcaagagagaatcttgtatcttgcgaattgaggcgtaac

SEQ ID NO: 31944 - DNA, 50 bp, unidentified
  source 1..50: mol_type = unassigned DNA; note = donor_25a6fd2
  misc_feature 1..20: note = RE
  misc_feature 21..25: note = Core
  misc_feature 26..50: note = LE
tgacgaaaaccatagggacacccccgttaccttattcacggtccttcaca

SEQ ID NO: 31945 - DNA, 50 bp, unidentified
  source 1..50: mol_type = unassigned DNA; note = donor_25ae482
  misc_feature 1..24: note = RE
  misc_feature 25: note = Core
  misc_feature 26..50: note = LE
gggttgacgaagaacataggggcaccgttaccttttctgtggctccgcaa

SEQ ID NO: 31946 - DNA, 50 bp, unidentified
  source 1..50: mol_type = unassigned DNA; note = donor_25b6955
  misc_feature 1..23: note = RE
  misc_feature 24..25: note = Core
  misc_feature 26..50: note = LE
aataatatccaccaataccgttgcctgtgtattggatttgtgctatgtag

SEQ ID NO: 31947 - DNA, 50 bp, unidentified
  source 1..50: mol_type = unassigned DNA; note = donor_25bb604
  misc_feature 1..24: note = RE
  misc_feature 25: note = Core
  misc_feature 26..50: note = LE
ttgcaaacagggggcgtccatgtacaatgggatggacgcccctcccgaaa

SEQ ID NO: 31948 - DNA, 50 bp, unidentified
  source 1..50: mol_type = unassigned DNA; note = donor_25bc9ba
  misc_feature 1..23: note = RE
  misc_feature 24..25: note = Core
  misc_feature 26..50: note = LE
tctattgacttttcatagttggtcttgtatgatatatttaataacttaaa

SEQ ID NO: 31949 - DNA, 50 bp, unidentified
  source 1..50: mol_type = unassigned DNA; note = donor_25bd72c
  misc_feature 1..24: note = RE
  misc_feature 25: note = Core
  misc_feature 26..50: note = LE
tgcaaatgagggggagtccatatacaatggtatggactcctcctccccta

SEQ ID NO: 31950 - DNA, 50 bp, unidentified
  source 1..50: mol_type = unassigned DNA; note = donor_25c3f8f
  misc_feature 1..24: note = RE
  misc_feature 25: note = Core
  misc_feature 26..50: note = LE
cacagatgctcatccgcctgccggcttgcatgttcaaactgcatccgttg

SEQ ID NO: 31951 - DNA, 50 bp, unidentified
  source 1..50: mol_type = unassigned DNA; note = donor_25d2eb3
  misc_feature 1..24: note = RE
  misc_feature 25: note = Core
  misc_feature 26..50: note = LE
tgcaaaggcagggcgggtcatacataatgagatgacccgccctgtcaccc

SEQ ID NO: 31952 - DNA, 50 bp, unidentified
  source 1..50: mol_type = unassigned DNA; note = donor_25d410f
  misc_feature 1..23: note = RE
  misc_feature 24..25: note = Core
  misc_feature 26..50: note = LE
tgacatctaagctcctgggatgtctaatcagagttagcgagttgccatcc

SEQ ID NO: 31953 - DNA, 50 bp, unidentified
  source 1..50: mol_type = unassigned DNA; note = donor_25d5bda
  misc_feature 1..23: note = RE
  misc_feature 24..25: note = Core
  misc_feature 26..50: note = LE
aggcttgacgggagagacggtatcttgtatctttctttctgtagtggtta

SEQ ID NO: 31954 - DNA, 50 bp, unidentified
  source 1..50: mol_type = unassigned DNA; note = donor_25e8a61
  misc_feature 1..22: note = RE
  misc_feature 23..25: note = Core
  misc_feature 26..50: note = LE
acctcgacaggccgaatagagaagatgggatattcggccggccgtcgtag

SEQ ID NO: 31955 - DNA, 50 bp, unidentified
  source 1..50: mol_type = unassigned DNA; note = donor_25e93ee
  misc_feature 1..23: note = RE
  misc_feature 24..25: note = Core
  misc_feature 26..50: note = LE
accgggtggttgacagagggtgtctgatggctctaccttcccttcacacg

SEQ ID NO: 31956 - DNA, 50 bp, unidentified
  source 1..50: mol_type = unassigned DNA; note = donor_25ee7f6
  misc_feature 1..23: note = RE
  misc_feature 24..25: note = Core
  misc_feature 26..50: note = LE
taatgagtgactaaagacagttgcttgtatctcaaaagtggattactatg

SEQ ID NO: 31957 - DNA, 50 bp, unidentified
  source 1..50: mol_type = unassigned DNA; note = donor_25f3ece
  misc_feature 1..23: note = RE
  misc_feature 24..25: note = Core
  misc_feature 26..50: note = LE
gacgtcaacattgcgattagacaacatggggtaatcgcgggagcgagttt

SEQ ID NO: 31958 - DNA, 50 bp, unidentified
  source 1..50: mol_type = unassigned DNA; note = donor_25fe88e
  misc_feature 1..23: note = RE
  misc_feature 24..25: note = Core
  misc_feature 26..50: note = LE
gcggttgccaacgaagagagaatcttgtatgttgctgccgctaccccgat

SEQ ID NO: 31959 - DNA, 50 bp, unidentified
  source 1..50: mol_type = unassigned DNA; note = donor_2602c89
  misc_feature 1..23: note = RE
  misc_feature 24..25: note = Core
  misc_feature 26..50: note = LE
gggcttgacttttaatagttagtcttgtattatagagtagtagttattag

SEQ ID NO: 31960 - DNA, 50 bp, unidentified
  source 1..50: mol_type = unassigned DNA; note = donor_2609c74
  misc_feature 1..24: note = RE
  misc_feature 25: note = Core
  misc_feature 26..50: note = LE
tgcaaaagaggaggagtccatacacaatgggatggactcctcctcaccta

SEQ ID NO: 31961 - DNA, 50 bp, unidentified
  source 1..50: mol_type = unassigned DNA; note = donor_2619c6d
  misc_feature 1..21: note = RE
  misc_feature 22..25: note = Core
  misc_feature 26..50: note = LE
tggttgacttttaatagttagtcacgtataatcaatcttaaggaaattaa

SEQ ID NO: 31962 - DNA, 50 bp, unidentified
  source 1..50: mol_type = unassigned DNA; note = donor_261d759
  misc_feature 1..23: note = RE
  misc_feature 24..25: note = Core
  misc_feature 26..50: note = LE
gcccgccgcttgacatagaagcgtctactggtccaccatggtggtgtcag

SEQ ID NO: 31963 - DNA, 50 bp, unidentified
  source 1..50: mol_type = unassigned DNA; note = donor_2623e4a
  misc_feature 1..23: note = RE
  misc_feature 24..25: note = Core
  misc_feature 26..50: note = LE
atgatttggttttgtcatagaaatcctttagatttgttttgattattttt

SEQ ID NO: 31964 - DNA, 50 bp, unidentified
  source 1..50: mol_type = unassigned DNA; note = donor_262f24e
  misc_feature 1..24: note = RE
  misc_feature 25: note = Core
  misc_feature 26..50: note = LE
tgcaggcgcgcggcggaccatacataatgagatggtccgccgcgcgacaa

SEQ ID NO: 31965 - DNA, 50 bp, unidentified
  source 1..50: mol_type = unassigned DNA; note = donor_263e05d
  misc_feature 1..23: note = RE
  misc_feature 24..25: note = Core
  misc_feature 26..50: note = LE
ttgcaaacggggtgggtccatatataatgaaatggacccacccctccttg

SEQ ID NO: 31966 - DNA, 50 bp, unidentified
  source 1..50: mol_type = unassigned DNA; note = donor_26402b3
  misc_feature 1..22: note = RE
  misc_feature 23..25: note = Core
  misc_feature 26..50: note = LE
ttttaaaggtatcaagacagttgcttgtgtcttgcgctgggtttaaactg

SEQ ID NO: 31967 - DNA, 50 bp, unidentified; identical to SEQ ID NO: 31939
  source 1..50: mol_type = unassigned DNA; note = donor_264529c
  misc_feature 1..22: note = RE
  misc_feature 23..25: note = Core
  misc_feature 26..50: note = LE

SEQ ID NO: 31968 - DNA, 50 bp, unidentified
  source 1..50: mol_type = unassigned DNA; note = donor_2650651
  misc_feature 1..23: note = RE
  misc_feature 24..25: note = Core
  misc_feature 26..50: note = LE
cctcttgacatttaaccgctggactcgtataataatttttgtaaggtttt

SEQ ID NO: 31969 - DNA, 50 bp, unidentified
  source 1..50: mol_type = unassigned DNA; note = donor_26549f1
  misc_feature 1..23: note = RE
  misc_feature 24..25: note = Core
  misc_feature 26..50: note = LE
gggcttgacatttgtttgcaggactcctacaatatagttacggtataagg

SEQ ID NO: 31970 - DNA, 50 bp, unidentified
  source 1..50: mol_type = unassigned DNA; note = donor_265627a
  misc_feature 1..22: note = RE
  misc_feature 23..25: note = Core
  misc_feature 26..50: note = LE
ccttgacaacaacatggggacacccttaccttgctcgtgagccttgagcg

SEQ ID NO: 31971 - DNA, 50 bp, unidentified
  source 1..50: mol_type = unassigned DNA; note = donor_2657b67
  misc_feature 1..24: note = RE
  misc_feature 25: note = Core
  misc_feature 26..50: note = LE
ttgccatcgggaggcgtccatataatggtatggacgcctcccccctcagg

SEQ ID NO: 31972 - DNA, 50 bp, unidentified
  source 1..50: mol_type = unassigned DNA; note = donor_265c82e
  misc_feature 1..23: note = RE
  misc_feature 24..25: note = Core
  misc_feature 26..50: note = LE
aggcttgactttttattagtagactcctaatataaatgtgtagtggttat

SEQ ID NO: 31973 - DNA, 50 bp, unidentified
  source 1..50: mol_type = unassigned DNA; note = donor_26611de
  misc_feature 1..23: note = RE
  misc_feature 24..25: note = Core
  misc_feature 26..50: note = LE
gcaagttcagggccgtccacatatgttggtgtggacggccccccgacggc

SEQ ID NO: 31974 - DNA, 50 bp, unidentified
  source 1..50: mol_type = unassigned DNA; note = donor_266d028
  misc_feature 1..23: note = RE
  misc_feature 24..25: note = Core
  misc_feature 26..50: note = LE
gacgaacaaaggcccattacagaagatgccgtaatgggccggcgtcacaa

SEQ ID NO: 31975 - DNA, 50 bp, unidentified
  source 1..50: mol_type = unassigned DNA; note = donor_2674b42
  misc_feature 1..24: note = RE
  misc_feature 25: note = Core
  misc_feature 26..50: note = LE
ttgctattgggagcagtccatatataatggtatggactgctccggcaggc

SEQ ID NO: 31976 - DNA, 50 bp, unidentified
  source 1..50: mol_type = unassigned DNA; note = donor_2681a36
  misc_feature 1..23: note = RE
  misc_feature 24..25: note = Core
  misc_feature 26..50: note = LE
gcaagcgggagccatccagacaggatgggatggatggctcccgctcccgg

SEQ ID NO: 31977 - DNA, 50 bp, unidentified
  source 1..50: mol_type = unassigned DNA; note = donor_268304d
  misc_feature 1..23: note = RE
  misc_feature 24..25: note = Core
  misc_feature 26..50: note = LE
cttgacttcttttaatagttagtctactattagtattgtcatagtcattc

SEQ ID NO: 31978 - DNA, 50 bp, unidentified
  source 1..50: mol_type = unassigned DNA; note = donor_2686298
  misc_feature 1..24: note = RE
  misc_feature 25: note = Core
  misc_feature 26..50: note = LE
tgcagtcacgcggcggaccatacataatgggatggtccgccgcttgatct

SEQ ID NO: 31979 - DNA, 50 bp, unidentified
  source 1..50: mol_type = unassigned DNA; note = donor_2686ff5
  misc_feature 1..23: note = RE
  misc_feature 24..25: note = Core
  misc_feature 26..50: note = LE
gcatctgcgggggcgtccacacacgatggggtggacgccccctccggcgg

SEQ ID NO: 31980 - DNA, 50 bp, unidentified
  source 1..50: mol_type = unassigned DNA; note = donor_2699281
  misc_feature 1..23: note = RE
  misc_feature 24..25: note = Core
  misc_feature 26..50: note = LE
agtgcttgacaaagtcatagtgttccattagactattaattataaatata

SEQ ID NO: 31981 - DNA, 50 bp, unidentified
  source 1..50: mol_type = unassigned DNA; note = donor_26a6595
  misc_feature 1..23: note = RE
  misc_feature 24..25: note = Core
  misc_feature 26..50: note = LE
atagattgatttttcttagcaggttggtactataaaagtgtagttgttag

SEQ ID NO: 31982 - DNA, 50 bp, unidentified
  source 1..50: mol_type = unassigned DNA; note = donor_26a7f60
  misc_feature 1..23: note = RE
  misc_feature 24..25: note = Core
  misc_feature 26..50: note = LE
accgggctacttcgccacagttgcttgtgtccggaaaatctggcaggatg

SEQ ID NO: 31983 - DNA, 50 bp, unidentified
  source 1..50: mol_type = unassigned DNA; note = donor_26aa67d
  misc_feature 1..23: note = RE
  misc_feature 24..25: note = Core
  misc_feature 26..50: note = LE
tctattgacttttaatagttagtctcgtattatatagtcatacccattct

SEQ ID NO: 31984 - DNA, 50 bp, unidentified
  source 1..50: mol_type = unassigned DNA; note = donor_26aadc8
  misc_feature 1..22: note = RE
  misc_feature 23..25: note = Core
  misc_feature 26..50: note = LE
cagctcaggggccgtccacagatgatggggtggacggcccctgtgtccgg

SEQ ID NO: 31985 - DNA, 50 bp, unidentified
  source 1..50: mol_type = unassigned DNA; note = donor_26acc11
  misc_feature 1..24: note = RE
  misc_feature 25: note = Core
  misc_feature 26..50: note = LE
tgcaatgaggggggagtccatatacaatgggatggactccccctcacctc

SEQ ID NO: 31986 - DNA, 50 bp, unidentified
  source 1..50: mol_type = unassigned DNA; note = donor_26b9a87
  misc_feature 1..23: note = RE
  misc_feature 24..25: note = Core
  misc_feature 26..50: note = LE
gcaacgcaggggccgtccacacatgatggtgtggacggcccctgctcacc

SEQ ID NO: 31987 - DNA, 50 bp, unidentified
  source 1..50: mol_type = unassigned DNA; note = donor_26baac8
  misc_feature 1..24: note = RE
  misc_feature 25: note = Core
  misc_feature 26..50: note = LE
ttgcacaaagggggcgtccatgtacaatgggatggacgcccccgcctcta

SEQ ID NO: 31988 - DNA, 50 bp, unidentified
  source 1..50: mol_type = unassigned DNA; note = donor_26bd1c1
  misc_feature 1..23: note = RE
  misc_feature 24..25: note = Core
  misc_feature 26..50: note = LE
ccggcttgaactcaagacagttacttgtatctttaacttgttcccttctt

SEQ ID NO: 31989 - DNA, 50 bp, unidentified
  source 1..50: mol_type = unassigned DNA; note = donor_26c143f
  misc_feature 1..23: note = RE
  misc_feature 24..25: note = Core
  misc_feature 26..50: note = LE
acttgaaaattcaagtggaatgttctaccattgtatttttacaggtgaca

SEQ ID NO: 31990 - DNA, 50 bp, unidentified
  source 1..50: mol_type = unassigned DNA; note = donor_26cf299
  misc_feature 1..24: note = RE
  misc_feature 25: note = Core
  misc_feature 26..50: note = LE
caaccacttgacacaaagaagcttctgattgatacttgtgggggttgcgg

SEQ ID NO: 31991 - DNA, 50 bp, unidentified
  source 1..50: mol_type = unassigned DNA; note = donor_26e4400
  misc_feature 1..23: note = RE
  misc_feature 24..25: note = Core
  misc_feature 26..50: note = LE
gctttccctgggacgaccatgtaagatggcatggtcgtcccacctacacc

SEQ ID NO: 31992 - DNA, 50 bp, unidentified
  source 1..50: mol_type = unassigned DNA; note = donor_26e70d1
  misc_feature 1..23: note = RE
  misc_feature 24..25: note = Core
  misc_feature 26..50: note = LE
gcaaggagggggccgtccacatatgttggagtggacggcccccacacggc

SEQ ID NO: 31993 - DNA, 50 bp, unidentified
  source 1..50: mol_type = unassigned DNA; note = donor_26ec754
  misc_feature 1..22: note = RE
  misc_feature 23..25: note = Core
  misc_feature 26..50: note = LE
tttgacccttgacatagagagtcttatacgttactattgatccaggcccc

SEQ ID NO: 31994 - DNA, 50 bp, unidentified
  source 1..50: mol_type = unassigned DNA; note = donor_26ec9ab
  misc_feature 1..23: note = RE
  misc_feature 24..25: note = Core
  misc_feature 26..50: note = LE
ctcgaggctaggtgacacggtatcttgtatgtcgactacccgccataacg

SEQ ID NO: 31995 - DNA, 50 bp, unidentified
  source 1..50: mol_type = unassigned DNA; note = donor_26f33eb
  misc_feature 1..23: note = RE
  misc_feature 24..25: note = Core
  misc_feature 26..50: note = LE
ggcctgaggttgacagagggtgtctgatagcggtaccttctttcatggct

SEQ ID NO: 31996 - DNA, 50 bp, unidentified
  source 1..50: mol_type = unassigned DNA; note = donor_26f9493
  misc_feature 1..23: note = RE
  misc_feature 24..25: note = Core
  misc_feature 26..50: note = LE
tgattgatttggagagatggtatcttgtatctttccaaaccatgatatat

SEQ ID NO: 31997 - DNA, 50 bp, unidentified; identical to SEQ ID NO: 31190
  source 1..50: mol_type = unassigned DNA; note = donor_26fe55a
  misc_feature 1..24: note = RE
  misc_feature 25: note = Core
  misc_feature 26..50: note = LE

SEQ ID NO: 31998 - DNA, 50 bp, unidentified
  source 1..50: mol_type = unassigned DNA; note = donor_2704a58
  misc_feature 1..23: note = RE
  misc_feature 24..25: note = Core
  misc_feature 26..50: note = LE
catagagtccgtcaagacggtatcttatgtcttggaaccagcccgacaag

SEQ ID NO: 31999 - DNA, 50 bp, unidentified
  source 1..50: mol_type = unassigned DNA; note = donor_2711832
  misc_feature 1..23: note = RE
  misc_feature 24..25: note = Core
  misc_feature 26..50: note = LE
gacaccctccaaccgtgggatgtctaatggggttgcaccggctgttgtta

SEQ ID NO: 32000 - DNA, 50 bp, unidentified
  source 1..50: mol_type = unassigned DNA; note = donor_2713ffe
  misc_feature 1..21: note = RE
  misc_feature 22..25: note = Core
  misc_feature 26..50: note = LE
agttgactttgaaacacagtacattgtatattgactacaaattatttaat

SEQ ID NO: 32001 - DNA, 50 bp, unidentified
  source 1..50: mol_type = unassigned DNA; note = donor_27189ad
  misc_feature 1..24: note = RE
  misc_feature 25: note = Core
  misc_feature 26..50: note = LE
ttgcaaatctggggcggaccatagaatgaaatggtccgccccacctctcc

SEQ ID NO: 32002 - DNA, 50 bp, unidentified
  source 1..50: mol_type = unassigned DNA; note = donor_271a792
  misc_feature 1..24: note = RE
  misc_feature 25: note = Core
  misc_feature 26..50: note = LE
tgcaatgacggggcggaccatacataatgagatggcccgccccgtctctc

SEQ ID NO: 32003 - DNA, 50 bp, unidentified
  source 1..50: mol_type = unassigned DNA; note = donor_2721143
  misc_feature 1..23: note = RE
  misc_feature 24..25: note = Core
  misc_feature 26..50: note = LE
gagccactccaacaacacagttgcttatctgttggaattctgccagtgtg

SEQ ID NO: 32004 - DNA, 50 bp, unidentified
  source 1..50: mol_type = unassigned DNA; note = donor_27431ce
  misc_feature 1..23: note = RE
  misc_feature 24..25: note = Core
  misc_feature 26..50: note = LE
cgcgatgagggtcaagacggtatcttgtatctcgactctggtgcttcatc

SEQ ID NO: 32005 - DNA, 50 bp, unidentified
  source 1..50: mol_type = unassigned DNA; note = donor_2743a58
  misc_feature 1..23: note = RE
  misc_feature 24..25: note = Core
  misc_feature 26..50: note = LE
agaaaatcgtattaaactgagggagcattcctgtagatctttatttttcg

SEQ ID NO: 32006 - DNA, 50 bp, unidentified
  source 1..50: mol_type = unassigned DNA; note = donor_274fa7f
  misc_feature 1..20: note = RE
  misc_feature 21..25: note = Core
  misc_feature 26..50: note = LE
gttgactactcatagctggtctcctacaatcttcttgtcgcgttttgact

SEQ ID NO: 32007 - DNA, 50 bp, unidentified
  source 1..50: mol_type = unassigned DNA; note = donor_2760735
  misc_feature 1..23: note = RE
  misc_feature 24..25: note = Core
  misc_feature 26..50: note = LE
ggcaaacgggaggcgtccatatagaatggaatggacgcctccccccgtga

SEQ ID NO: 32008 - DNA, 50 bp, unidentified; identical to SEQ ID NO: 30451
  source 1..50: mol_type = unassigned DNA; note = donor_27757df
  misc_feature 1..23: note = RE
  misc_feature 24..25: note = Core
  misc_feature 26..50: note = LE

SEQ ID NO: 32009 - DNA, 50 bp, unidentified
  source 1..50: mol_type = unassigned DNA; note = donor_277ee4e
  misc_feature 1..24: note = RE
  misc_feature 25: note = Core
  misc_feature 26..50: note = LE
tgcaaaaatgggggtgaccatagataatgggatggtcacccccacctctc

SEQ ID NO: 32010 - DNA, 50 bp, unidentified
  source 1..50: mol_type = unassigned DNA; note = donor_2780260
  misc_feature 1..24: note = RE
  misc_feature 25: note = Core
  misc_feature 26..50: note = LE
agagttgtttttcacctcagttcttcttaagtttgatttctattaaaata

SEQ ID NO: 32011 - DNA, 50 bp, unidentified
  source 1..50: mol_type = unassigned DNA; note = donor_2783a28
  misc_feature 1..23: note = RE
  misc_feature 24..25: note = Core
  misc_feature 26..50: note = LE
ctgctatttttttcatagctggtcttgtatgataattaggaagccagtta

SEQ ID NO: 32012 - DNA, 50 bp, unidentified
  source 1..50: mol_type = unassigned DNA; note = donor_2784a00
  misc_feature 1..22: note = RE
  misc_feature 23..25: note = Core
  misc_feature 26..50: note = LE
cttgactcctaacaccccatacaagatgctatggggcgagcggcgaggag

SEQ ID NO: 32013 - DNA, 50 bp, unidentified
  source 1..50: mol_type = unassigned DNA; note = donor_279166b
  misc_feature 1..21: note = RE
  misc_feature 22..25: note = Core
  misc_feature 26..50: note = LE
ccgagagggggccgtccatacatgatggagtggacggcccccgacggcat

SEQ ID NO: 32014 - DNA, 50 bp, unidentified
  source 1..50: mol_type = unassigned DNA; note = donor_2791c06
  misc_feature 1..24: note = RE
  misc_feature 25: note = Core
  misc_feature 26..50: note = LE
tgctacgcgcggccgggccatacataatgggatggcccggccgcgctcct

SEQ ID NO: 32015 - DNA, 50 bp, unidentified; identical to SEQ ID NO: 30414
  source 1..50: mol_type = unassigned DNA; note = donor_27a7f8c
  misc_feature 1..24: note = RE
  misc_feature 25: note = Core
  misc_feature 26..50: note = LE

SEQ ID NO: 32016 - DNA, 50 bp, unidentified
  source 1..50: mol_type = unassigned DNA; note = donor_27ad00a
  misc_feature 1..23: note = RE
  misc_feature 24..25: note = Core
  misc_feature 26..50: note = LE
aggcttgacatctaatagttagtcttgtattatagagtagtagttattag

SEQ ID NO: 32017 - DNA, 50 bp, unidentified
  source 1..50: mol_type = unassigned DNA; note = donor_27afbcb
  misc_feature 1..23: note = RE
  misc_feature 24..25: note = Core
  misc_feature 26..50: note = LE
ccaagcgggagccatccacacaggatggggtggatggctcctgctccaac

SEQ ID NO: 32018 - DNA, 50 bp, unidentified
  source 1..50: mol_type = unassigned DNA; note = donor_27baf8f
  misc_feature 1..22: note = RE
  misc_feature 23..25: note = Core
  misc_feature 26..50: note = LE
ggccttgacttttattagcaggtctattacaataaatttggaaccggagc

SEQ ID NO: 32019 - DNA, 50 bp, unidentified
  source 1..50: mol_type = unassigned DNA; note = donor_27bbae3
  misc_feature 1..24: note = RE
  misc_feature 25: note = Core
  misc_feature 26..50: note = LE
cttgccgacggggcgggccatacgtatggaatggcccgcccctctcctcc

SEQ ID NO: 32020 - DNA, 50 bp, unidentified
  source 1..50: mol_type = unassigned DNA; note = donor_27be9d7
  misc_feature 1..23: note = RE
  misc_feature 24..25: note = Core
  misc_feature 26..50: note = LE
gcttgacaaagctcatagaaagtcttatattgggtttgttgcaatgtgaa

SEQ ID NO: 32021 - DNA, 50 bp, unidentified
  source 1..50: mol_type = unassigned DNA; note = donor_27c107e
  misc_feature 1..21: note = RE
  misc_feature 22..25: note = Core
  misc_feature 26..50: note = LE
tcttgacacgtattagcaggtttgctacaatatgtttgacctcagaatag

SEQ ID NO: 32022 - DNA, 50 bp, unidentified; identical to SEQ ID NO: 30389
  source 1..50: mol_type = unassigned DNA; note = donor_27c2c1a
  misc_feature 1..23: note = RE
  misc_feature 24..25: note = Core
  misc_feature 26..50: note = LE

SEQ ID NO: 32023 - DNA, 50 bp, unidentified
  source 1..50: mol_type = unassigned DNA; note = donor_27c6b2c
  misc_feature 1..23: note = RE
  misc_feature 24..25: note = Core
  misc_feature 26..50: note = LE
aaccgagcggcatccacaaaagaagatggggtggatgccgctctccccaa

SEQ ID NO: 32024 - DNA, 50 bp, unidentified
  source 1..50: mol_type = unassigned DNA; note = donor_27caded
  misc_feature 1..23: note = RE
  misc_feature 24..25: note = Core
  misc_feature 26..50: note = LE
gacttgacaagaccctatgggatctgatatagctcgtagtggaggtcagt

SEQ ID NO: 32025 - DNA, 50 bp, unidentified
  source 1..50: mol_type = unassigned DNA; note = donor_27cdf0a
  misc_feature 1..23: note = RE
  misc_feature 24..25: note = Core
  misc_feature 26..50: note = LE
gcagcgaaggctgggtccatatataatgaaatggacccagccttcttccc

SEQ ID NO: 32026 - DNA, 50 bp, unidentified
  source 1..50: mol_type = unassigned DNA; note = donor_27d9c80
  misc_feature 1..23: note = RE
  misc_feature 24..25: note = Core
  misc_feature 26..50: note = LE
gggcttgacgggcaagacggtatcttgtatcttgttctcattggtggtta

SEQ ID NO: 32027 - DNA, 50 bp, unidentified
  source 1..50: mol_type = unassigned DNA; note = donor_27db841
  misc_feature 1..23: note = RE
  misc_feature 24..25: note = Core
  misc_feature 26..50: note = LE
aaaaaatggatttaagacggtatcttatatcttgattcagacccctaaaa

SEQ ID NO: 32028 - DNA, 50 bp, unidentified
  source 1..50: mol_type = unassigned DNA; note = donor_27f7413
  misc_feature 1..21: note = RE
  misc_feature 22..25: note = Core
  misc_feature 26..50: note = LE
cttgacaacgacatagagacaccccgttaccttcttggtagccccaggtt

SEQ ID NO: 32029 - DNA, 50 bp, unidentified
  source 1..50: mol_type = unassigned DNA; note = donor_2800497
  misc_feature 1..24: note = RE
  misc_feature 25: note = Core
  misc_feature 26..50: note = LE
tgcaaaaatcgggctgaccatagataatgagatggtcagcccgatccctc

SEQ ID NO: 32030 - DNA, 50 bp, unidentified
  source 1..50: mol_type = unassigned DNA; note = donor_2807d7c
  misc_feature 1..23: note = RE
  misc_feature 24..25: note = Core
  misc_feature 26..50: note = LE
gacaaacaatggcccgttacagaagatggtgtaacgggccgagctcgcca

SEQ ID NO: 32031 - DNA, 50 bp, unidentified
  source 1..50: mol_type = unassigned DNA; note = donor_28091ab
  misc_feature 1..24: note = RE
  misc_feature 25: note = Core
  misc_feature 26..50: note = LE
cttgcagaccgggcgggccatacgtatgggatggcccgcccttttcggcg

SEQ ID NO: 32032 - DNA, 50 bp, unidentified
  source 1..50: mol_type = unassigned DNA; note = donor_280e170
  misc_feature 1..24: note = RE
  misc_feature 25: note = Core
  misc_feature 26..50: note = LE
tggcttattcggggcgtccatatacaatgggatggacgcccccaccctaa

SEQ ID NO: 32033 - DNA, 50 bp, unidentified
  source 1..50: mol_type = unassigned DNA; note = donor_2810db2
  misc_feature 1..22: note = RE
  misc_feature 23..25: note = Core
  misc_feature 26..50: note = LE
caagtttaagtgggtccatatataatggtgtggacccactaagctgaaga

SEQ ID NO: 32034 - DNA, 50 bp, unidentified
  source 1..50: mol_type = unassigned DNA; note = donor_281c2f8
  misc_feature 1..23: note = RE
  misc_feature 24..25: note = Core
  misc_feature 26..50: note = LE
gtaaaaaatcatttataacatgtctcgtataaatgataattgcagcatac

SEQ ID NO: 32035 - DNA, 50 bp, unidentified
  source 1..50: mol_type = unassigned DNA; note = donor_28240e1
  misc_feature 1..24: note = RE
  misc_feature 25: note = Core
  misc_feature 26..50: note = LE
tgcagcaacgcggcggaccatacataatggtatggtccgccgccttaact

SEQ ID NO: 32036 - DNA, 50 bp, unidentified
  source 1..50: mol_type = unassigned DNA; note = donor_2829f00
  misc_feature 1..23: note = RE
  misc_feature 24..25: note = Core
  misc_feature 26..50: note = LE
actcttgatttttatatagttagctggtatattgtaattgactcatttaa

SEQ ID NO: 32037 - DNA, 50 bp, unidentified
  source 1..50: mol_type = unassigned DNA; note = donor_282af23
  misc_feature 1..22: note = RE
  misc_feature 23..25: note = Core
  misc_feature 26..50: note = LE
ccaacccggagccgtccacacatgatgctgtggacggctcctccatcggc

SEQ ID NO: 32038 - DNA, 50 bp, unidentified
  source 1..50: mol_type = unassigned DNA; note = donor_283194f
  misc_feature 1..24: note = RE
  misc_feature 25: note = Core
  misc_feature 26..50: note = LE
tggcaaaaaggaggcgtccatatacaatggaatggacgcctcccccttaa

SEQ ID NO: 32039 - DNA, 50 bp, unidentified
  source 1..50: mol_type = unassigned DNA; note = donor_2832431
  misc_feature 1..24: note = RE
  misc_feature 25: note = Core
  misc_feature 26..50: note = LE
cccagttgacagacatagaagcgtctgtgagtcttggagcggctggtctg

SEQ ID NO: 32040 - DNA, 50 bp, unidentified; identical to SEQ ID NO: 30451
  source 1..50: mol_type = unassigned DNA; note = donor_2846ab4
  misc_feature 1..23: note = RE
  misc_feature 24..25: note = Core
  misc_feature 26..50: note = LE

SEQ ID NO: 32041 - DNA, 50 bp, unidentified
  source 1..50: mol_type = unassigned DNA; note = donor_28563c7
  misc_feature 1..23: note = RE
  misc_feature 24..25: note = Core
  misc_feature 26..50: note = LE
tgacatctaaacccctgggatgtctaatgagggtagcgggttgcctgtgc

SEQ ID NO: 32042 - DNA, 50 bp, unidentified
  source 1..50: mol_type = unassigned DNA; note = donor_285bf11
  misc_feature 1..24: note = RE
  misc_feature 25: note = Core
  misc_feature 26..50: note = LE
ggcaaaacgggaggagtccatatacaatgagatggactcctccctccttc

SEQ ID NO: 32043 - DNA, 50 bp, unidentified
  source 1..50: mol_type = unassigned DNA; note = donor_285d40c
  misc_feature 1..23: note = RE
  misc_feature 24..25: note = Core
  misc_feature 26..50: note = LE
acagcttgactatgtcataatattccattagacttagaacattattattt

SEQ ID NO: 32044 - DNA, 50 bp, unidentified; identical to SEQ ID NO: 30514
  source 1..50: mol_type = unassigned DNA; note = donor_286a3c2
  misc_feature 1..23: note = RE
  misc_feature 24..25: note = Core
  misc_feature 26..50: note = LE

SEQ ID NO: 32045 - DNA, 50 bp, unidentified
  source 1..50: mol_type = unassigned DNA; note = donor_2880784
  misc_feature 1..23: note = RE
  misc_feature 24..25: note = Core
  misc_feature 26..50: note = LE
agtccggataggagagacggtatcttgtgtctctccgcaggggagatgat

SEQ ID NO: 32046 - DNA, 50 bp, unidentified
  source 1..50: mol_type = unassigned DNA; note = donor_28814be
  misc_feature 1..24: note = RE
  misc_feature 25: note = Core
  misc_feature 26..50: note = LE
tgcagtcgggcagcggaccatacataatgagatggtccgccgcttaatcc

SEQ ID NO: 32047 - DNA, 50 bp, unidentified
  source 1..50: mol_type = unassigned DNA; note = donor_28856bf
  misc_feature 1..23: note = RE
  misc_feature 24..25: note = Core
  misc_feature 26..50: note = LE
gttttccaggagacgtccatgtaagatggtatggacgtctccacccttac

SEQ ID NO: 32048 - DNA, 50 bp, unidentified
  source 1..50: mol_type = unassigned DNA; note = donor_2885fc7
  misc_feature 1..24: note = RE
  misc_feature 25: note = Core
  misc_feature 26..50: note = LE
tgcccgggcggggcaggtcatacataatgggatgacctgccccaccctcc

SEQ ID NO: 32049 - DNA, 50 bp, unidentified
  source 1..50: mol_type = unassigned DNA; note = donor_2888371
  misc_feature 1..23: note = RE
  misc_feature 24..25: note = Core
  misc_feature 26..50: note = LE
gcgcgaacgggggcatccatacatgatggagtggatgccccctcctgacg

SEQ ID NO: 32050 - DNA, 50 bp, unidentified
  source 1..50: mol_type = unassigned DNA; note = donor_2889dbc
  misc_feature 1..24: note = RE
  misc_feature 25: note = Core
  misc_feature 26..50: note = LE
ccactccttgacacagaggggagcctactaggagacttcccgcaggatcg

SEQ ID NO: 32051 - DNA, 50 bp, unidentified
  source 1..50: mol_type = unassigned DNA; note = donor_2898534
  misc_feature 1..22: note = RE
  misc_feature 23..25: note = Core
  misc_feature 26..50: note = LE
aactgggtattgacaaagcatgtcctgttactgtaagctagacaaagaga

SEQ ID NO: 32052 - DNA, 50 bp, unidentified
  source 1..50: mol_type = unassigned DNA; note = donor_28a1506
  misc_feature 1..24: note = RE
  misc_feature 25: note = Core
  misc_feature 26..50: note = LE
gccgcttgacaaacagaagggcgtcagtcagaggatagtcgccagttcct

SEQ ID NO: 32053 - DNA, 50 bp, unidentified; identical to SEQ ID NO: 30847
  source 1..50: mol_type = unassigned DNA; note = donor_28a85fd
  misc_feature 1..24: note = RE
  misc_feature 25: note = Core
  misc_feature 26..50: note = LE

SEQ ID NO: 32054 - DNA, 50 bp, unidentified
  source 1..50: mol_type = unassigned DNA; note = donor_28b2180
  misc_feature 1..23: note = RE
  misc_feature 24..25: note = Core
  misc_feature 26..50: note = LE
cctattgactttttatttgcaggctccttcctctactacaatatatttat

SEQ ID NO: 32055 - DNA, 50 bp, unidentified
  source 1..50: mol_type = unassigned DNA; note = donor_28b60d1
  misc_feature 1..22: note = RE
  misc_feature 23..25: note = Core
  misc_feature 26..50: note = LE
aatattgacaaactattagctggttcgtattataaggttagccagaatgc

SEQ ID NO: 32056 - DNA, 50 bp, unidentified
  source 1..50: mol_type = unassigned DNA; note = donor_28bc30b
  misc_feature 1..23: note = RE
  misc_feature 24..25: note = Core
  misc_feature 26..50: note = LE
ggccttgacttttaatagttagtctcgtattataaaagagtagtatttat

SEQ ID NO: 32057 - DNA, 50 bp, unidentified
  source 1..50: mol_type = unassigned DNA; note = donor_28c4f26
  misc_feature 1..21: note = RE
  misc_feature 22..25: note = Core
  misc_feature 26..50: note = LE
cggaaccttgacacagggtgtctcactggtgcaccttccgtgtcgggtgc

SEQ ID NO: 32058 - DNA, 50 bp, unidentified
  source 1..50: mol_type = unassigned DNA; note = donor_28c714c
  misc_feature 1..24: note = RE
  misc_feature 25: note = Core
  misc_feature 26..50: note = LE
ctattgacatttattagctggacttagtataataatggtgtagtcaatca

SEQ ID NO: 32059 - DNA, 50 bp, unidentified
  source 1..50: mol_type = unassigned DNA; note = donor_28c8bfc
  misc_feature 1..23: note = RE
  misc_feature 24..25: note = Core
  misc_feature 26..50: note = LE
caaagcaggggccatccacagaggatgaggtggatggcccctgctccctc

SEQ ID NO: 32060 - DNA, 50 bp, unidentified
  source 1..50: mol_type = unassigned DNA; note = donor_28ce748
  misc_feature 1..21: note = RE
  misc_feature 22..25: note = Core
  misc_feature 26..50: note = LE
atctttaaaataattagtaggttttcgtactatataagtatgaggagtta

SEQ ID NO: 32061 - DNA, 50 bp, unidentified
  source 1..50: mol_type = unassigned DNA; note = donor_28d3f05
  misc_feature 1..23: note = RE
  misc_feature 24..25: note = Core
  misc_feature 26..50: note = LE
gcattccaacgagcgattagacgacattgggtaatcgcggagcgagtcgc

SEQ ID NO: 32062 - DNA, 50 bp, unidentified
  source 1..50: mol_type = unassigned DNA; note = donor_28e0a03
  misc_feature 1..24: note = RE
  misc_feature 25: note = Core
  misc_feature 26..50: note = LE
ttgccatcgggaggcgtccatataatggtatggacgcctcccactttaaa

SEQ ID NO: 32063 - DNA, 50 bp, unidentified
  source 1..50: mol_type = unassigned DNA; note = donor_28e740f
  misc_feature 1..24: note = RE
  misc_feature 25: note = Core
  misc_feature 26..50: note = LE
tgaacgccgggaggcatccctataatggtttggatgcctcccccccgaca

SEQ ID NO: 32064 - DNA, 50 bp, unidentified
  source 1..50: mol_type = unassigned DNA; note = donor_28ebf71
  misc_feature 1..20: note = RE
  misc_feature 21..25: note = Core
  misc_feature 26..50: note = LE
ttgacaaccccatagagacacccccgttaccttcttgatcaagcccggac

SEQ ID NO: 32065 - DNA, 50 bp, unidentified
  source 1..50: mol_type = unassigned DNA; note = donor_28ee23c
  misc_feature 1..24: note = RE
  misc_feature 25: note = Core
  misc_feature 26..50: note = LE
tgacctcggggggaagcccttgtagaatggaagggacttccccgtcctga

SEQ ID NO: 32066 - DNA, 50 bp, unidentified
  source 1..50: mol_type = unassigned DNA; note = donor_28ee6f0
  misc_feature 1..24: note = RE
  misc_feature 25: note = Core
  misc_feature 26..50: note = LE
tgcaaaaacgggggtgaccatagataatgaaatggtcacccccacccctc

SEQ ID NO: 32067 - DNA, 50 bp, unidentified
  source 1..50: mol_type = unassigned DNA; note = donor_28fd7d4
  misc_feature 1..23: note = RE
  misc_feature 24..25: note = Core
  misc_feature 26..50: note = LE
aacttgacaaccgcgattagagaacatagcgtaatcgctcagggcctagc

SEQ ID NO: 32068 - DNA, 50 bp, unidentified
  source 1..50: mol_type = unassigned DNA; note = donor_29091ab
  misc_feature 1..23: note = RE
  misc_feature 24..25: note = Core
  misc_feature 26..50: note = LE
aaacttgacattatatagttagtctcgtataatatatttgtagtttttta

SEQ ID NO: 32069 - DNA, 50 bp, unidentified
  source 1..50: mol_type = unassigned DNA; note = donor_290f7e6
  misc_feature 1..21: note = RE
  misc_feature 22..25: note = Core
  misc_feature 26..50: note = LE
catggggttgacacagggagtgtcactagggcaccatccttctgacggag

SEQ ID NO: 32070 - DNA, 50 bp, unidentified
  source 1..50: mol_type = unassigned DNA; note = donor_2915693
  misc_feature 1..24: note = RE
  misc_feature 25: note = Core
  misc_feature 26..50: note = LE
gcaagccgagggggagtccatatacaatgggatggactcctcctccccta

SEQ ID NO: 32071 - DNA, 50 bp, unidentified
  source 1..50: mol_type = unassigned DNA; note = donor_291e39f
  misc_feature 1..18: note = RE
  misc_feature 19..25: note = Core
  misc_feature 26..50: note = LE
tcgatgagcgtggtctctcgctggtcgagcgacgagcagatcagccgctg

SEQ ID NO: 32072 - DNA, 50 bp, unidentified; identical to SEQ ID NO: 31264
  source 1..50: mol_type = unassigned DNA; note = donor_291f26b
  misc_feature 1..24: note = RE
  misc_feature 25: note = Core
  misc_feature 26..50: note = LE

SEQ ID NO: 32073 - DNA, 50 bp, unidentified
  source 1..50: mol_type = unassigned DNA; note = donor_292007d
  misc_feature 1..22: note = RE
  misc_feature 23..25: note = Core
  misc_feature 26..50: note = LE
aatattgacaaactattagctggttcgtattataagttcagccagatatt

SEQ ID NO: 32074 - DNA, 50 bp, unidentified
  source 1..50: mol_type = unassigned DNA; note = donor_29254aa
  misc_feature 1..23: note = RE
  misc_feature 24..25: note = Core
  misc_feature 26..50: note = LE
tctcttgactttttatagctggtctcgtataatgaatttacggtttaagt

SEQ ID NO: 32075 - DNA, 50 bp, unidentified
  source 1..50: mol_type = unassigned DNA; note = donor_2927aca
  misc_feature 1..23: note = RE
  misc_feature 24..25: note = Core
  misc_feature 26..50: note = LE
agacttgacttttaatagttagtctcgtattatatagtagtagtgtttag

SEQ ID NO: 32076 - DNA, 50 bp, unidentified
  source 1..50: mol_type = unassigned DNA; note = donor_292b4ad
  misc_feature 1..23: note = RE
  misc_feature 24..25: note = Core
  misc_feature 26..50: note = LE
cagccgcttgacacacagaggcgctgacttgtctactggtcccagacatc

SEQ ID NO: 32077 - DNA, 50 bp, unidentified
  source 1..50: mol_type = unassigned DNA; note = donor_292f3a3
  misc_feature 1..23: note = RE
  misc_feature 24..25: note = Core
  misc_feature 26..50: note = LE
tgccaagcgggtcgttccacatatgatgtggtggaacgacccgctaccgc

SEQ ID NO: 32078 - DNA, 50 bp, unidentified
  source 1..50: mol_type = unassigned DNA; note = donor_29317ae
  misc_feature 1..22: note = RE
  misc_feature 23..25: note = Core
  misc_feature 26..50: note = LE
cttgacaacaaaagccccatacaagatgctatggggcgggcggcgaggaa

SEQ ID NO: 32079 - DNA, 50 bp, unidentified
  source 1..50: mol_type = unassigned DNA; note = donor_2932026
  misc_feature 1..23: note = RE
  misc_feature 24..25: note = Core
  misc_feature 26..50: note = LE
gcaatacgggaggagaccatatacgatgagatggtctcctccctctttcc

SEQ ID NO: 32080 - DNA, 50 bp, unidentified
  source 1..50: mol_type = unassigned DNA; note = donor_2938f5e
  misc_feature 1..23: note = RE
  misc_feature 24..25: note = Core
  misc_feature 26..50: note = LE
gcaaaactcaggctgaccatacattaatgagatggtcagcctgattcagc

SEQ ID NO: 32081 - DNA, 50 bp, unidentified
  source 1..50: mol_type = unassigned DNA; note = donor_2939bf6
  misc_feature 1..23: note = RE
  misc_feature 24..25: note = Core
  misc_feature 26..50: note = LE
cttgcaccggggccgtccaaacatgatggtgtggacggccccggctctac

SEQ ID NO: 32082 - DNA, 50 bp, unidentified
  source 1..50: mol_type = unassigned DNA; note = donor_29469e9
  misc_feature 1..23: note = RE
  misc_feature 24..25: note = Core
  misc_feature 26..50: note = LE
tgacaaagaacgtcatgggatgtctaataagaaccaccgggtcagcgatg

SEQ ID NO: 32083 - DNA, 50 bp, unidentified
  source 1..50: mol_type = unassigned DNA; note = donor_295053a
  misc_feature 1..22: note = RE
  misc_feature 23..25: note = Core
  misc_feature 26..50: note = LE
ctcaacgggcggcaaccacagaagatgggatggttgccgccctccccaga

SEQ ID NO: 32084 - DNA, 50 bp, unidentified
  source 1..50: mol_type = unassigned DNA; note = donor_29654ac
  misc_feature 1..23: note = RE
  misc_feature 24..25: note = Core
  misc_feature 26..50: note = LE
tgacaatcaaagtccagggatgtctaatgggagataccgggtcggccacg

SEQ ID NO: 32085 - DNA, 50 bp, unidentified
  source 1..50: mol_type = unassigned DNA; note = donor_296a945
  misc_feature 1..24: note = RE
  misc_feature 25: note = Core
  misc_feature 26..50: note = LE
gcggttgacaaaactatagagacacattacagtttgagttgtccgaaagg

SEQ ID NO: 32086 - DNA, 50 bp, unidentified
  source 1..50: mol_type = unassigned DNA; note = donor_2978ca7
  misc_feature 1..23: note = RE
  misc_feature 24..25: note = Core
  misc_feature 26..50: note = LE
ttgacacaggaggagtccacataagataattggactcctccacctctact

SEQ ID NO: 32087 - DNA, 50 bp, unidentified
  source 1..50: mol_type = unassigned DNA; note = donor_297a0f5
  misc_feature 1..23: note = RE
  misc_feature 24..25: note = Core
  misc_feature 26..50: note = LE
gcaaacaggagggggaccatagattaatgagatggtccccctccaccccg

SEQ ID NO: 32088 - DNA, 50 bp, unidentified
  source 1..50: mol_type = unassigned DNA; note = donor_297c69d
  misc_feature 1..24: note = RE
  misc_feature 25: note = Core
  misc_feature 26..50: note = LE
tgcaaatgcggggcgtaccatacataattagatggtacgccccacaccca

SEQ ID NO: 32089 - DNA, 50 bp, unidentified
  source 1..50: mol_type = unassigned DNA; note = donor_2980967
  misc_feature 1..23: note = RE
  misc_feature 24..25: note = Core
  misc_feature 26..50: note = LE
gcatctcgggcggcaaccacagaagatggggtggttgccgccctgacctg

SEQ ID NO: 32090 - DNA, 50 bp, unidentified
  source 1..50: mol_type = unassigned DNA; note = donor_298794c
  misc_feature 1..23: note = RE
  misc_feature 24..25: note = Core
  misc_feature 26..50: note = LE
tgacacctaagcacctgggatgtctaatgagtgttagcgggttcgccgtc

SEQ ID NO: 32091 - DNA, 50 bp, unidentified
  source 1..50: mol_type = unassigned DNA; note = donor_298b936
  misc_feature 1..23: note = RE
  misc_feature 24..25: note = Core
  misc_feature 26..50: note = LE
ctcgcttgaaaacaacacagttacttgtatcttggaattgccctccttgt

SEQ ID NO: 32092 - DNA, 50 bp, unidentified
  source 1..50: mol_type = unassigned DNA; note = donor_29902aa
  misc_feature 1..23: note = RE
  misc_feature 24..25: note = Core
  misc_feature 26..50: note = LE
cggcttgacaacgtcattgggaatccatacctttcttcgtgggcttgaac

SEQ ID NO: 32093 - DNA, 50 bp, unidentified
  source 1..50: mol_type = unassigned DNA; note = donor_2993537
  misc_feature 1..23: note = RE
  misc_feature 24..25: note = Core
  misc_feature 26..50: note = LE
caaaaaatggggtgaccatagatttaatgagatggtcaccccggcactct

SEQ ID NO: 32094 - DNA, 50 bp, unidentified
  source 1..50: mol_type = unassigned DNA; note = donor_29a9317
  misc_feature 1..24: note = RE
  misc_feature 25: note = Core
  misc_feature 26..50: note = LE
tgcacggacgaggcggaccatacataatgggatggtccgcctcgtcctcc

SEQ ID NO: 32095 - DNA, 50 bp, unidentified
  source 1..50: mol_type = unassigned DNA; note = donor_29a982c
  misc_feature 1..23: note = RE
  misc_feature 24..25: note = Core
  misc_feature 26..50: note = LE
gaccccaaacggccgattagagaagatggggtaatcggccggcgagcttg

SEQ ID NO: 32096 - DNA, 50 bp, unidentified
  source 1..50: mol_type = unassigned DNA; note = donor_29adf15
  misc_feature 1..22: note = RE
  misc_feature 23..25: note = Core
  misc_feature 26..50: note = LE
catccatgggggcgtccacagatgatggggtggacgccccccgacggcat

SEQ ID NO: 32097 - DNA, 50 bp, unidentified
  source 1..50: mol_type = unassigned DNA; note = donor_29b3ca5
  misc_feature 1..24: note = RE
  misc_feature 25: note = Core
  misc_feature 26..50: note = LE
ttgcaaaagggaggcgtccatgtataatgaaatggacgcctcccacccac

SEQ ID NO: 32098 - DNA, 50 bp, unidentified
  source 1..50: mol_type = unassigned DNA; note = donor_29b4d45
  misc_feature 1..24: note = RE
  misc_feature 25: note = Core
  misc_feature 26..50: note = LE
ttgcaatcgggcggggtccatatacaatggtatggaacccgccctcgcgg

SEQ ID NO: 32099 - DNA, 50 bp, unidentified
  source 1..50: mol_type = unassigned DNA; note = donor_29b5b97
  misc_feature 1..24: note = RE
  misc_feature 25: note = Core
  misc_feature 26..50: note = LE
ttgacgaacgggggaatccatgtagaatgacatggattccccctcacgag

SEQ ID NO: 32100 - DNA, 50 bp, unidentified
  source 1..50: mol_type = unassigned DNA; note = donor_29b6354
  misc_feature 1..22: note = RE
  misc_feature 23..25: note = Core
  misc_feature 26..50: note = LE
ttcggctcttgacatagagggtcttatatgttactattttcccagaccct

SEQ ID NO: 32101 - DNA, 50 bp, unidentified
  source 1..50: mol_type = unassigned DNA; note = donor_29c394d
  misc_feature 1..23: note = RE
  misc_feature 24..25: note = Core
  misc_feature 26..50: note = LE
gcaccggaagggccgtccacacatgatgtggtggacggccctttcaccgg

SEQ ID NO: 32102 - DNA, 50 bp, unidentified
  source 1..50: mol_type = unassigned DNA; note = donor_29d1eab
  misc_feature 1..23: note = RE
  misc_feature 24..25: note = Core
  misc_feature 26..50: note = LE
ctcaatagggtggcgttcatataagatgagatgaacgccacccttctttt

SEQ ID NO: 32103 - DNA, 50 bp, unidentified
  source 1..50: mol_type = unassigned DNA; note = donor_29d6534
  misc_feature 1..23: note = RE
  misc_feature 24..25: note = Core
  misc_feature 26..50: note = LE
tgcaaaaacgggagtgaccatagatgagatggtcactccctcttcctgag

SEQ ID NO: 32104 - DNA, 50 bp, unidentified
  source 1..50: mol_type = unassigned DNA; note = donor_29e1fb4
  misc_feature 1..23: note = RE
  misc_feature 24..25: note = Core
  misc_feature 26..50: note = LE
gcaaaaacgggggggaccatagattaatgagatggtcacccccaccctgt

SEQ ID NO: 32105 - DNA, 50 bp, unidentified
  source 1..50: mol_type = unassigned DNA; note = donor_29e2a89
  misc_feature 1..24: note = RE
  misc_feature 25: note = Core
  misc_feature 26..50: note = LE
ccagccattgacacagaggggtgcctacttgttaactggtggtacgaccg

SEQ ID NO: 32106 - DNA, 50 bp, unidentified
  source 1..50: mol_type = unassigned DNA; note = donor_29e75b3
  misc_feature 1..23: note = RE
  misc_feature 24..25: note = Core
  misc_feature 26..50: note = LE
ttgcaaacggggtgggtccatatataatggaatggacccatcccctttta

SEQ ID NO: 32107 - DNA, 50 bp, unidentified
  source 1..50: mol_type = unassigned DNA; note = donor_29efd08
  misc_feature 1..23: note = RE
  misc_feature 24..25: note = Core
  misc_feature 26..50: note = LE
aggagaaaacgatactttatagtggaggagccattcctgtaatgaagtaa

SEQ ID NO: 32108 - DNA, 50 bp, unidentified
  source 1..50: mol_type = unassigned DNA; note = donor_29f5aae
  misc_feature 1..23: note = RE
  misc_feature 24..25: note = Core
  misc_feature 26..50: note = LE
cgggttgacttttaatagttaatcttgtattataaagtagtagttattag

SEQ ID NO: 32109 - DNA, 50 bp, unidentified
  source 1..50: mol_type = unassigned DNA; note = donor_2a06c57
  misc_feature 1..24: note = RE
  misc_feature 25: note = Core
  misc_feature 26..50: note = LE
caccggttgacaacaaaggggagcctactagacgattcccttagggccgg

SEQ ID NO: 32110 - DNA, 50 bp, unidentified
  source 1..50: mol_type = unassigned DNA; note = donor_2a09245
  misc_feature 1..23: note = RE
  misc_feature 24..25: note = Core
  misc_feature 26..50: note = LE
gcaaggagggggccgtccacatatgttggtgtggacggcccccgacggca

SEQ ID NO: 32111 - DNA, 50 bp, unidentified
  source 1..50: mol_type = unassigned DNA; note = donor_2a0a7d5
  misc_feature 1..23: note = RE
  misc_feature 24..25: note = Core
  misc_feature 26..50: note = LE
ggtcttgacttttaatagttagtctcgtattataaagtagtagtgtttat

SEQ ID NO: 32112 - DNA, 50 bp, unidentified
  source 1..50: mol_type = unassigned DNA; note = donor_2a1020d
  misc_feature 1..23: note = RE
  misc_feature 24..25: note = Core
  misc_feature 26..50: note = LE
gcataacgggcggcaaccatagaagatggaatggttgccgccctcccgga

SEQ ID NO: 32113 - DNA, 50 bp, unidentified
  source 1..50: mol_type = unassigned DNA; note = donor_2a13ae7
  misc_feature 1..23: note = RE
  misc_feature 24..25: note = Core
  misc_feature 26..50: note = LE
gccacgcggaggccgtccatacatgatgtgatggacggcctccgctcccg

SEQ ID NO: 32114 - DNA, 50 bp, unidentified
  source 1..50: mol_type = unassigned DNA; note = donor_2a1846a
  misc_feature 1..24: note = RE
  misc_feature 25: note = Core
  misc_feature 26..50: note = LE
ttggcaaacgggggcgaccatctataatgggatgggcgcccttccccaaa

SEQ ID NO: 32115 - DNA, 50 bp, unidentified
  source 1..50: mol_type = unassigned DNA; note = donor_2a2096a
  misc_feature 1..24: note = RE
  misc_feature 25: note = Core
  misc_feature 26..50: note = LE
ttggcaaacgggggcgtccatgtacaatgggatggacgcccccacccact

SEQ ID NO: 32116 - DNA, 50 bp, unidentified
  source 1..50: mol_type = unassigned DNA; note = donor_2a24116
  misc_feature 1..23: note = RE
  misc_feature 24..25: note = Core
  misc_feature 26..50: note = LE
gcaaaaatgggggtgaccatagattaatgagatggtcacccccaacaccc

SEQ ID NO: 32117 - DNA, 50 bp, unidentified
  source 1..50: mol_type = unassigned DNA; note = donor_2a2cdab
  misc_feature 1..24: note = RE
  misc_feature 25: note = Core
  misc_feature 26..50: note = LE
caccggttgacaacagaggggagcctactagaggattcccgtaggaccgg

SEQ ID NO: 32118 - DNA, 50 bp, unidentified
  source 1..50: mol_type = unassigned DNA; note = donor_2a34e3d
  misc_feature 1..23: note = RE
  misc_feature 24..25: note = Core
  misc_feature 26..50: note = LE
tcgcttgacgcggaacagagtgtcttgtatattgctaatcgcctgctcag

SEQ ID NO: 32119 - DNA, 50 bp, unidentified
  source 1..50: mol_type = unassigned DNA; note = donor_2a475bb
  misc_feature 1..23: note = RE
  misc_feature 24..25: note = Core
  misc_feature 26..50: note = LE
gaccccaaccggccgattagagaagatggggtaatcggccggcgttcttg

SEQ ID NO: 32120 - DNA, 50 bp, unidentified
  source 1..50: mol_type = unassigned DNA; note = donor_2a4d248
  misc_feature 1..24: note = RE
  misc_feature 25: note = Core
  misc_feature 26..50: note = LE
ccgctgcttgacacagaggggagcctacttagagacttcacgcaggatcg

SEQ ID NO: 32121 - DNA, 50 bp, unidentified; identical to SEQ ID NO: 31949
  source 1..50: mol_type = unassigned DNA; note = donor_2a4e311
  misc_feature 1..24: note = RE
  misc_feature 25: note = Core
  misc_feature 26..50: note = LE

SEQ ID NO: 32122 - DNA, 50 bp, unidentified
  source 1..50: mol_type = unassigned DNA; note = donor_2a4e67f
  misc_feature 1..24: note = RE
  misc_feature 25: note = Core
  misc_feature 26..50: note = LE
tgcaacgcacggccggaccatacataatggaatggtccggccgtgctcct

SEQ ID NO: 32123 - DNA, 50 bp, unidentified
  source 1..50: mol_type = unassigned DNA; note = donor_2a51baa
  misc_feature 1..22: note = RE
  misc_feature 23..25: note = Core
  misc_feature 26..50: note = LE
tgtcctctactttctttcacactaatctccattccgccgccttcggttgg

SEQ ID NO: 32124 - DNA, 50 bp, unidentified
  source 1..50: mol_type = unassigned DNA; note = donor_2a53ee6
  misc_feature 1..23: note = RE
  misc_feature 24..25: note = Core
  misc_feature 26..50: note = LE
ttaaacttgacttttcatagctggtatgataattagaaggtaattatcac

SEQ ID NO: 32125 - DNA, 50 bp, unidentified
  source 1..50: mol_type = unassigned DNA; note = donor_2a59bd6
  misc_feature 1..22: note = RE
  misc_feature 23..25: note = Core
  misc_feature 26..50: note = LE
gactaatgacatgcaattagacaacatggggtaatcgcggagcggttcac

SEQ ID NO: 32126 - DNA, 50 bp, unidentified
  source 1..50: mol_type = unassigned DNA; note = donor_2a66e66
  misc_feature 1..22: note = RE
  misc_feature 23..25: note = Core
  misc_feature 26..50: note = LE
cctaggcaaggacgacacggtatcttgtgtcttggaatggcgccctgatc

SEQ ID NO: 32127 - DNA, 50 bp, unidentified
  source 1..50: mol_type = unassigned DNA; note = donor_2a6a0e0
  misc_feature 1..24: note = RE
  misc_feature 25: note = Core
  misc_feature 26..50: note = LE
aaacttgttttttaactcagttcttcttaagtttgatttcctaacttttg

SEQ ID NO: 32128 - DNA, 50 bp, unidentified
  source 1..50: mol_type = unassigned DNA; note = donor_2a6cb6e
  misc_feature 1..21: note = RE
  misc_feature 22..25: note = Core
  misc_feature 26..50: note = LE
taatttgctttttaacacagatcatcctatgtttgcaaagtattaatttt

SEQ ID NO: 32129 - DNA, 50 bp, unidentified; identical to SEQ ID NO: 31135
  source 1..50: mol_type = unassigned DNA; note = donor_2a77b52
  misc_feature 1..22: note = RE
  misc_feature 23..25: note = Core
  misc_feature 26..50: note = LE

SEQ ID NO: 32130 - DNA, 50 bp, unidentified
  source 1..50: mol_type = unassigned DNA; note = donor_2a7aa7a
  misc_feature 1..23: note = RE
  misc_feature 24..25: note = Core
  misc_feature 26..50: note = LE
ctgcttgacttattatagtaagtcttgtatactcagaactgtaataatag

SEQ ID NO: 32131 - DNA, 50 bp, unidentified
  source 1..50: mol_type = unassigned DNA; note = donor_2a80871
  misc_feature 1..22: note = RE
  misc_feature 23..25: note = Core
  misc_feature 26..50: note = LE
gcaaacggggaggcgttcatacagaatgagatgaacgccccccactcatt

SEQ ID NO: 32132 - DNA, 50 bp, unidentified
  source 1..50: mol_type = unassigned DNA; note = donor_2a8540a
  misc_feature 1..23: note = RE
  misc_feature 24..25: note = Core
  misc_feature 26..50: note = LE
accacgcttgaccaagacggatacttgtcttatgctttccttatcgatct

SEQ ID NO: 32133 - DNA, 50 bp, unidentified
  source 1..50: mol_type = unassigned DNA; note = donor_2a87a92
  misc_feature 1..22: note = RE
  misc_feature 23..25: note = Core
  misc_feature 26..50: note = LE
aaatttggaaataaacacagttcatcctatgtttgcaaaaggaagttctt

SEQ ID NO: 32134 - DNA, 50 bp, unidentified
  source 1..50: mol_type = unassigned DNA; note = donor_2a880d2
  misc_feature 1..24: note = RE
  misc_feature 25: note = Core
  misc_feature 26..50: note = LE
aaaatttggaattaccataggatacctttagatttgttctatagatgaaa

SEQ ID NO: 32135 - DNA, 50 bp, unidentified
  source 1..50: mol_type = unassigned DNA; note = donor_2a97c80
  misc_feature 1..23: note = RE
  misc_feature 24..25: note = Core
  misc_feature 26..50: note = LE
gggcttgacttttaatagttagtcttgtattataaagtagtagtttatag

SEQ ID NO: 32136 - DNA, 50 bp, unidentified
  source 1..50: mol_type = unassigned DNA; note = donor_2aa29e6
  misc_feature 1..23: note = RE
  misc_feature 24..25: note = Core
  misc_feature 26..50: note = LE
gaacttgacttttaatagttaatcttgtattatagagtagtagttattaa

SEQ ID NO: 32137 - DNA, 50 bp, unidentified
  source 1..50: mol_type = unassigned DNA; note = donor_2aab41a
  misc_feature 1..22: note = RE
  misc_feature 23..25: note = Core
  misc_feature 26..50: note = LE
tgcttgactttttatttgcagactactacaatatatttatggttaatacc

SEQ ID NO: 32138 - DNA, 50 bp, unidentified
  source 1..50: mol_type = unassigned DNA; note = donor_2aabb21
  misc_feature 1..22: note = RE
  misc_feature 23..25: note = Core
  misc_feature 26..50: note = LE
cagtgcaggggccgtccacagatgatggggtggacggcccctgtgtccgg

SEQ ID NO: 32139 - DNA, 50 bp, unidentified
  source 1..50: mol_type = unassigned DNA; note = donor_2aaf7a5
  misc_feature 1..24: note = RE
  misc_feature 25: note = Core
  misc_feature 26..50: note = LE
ttgacaaaagagggagtccatgtagaatgatatggactccctctccctga

SEQ ID NO: 32140 - DNA, 50 bp, unidentified
  source 1..50: mol_type = unassigned DNA; note = donor_2aaf8a7
  misc_feature 1..23: note = RE
  misc_feature 24..25: note = Core
  misc_feature 26..50: note = LE
ggacttgacttttaatagttggtctcgtattatatagtagtagttattta

SEQ ID NO: 32141 - DNA, 50 bp, unidentified
  source 1..50: mol_type = unassigned DNA; note = donor_2ab53dd
  misc_feature 1..24: note = RE
  misc_feature 25: note = Core
  misc_feature 26..50: note = LE
tggcaaaataggggcgaccatctataatgggatggtcgcccctacccgaa

SEQ ID NO: 32142 - DNA, 50 bp, unidentified
  source 1..50: mol_type = unassigned DNA; note = donor_2ab5b8c
  misc_feature 1..23: note = RE
  misc_feature 24..25: note = Core
  misc_feature 26..50: note = LE
tgacacctcagctcctggggtgtctaatgggagctagccgggtcgggctc

SEQ ID NO: 32143 - DNA, 50 bp, unidentified
  source 1..50: mol_type = unassigned DNA; note = donor_2ab64a1
  misc_feature 1..24: note = RE
  misc_feature 25: note = Core
  misc_feature 26..50: note = LE
accccttgacaaacataggggcatctgtgaggatcgtcaagtgccgttcg

SEQ ID NO: 32144 - DNA, 50 bp, unidentified
  source 1..50: mol_type = unassigned DNA; note = donor_2ab6efb
  misc_feature 1..24: note = RE
  misc_feature 25: note = Core
  misc_feature 26..50: note = LE
tttaagctattctttataggatggtcgtataatatatttaccaaccaaat

SEQ ID NO: 32145 - DNA, 50 bp, unidentified
  source 1..50: mol_type = unassigned DNA; note = donor_2abf6b6
  misc_feature 1..21: note = RE
  misc_feature 22..25: note = Core
  misc_feature 26..50: note = LE
ttgacgaaaactatagaagcaccccgttaccttttaggtgtcactgtttt

SEQ ID NO: 32146 - DNA, 50 bp, unidentified
  source 1..50: mol_type = unassigned DNA; note = donor_2ad80cb
  misc_feature 1..23: note = RE
  misc_feature 24..25: note = Core
  misc_feature 26..50: note = LE
ctgcttgactttttatttgcagactactacaatatatttatggttaatat

SEQ ID NO: 32147 - DNA, 50 bp, unidentified
  source 1..50: mol_type = unassigned DNA; note = donor_2ae0546
  misc_feature 1..23: note = RE
  misc_feature 24..25: note = Core
  misc_feature 26..50: note = LE
gactaaccaaggcccgttacagaagatggggtaacgggccggccgcccgc

SEQ ID NO: 32148 - DNA, 50 bp, unidentified
  source 1..50: mol_type = unassigned DNA; note = donor_2ae7d4b
  misc_feature 1..24: note = RE
  misc_feature 25: note = Core
  misc_feature 26..50: note = LE
tgcggaaacggggaagtccttatagaatgaaagggacttcccctactcga

SEQ ID NO: 32149 - DNA, 50 bp, unidentified
  source 1..50: mol_type = unassigned DNA; note = donor_2aeb409
  misc_feature 1..24: note = RE
  misc_feature 25: note = Core
  misc_feature 26..50: note = LE
tgcacggacggggcggaccatacataatgggatggtccgcctcgtcctcc

SEQ ID NO: 32150 - DNA, 50 bp, unidentified
  source 1..50: mol_type = unassigned DNA; note = donor_2aef7cc
  misc_feature 1..23: note = RE
  misc_feature 24..25: note = Core
  misc_feature 26..50: note = LE
aggcttgaccacgaacataggatcttgtatgttcctcccggctcctacgc

SEQ ID NO: 32151 - DNA, 50 bp, unidentified
  source 1..50: mol_type = unassigned DNA; note = donor_2b0c1a6
  misc_feature 1..23: note = RE
  misc_feature 24..25: note = Core
  misc_feature 26..50: note = LE
ctgcttgactttttatttgcagactactacaatatatttacggttaatac

SEQ ID NO: 32152 - DNA, 50 bp, unidentified
  source 1..50: mol_type = unassigned DNA; note = donor_2b1513c
  misc_feature 1..22: note = RE
  misc_feature 23..25: note = Core
  misc_feature 26..50: note = LE
ggcaagccggaggcgtccatataaatggtatggacgcctcgtcatcgcat

SEQ ID NO: 32153 - DNA, 50 bp, unidentified
  source 1..50: mol_type = unassigned DNA; note = donor_2b1efb5
  misc_feature 1..23: note = RE
  misc_feature 24..25: note = Core
  misc_feature 26..50: note = LE
cataatttgtatcaagacggtatcttatatcttgattcggccatcttttg

SEQ ID NO: 32154 - DNA, 50 bp, unidentified
  source 1..50: mol_type = unassigned DNA; note = donor_2b28b3f
  misc_feature 1..23: note = RE
  misc_feature 24..25: note = Core
  misc_feature 26..50: note = LE
gcttgactcagaacatagggacaccgttaccttgtgagtgctccgatggt

SEQ ID NO: 32155 - DNA, 50 bp, unidentified
  source 1..50: mol_type = unassigned DNA; note = donor_2b2d6e0
  misc_feature 1..24: note = RE
  misc_feature 25: note = Core
  misc_feature 26..50: note = LE
ttgcaaagcggggcggaccatatataatggtatggtccgccccgctccaa

SEQ ID NO: 32156 - DNA, 50 bp, unidentified
  source 1..50: mol_type = unassigned DNA; note = donor_2b4241a
  misc_feature 1..24: note = RE
  misc_feature 25: note = Core
  misc_feature 26..50: note = LE
tggcaaatcgggggcgtccatgtacaatgggatggacgcccccacccgaa

SEQ ID NO: 32157 - DNA, 50 bp, unidentified; identical to SEQ ID NO: 31844
  source 1..50: mol_type = unassigned DNA; note = donor_2b4ce52
  misc_feature 1..22: note = RE
  misc_feature 23..25: note = Core
  misc_feature 26..50: note = LE

SEQ ID NO: 32158 - DNA, 50 bp, unidentified
  source 1..50: mol_type = unassigned DNA; note = donor_2b4e9f6
  misc_feature 1..22: note = RE
  misc_feature 23..25: note = Core
  misc_feature 26..50: note = LE
caataagggaggagaccatatatgatgtaatggtctcctcccacactcgg

SEQ ID NO: 32159 - DNA, 50 bp, unidentified
  source 1..50: mol_type = unassigned DNA; note = donor_2b5cfbd
  misc_feature 1..23: note = RE
  misc_feature 24..25: note = Core
  misc_feature 26..50: note = LE
gacctcaacacgccgaatagagaagatgggatattcggcttgagccccat

SEQ ID NO: 32160 - DNA, 50 bp, unidentified
  source 1..50: mol_type = unassigned DNA; note = donor_2b5f7d9
  misc_feature 1..24: note = RE
  misc_feature 25: note = Core
  misc_feature 26..50: note = LE
cggcgtcttgacacagaggggtgcctacgtgtttcattgacgtcaggatc

SEQ ID NO: 32161 - DNA, 50 bp, unidentified
  source 1..50: mol_type = unassigned DNA; note = donor_2b629db
  misc_feature 1..22: note = RE
  misc_feature 23..25: note = Core
  misc_feature 26..50: note = LE
ccaaaacggagccgtccacacatgatgctgtggacggctccaccgcaggc

SEQ ID NO: 32162 - DNA, 50 bp, unidentified
  source 1..50: mol_type = unassigned DNA; note = donor_2b6d4ba
  misc_feature 1..24: note = RE
  misc_feature 25: note = Core
  misc_feature 26..50: note = LE
tgcaaaagaggaggagtccatatacaatgggatggactcctcctccccct

SEQ ID NO: 32163 - DNA, 50 bp, unidentified
  source 1..50: mol_type = unassigned DNA; note = donor_2b72218
  misc_feature 1..23: note = RE
  misc_feature 24..25: note = Core
  misc_feature 26..50: note = LE
gacgggttccccccgtgggatgtctaatggggcccgacggtgtgcgttgg

SEQ ID NO: 32164 - DNA, 50 bp, unidentified
  source 1..50: mol_type = unassigned DNA; note = donor_2b7770e
  misc_feature 1..22: note = RE
  misc_feature 23..25: note = Core
  misc_feature 26..50: note = LE
caaaaagcgagccatccacacaggatggggtggatggctcctgcatcatc

SEQ ID NO: 32165 - DNA, 50 bp, unidentified
  source 1..50: mol_type = unassigned DNA; note = donor_2b79778
  misc_feature 1..23: note = RE
  misc_feature 24..25: note = Core
  misc_feature 26..50: note = LE
atgcttgacttttcatagctggtcttgtatgatgatttcagaagctaaat

SEQ ID NO: 32166 - DNA, 50 bp, unidentified
  source 1..50: mol_type = unassigned DNA; note = donor_2b7b85b
  misc_feature 1..24: note = RE
  misc_feature 25: note = Core
  misc_feature 26..50: note = LE
gcaaaaatgggggtgaccatagattaatgagatggtcacccccgacatcc

SEQ ID NO: 32167 - DNA, 50 bp, unidentified
  source 1..50: mol_type = unassigned DNA; note = donor_2b88542
  misc_feature 1..24: note = RE
  misc_feature 25: note = Core
  misc_feature 26..50: note = LE
aacgcttgacgaaacacataggggcgttactatctttgtgccccaacaac

SEQ ID NO: 32168 - DNA, 50 bp, unidentified
  source 1..50: mol_type = unassigned DNA; note = donor_2b8a6e4
  misc_feature 1..24: note = RE
  misc_feature 25: note = Core
  misc_feature 26..50: note = LE
tggatatatgagaaacctagaatacctttggtctaacaaagataatttta

SEQ ID NO: 32169 - DNA, 50 bp, unidentified; identical to SEQ ID NO: 30467
  source 1..50: mol_type = unassigned DNA; note = donor_2b8b1f2
  misc_feature 1..24: note = RE
  misc_feature 25: note = Core
  misc_feature 26..50: note = LE

SEQ ID NO: 32170 - DNA, 50 bp, unidentified
  source 1..50: mol_type = unassigned DNA; note = donor_2b93ef4
  misc_feature 1..23: note = RE
  misc_feature 24..25: note = Core
  misc_feature 26..50: note = LE
tgacatttaagctcctgggatgtctaataagaactaacgggttgagcctt

SEQ ID NO: 32171 - DNA, 50 bp, unidentified
  source 1..50: mol_type = unassigned DNA; note = donor_2b967f2
  misc_feature 1..24: note = RE
  misc_feature 25: note = Core
  misc_feature 26..50: note = LE
tggcaaaccgggggcgaccatctataatggaatggtcgcccctccccaaa

SEQ ID NO: 32172 - DNA, 50 bp, unidentified
  source 1..50: mol_type = unassigned DNA; note = donor_2b98b6a
  misc_feature 1..24: note = RE
  misc_feature 25: note = Core
  misc_feature 26..50: note = LE
tgcagttccggggaagtccttatagaatgaaagggacttcccctactcga

SEQ ID NO: 32173 - DNA, 50 bp, unidentified
  source 1..50: mol_type = unassigned DNA; note = donor_2b98d37
  misc_feature 1..24: note = RE
  misc_feature 25: note = Core
  misc_feature 26..50: note = LE
gcaccgcacggccggaccatacattaatggaatggtccggccgtgctcca

SEQ ID NO: 32174 - DNA, 50 bp, unidentified
  source 1..50: mol_type = unassigned DNA; note = donor_2b9b495
  misc_feature 1..24: note = RE
  misc_feature 25: note = Core
  misc_feature 26..50: note = LE
cgcgtcttgacacgagaggggagcctacttaatactggtgccagggcctg

SEQ ID NO: 32175 - DNA, 50 bp, unidentified
  source 1..50: mol_type = unassigned DNA; note = donor_2ba12ba
  misc_feature 1..23: note = RE
  misc_feature 24..25: note = Core
  misc_feature 26..50: note = LE
ggacttgacttttaatagttagtctcgtataataaaagtagtagttttta

SEQ ID NO: 32176 - DNA, 50 bp, unidentified
  source 1..50: mol_type = unassigned DNA; note = donor_2ba2406
  misc_feature 1..22: note = RE
  misc_feature 23..25: note = Core
  misc_feature 26..50: note = LE
gtacttgaattttgttagcaggtttagtaccataaaagtgtagttgacag

SEQ ID NO: 32177 - DNA, 50 bp, unidentified
  source 1..50: mol_type = unassigned DNA; note = donor_2ba4e7f
  misc_feature 1..24: note = RE
  misc_feature 25: note = Core
  misc_feature 26..50: note = LE
tgcagtcagacggcggaccatacatactgagatggtccgccggtggatct

SEQ ID NO: 32178 - DNA, 50 bp, unidentified
  source 1..50: mol_type = unassigned DNA; note = donor_2bac004
  misc_feature 1..24: note = RE
  misc_feature 25: note = Core
  misc_feature 26..50: note = LE
tggcataccgggggcgtccatgtacaatgggatggacgcccccaccttaa

SEQ ID NO: 32179 - DNA, 50 bp, unidentified
  source 1..50: mol_type = unassigned DNA; note = donor_2bad09f
  misc_feature 1..22: note = RE
  misc_feature 23..25: note = Core
  misc_feature 26..50: note = LE
caaaaaaggagccgtccacacatgatgttgtggacggctccacccagacg

SEQ ID NO: 32180 - DNA, 50 bp, unidentified
  source 1..50: mol_type = unassigned DNA; note = donor_2bb55be
  misc_feature 1..23: note = RE
  misc_feature 24..25: note = Core
  misc_feature 26..50: note = LE
tgacaccaaaacccctgggatgtctaatggggtttgccgggtcgtcgtgt

SEQ ID NO: 32181 - DNA, 50 bp, unidentified
  source 1..50: mol_type = unassigned DNA; note = donor_2bbc682
  misc_feature 1..23: note = RE
  misc_feature 24..25: note = Core
  misc_feature 26..50: note = LE
gggctttcccaaaaccatagaatcttgtatggtaagacttgaagggagga

SEQ ID NO: 32182 - DNA, 50 bp, unidentified
  source 1..50: mol_type = unassigned DNA; note = donor_2bd6cf7
  misc_feature 1..23: note = RE
  misc_feature 24..25: note = Core
  misc_feature 26..50: note = LE
acggttgacaggaaagacggttacttgtatgttcaggccagaccggcgcg

SEQ ID NO: 32183 - DNA, 50 bp, unidentified
  source 1..50: mol_type = unassigned DNA; note = donor_2bd7d43
  misc_feature 1..23: note = RE
  misc_feature 24..25: note = Core
  misc_feature 26..50: note = LE
ccgcttgagggaagacatagaatcttgtatgtttcccgcggcaggtgcag

SEQ ID NO: 32184 - DNA, 50 bp, unidentified
  source 1..50: mol_type = unassigned DNA; note = donor_2be70bf
  misc_feature 1..23: note = RE
  misc_feature 24..25: note = Core
  misc_feature 26..50: note = LE
aatccccttgatcaacacggatacttgtcttatgactttctgcgccgctg

SEQ ID NO: 32185 - DNA, 50 bp, unidentified; identical to SEQ ID NO: 31960
  source 1..50: mol_type = unassigned DNA; note = donor_2be9616
  misc_feature 1..24: note = RE
  misc_feature 25: note = Core
  misc_feature 26..50: note = LE

SEQ ID NO: 32186 - DNA, 50 bp, unidentified
  source 1..50: mol_type = unassigned DNA; note = donor_2bed105
  misc_feature 1..23: note = RE
  misc_feature 24..25: note = Core
  misc_feature 26..50: note = LE
tgcatttttcttattatagttcattgtatattaattaatcattctatttt

SEQ ID NO: 32187 - DNA, 50 bp, unidentified
  source 1..50: mol_type = unassigned DNA; note = donor_2c058f9
  misc_feature 1..23: note = RE
  misc_feature 24..25: note = Core
  misc_feature 26..50: note = LE
acgacttgactaatagagagacaccgacttatatctccggtagcggtttc

SEQ ID NO: 32188 - DNA, 50 bp, unidentified
  source 1..50: mol_type = unassigned DNA; note = donor_2c18566
  misc_feature 1..23: note = RE
  misc_feature 24..25: note = Core
  misc_feature 26..50: note = LE
atatttgataattaacacagaatctcctatgtttgttgttaatatcaaag

SEQ ID NO: 32189 - DNA, 50 bp, unidentified
  source 1..50: mol_type = unassigned DNA; note = donor_2c1d87c
  misc_feature 1..23: note = RE
  misc_feature 24..25: note = Core
  misc_feature 26..50: note = LE
tgacatctaagctcctgggatgtctaataagacttaacgggtcggccatc

SEQ ID NO: 32190 - DNA, 50 bp, unidentified
  source 1..50: mol_type = unassigned DNA; note = donor_2c3d419
  misc_feature 1..23: note = RE
  misc_feature 24..25: note = Core
  misc_feature 26..50: note = LE
gcaatcctgggcgcgtccatacacgatggagtggacgcgccctcccggcg

SEQ ID NO: 32191 - DNA, 50 bp, unidentified
  source 1..50: mol_type = unassigned DNA; note = donor_2c4be1b
  misc_feature 1..23: note = RE
  misc_feature 24..25: note = Core
  misc_feature 26..50: note = LE
ttgcaacaggggcgggccatacgttatggatggcccgccccttcctccgg

SEQ ID NO: 32192 - DNA, 50 bp, unidentified
  source 1..50: mol_type = unassigned DNA; note = donor_2c50236
  misc_feature 1..23: note = RE
  misc_feature 24..25: note = Core
  misc_feature 26..50: note = LE
gtacttgacttttattagcaaggttcgtactatataagagtagagaatat

SEQ ID NO: 32193 - DNA, 50 bp, unidentified
  source 1..50: mol_type = unassigned DNA; note = donor_2c55e68
  misc_feature 1..23: note = RE
  misc_feature 24..25: note = Core
  misc_feature 26..50: note = LE
caacgcgggagccatccacagaagatgaggtggatggctcccgctcacgg

SEQ ID NO: 32194 - DNA, 50 bp, unidentified
  source 1..50: mol_type = unassigned DNA; note = donor_2c593ac
  misc_feature 1..21: note = RE
  misc_feature 22..25: note = Core
  misc_feature 26..50: note = LE
cctaggaaattattttcacagaaaacattcatgatcgtctctctcccaac

SEQ ID NO: 32195 - DNA, 50 bp, unidentified
  source 1..50: mol_type = unassigned DNA; note = donor_2c5ad8f
  misc_feature 1..23: note = RE
  misc_feature 24..25: note = Core
  misc_feature 26..50: note = LE
tcgcttgaccgacaacacagtcgcttgtaacttggtttgcgcgtcttctg

SEQ ID NO: 32196 - DNA, 50 bp, unidentified
  source 1..50: mol_type = unassigned DNA; note = donor_2c6e2c8
  misc_feature 1..23: note = RE
  misc_feature 24..25: note = Core
  misc_feature 26..50: note = LE
tgctaaccgggccgttccacatatgatggtgtggaacggcccttcgcacc

SEQ ID NO: 32197 - DNA, 50 bp, unidentified
  source 1..50: mol_type = unassigned DNA; note = donor_2c6e35e
  misc_feature 1..23: note = RE
  misc_feature 24..25: note = Core
  misc_feature 26..50: note = LE
ttacttgacttttgttagcaggtctattacaatacatttggacgaggaag

SEQ ID NO: 32198 - DNA, 50 bp, unidentified
  source 1..50: mol_type = unassigned DNA; note = donor_2c73608
  misc_feature 1..24: note = RE
  misc_feature 25: note = Core
  misc_feature 26..50: note = LE
acgcttgacaaacaagacagtcgctgtaacttccctttatccgctcccgg

SEQ ID NO: 32199 - DNA, 50 bp, unidentified
  source 1..50: mol_type = unassigned DNA; note = donor_2c76e6d
  misc_feature 1..24: note = RE
  misc_feature 25: note = Core
  misc_feature 26..50: note = LE
cttgcaaacagggcgggccatacgtatgggatggcccgcccttccgagga

SEQ ID NO: 32200 - DNA, 50 bp, unidentified
  source 1..50: mol_type = unassigned DNA; note = donor_2c7d6f5
  misc_feature 1..23: note = RE
  misc_feature 24..25: note = Core
  misc_feature 26..50: note = LE
gacagtgggggcgagtccatacataattggatggactcgcccaagccgag

SEQ ID NO: 32201 - DNA, 50 bp, unidentified
  source 1..50: mol_type = unassigned DNA; note = donor_2c7e91d
  misc_feature 1..23: note = RE
  misc_feature 24..25: note = Core
  misc_feature 26..50: note = LE
accgggaggttgccaaagggtgtctgatggcactaccctcctgagtcatg

SEQ ID NO: 32202 - DNA, 50 bp, unidentified
  source 1..50: mol_type = unassigned DNA; note = donor_2c80cb2
  misc_feature 1..24: note = RE
  misc_feature 25: note = Core
  misc_feature 26..50: note = LE
tgcaggccagcggcggaccatacataataagatggtccgccgcttgcatc

SEQ ID NO: 32203 - DNA, 50 bp, unidentified
  source 1..50: mol_type = unassigned DNA; note = donor_2c82f6b
  misc_feature 1..22: note = RE
  misc_feature 23..25: note = Core
  misc_feature 26..50: note = LE
tatcttgaaaataattagtaggtttcgtactatataagtatgaggagtta

SEQ ID NO: 32204 - DNA, 50 bp, unidentified
  source 1..50: mol_type = unassigned DNA; note = donor_2c87113
  misc_feature 1..22: note = RE
  misc_feature 23..25: note = Core
  misc_feature 26..50: note = LE
catcaagggcggcaaccccagaagatgggatggttgccgccctccccaga

SEQ ID NO: 32205 - DNA, 50 bp, unidentified; identical to SEQ ID NO: 31930
  source 1..50: mol_type = unassigned DNA; note = donor_2c888ce
  misc_feature 1..23: note = RE
  misc_feature 24..25: note = Core
  misc_feature 26..50: note = LE

SEQ ID NO: 32206 - DNA, 50 bp, unidentified
  source 1..50: mol_type = unassigned DNA; note = donor_2c8958e
  misc_feature 1..22: note = RE
  misc_feature 23..25: note = Core
  misc_feature 26..50: note = LE
cagcgatggggccgtccacagatgatgttgtggacggcccctgtgtccgg

SEQ ID NO: 32207 - DNA, 50 bp, unidentified
  source 1..50: mol_type = unassigned DNA; note = donor_2c8d888
  misc_feature 1..23: note = RE
  misc_feature 24..25: note = Core
  misc_feature 26..50: note = LE
gacgcccaacggcccattacggaagatgcggtaatgggcctctgccggaa

SEQ ID NO: 32208 - DNA, 50 bp, unidentified
  source 1..50: mol_type = unassigned DNA; note = donor_2c900b2
  misc_feature 1..23: note = RE
  misc_feature 24..25: note = Core
  misc_feature 26..50: note = LE
gttgacaagggggagtccacataagataattggactcccccaactcctag

SEQ ID NO: 32209 - DNA, 50 bp, unidentified; identical to SEQ ID NO: 30383
  source 1..50: mol_type = unassigned DNA; note = donor_2c924f5
  misc_feature 1..23: note = RE
  misc_feature 24..25: note = Core
  misc_feature 26..50: note = LE

SEQ ID NO: 32210 - DNA, 50 bp, unidentified
  source 1..50: mol_type = unassigned DNA; note = donor_2c973c6
  misc_feature 1..24: note = RE
  misc_feature 25: note = Core
  misc_feature 26..50: note = LE
gctttacgaaaaccatagaagcaccgttacctttttcatgacgccggtgt

SEQ ID NO: 32211 - DNA, 50 bp, unidentified
  source 1..50: mol_type = unassigned DNA; note = donor_2c9ca5c
  misc_feature 1..23: note = RE
  misc_feature 24..25: note = Core
  misc_feature 26..50: note = LE
gcaaaagtcaggctgaccatagattaataagatggtcagcctgaccgaaa

SEQ ID NO: 32212 - DNA, 50 bp, unidentified
  source 1..50: mol_type = unassigned DNA; note = donor_2ca1b3d
  misc_feature 1..22: note = RE
  misc_feature 23..25: note = Core
  misc_feature 26..50: note = LE
aatgttgacaaactattagctggttcgtattataaggtcagccagatatt

SEQ ID NO: 32213 - DNA, 50 bp, unidentified
  source 1..50: mol_type = unassigned DNA; note = donor_2ca25ad
  misc_feature 1..24: note = RE
  misc_feature 25: note = Core
  misc_feature 26..50: note = LE
gggcataccgggggcgtccatgtacaatgggatggacgcccccacccgat

SEQ ID NO: 32214 - DNA, 50 bp, unidentified
  source 1..50: mol_type = unassigned DNA; note = donor_2ca77b8
  misc_feature 1..24: note = RE
  misc_feature 25: note = Core
  misc_feature 26..50: note = LE
atgttgacaagatattagctggtttcgtattatgaggtcagccagttttt

SEQ ID NO: 32215 - DNA, 50 bp, unidentified
  source 1..50: mol_type = unassigned DNA; note = donor_2ca9ee0
  misc_feature 1..23: note = RE
  misc_feature 24..25: note = Core
  misc_feature 26..50: note = LE
agcctgcttgaccaaaacggatacttgtcttatgactttctgtgcccgat

SEQ ID NO: 32216 - DNA, 50 bp, unidentified
  source 1..50: mol_type = unassigned DNA; note = donor_2cae2cd
  misc_feature 1..24: note = RE
  misc_feature 25: note = Core
  misc_feature 26..50: note = LE
ttgcaaataggaggagtccatatacaatggtatggactcctcctccccta

SEQ ID NO: 32217 - DNA, 50 bp, unidentified
  source 1..50: mol_type = unassigned DNA; note = donor_2cbc968
  misc_feature 1..23: note = RE
  misc_feature 24..25: note = Core
  misc_feature 26..50: note = LE
cttgacctgaacctccccatgtgagatcccatggggaggtggatagcgac

SEQ ID NO: 32218 - DNA, 50 bp, unidentified
  source 1..50: mol_type = unassigned DNA; note = donor_2cbfcd0
  misc_feature 1..24: note = RE
  misc_feature 25: note = Core
  misc_feature 26..50: note = LE
tggcaaactgggggcgtccatgtacaatgggatggacgcccccaaccaaa

SEQ ID NO: 32219 - DNA, 50 bp, unidentified
  source 1..50: mol_type = unassigned DNA; note = donor_2cd403a
  misc_feature 1..22: note = RE
  misc_feature 23..25: note = Core
  misc_feature 26..50: note = LE
catcaggggcggcaaccagagaagatgggatggttgccgccctccccaga

SEQ ID NO: 32220 - DNA, 50 bp, unidentified
  source 1..50: mol_type = unassigned DNA; note = donor_2cd62ba
  misc_feature 1..23: note = RE
  misc_feature 24..25: note = Core
  misc_feature 26..50: note = LE
tcgggagcccaaaatcacagttgcttgtgtcttgaaaatgtgccaaaaag

SEQ ID NO: 32221 - DNA, 50 bp, unidentified
  source 1..50: mol_type = unassigned DNA; note = donor_2cdd456
  misc_feature 1..23: note = RE
  misc_feature 24..25: note = Core
  misc_feature 26..50: note = LE
acaggtgaattcttgatagttgactcctaccatgaatttgtatagaatgg

SEQ ID NO: 32222 - DNA, 50 bp, unidentified
  source 1..50: mol_type = unassigned DNA; note = donor_2cdedd8
  misc_feature 1..23: note = RE
  misc_feature 24..25: note = Core
  misc_feature 26..50: note = LE
ttgcttgacaattcatagttggtcttgtatgatatagtcagtgactaaaa

SEQ ID NO: 32223 - DNA, 50 bp, unidentified
  source 1..50: mol_type = unassigned DNA; note = donor_2ce7409
  misc_feature 1..23: note = RE
  misc_feature 24..25: note = Core
  misc_feature 26..50: note = LE
gcatgaaacggggcatccacacatgatggagtggatgcccctcctgccgg

SEQ ID NO: 32224 - DNA, 50 bp, unidentified
  source 1..50: mol_type = unassigned DNA; note = donor_2cfcec2
  misc_feature 1..23: note = RE
  misc_feature 24..25: note = Core
  misc_feature 26..50: note = LE
aagcttgaccgtgaacagagtatcttgtatgttgaccctacacccaacga

SEQ ID NO: 32225 - DNA, 50 bp, unidentified
  source 1..50: mol_type = unassigned DNA; note = donor_2d01866
  misc_feature 1..23: note = RE
  misc_feature 24..25: note = Core
  misc_feature 26..50: note = LE
gcattgaaaggggcgtccacacatgatggggtggatgccccacccggcgg

SEQ ID NO: 32226 - DNA, 50 bp, unidentified
  source 1..50: mol_type = unassigned DNA; note = donor_2d07510
  misc_feature 1..21: note = RE
  misc_feature 22..25: note = Core
  misc_feature 26..50: note = LE
ccttgacttcatatagctggtctcctatctttaagtcgttgcatttttaa

SEQ ID NO: 32227 - DNA, 50 bp, unidentified
  source 1..50: mol_type = unassigned DNA; note = donor_2d08efb
  misc_feature 1..24: note = RE
  misc_feature 25: note = Core
  misc_feature 26..50: note = LE
tggaaatatagtaaacctagaatacctttggttaagcaaagataatatct

SEQ ID NO: 32228 - DNA, 50 bp, unidentified; identical to SEQ ID NO: 30487
  source 1..50: mol_type = unassigned DNA; note = donor_2d121d6
  misc_feature 1..23: note = RE
  misc_feature 24..25: note = Core
  misc_feature 26..50: note = LE

SEQ ID NO: 32229 - DNA, 50 bp, unidentified
  source 1..50: mol_type = unassigned DNA; note = donor_2d12cb6
  misc_feature 1..23: note = RE
  misc_feature 24..25: note = Core
  misc_feature 26..50: note = LE
gacccaccccgcacgtgggatgtctaatgggtgtgtcccggtcgtcgtga

SEQ ID NO: 32230 - DNA, 50 bp, unidentified; identical to SEQ ID NO: 30418
  source 1..50: mol_type = unassigned DNA; note = donor_2d1cf9d
  misc_feature 1..23: note = RE
  misc_feature 24..25: note = Core
  misc_feature 26..50: note = LE

SEQ ID NO: 32231 - DNA, 50 bp, unidentified
  source 1..50: mol_type = unassigned DNA; note = donor_2d1f882
  misc_feature 1..24: note = RE
  misc_feature 25: note = Core
  misc_feature 26..50: note = LE
ttgcaaaaggggacggttcatatataatgtaatgaaccgtccccaccctc

SEQ ID NO: 32232 - DNA, 50 bp, unidentified; identical to SEQ ID NO: 30383
  source 1..50: mol_type = unassigned DNA; note = donor_2d21ebe
  misc_feature 1..23: note = RE
  misc_feature 24..25: note = Core
  misc_feature 26..50: note = LE

SEQ ID NO: 32233 - DNA, 50 bp, unidentified
  source 1..50: mol_type = unassigned DNA; note = donor_2d24103
  misc_feature 1..24: note = RE
  misc_feature 25: note = Core
  misc_feature 26..50: note = LE
cgtaccacttgacataggagcgtcactcagttcagaatacgcctcgaacg

SEQ ID NO: 32234 - DNA, 50 bp, unidentified
  source 1..50: mol_type = unassigned DNA; note = donor_2d254e8
  misc_feature 1..23: note = RE
  misc_feature 24..25: note = Core
  misc_feature 26..50: note = LE
ccgcttgactcgctagacggttacttgtatgtttaagtctgaccagtacg

SEQ ID NO: 32235 - DNA, 50 bp, unidentified
  source 1..50: mol_type = unassigned DNA; note = donor_2d25dc5
  misc_feature 1..24: note = RE
  misc_feature 25: note = Core
  misc_feature 26..50: note = LE
tgcagcacggcgacggaccatacataatggtatggtccgtcgcctcaagc

SEQ ID NO: 32236 - DNA, 50 bp, unidentified
  source 1..50: mol_type = unassigned DNA; note = donor_2d2c35a
  misc_feature 1..23: note = RE
  misc_feature 24..25: note = Core
  misc_feature 26..50: note = LE
ttaattgaaaatcaacacagaatctcctatgtttgcaaagttataaattt

SEQ ID NO: 32237 - DNA, 50 bp, unidentified
  source 1..50: mol_type = unassigned DNA; note = donor_2d3464c
  misc_feature 1..22: note = RE
  misc_feature 23..25: note = Core
  misc_feature 26..50: note = LE
cgcttgactctcaacagagtatcttgtatgttgaagaagaagacgcgggg

SEQ ID NO: 32238 - DNA, 50 bp, unidentified; identical to SEQ ID NO: 30449
  source 1..50: mol_type = unassigned DNA; note = donor_2d47fef
  misc_feature 1..24: note = RE
  misc_feature 25: note = Core
  misc_feature 26..50: note = LE

SEQ ID NO: 32239 - DNA, 50 bp, unidentified
  source 1..50: mol_type = unassigned DNA; note = donor_2d4e5c1
  misc_feature 1..23: note = RE
  misc_feature 24..25: note = Core
  misc_feature 26..50: note = LE
gatcttgacttcatatagttagtcttgtatgatgaattacatagggaaca

SEQ ID NO: 32240 - DNA, 50 bp, unidentified
  source 1..50: mol_type = unassigned DNA; note = donor_2d5550f
  misc_feature 1..21: note = RE
  misc_feature 22..25: note = Core
  misc_feature 26..50: note = LE
aggcggcttgacatagggcttctcactggtccaccatcgtcgtgtcgacg

SEQ ID NO: 32241 - DNA, 50 bp, unidentified
  source 1..50: mol_type = unassigned DNA; note = donor_2d632f4
  misc_feature 1..23: note = RE
  misc_feature 24..25: note = Core
  misc_feature 26..50: note = LE
atgcttgactcccaagagagaatcttgtatcttccgaaattgagcgtgag

SEQ ID NO: 32242 - DNA, 50 bp, unidentified
  source 1..50: mol_type = unassigned DNA; note = donor_2d67245
  misc_feature 1..24: note = RE
  misc_feature 25: note = Core
  misc_feature 26..50: note = LE
tgcggcaaagcggcggaccatacataatgggatggtccgccgcctttgac

SEQ ID NO: 32243 - DNA, 50 bp, unidentified; identical to SEQ ID NO: 31096
  source 1..50: mol_type = unassigned DNA; note = donor_2d68738
  misc_feature 1..23: note = RE
  misc_feature 24..25: note = Core
  misc_feature 26..50: note = LE

SEQ ID NO: 32244 - DNA, 50 bp, unidentified
  source 1..50: mol_type = unassigned DNA; note = donor_2d69c17
  misc_feature 1..23: note = RE
  misc_feature 24..25: note = Core
  misc_feature 26..50: note = LE
gaccccaaccggccgattagagaagatggggtaatcggctggcgttaatt

SEQ ID NO: 32245 - DNA, 50 bp, unidentified
  source 1..50: mol_type = unassigned DNA; note = donor_2d6f62f
  misc_feature 1..24: note = RE
  misc_feature 25: note = Core
  misc_feature 26..50: note = LE
tgcagtccggcggcggaccatacataatgagatggtccgccgccgagtag

SEQ ID NO: 32246 - DNA, 50 bp, unidentified
  source 1..50: mol_type = unassigned DNA; note = donor_2d738aa
  misc_feature 1..23: note = RE
  misc_feature 24..25: note = Core
  misc_feature 26..50: note = LE
gcaaaccgggaggagaccatatacgatgagatggtctcctccctccttta

SEQ ID NO: 32247 - DNA, 50 bp, unidentified
  source 1..50: mol_type = unassigned DNA; note = donor_2d77968
  misc_feature 1..24: note = RE
  misc_feature 25: note = Core
  misc_feature 26..50: note = LE
ggctggttgacaacagaggggagcctactagagacttcccgcaggaccgg

SEQ ID NO: 32248 - DNA, 50 bp, unidentified
  source 1..50: mol_type = unassigned DNA; note = donor_2d7c6aa
  misc_feature 1..24: note = RE
  misc_feature 25: note = Core
  misc_feature 26..50: note = LE
accgcttgacgaaagccataggggcgttaccgttttcgtggccccgcaat

SEQ ID NO: 32249 - DNA, 50 bp, unidentified
  source 1..50: mol_type = unassigned DNA; note = donor_2d9ff80
  misc_feature 1..23: note = RE
  misc_feature 24..25: note = Core
  misc_feature 26..50: note = LE
ctacttgacttttattagcaggtctattacaatatatttggacaaggaag

SEQ ID NO: 32250 - DNA, 50 bp, unidentified
  source 1..50: mol_type = unassigned DNA; note = donor_2da15f6
  misc_feature 1..21: note = RE
  misc_feature 22..25: note = Core
  misc_feature 26..50: note = LE
ggcttgacttcgtcattgagactccgtaagttgttgggtggcccgggagg

SEQ ID NO: 32251 - DNA, 50 bp, unidentified
  source 1..50: mol_type = unassigned DNA; note = donor_2da1b81
  misc_feature 1..23: note = RE
  misc_feature 24..25: note = Core
  misc_feature 26..50: note = LE
tgtggtgaactcatgatagttgactcctaccatgagttcgtgtataagac

SEQ ID NO: 32252 - DNA, 50 bp, unidentified
  source 1..50: mol_type = unassigned DNA; note = donor_2da463d
  misc_feature 1..22: note = RE
  misc_feature 23..25: note = Core
  misc_feature 26..50: note = LE
caccttgacttttgttagcaggtttagtaccataaatagtgtaagaaaga

SEQ ID NO: 32253 - DNA, 50 bp, unidentified
  source 1..50: mol_type = unassigned DNA; note = donor_2da4e27
  misc_feature 1..23: note = RE
  misc_feature 24..25: note = Core
  misc_feature 26..50: note = LE
cgcctgagccaacaacacagttgcttgtatgtcgggaaaggagcattgtg

SEQ ID NO: 32254 - DNA, 50 bp, unidentified
  source 1..50: mol_type = unassigned DNA; note = donor_2da82a9
  misc_feature 1..23: note = RE
  misc_feature 24..25: note = Core
  misc_feature 26..50: note = LE
tgacatcaaaaatcctgggatgtctaatggcttctgccgggactgtttgg

SEQ ID NO: 32255 - DNA, 50 bp, unidentified
  source 1..50: mol_type = unassigned DNA; note = donor_2daea0f
  misc_feature 1..24: note = RE
  misc_feature 25: note = Core
  misc_feature 26..50: note = LE
ggggcttgacgaaaaacatagaggccccgttatgtttttggtggtcccgc

SEQ ID NO: 32256 - DNA, 50 bp, unidentified; identical to SEQ ID NO: 30451
  source 1..50: mol_type = unassigned DNA; note = donor_2db412c
  misc_feature 1..23: note = RE
  misc_feature 24..25: note = Core
  misc_feature 26..50: note = LE

SEQ ID NO: 32257 - DNA, 50 bp, unidentified
  source 1..50: mol_type = unassigned DNA; note = donor_2db5655
  misc_feature 1..24: note = RE
  misc_feature 25: note = Core
  misc_feature 26..50: note = LE
tgcaaaaacagagcagaccatacataatgggatggtctgctcctccctct

SEQ ID NO: 32258 - DNA, 50 bp, unidentified
  source 1..50: mol_type = unassigned DNA; note = donor_2dc78e8
  misc_feature 1..23: note = RE
  misc_feature 24..25: note = Core
  misc_feature 26..50: note = LE
ccgcttgactttttattagtagactcctaatataaaagtgtagtggttat

SEQ ID NO: 32259 - DNA, 50 bp, unidentified
  source 1..50: mol_type = unassigned DNA; note = donor_2dd616f
  misc_feature 1..22: note = RE
  misc_feature 23..25: note = Core
  misc_feature 26..50: note = LE
ctattgacaattaatagttagtcttgtataatatatttaggtttttaaaa

SEQ ID NO: 32260 - DNA, 50 bp, unidentified
  source 1..50: mol_type = unassigned DNA; note = donor_2dd856f
  misc_feature 1..21: note = RE
  misc_feature 22..25: note = Core
  misc_feature 26..50: note = LE
cggcggcttgacacagggctactcactggtgcaccatccttatgtcggca

SEQ ID NO: 32261 - DNA, 50 bp, unidentified
  source 1..50: mol_type = unassigned DNA; note = donor_2de034a
  misc_feature 1..24: note = RE
  misc_feature 25: note = Core
  misc_feature 26..50: note = LE
tggcaaaccgggggcgaccatctataatgggatggtcgcccctccctaaa

SEQ ID NO: 32262 - DNA, 50 bp, unidentified; identical to SEQ ID NO: 31272
  source 1..50: mol_type = unassigned DNA; note = donor_2de6584
  misc_feature 1..24: note = RE
  misc_feature 25: note = Core
  misc_feature 26..50: note = LE

SEQ ID NO: 32263 - DNA, 50 bp, unidentified; identical to SEQ ID NO: 30869
  source 1..50: mol_type = unassigned DNA; note = donor_2df1b26
  misc_feature 1..24: note = RE
  misc_feature 25: note = Core
  misc_feature 26..50: note = LE

SEQ ID NO: 32264 - DNA, 50 bp, unidentified
  source 1..50: mol_type = unassigned DNA; note = donor_2df1ccf
  misc_feature 1..24: note = RE
  misc_feature 25: note = Core
  misc_feature 26..50: note = LE
aatgcttgcaaatgacatagaatagctctagtcttgcacggtcgataagg

SEQ ID NO: 32265 - DNA, 50 bp, unidentified
  source 1..50: mol_type = unassigned DNA; note = donor_2df4159
  misc_feature 1..23: note = RE
  misc_feature 24..25: note = Core
  misc_feature 26..50: note = LE
ctcggtgaggttcaagacggtatcttgtatctcgactatcgctccgtcag

SEQ ID NO: 32266 - DNA, 50 bp, unidentified
  source 1..50: mol_type = unassigned DNA; note = donor_2dfdce6
  misc_feature 1..23: note = RE
  misc_feature 24..25: note = Core
  misc_feature 26..50: note = LE
cctattgactttttatttgcaggctactacaatgtatttatggttaatat

SEQ ID NO: 32267 - DNA, 50 bp, unidentified
  source 1..50: mol_type = unassigned DNA; note = donor_2e04ae8
  misc_feature 1..23: note = RE
  misc_feature 24..25: note = Core
  misc_feature 26..50: note = LE
gcattcgagggagcgtccacacacgatggggtggacgctcccactcaaca

SEQ ID NO: 32268 - DNA, 50 bp, unidentified
  source 1..50: mol_type = unassigned DNA; note = donor_2e0b09b
  misc_feature 1..23: note = RE
  misc_feature 24..25: note = Core
  misc_feature 26..50: note = LE
gactgggaaaggcccgttacagaagatggggtaacgggcggctcctgcgc

SEQ ID NO: 32269 - DNA, 50 bp, unidentified
  source 1..50: mol_type = unassigned DNA; note = donor_2e0d4a6
  misc_feature 1..23: note = RE
  misc_feature 24..25: note = Core
  misc_feature 26..50: note = LE
gctcttgacatttaaccgctggactcgtataatattttttgtgaggtttt

SEQ ID NO: 32270 - DNA, 50 bp, unidentified
  source 1..50: mol_type = unassigned DNA; note = donor_2e1556a
  misc_feature 1..21: note = RE
  misc_feature 22..25: note = Core
  misc_feature 26..50: note = LE
cgaaacgggggccgtccatacatgatggggtggacggcccccacccggca

SEQ ID NO: 32271 - DNA, 50 bp, unidentified
  source 1..50: mol_type = unassigned DNA; note = donor_2e19f59
  misc_feature 1..24: note = RE
  misc_feature 25: note = Core
  misc_feature 26..50: note = LE
tgcaaaacggcggcggaccatacatactgggatggtccgccgcctaagcc

SEQ ID NO: 32272 - DNA, 50 bp, unidentified
  source 1..50: mol_type = unassigned DNA; note = donor_2e25c89
  misc_feature 1..23: note = RE
  misc_feature 24..25: note = Core
  misc_feature 26..50: note = LE
agccgggggttgacagagggtgtctgatggctctaccttcctttcgcacg

SEQ ID NO: 32273 - DNA, 50 bp, unidentified; identical to SEQ ID NO: 30418
  source 1..50: mol_type = unassigned DNA; note = donor_2e2b6fa
  misc_feature 1..23: note = RE
  misc_feature 24..25: note = Core
  misc_feature 26..50: note = LE

SEQ ID NO: 32274 - DNA, 50 bp, unidentified
  source 1..50: mol_type = unassigned DNA; note = donor_2e2d8b4
  misc_feature 1..23: note = RE
  misc_feature 24..25: note = Core
  misc_feature 26..50: note = LE
aattcttggtcgtgtcctagatttcatttagatttgcaccagtcaagatt

SEQ ID NO: 32275 - DNA, 50 bp, unidentified
  source 1..50: mol_type = unassigned DNA; note = donor_2e443c5
  misc_feature 1..24: note = RE
  misc_feature 25: note = Core
  misc_feature 26..50: note = LE
tggcaaaacaggggcgaccatctataatggaatggtcgcccctactctaa

SEQ ID NO: 32276 - DNA, 50 bp, unidentified
  source 1..50: mol_type = unassigned DNA; note = donor_2e45d2e
  misc_feature 1..24: note = RE
  misc_feature 25: note = Core
  misc_feature 26..50: note = LE
cagcgtcttgacacagaagggagcctacttgtttcattgacctcaggacc

SEQ ID NO: 32277 - DNA, 50 bp, unidentified
  source 1..50: mol_type = unassigned DNA; note = donor_2e4efb6
  misc_feature 1..22: note = RE
  misc_feature 23..25: note = Core
  misc_feature 26..50: note = LE
agtcagttttcgtattatagttcattgtataatttttaatcgttatatat

SEQ ID NO: 32278 - DNA, 50 bp, unidentified
  source 1..50: mol_type = unassigned DNA; note = donor_2e554e2
  misc_feature 1..23: note = RE
  misc_feature 24..25: note = Core
  misc_feature 26..50: note = LE
atgcttgacgcgcaacagagaatcttgtatcttgcggggtgaggcgtgag

SEQ ID NO: 32279 - DNA, 50 bp, unidentified
  source 1..50: mol_type = unassigned DNA; note = donor_2e581ea
  misc_feature 1..24: note = RE
  misc_feature 25: note = Core
  misc_feature 26..50: note = LE
gcagcttgacacacaacataggggcgttaccttgttgacaggtccggatc

SEQ ID NO: 32280 - DNA, 50 bp, unidentified
  source 1..50: mol_type = unassigned DNA; note = donor_2e58e06
  misc_feature 1..22: note = RE
  misc_feature 23..25: note = Core
  misc_feature 26..50: note = LE
atgttgacaaactattagctggtttcgtattataaggtcagccagaaaat

SEQ ID NO: 32281 - DNA, 50 bp, unidentified
  source 1..50: mol_type = unassigned DNA; note = donor_2e69dd6
  misc_feature 1..23: note = RE
  misc_feature 24..25: note = Core
  misc_feature 26..50: note = LE
cgcaggcgggggccgtccacatatgatggggtggacggtccccgctcccg

SEQ ID NO: 32282 - DNA, 50 bp, unidentified
  source 1..50: mol_type = unassigned DNA; note = donor_2e6d70c
  misc_feature 1..23: note = RE
  misc_feature 24..25: note = Core
  misc_feature 26..50: note = LE
tttgttgcatactaacacagaatctcctatgtttgtaaaagaagttaatt

SEQ ID NO: 32283 - DNA, 50 bp, unidentified
  source 1..50: mol_type = unassigned DNA; note = donor_2e6f4e4
  misc_feature 1..23: note = RE
  misc_feature 24..25: note = Core
  misc_feature 26..50: note = LE
gcttccagggcggcaaccacagaagatggtatggttgccgccctccccat

SEQ ID NO: 32284 - DNA, 50 bp, unidentified
  source 1..50: mol_type = unassigned DNA; note = donor_2e7c6ae
  misc_feature 1..24: note = RE
  misc_feature 25: note = Core
  misc_feature 26..50: note = LE
ccgcgtcttgacacagaggggcgcctacttgtttcattgacgcacggccg

SEQ ID NO: 32285 - DNA, 50 bp, unidentified
  source 1..50: mol_type = unassigned DNA; note = donor_2e881e7
  misc_feature 1..24: note = RE
  misc_feature 25: note = Core
  misc_feature 26..50: note = LE
tggcaaaccgggggcgtccatgtacaatgggatggacgcccccacccgac

SEQ ID NO: 32286 - DNA, 50 bp, unidentified
  source 1..50: mol_type = unassigned DNA; note = donor_2e8b24b
  misc_feature 1..21: note = RE
  misc_feature 22..25: note = Core
  misc_feature 26..50: note = LE
caacttacgcacctgggatgtctaatgggtgttgatcggcgtgcctcgaa

SEQ ID NO: 32287 - DNA, 50 bp, unidentified
  source 1..50: mol_type = unassigned DNA; note = donor_2e8bb8e
  misc_feature 1..23: note = RE
  misc_feature 24..25: note = Core
  misc_feature 26..50: note = LE
tcgcttgactttcaagacagttgcttgtatcttccgatccgtcagtttcg

SEQ ID NO: 32288 - DNA, 50 bp, unidentified
  source 1..50: mol_type = unassigned DNA; note = donor_2e94eb4
  misc_feature 1..23: note = RE
  misc_feature 24..25: note = Core
  misc_feature 26..50: note = LE
ccaatccgggccgcccttagacgacatggggtaatcgcgggagcgagtcg

SEQ ID NO: 32289 - DNA, 50 bp, unidentified
  source 1..50: mol_type = unassigned DNA; note = donor_2e963d2
  misc_feature 1..23: note = RE
  misc_feature 24..25: note = Core
  misc_feature 26..50: note = LE
gacaccacaacgacatggggtgtctaatgggagctacggggccggggaat

SEQ ID NO: 32290 - DNA, 50 bp, unidentified
  source 1..50: mol_type = unassigned DNA; note = donor_2e9d52c
  misc_feature 1..23: note = RE
  misc_feature 24..25: note = Core
  misc_feature 26..50: note = LE
aggcttgacttctaatagttagtcttgtattatagagtagtagtgattaa

SEQ ID NO: 32291 - DNA, 50 bp, unidentified
  source 1..50: mol_type = unassigned DNA; note = donor_2ea7a81
  misc_feature 1..23: note = RE
  misc_feature 24..25: note = Core
  misc_feature 26..50: note = LE
tcacttgttttttatatagttagctggtatattataattgactcatttaa

SEQ ID NO: 32292 - DNA, 50 bp, unidentified
  source 1..50: mol_type = unassigned DNA; note = donor_2eac8f4
  misc_feature 1..23: note = RE
  misc_feature 24..25: note = Core
  misc_feature 26..50: note = LE
gctaggcgggggccatccacacatgatggggtggatggccccctaccggc

SEQ ID NO: 32293 - DNA, 50 bp, unidentified
  source 1..50: mol_type = unassigned DNA; note = donor_2eafdc4
  misc_feature 1..24: note = RE
  misc_feature 25: note = Core
  misc_feature 26..50: note = LE
tttgtcttgacttttcatagttggttgtatgataaaagtatagtaaatta

SEQ ID NO: 32294 - DNA, 50 bp, unidentified
  source 1..50: mol_type = unassigned DNA; note = donor_2eb24df
  misc_feature 1..23: note = RE
  misc_feature 24..25: note = Core
  misc_feature 26..50: note = LE
tcccttgacttttatttgcaggtctgatacaatatatttgaccgagaaag

SEQ ID NO: 32295 - DNA, 50 bp, unidentified
  source 1..50: mol_type = unassigned DNA; note = donor_2ebf921
  misc_feature 1..24: note = RE
  misc_feature 25: note = Core
  misc_feature 26..50: note = LE
aatgttgacagctattggctggtatcgtattatatggtcagtcagtcatt

SEQ ID NO: 32296 - DNA, 50 bp, unidentified
  source 1..50: mol_type = unassigned DNA; note = donor_2ec4b7f
  misc_feature 1..23: note = RE
  misc_feature 24..25: note = Core
  misc_feature 26..50: note = LE
agtattgactttttatttgcaggctactacaatatatttatgggtaatcc

SEQ ID NO: 32297 - DNA, 50 bp, unidentified
  source 1..50: mol_type = unassigned DNA; note = donor_2ec50b3
  misc_feature 1..23: note = RE
  misc_feature 24..25: note = Core
  misc_feature 26..50: note = LE
gctattgacttttaatagctggtctcgtataatatatttaaatttaattt

SEQ ID NO: 32298 - DNA, 50 bp, unidentified
  source 1..50: mol_type = unassigned DNA; note = donor_2ec7b73
  misc_feature 1..22: note = RE
  misc_feature 23..25: note = Core
  misc_feature 26..50: note = LE
caatacaggggccgtccacacatgatggtgtggacggccccattccccgg

SEQ ID NO: 32299 - DNA, 50 bp, unidentified
  source 1..50: mol_type = unassigned DNA; note = donor_2ed53b8
  misc_feature 1..23: note = RE
  misc_feature 24..25: note = Core
  misc_feature 26..50: note = LE
tgacatcgaaaagcctgggatgtctaatgggtttctgccgggtctctggg

SEQ ID NO: 32300 - DNA, 50 bp, unidentified
  source 1..50: mol_type = unassigned DNA; note = donor_2ee5ce1
  misc_feature 1..23: note = RE
  misc_feature 24..25: note = Core
  misc_feature 26..50: note = LE
taacttgacttttaatagttagtctcgtattatatagtagtagtttttag

SEQ ID NO: 32301 - DNA, 50 bp, unidentified
  source 1..50: mol_type = unassigned DNA; note = donor_2ef8b8a
  misc_feature 1..23: note = RE
  misc_feature 24..25: note = Core
  misc_feature 26..50: note = LE
gcatcacggacggcaaccacagaagatggggtggttgccgtcctccccag

SEQ ID NO: 32302 - DNA, 50 bp, unidentified
  source 1..50: mol_type = unassigned DNA; note = donor_2f09a15
  misc_feature 1..23: note = RE
  misc_feature 24..25: note = Core
  misc_feature 26..50: note = LE
cgcttgacagacagcattaggaatccctacgttgttccgcgggatgtggt

SEQ ID NO: 32303 - DNA, 50 bp, unidentified
  source 1..50: mol_type = unassigned DNA; note = donor_2f11435
  misc_feature 1..24: note = RE
  misc_feature 25: note = Core
  misc_feature 26..50: note = LE
ttggcaaacgggggcgaccatctataatggaatggtcgccccctctcaga

SEQ ID NO: 32304 - DNA, 50 bp, unidentified
  source 1..50: mol_type = unassigned DNA; note = donor_2f1658c
  misc_feature 1..23: note = RE
  misc_feature 24..25: note = Core
  misc_feature 26..50: note = LE
acaggtgcggcctttttcatagaagatgggatgaaaggggcgtaccttcc

SEQ ID NO: 32305 - DNA, 50 bp, unidentified
  source 1..50: mol_type = unassigned DNA; note = donor_2f22274
  misc_feature 1..23: note = RE
  misc_feature 24..25: note = Core
  misc_feature 26..50: note = LE
actgttgcgaggcaccatagaatcttgtatggtttcccggcgagtcttaa

SEQ ID NO: 32306 - DNA, 50 bp, unidentified
  source 1..50: mol_type = unassigned DNA; note = donor_2f222e7
  misc_feature 1..24: note = RE
  misc_feature 25: note = Core
  misc_feature 26..50: note = LE
gcaaaagtgcgtcgggtccatacatactgagatggacccggcgccacctt

SEQ ID NO: 32307 - DNA, 50 bp, unidentified
  source 1..50: mol_type = unassigned DNA; note = donor_2f2e30c
  misc_feature 1..20: note = RE
  misc_feature 21..25: note = Core
  misc_feature 26..50: note = LE
cttgacatcaacattgagagtccttaagttcgtaggtgcagttacttcgc

SEQ ID NO: 32308 - DNA, 50 bp, unidentified
  source 1..50: mol_type = unassigned DNA; note = donor_2f3bdbb
  misc_feature 1..24: note = RE
  misc_feature 25: note = Core
  misc_feature 26..50: note = LE
tggcaaaccgggggcgaccatctataatgggatggtcgcccccttctgaa

SEQ ID NO: 32309 - DNA, 50 bp, unidentified
  source 1..50: mol_type = unassigned DNA; note = donor_2f3d8c9
  misc_feature 1..22: note = RE
  misc_feature 23..25: note = Core
  misc_feature 26..50: note = LE
actgttgacatcccttagcgagtttagtacgctgtaagtgtagtcggaca

SEQ ID NO: 32310 - DNA, 50 bp, unidentified
  source 1..50: mol_type = unassigned DNA; note = donor_2f48f9e
  misc_feature 1..23: note = RE
  misc_feature 24..25: note = Core
  misc_feature 26..50: note = LE
ctttgcaggagccatccacacaggatggtgtggatggctcctgctccatc

SEQ ID NO: 32311 - DNA, 50 bp, unidentified
  source 1..50: mol_type = unassigned DNA; note = donor_2f4e71f
  misc_feature 1..23: note = RE
  misc_feature 24..25: note = Core
  misc_feature 26..50: note = LE
ttgcttgacttttaatagttagtctcgtataatataaaagtagtagtttt

SEQ ID NO: 32312 - DNA, 50 bp, unidentified
  source 1..50: mol_type = unassigned DNA; note = donor_2f55761
  misc_feature 1..22: note = RE
  misc_feature 23..25: note = Core
  misc_feature 26..50: note = LE
ctacttgacttttcttagcaggtctattacaataaaattggacagggaag

SEQ ID NO: 32313 - DNA, 50 bp, unidentified
  source 1..50: mol_type = unassigned DNA; note = donor_2f5879b
  misc_feature 1..24: note = RE
  misc_feature 25: note = Core
  misc_feature 26..50: note = LE
tgcagtcaggcggcggaccatacataatgagatggtccgccgccttgatc

SEQ ID NO: 32314 - DNA, 50 bp, unidentified
  source 1..50: mol_type = unassigned DNA; note = donor_2f5f7d5
  misc_feature 1..20: note = RE
  misc_feature 21..25: note = Core
  misc_feature 26..50: note = LE
ggggggttgacactgggtgtctcattgggcatcctccccaccttgatcgc

SEQ ID NO: 32315 - DNA, 50 bp, unidentified
  source 1..50: mol_type = unassigned DNA; note = donor_2f6e78e
  misc_feature 1..23: note = RE
  misc_feature 24..25: note = Core
  misc_feature 26..50: note = LE
gcgcccgcgggccgttccatacatgatgcggtggaacggcccgctccggc

SEQ ID NO: 32316 - DNA, 50 bp, unidentified
  source 1..50: mol_type = unassigned DNA; note = donor_2f7ba2d
  misc_feature 1..22: note = RE
  misc_feature 23..25: note = Core
  misc_feature 26..50: note = LE
acccttgacgaacatcacggtagattgcatgatggggtcgccatcctgtt

SEQ ID NO: 32317 - DNA, 50 bp, unidentified
  source 1..50: mol_type = unassigned DNA; note = donor_2f7d692
  misc_feature 1..23: note = RE
  misc_feature 24..25: note = Core
  misc_feature 26..50: note = LE
cctcttgactttttatagctggtctcgtataatgtatttacggtgttttt

SEQ ID NO: 32318 - DNA, 50 bp, unidentified
  source 1..50: mol_type = unassigned DNA; note = donor_2f7e062
  misc_feature 1..23: note = RE
  misc_feature 24..25: note = Core
  misc_feature 26..50: note = LE
tggggttgattttaatagttaatcttgtattatagagtagtagttattag

SEQ ID NO: 32319 - DNA, 50 bp, unidentified
  source 1..50: mol_type = unassigned DNA; note = donor_2f7e236
  misc_feature 1..24: note = RE
  misc_feature 25: note = Core
  misc_feature 26..50: note = LE
tgcaaccgggtcagactccatatacaatgggatggagtccgacccaccct

SEQ ID NO: 32320 - DNA, 50 bp, unidentified
  source 1..50: mol_type = unassigned DNA; note = donor_2f842cc
  misc_feature 1..22: note = RE
  misc_feature 23..25: note = Core
  misc_feature 26..50: note = LE
taaacctattgacatagaaggtcttatctgttaaactcaaattagatagc

SEQ ID NO: 32321 - DNA, 50 bp, unidentified
  source 1..50: mol_type = unassigned DNA; note = donor_2f89c97
  misc_feature 1..24: note = RE
  misc_feature 25: note = Core
  misc_feature 26..50: note = LE
tgcattccggcggcggaccatacataatgagatggtccgccgcttgatct

SEQ ID NO: 32322 - DNA, 50 bp, unidentified
  source 1..50: mol_type = unassigned DNA; note = donor_2f8aecc
  misc_feature 1..24: note = RE
  misc_feature 25: note = Core
  misc_feature 26..50: note = LE
tgacaaaccgggggcgcccatgtacaatgggatgggcgcccccacccgag

SEQ ID NO: 32323 - DNA, 50 bp, unidentified
  source 1..50: mol_type = unassigned DNA; note = donor_2f8e308
  misc_feature 1..24: note = RE
  misc_feature 25: note = Core
  misc_feature 26..50: note = LE
cgccggttgacaacagaggggagcctactagacgattcccgtaggaccgg

SEQ ID NO: 32324 - DNA, 50 bp, unidentified
  source 1..50: mol_type = unassigned DNA; note = donor_2f8f168
  misc_feature 1..22: note = RE
  misc_feature 23..25: note = Core
  misc_feature 26..50: note = LE
caatgagggaggagaccatatacgatgagatggtctcctccctctccctt

SEQ ID NO: 32325 - DNA, 50 bp, unidentified; identical to SEQ ID NO: 30508
  source 1..50: mol_type = unassigned DNA; note = donor_2f8ff12
  misc_feature 1..24: note = RE
  misc_feature 25: note = Core
  misc_feature 26..50: note = LE

SEQ ID NO: 32326 - DNA, 50 bp, unidentified
  source 1..50: mol_type = unassigned DNA; note = donor_2f9196a
  misc_feature 1..24: note = RE
  misc_feature 25: note = Core
  misc_feature 26..50: note = LE
tcttgacaatggtcatttcataacataatatgaaatgacctcctagttgt

SEQ ID NO: 32327 - DNA, 50 bp, unidentified
  source 1..50: mol_type = unassigned DNA; note = donor_2f94dbf
  misc_feature 1..23: note = RE
  misc_feature 24..25: note = Core
  misc_feature 26..50: note = LE
ttatttggaatttaacatagttcgtcgtacatttgtacggttaataaatt

SEQ ID NO: 32328 - DNA, 50 bp, unidentified
  source 1..50: mol_type = unassigned DNA; note = donor_2f9b643
  misc_feature 1..24: note = RE
  misc_feature 25: note = Core
  misc_feature 26..50: note = LE
tggcataccgggggcgtccatgtacaatgggatggacgcccccaccctaa

SEQ ID NO: 32329 - DNA, 50 bp, unidentified; identical to SEQ ID NO: 30717
  source 1..50: mol_type = unassigned DNA; note = donor_2fa49d1
  misc_feature 1..23: note = RE
  misc_feature 24..25: note = Core
  misc_feature 26..50: note = LE

SEQ ID NO: 32330 - DNA, 50 bp, unidentified
  source 1..50: mol_type = unassigned DNA; note = donor_2fab35c
  misc_feature 1..23: note = RE
  misc_feature 24..25: note = Core
  misc_feature 26..50: note = LE
ggcttgacgcccgctattgggaagtcctaccgttctagcgcgggcccacg

SEQ ID NO: 32331 - DNA, 50 bp, unidentified
  source 1..50: mol_type = unassigned DNA; note = donor_2fadedc
  misc_feature 1..23: note = RE
  misc_feature 24..25: note = Core
  misc_feature 26..50: note = LE
cccggggctaaacaagacggtatcttgtatctcgactaccaccctctcaa

SEQ ID NO: 32332 - DNA, 50 bp, unidentified
  source 1..50: mol_type = unassigned DNA; note = donor_2fb0cac
  misc_feature 1..23: note = RE
  misc_feature 24..25: note = Core
  misc_feature 26..50: note = LE
gcatccaacgggccgtccacacatgttggtgtggacggccccacggcatc

SEQ ID NO: 32333 - DNA, 50 bp, unidentified
  source 1..50: mol_type = unassigned DNA; note = donor_2fb255a
  misc_feature 1..23: note = RE
  misc_feature 24..25: note = Core
  misc_feature 26..50: note = LE
gcaaggagggagccgtccacatatgttggagtggacggctcccgaaccgc

SEQ ID NO: 32334 - DNA, 50 bp, unidentified; identical to SEQ ID NO: 30386
  source 1..50: mol_type = unassigned DNA; note = donor_2fb7d9a
  misc_feature 1..23: note = RE
  misc_feature 24..25: note = Core
  misc_feature 26..50: note = LE

SEQ ID NO: 32335 - DNA, 50 bp, unidentified
  source 1..50: mol_type = unassigned DNA; note = donor_2fc30d9
  misc_feature 1..23: note = RE
  misc_feature 24..25: note = Core
  misc_feature 26..50: note = LE
atacttgactcttaatagttagtcttgtattatagagtagtagttattag

SEQ ID NO: 32336 - DNA, 50 bp, unidentified
  source 1..50: mol_type = unassigned DNA; note = donor_2fcb763
  misc_feature 1..23: note = RE
  misc_feature 24..25: note = Core
  misc_feature 26..50: note = LE
ttgacttcgagcatgcccatgtgagatcccatgggcgtccggctagcgac

SEQ ID NO: 32337 - DNA, 50 bp, unidentified
  source 1..50: mol_type = unassigned DNA; note = donor_2fcd1cd
  misc_feature 1..24: note = RE
  misc_feature 25: note = Core
  misc_feature 26..50: note = LE
tgcagatccggggaagtccttatagaatgaaagggacttcccctactcga

SEQ ID NO: 32338 - DNA, 50 bp, unidentified
  source 1..50: mol_type = unassigned DNA; note = donor_2fdc614
  misc_feature 1..23: note = RE
  misc_feature 24..25: note = Core
  misc_feature 26..50: note = LE
agacttgacttttaatagttagtctcgtattatatagtagtagtttttag

SEQ ID NO: 32339 - DNA, 50 bp, unidentified
  source 1..50: mol_type = unassigned DNA; note = donor_2fdcd35
  misc_feature 1..23: note = RE
  misc_feature 24..25: note = Core
  misc_feature 26..50: note = LE
agggttgacacttaatagttaatcttgtattatagagtagtagttattag

SEQ ID NO: 32340 - DNA, 50 bp, unidentified
  source 1..50: mol_type = unassigned DNA; note = donor_2fdf6df
  misc_feature 1..24: note = RE
  misc_feature 25: note = Core
  misc_feature 26..50: note = LE
tgcacgaagggggccgtccacacatgatgcggtggacggcccctgagcgg

SEQ ID NO: 32341 - DNA, 50 bp, unidentified
  source 1..50: mol_type = unassigned DNA; note = donor_2ff2c9a
  misc_feature 1..23: note = RE
  misc_feature 24..25: note = Core
  misc_feature 26..50: note = LE
gcaataacgaggtggaccatacattaattagatggtccacctcaccctaa

SEQ ID NO: 32342 - DNA, 50 bp, unidentified
  source 1..50: mol_type = unassigned DNA; note = donor_2ff39a9
  misc_feature 1..22: note = RE
  misc_feature 23..25: note = Core
  misc_feature 26..50: note = LE
ttattgacaatctattagctggtttcgtattataaggtcagtcagagaaa

SEQ ID NO: 32343 - DNA, 50 bp, unidentified
  source 1..50: mol_type = unassigned DNA; note = donor_2ff6502
  misc_feature 1..23: note = RE
  misc_feature 24..25: note = Core
  misc_feature 26..50: note = LE
tcgcttgacgcgcgtcacggtatcttgtatgttgggcactcatcgcggac

SEQ ID NO: 32344 - DNA, 50 bp, unidentified
  source 1..50: mol_type = unassigned DNA; note = donor_3007d0c
  misc_feature 1..23: note = RE
  misc_feature 24..25: note = Core
  misc_feature 26..50: note = LE
gcatttacgggggcgtccacacacgatggggtggacgccccctctgacgg

SEQ ID NO: 32345 - DNA, 50 bp, unidentified
  source 1..50: mol_type = unassigned DNA; note = donor_3007d92
  misc_feature 1..24: note = RE
  misc_feature 25: note = Core
  misc_feature 26..50: note = LE
tggcaaaccgggggcgaccatctataatgggatggtcgcccccttctgag

SEQ ID NO: 32346 - DNA, 50 bp, unidentified
  source 1..50: mol_type = unassigned DNA; note = donor_300f6c1
  misc_feature 1..23: note = RE
  misc_feature 24..25: note = Core
  misc_feature 26..50: note = LE
gcattcacgcggcggaccatacataatgggatggtccgccgcgatagccc

SEQ ID NO: 32347 - DNA, 50 bp, unidentified
  source 1..50: mol_type = unassigned DNA; note = donor_3014086
  misc_feature 1..24: note = RE
  misc_feature 25: note = Core
  misc_feature 26..50: note = LE
tgactgttcggggaagcccttatagaatgaaagggacttcccctcgattt

SEQ ID NO: 32348 - DNA, 50 bp, unidentified
  source 1..50: mol_type = unassigned DNA; note = donor_301cc76
  misc_feature 1..23: note = RE
  misc_feature 24..25: note = Core
  misc_feature 26..50: note = LE
tgtcttgacttagtaccacatgactcgtattatataaatcgaattagtag

SEQ ID NO: 32349 - DNA, 50 bp, unidentified
  source 1..50: mol_type = unassigned DNA; note = donor_301eead
  misc_feature 1..23: note = RE
  misc_feature 24..25: note = Core
  misc_feature 26..50: note = LE
tgacattcaagaagctggggtgtctaatgggagctaccgggtcagccgct

SEQ ID NO: 32350 - DNA, 50 bp, unidentified
  source 1..50: mol_type = unassigned DNA; note = donor_302278a
  misc_feature 1..23: note = RE
  misc_feature 24..25: note = Core
  misc_feature 26..50: note = LE
gcacctgaccgggtgtccacagatgatggggtggacaccccccgacggca

SEQ ID NO: 32351 - DNA, 50 bp, unidentified; identical to SEQ ID NO: 30383
  source 1..50: mol_type = unassigned DNA; note = donor_3028a24
  misc_feature 1..23: note = RE
  misc_feature 24..25: note = Core
  misc_feature 26..50: note = LE

SEQ ID NO: 32352 - DNA, 50 bp, unidentified
  source 1..50: mol_type = unassigned DNA; note = donor_302db97
  misc_feature 1..24: note = RE
  misc_feature 25: note = Core
  misc_feature 26..50: note = LE
ttacttgttttttaccacagtacttcttaagtttacaatctattaaattt

SEQ ID NO: 32353 - DNA, 50 bp, unidentified
  source 1..50: mol_type = unassigned DNA; note = donor_303224f
  misc_feature 1..22: note = RE
  misc_feature 23..25: note = Core
  misc_feature 26..50: note = LE
cacttgacaaaacatagggacacccgttaccttgtcagtatccccgataa

SEQ ID NO: 32354 - DNA, 50 bp, unidentified
  source 1..50: mol_type = unassigned DNA; note = donor_3032d8f
  misc_feature 1..23: note = RE
  misc_feature 24..25: note = Core
  misc_feature 26..50: note = LE
tgccattgggggccgtccacatatgatggtgtggacggcctctcctcaac

SEQ ID NO: 32355 - DNA, 50 bp, unidentified
  source 1..50: mol_type = unassigned DNA; note = donor_303407c
  misc_feature 1..24: note = RE
  misc_feature 25: note = Core
  misc_feature 26..50: note = LE
tgccaatagagagccgtccacacatgatgctgtggacggctctcacccaa

SEQ ID NO: 32356 - DNA, 50 bp, unidentified
  source 1..50: mol_type = unassigned DNA; note = donor_3038138
  misc_feature 1..24: note = RE
  misc_feature 25: note = Core
  misc_feature 26..50: note = LE
tgcaaaagggggatggttcatatataatgtaatgaaccatcctccaccca

SEQ ID NO: 32357 - DNA, 50 bp, unidentified
  source 1..50: mol_type = unassigned DNA; note = donor_303a25e
  misc_feature 1..23: note = RE
  misc_feature 24..25: note = Core
  misc_feature 26..50: note = LE
atgcttgacgttaaagacggtatcttgtatcgttctttccgtggtggtta

SEQ ID NO: 32358 - DNA, 50 bp, unidentified
  source 1..50: mol_type = unassigned DNA; note = donor_303e140
  misc_feature 1..24: note = RE
  misc_feature 25: note = Core
  misc_feature 26..50: note = LE
tgcaaaacaaggggcgtccatgtacaatgggatggacgccccgactctaa

SEQ ID NO: 32359 - DNA, 50 bp, unidentified
  source 1..50: mol_type = unassigned DNA; note = donor_3048ca1
  misc_feature 1..23: note = RE
  misc_feature 24..25: note = Core
  misc_feature 26..50: note = LE
ttatgcttgacttttcatagctggtatgatgtttgcagaagctaaaacac

SEQ ID NO: 32360 - DNA, 50 bp, unidentified
  source 1..50: mol_type = unassigned DNA; note = donor_3052963
  misc_feature 1..23: note = RE
  misc_feature 24..25: note = Core
  misc_feature 26..50: note = LE
aggcttgacttttatttgcaggtctgttacaatataattgacgggtaaaa

SEQ ID NO: 32361 - DNA, 50 bp, unidentified
  source 1..50: mol_type = unassigned DNA; note = donor_3057b76
  misc_feature 1..22: note = RE
  misc_feature 23..25: note = Core
  misc_feature 26..50: note = LE
caatcaggggggcgtccatagatgatggtatggacgccccccacgacttc

SEQ ID NO: 32362 - DNA, 50 bp, unidentified
  source 1..50: mol_type = unassigned DNA; note = donor_305c4ec
  misc_feature 1..23: note = RE
  misc_feature 24..25: note = Core
  misc_feature 26..50: note = LE
ttactggacattcaatacagtggcttgtatattaattgaactttaaaaaa

SEQ ID NO: 32363 - DNA, 50 bp, unidentified
  source 1..50: mol_type = unassigned DNA; note = donor_30666f0
  misc_feature 1..24: note = RE
  misc_feature 25: note = Core
  misc_feature 26..50: note = LE
ttgcaatgaggaggagtccatatacaatgggatggactcctcctcccctt

SEQ ID NO: 32364 - DNA, 50 bp, unidentified
  source 1..50: mol_type = unassigned DNA; note = donor_306e839
  misc_feature 1..21: note = RE
  misc_feature 22..25: note = Core
  misc_feature 26..50: note = LE
ctattgacttttaatagttagtcacgtataatccaattatcttcttttag

SEQ ID NO: 32365 - DNA, 50 bp, unidentified; identical to SEQ ID NO: 31773
  source 1..50: mol_type = unassigned DNA; note = donor_3080115
  misc_feature 1..24: note = RE
  misc_feature 25: note = Core
  misc_feature 26..50: note = LE

SEQ ID NO: 32366 - DNA, 50 bp, unidentified
  source 1..50: mol_type = unassigned DNA; note = donor_3080f47
  misc_feature 1..22: note = RE
  misc_feature 23..25: note = Core
  misc_feature 26..50: note = LE
cacaaatgggggtatccatacatgatggtgtggataccccctgccaacgg

SEQ ID NO: 32367 - DNA, 50 bp, unidentified
  source 1..50: mol_type = unassigned DNA; note = donor_3086267
  misc_feature 1..23: note = RE
  misc_feature 24..25: note = Core
  misc_feature 26..50: note = LE
gacttgacagctggacacggttacttgtatgtttagccatgaccagtgcg

SEQ ID NO: 32368 - DNA, 50 bp, unidentified
  source 1..50: mol_type = unassigned DNA; note = donor_3088ac9
  misc_feature 1..23: note = RE
  misc_feature 24..25: note = Core
  misc_feature 26..50: note = LE
gacgagttagaaccgtgggatgtctaatgggtctgcatcgaggtctctga

SEQ ID NO: 32369 - DNA, 50 bp, unidentified
  source 1..50: mol_type = unassigned DNA; note = donor_309aba8
  misc_feature 1..23: note = RE
  misc_feature 24..25: note = Core
  misc_feature 26..50: note = LE
taggttgacagccaagacggtatcttgtatcttagtttgtatagtgatta

SEQ ID NO: 32370 - DNA, 50 bp, unidentified
  source 1..50: mol_type = unassigned DNA; note = donor_309fc49
  misc_feature 1..23: note = RE
  misc_feature 24..25: note = Core
  misc_feature 26..50: note = LE
aagcctataaagagagatggtatcttgtatctctctgtaatagatgatta

SEQ ID NO: 32371 - DNA, 50 bp, unidentified
  source 1..50: mol_type = unassigned DNA; note = donor_30a6143
  misc_feature 1..22: note = RE
  misc_feature 23..25: note = Core
  misc_feature 26..50: note = LE
tctcttttaatttttattcagattaaccttacattcctttccgcctgcag

SEQ ID NO: 32372 - DNA, 50 bp, unidentified
  source 1..50: mol_type = unassigned DNA; note = donor_30b380c
  misc_feature 1..23: note = RE
  misc_feature 24..25: note = Core
  misc_feature 26..50: note = LE
acttgaccaaacccataggggcaccattaccttcttggtggccccgcaat

SEQ ID NO: 32373 - DNA, 50 bp, unidentified
  source 1..50: mol_type = unassigned DNA; note = donor_30bbcb2
  misc_feature 1..23: note = RE
  misc_feature 24..25: note = Core
  misc_feature 26..50: note = LE
tagtcgcgctcaaaagacagttgcttgtatctcaaaagtggattactatg

SEQ ID NO: 32374 - DNA, 50 bp, unidentified
  source 1..50: mol_type = unassigned DNA; note = donor_30c3db3
  misc_feature 1..23: note = RE
  misc_feature 24..25: note = Core
  misc_feature 26..50: note = LE
ctgcttgacacgcaacatagtcactggtatatttcggcatccactcgtta

SEQ ID NO: 32375 - DNA, 50 bp, unidentified
  source 1..50: mol_type = unassigned DNA; note = donor_30c8c56
  misc_feature 1..22: note = RE
  misc_feature 23..25: note = Core
  misc_feature 26..50: note = LE
cttgacaagaaaagccccatacaagatgctatggggcggcggcgagaatc

SEQ ID NO: 32376 - DNA, 50 bp, unidentified
  source 1..50: mol_type = unassigned DNA; note = donor_30d22a8
  misc_feature 1..22: note = RE
  misc_feature 23..25: note = Core
  misc_feature 26..50: note = LE
ccaaaggggtgccatccagacatgatgtggtggatggcaccccccaacgc

SEQ ID NO: 32377 - DNA, 50 bp, unidentified
  source 1..50: mol_type = unassigned DNA; note = donor_30d3f72
  misc_feature 1..23: note = RE
  misc_feature 24..25: note = Core
  misc_feature 26..50: note = LE
acttgacaaatgtcatagaaagtcttatattagctgtatacgaagaagtg

SEQ ID NO: 32378 - DNA, 50 bp, unidentified
  source 1..50: mol_type = unassigned DNA; note = donor_30e001d
  misc_feature 1..24: note = RE
  misc_feature 25: note = Core
  misc_feature 26..50: note = LE
tgcaaacgaggaggagtccatatacaatgggatggactcctcctcaccac

SEQ ID NO: 32379 - DNA, 50 bp, unidentified
  source 1..50: mol_type = unassigned DNA; note = donor_30e335c
  misc_feature 1..23: note = RE
  misc_feature 24..25: note = Core
  misc_feature 26..50: note = LE
cgccccaaccttcataacagttgcctgtgtctgagaagtctgtcatgatg

SEQ ID NO: 32380 - DNA, 50 bp, unidentified
  source 1..50: mol_type = unassigned DNA; note = donor_30e583e
  misc_feature 1..23: note = RE
  misc_feature 24..25: note = Core
  misc_feature 26..50: note = LE
aggccgcatgagaaatacagttgcttctgtatctccggtttgctatcctg

SEQ ID NO: 32381 - DNA, 50 bp, unidentified
  source 1..50: mol_type = unassigned DNA; note = donor_30f233b
  misc_feature 1..23: note = RE
  misc_feature 24..25: note = Core
  misc_feature 26..50: note = LE
tgaccgcaaccgccgaatagagaagatggggtattcggcatgcgctgcat

SEQ ID NO: 32382 - DNA, 50 bp, unidentified
  source 1..50: mol_type = unassigned DNA; note = donor_30f4027
  misc_feature 1..22: note = RE
  misc_feature 23..25: note = Core
  misc_feature 26..50: note = LE
atattgacaaactattagctggtttcgtattataaggttagccagaatgc

SEQ ID NO: 32383 - DNA, 50 bp, unidentified
  source 1..50: mol_type = unassigned DNA; note = donor_30f41ff
  misc_feature 1..23: note = RE
  misc_feature 24..25: note = Core
  misc_feature 26..50: note = LE
ttgacaatttccatagggacacccctccccgttacctttttcgtggctcc

SEQ ID NO: 32384 - DNA, 50 bp, unidentified
  source 1..50: mol_type = unassigned DNA; note = donor_30f7e88
  misc_feature 1..21: note = RE
  misc_feature 22..25: note = Core
  misc_feature 26..50: note = LE
catctcgcggggcgtccacagatgatggggtggacgccccgccgacggca

SEQ ID NO: 32385 - DNA, 50 bp, unidentified
  source 1..50: mol_type = unassigned DNA; note = donor_30f932d
  misc_feature 1..21: note = RE
  misc_feature 22..25: note = Core
  misc_feature 26..50: note = LE
tgcttgacatcttcattgagactccgtaagttgataggtggccctgtggg

SEQ ID NO: 32386 - DNA, 50 bp, unidentified
  source 1..50: mol_type = unassigned DNA; note = donor_30fe296
  misc_feature 1..23: note = RE
  misc_feature 24..25: note = Core
  misc_feature 26..50: note = LE
tgccgacggggcgggccatacgtttatggaatggcccgcccctcactctc

SEQ ID NO: 32387 - DNA, 50 bp, unidentified
  source 1..50: mol_type = unassigned DNA; note = donor_3116af3
  misc_feature 1..23: note = RE
  misc_feature 24..25: note = Core
  misc_feature 26..50: note = LE
ccgcttgacaacagcattaggaagctctaccttcttgatcgggctgatcg

SEQ ID NO: 32388 - DNA, 50 bp, unidentified
  source 1..50: mol_type = unassigned DNA; note = donor_3119f98
  misc_feature 1..24: note = RE
  misc_feature 25: note = Core
  misc_feature 26..50: note = LE
ttgcaagcagggggccgtccacatatgatggtgtggacggcctccgacgg

SEQ ID NO: 32389 - DNA, 50 bp, unidentified
  source 1..50: mol_type = unassigned DNA; note = donor_311b2e6
  misc_feature 1..23: note = RE
  misc_feature 24..25: note = Core
  misc_feature 26..50: note = LE
caacacaggggccgtccatacaggatggggtggacggcccctgtgacggc

SEQ ID NO: 32390 - DNA, 50 bp, unidentified
  source 1..50: mol_type = unassigned DNA; note = donor_312155d
  misc_feature 1..24: note = RE
  misc_feature 25: note = Core
  misc_feature 26..50: note = LE
tgcaacggaggggcagaccatacataatggaatggtctgcccctcctctc

SEQ ID NO: 32391 - DNA, 50 bp, unidentified
  source 1..50: mol_type = unassigned DNA; note = donor_3122449
  misc_feature 1..22: note = RE
  misc_feature 23..25: note = Core
  misc_feature 26..50: note = LE
aatattgacaaactattagctggttcgtattataaggttaaccagataag

SEQ ID NO: 32392 - DNA, 50 bp, unidentified
  source 1..50: mol_type = unassigned DNA; note = donor_3123ee5
  misc_feature 1..21: note = RE
  misc_feature 22..25: note = Core
  misc_feature 26..50: note = LE
aggcggcttgacacagggcttctcactggtgcaccatccttgtgtcggtg

SEQ ID NO: 32393 - DNA, 50 bp, unidentified
  source 1..50: mol_type = unassigned DNA; note = donor_312ca9a
  misc_feature 1..23: note = RE
  misc_feature 24..25: note = Core
  misc_feature 26..50: note = LE
ctacttgacttttaatagttagtctcgtattatatagtcataccccttct

SEQ ID NO: 32394 - DNA, 50 bp, unidentified
  source 1..50: mol_type = unassigned DNA; note = donor_3138989
  misc_feature 1..23: note = RE
  misc_feature 24..25: note = Core
  misc_feature 26..50: note = LE
agctcctcctgcaaacacagttgcttatctgatcggaatctggcagcgta

SEQ ID NO: 32395 - DNA, 50 bp, unidentified
  source 1..50: mol_type = unassigned DNA; note = donor_313b8d2
  misc_feature 1..23: note = RE
  misc_feature 24..25: note = Core
  misc_feature 26..50: note = LE
aggcttgccttttaatagttagtctcgtattatagtgtcatagccttttc

SEQ ID NO: 32396 - DNA, 50 bp, unidentified
  source 1..50: mol_type = unassigned DNA; note = donor_3149376
  misc_feature 1..22: note = RE
  misc_feature 23..25: note = Core
  misc_feature 26..50: note = LE
caatacgggaggagaccatatatgatgtgatggtctcctcccactacggc

SEQ ID NO: 32397 - DNA, 50 bp, unidentified
  source 1..50: mol_type = unassigned DNA; note = donor_314dbba
  misc_feature 1..23: note = RE
  misc_feature 24..25: note = Core
  misc_feature 26..50: note = LE
gcaaaaatgggggtgaccatagattaatgagatggtcacccccacaccct

SEQ ID NO: 32398 - DNA, 50 bp, unidentified
  source 1..50: mol_type = unassigned DNA; note = donor_31531a6
  misc_feature 1..23: note = RE
  misc_feature 24..25: note = Core
  misc_feature 26..50: note = LE
tacctattgactttttatagttggtataatatatttaggttgataaggga

SEQ ID NO: 32399 - DNA, 50 bp, unidentified
  source 1..50: mol_type = unassigned DNA; note = donor_3156789
  misc_feature 1..21: note = RE
  misc_feature 22..25: note = Core
  misc_feature 26..50: note = LE
aggcgggttgacacagggcttctcactggtgcaccatcctcgggtcggta

SEQ ID NO: 32400 - DNA, 50 bp, unidentified
  source 1..50: mol_type = unassigned DNA; note = donor_315cf86
  misc_feature 1..24: note = RE
  misc_feature 25: note = Core
  misc_feature 26..50: note = LE
ttgccaataaggagtgtccatatataatgatatggacactcctacccaac

SEQ ID NO: 32401 - DNA, 50 bp, unidentified
  source 1..50: mol_type = unassigned DNA; note = donor_315e817
  misc_feature 1..24: note = RE
  misc_feature 25: note = Core
  misc_feature 26..50: note = LE
ctagttgacaggtcattccatatcagtcagaatggaatgaccgactccga

SEQ ID NO: 32402 - DNA, 50 bp, unidentified
  source 1..50: mol_type = unassigned DNA; note = donor_316608f
  misc_feature 1..22: note = RE
  misc_feature 23..25: note = Core
  misc_feature 26..50: note = LE
aggcttgacatttattagcaagtttcgtactatataagagtagggaaatt

SEQ ID NO: 32403 - DNA, 50 bp, unidentified
  source 1..50: mol_type = unassigned DNA; note = donor_3167d42
  misc_feature 1..22: note = RE
  misc_feature 23..25: note = Core
  misc_feature 26..50: note = LE
ctgcttgacaaacattagcaagattcttaatatatgagcagaggctttaa

SEQ ID NO: 32404 - DNA, 50 bp, unidentified
  source 1..50: mol_type = unassigned DNA; note = donor_31691d7
  misc_feature 1..22: note = RE
  misc_feature 23..25: note = Core
  misc_feature 26..50: note = LE
tacttgacagattcatagctggtcttgtatgatacaaacgtaccttgtag

SEQ ID NO: 32405 - DNA, 50 bp, unidentified; identical to SEQ ID NO: 31549
  source 1..50: mol_type = unassigned DNA; note = donor_316af09
  misc_feature 1..22: note = RE
  misc_feature 23..25: note = Core
  misc_feature 26..50: note = LE

SEQ ID NO: 32406 - DNA, 50 bp, unidentified
  source 1..50: mol_type = unassigned DNA; note = donor_316e572
  misc_feature 1..22: note = RE
  misc_feature 23..25: note = Core
  misc_feature 26..50: note = LE
cttgacaaaaaaggccccatacaagatgctatggggcgagcggcgaggac

SEQ ID NO: 32407 - DNA, 50 bp, unidentified
  source 1..50: mol_type = unassigned DNA; note = donor_3178872
  misc_feature 1..24: note = RE
  misc_feature 25: note = Core
  misc_feature 26..50: note = LE
cttgcggacggggcgggccatacgtatggaatggcccgcccctcttctcc

SEQ ID NO: 32408 - DNA, 50 bp, unidentified
  source 1..50: mol_type = unassigned DNA; note = donor_317cf93
  misc_feature 1..24: note = RE
  misc_feature 25: note = Core
  misc_feature 26..50: note = LE
ttgcaaagaggaggagtccatatacaatgggatggactcctcctcaccta

SEQ ID NO: 32409 - DNA, 50 bp, unidentified
  source 1..50: mol_type = unassigned DNA; note = donor_3180360
  misc_feature 1..23: note = RE
  misc_feature 24..25: note = Core
  misc_feature 26..50: note = LE
acaactacgcctctcttcatagaagatggtatgaagagcggcgtaccttc

SEQ ID NO: 32410 - DNA, 50 bp, unidentified
  source 1..50: mol_type = unassigned DNA; note = donor_3181080
  misc_feature 1..24: note = RE
  misc_feature 25: note = Core
  misc_feature 26..50: note = LE
caaggtcttgacctaaaggggtgcctacttagaaactggttgcaggatcg

SEQ ID NO: 32411 - DNA, 50 bp, unidentified
  source 1..50: mol_type = unassigned DNA; note = donor_31929c8
  misc_feature 1..23: note = RE
  misc_feature 24..25: note = Core
  misc_feature 26..50: note = LE
atgcttgacttctaatagttagtcttgtatactcaatactgtaataatag

SEQ ID NO: 32412 - DNA, 50 bp, unidentified
  source 1..50: mol_type = unassigned DNA; note = donor_3193f1d
  misc_feature 1..24: note = RE
  misc_feature 25: note = Core
  misc_feature 26..50: note = LE
atagcttcactttttacacaggggcgttatcttgttgacagccctaaaag

SEQ ID NO: 32413 - DNA, 50 bp, unidentified
  source 1..50: mol_type = unassigned DNA; note = donor_31960a4
  misc_feature 1..21: note = RE
  misc_feature 22..25: note = Core
  misc_feature 26..50: note = LE
aggcggcttgacacagggcttctcactggtgcaccatccttgtgtcactg

SEQ ID NO: 32414 - DNA, 50 bp, unidentified
  source 1..50: mol_type = unassigned DNA; note = donor_319db4c
  misc_feature 1..24: note = RE
  misc_feature 25: note = Core
  misc_feature 26..50: note = LE
caggcccttgacacaaacagggttctgatggaggatcgggcgcatggcgc

SEQ ID NO: 32415 - DNA, 50 bp, unidentified
  source 1..50: mol_type = unassigned DNA; note = donor_31b0891
  misc_feature 1..24: note = RE
  misc_feature 25: note = Core
  misc_feature 26..50: note = LE
tgcaaacagggaggagtccatatacaatgggatggactcctcccccctaa

SEQ ID NO: 32416 - DNA, 50 bp, unidentified
  source 1..50: mol_type = unassigned DNA; note = donor_31b6886
  misc_feature 1..21: note = RE
  misc_feature 22..25: note = Core
  misc_feature 26..50: note = LE
cggcagcttgacacagggctactcactggtgcaccatgcttacgtcggca

SEQ ID NO: 32417 - DNA, 50 bp, unidentified
  source 1..50: mol_type = unassigned DNA; note = donor_31b762f
  misc_feature 1..22: note = RE
  misc_feature 23..25: note = Core
  misc_feature 26..50: note = LE
tgacatttacgaccaaggggtgtctaatggaacccgacatcgtcttttag

SEQ ID NO: 32418 - DNA, 50 bp, unidentified
  source 1..50: mol_type = unassigned DNA; note = donor_31ba81d
  misc_feature 1..24: note = RE
  misc_feature 25: note = Core
  misc_feature 26..50: note = LE
gccgcttgacacaccacataggggcccgttaccttgttggtggtcgctgg

SEQ ID NO: 32419 - DNA, 50 bp, unidentified
  source 1..50: mol_type = unassigned DNA; note = donor_31c15e8
  misc_feature 1..22: note = RE
  misc_feature 23..25: note = Core
  misc_feature 26..50: note = LE
acctcaacacgccgaatagagaagatggggtattcggctagcgccccatc

SEQ ID NO: 32420 - DNA, 50 bp, unidentified
  source 1..50: mol_type = unassigned DNA; note = donor_31c585d
  misc_feature 1..23: note = RE
  misc_feature 24..25: note = Core
  misc_feature 26..50: note = LE
ttacttgatttctttatagctagcttgtataataaaatcagttagatttt

SEQ ID NO: 32421 - DNA, 50 bp, unidentified
  source 1..50: mol_type = unassigned DNA; note = donor_31c9aad
  misc_feature 1..23: note = RE
  misc_feature 24..25: note = Core
  misc_feature 26..50: note = LE
agacttgacttttaatagttagtctcgtattatatagtagtagtttttat

SEQ ID NO: 32422 - DNA, 50 bp, unidentified
  source 1..50: mol_type = unassigned DNA; note = donor_31c9d47
  misc_feature 1..23: note = RE
  misc_feature 24..25: note = Core
  misc_feature 26..50: note = LE
gcaaatccggggcagaccatacattaatgggatggtctgccccacctcct

SEQ ID NO: 32423 - DNA, 50 bp, unidentified
  source 1..50: mol_type = unassigned DNA; note = donor_31e4112
  misc_feature 1..24: note = RE
  misc_feature 25: note = Core
  misc_feature 26..50: note = LE
tgcaaaaacgggggtgaccatagataatgagatggtcacccccaccctgt

SEQ ID NO: 32424 - DNA, 50 bp, unidentified
  source 1..50: mol_type = unassigned DNA; note = donor_31eda95
  misc_feature 1..23: note = RE
  misc_feature 24..25: note = Core
  misc_feature 26..50: note = LE
aaaattgaaattcaagagagaatcttgtatcttggttgtaactgccccat

SEQ ID NO: 32425 - DNA, 50 bp, unidentified
  source 1..50: mol_type = unassigned DNA; note = donor_31f7e62
  misc_feature 1..23: note = RE
  misc_feature 24..25: note = Core
  misc_feature 26..50: note = LE
gcaccgaaggctgggtccatatataatgaaatggacccagccttcttccc

SEQ ID NO: 32426 - DNA, 50 bp, unidentified
  source 1..50: mol_type = unassigned DNA; note = donor_31fa650
  misc_feature 1..23: note = RE
  misc_feature 24..25: note = Core
  misc_feature 26..50: note = LE
gccacgcgggagccatccatacatgatggagtggatggctcccgcttccg

SEQ ID NO: 32427 - DNA, 50 bp, unidentified; identical to SEQ ID NO: 32245
  source 1..50: mol_type = unassigned DNA; note = donor_31ff4c4
  misc_feature 1..24: note = RE
  misc_feature 25: note = Core
  misc_feature 26..50: note = LE

SEQ ID NO: 32428 - DNA, 50 bp, unidentified
  source 1..50: mol_type = unassigned DNA; note = donor_3203e3d
  misc_feature 1..23: note = RE
  misc_feature 24..25: note = Core
  misc_feature 26..50: note = LE
caaggcggggggccgtccatagatgatgagatggacgacccccccgtttc

SEQ ID NO: 32429 - DNA, 50 bp, unidentified
  source 1..50: mol_type = unassigned DNA; note = donor_320e7c2
  misc_feature 1..24: note = RE
  misc_feature 25: note = Core
  misc_feature 26..50: note = LE
tgcaaaaggcgtcgggtccatacatactgagatggacccggcgcctccct

SEQ ID NO: 32430 - DNA, 50 bp, unidentified
  source 1..50: mol_type = unassigned DNA; note = donor_3210c81
  misc_feature 1..23: note = RE
  misc_feature 24..25: note = Core
  misc_feature 26..50: note = LE
gacaacttacgaccgtgggatgtctaatgggtgcgtaccggtcggtggcg

SEQ ID NO: 32431 - DNA, 50 bp, unidentified
  source 1..50: mol_type = unassigned DNA; note = donor_3214d89
  misc_feature 1..24: note = RE
  misc_feature 25: note = Core
  misc_feature 26..50: note = LE
tgcaaacgaggaggagtccatacacaatgggatggactcctcctcaccca

SEQ ID NO: 32432 - DNA, 50 bp, unidentified
  source 1..50: mol_type = unassigned DNA; note = donor_3214ef5
  misc_feature 1..23: note = RE
  misc_feature 24..25: note = Core
  misc_feature 26..50: note = LE
tgacacttacagccgtgggatgtctaatagagcttgatggtcgtggtcag

SEQ ID NO: 32433 - DNA, 50 bp, unidentified
  source 1..50: mol_type = unassigned DNA; note = donor_3224598
  misc_feature 1..23: note = RE
  misc_feature 24..25: note = Core
  misc_feature 26..50: note = LE
ccgcttgatctccaagatggtatcttgtatcttgttttttatggtggtta

SEQ ID NO: 32434 - DNA, 50 bp, unidentified
  source 1..50: mol_type = unassigned DNA; note = donor_322d01a
  misc_feature 1..21: note = RE
  misc_feature 22..25: note = Core
  misc_feature 26..50: note = LE
cctgagcttgactcaggaagtgtcactagggcaccatcctttctgcggat

SEQ ID NO: 32435 - DNA, 50 bp, unidentified
  source 1..50: mol_type = unassigned DNA; note = donor_322dea4
  misc_feature 1..23: note = RE
  misc_feature 24..25: note = Core
  misc_feature 26..50: note = LE
ttacttgacaattcatagttggtcttgtatgatatagtggacaactaaat

SEQ ID NO: 32436 - DNA, 50 bp, unidentified
  source 1..50: mol_type = unassigned DNA; note = donor_322f31b
  misc_feature 1..21: note = RE
  misc_feature 22..25: note = Core
  misc_feature 26..50: note = LE
gccaataggggccgtccacatatgatggtgtggacggcctcactcaaacg

SEQ ID NO: 32437 - DNA, 50 bp, unidentified
  source 1..50: mol_type = unassigned DNA; note = donor_32321b3
  misc_feature 1..23: note = RE
  misc_feature 24..25: note = Core
  misc_feature 26..50: note = LE
cttgcaaacaccgctattagacgacatggggtaatcgcgggaagcagcta

SEQ ID NO: 32438 - DNA, 50 bp, unidentified
  source 1..50: mol_type = unassigned DNA; note = donor_3238276
  misc_feature 1..24: note = RE
  misc_feature 25: note = Core
  misc_feature 26..50: note = LE
tgcaaaaacgggggtgaccatagataatgggatggtcacccccaccccct

SEQ ID NO: 32439 - DNA, 50 bp, unidentified
  source 1..50: mol_type = unassigned DNA; note = donor_323c147
  misc_feature 1..23: note = RE
  misc_feature 24..25: note = Core
  misc_feature 26..50: note = LE
gccatcggagcgccgtccacacatgatgtcgtggacggcgctccatccgc

SEQ ID NO: 32440 - DNA, 50 bp, unidentified
  source 1..50: mol_type = unassigned DNA; note = donor_3247322
  misc_feature 1..23: note = RE
  misc_feature 24..25: note = Core
  misc_feature 26..50: note = LE
caacgcgggagccatccacagaggatggggtggacgccccccctgacggc

SEQ ID NO: 32441 - DNA, 50 bp, unidentified
  source 1..50: mol_type = unassigned DNA; note = donor_32510a7
  misc_feature 1..23: note = RE
  misc_feature 24..25: note = Core
  misc_feature 26..50: note = LE
gctaacggagagccgtccacacatgatgccgtggacggctctccaccacg

SEQ ID NO: 32442 - DNA, 50 bp, unidentified
  source 1..50: mol_type = unassigned DNA; note = donor_3258d19
  misc_feature 1..23: note = RE
  misc_feature 24..25: note = Core
  misc_feature 26..50: note = LE
gccaacggagggccgtccacacatgatgatgtggacggctctccaccctc

SEQ ID NO: 32443 - DNA, 50 bp, unidentified
  source 1..50: mol_type = unassigned DNA; note = donor_326a214
  misc_feature 1..24: note = RE
  misc_feature 25: note = Core
  misc_feature 26..50: note = LE
ttgacaaaaaacatagggacaccccgttacctttttagtagcccctaaat

SEQ ID NO: 32444 - DNA, 50 bp, unidentified
  source 1..50: mol_type = unassigned DNA; note = donor_326e288
  misc_feature 1..22: note = RE
  misc_feature 23..25: note = Core
  misc_feature 26..50: note = LE
acatgctaacgacgtgggatgtctaatggggatcgaccacctcgttggct

SEQ ID NO: 32445 - DNA, 50 bp, unidentified
  source 1..50: mol_type = unassigned DNA; note = donor_32707fe
  misc_feature 1..23: note = RE
  misc_feature 24..25: note = Core
  misc_feature 26..50: note = LE
aagaagaggttgacaaagggtgtctgatgggactaccttccacagacata

SEQ ID NO: 32446 - DNA, 50 bp, unidentified
  source 1..50: mol_type = unassigned DNA; note = donor_328700e
  misc_feature 1..23: note = RE
  misc_feature 24..25: note = Core
  misc_feature 26..50: note = LE
agacttgactttttatagctggtctcgtataataaatttaaggataattt

SEQ ID NO: 32447 - DNA, 50 bp, unidentified; identical to SEQ ID NO: 31601
  source 1..50: mol_type = unassigned DNA; note = donor_3288aff
  misc_feature 1..23: note = RE
  misc_feature 24..25: note = Core
  misc_feature 26..50: note = LE

SEQ ID NO: 32448 - DNA, 50 bp, unidentified
  source 1..50: mol_type = unassigned DNA; note = donor_328b73d
  misc_feature 1..24: note = RE
  misc_feature 25: note = Core
  misc_feature 26..50: note = LE
tgcccgggcgggacaggtcatacataatgggatgacctgccccgccctcc

SEQ ID NO: 32449 - DNA, 50 bp, unidentified
  source 1..50: mol_type = unassigned DNA; note = donor_3295af3
  misc_feature 1..24: note = RE
  misc_feature 25: note = Core
  misc_feature 26..50: note = LE
cttgcagtcggggcgagccatacgtatggaatggctcgcccctttccctc

SEQ ID NO: 32450 - DNA, 50 bp, unidentified
  source 1..50: mol_type = unassigned DNA; note = donor_329a7cb
  misc_feature 1..23: note = RE
  misc_feature 24..25: note = Core
  misc_feature 26..50: note = LE
gcaggagatgggctgaccatacattaatgagatggtcagcctgaccgaga

SEQ ID NO: 32451 - DNA, 50 bp, unidentified
  source 1..50: mol_type = unassigned DNA; note = donor_329cc52
  misc_feature 1..21: note = RE
  misc_feature 22..25: note = Core
  misc_feature 26..50: note = LE
ggcttgactcagtcattgagactccgtaagttgttaggtggcccgggagg

SEQ ID NO: 32452 - DNA, 50 bp, unidentified
  source 1..50: mol_type = unassigned DNA; note = donor_329d38f
  misc_feature 1..23: note = RE
  misc_feature 24..25: note = Core
  misc_feature 26..50: note = LE
gtccttgacaagtaacacagttgcttgtatctttaaaaataataatattg

SEQ ID NO: 32453 - DNA, 50 bp, unidentified
  source 1..50: mol_type = unassigned DNA; note = donor_32a6a15
  misc_feature 1..24: note = RE
  misc_feature 25: note = Core
  misc_feature 26..50: note = LE
tgctagactggaggagtccatatactatgtatggactcctccaacccagt

SEQ ID NO: 32454 - DNA, 50 bp, unidentified; identical to SEQ ID NO: 30354
  source 1..50: mol_type = unassigned DNA; note = donor_32a7a43
  misc_feature 1..23: note = RE
  misc_feature 24..25: note = Core
  misc_feature 26..50: note = LE

SEQ ID NO: 32455 - DNA, 50 bp, unidentified
  source 1..50: mol_type = unassigned DNA; note = donor_32a9a16
  misc_feature 1..24: note = RE
  misc_feature 25: note = Core
  misc_feature 26..50: note = LE
gcggttgacaaaactatagagacacattacagtttgagccgtccgaaagg

SEQ ID NO: 32456 - DNA, 50 bp, unidentified
  source 1..50: mol_type = unassigned DNA; note = donor_32ad0b5
  misc_feature 1..23: note = RE
  misc_feature 24..25: note = Core
  misc_feature 26..50: note = LE
ccgcttgacgtgaaagacggtatcttgtatcttgcaatcggtagtggtga

SEQ ID NO: 32457 - DNA, 50 bp, unidentified
  source 1..50: mol_type = unassigned DNA; note = donor_32affc0
  misc_feature 1..24: note = RE
  misc_feature 25: note = Core
  misc_feature 26..50: note = LE
tgcaaggacggagcggaccatacataatgagatggtccgctccgtccacc

SEQ ID NO: 32458 - DNA, 50 bp, unidentified
  source 1..50: mol_type = unassigned DNA; note = donor_32b3f09
  misc_feature 1..24: note = RE
  misc_feature 25: note = Core
  misc_feature 26..50: note = LE
atatttggattttaacatagaaagctctaagtttgcagatgattgcggct

SEQ ID NO: 32459 - DNA, 50 bp, unidentified
  source 1..50: mol_type = unassigned DNA; note = donor_32be715
  misc_feature 1..24: note = RE
  misc_feature 25: note = Core
  misc_feature 26..50: note = LE
gcaacgcacggcccgggccatacataatgggatggcccggccgtgctcag

SEQ ID NO: 32460 - DNA, 50 bp, unidentified
  source 1..50: mol_type = unassigned DNA; note = donor_32d57f3
  misc_feature 1..24: note = RE
  misc_feature 25: note = Core
  misc_feature 26..50: note = LE
atgattgccgggactcacagtatctgtatgatgatcccatcagaaagaac

SEQ ID NO: 32461 - DNA, 50 bp, unidentified
  source 1..50: mol_type = unassigned DNA; note = donor_32d74ec
  misc_feature 1..23: note = RE
  misc_feature 24..25: note = Core
  misc_feature 26..50: note = LE
acacttgactttttattagcaggctcctaatataggtagtgtaaggttca

SEQ ID NO: 32462 - DNA, 50 bp, unidentified
  source 1..50: mol_type = unassigned DNA; note = donor_32d80e8
  misc_feature 1..23: note = RE
  misc_feature 24..25: note = Core
  misc_feature 26..50: note = LE
gtgccacgggggccgtccacatatgatggggtggacggccccctacggca

SEQ ID NO: 32463 - DNA, 50 bp, unidentified
  source 1..50: mol_type = unassigned DNA; note = donor_32dc5cd
  misc_feature 1..23: note = RE
  misc_feature 24..25: note = Core
  misc_feature 26..50: note = LE
ggacttgactttatatagtcagtctcgtattattaaattgcgctaaacga

SEQ ID NO: 32464 - DNA, 50 bp, unidentified
  source 1..50: mol_type = unassigned DNA; note = donor_32dd57d
  misc_feature 1..21: note = RE
  misc_feature 22..25: note = Core
  misc_feature 26..50: note = LE
tgcttgataacaccattgagattccgtaagactgtgcgtggcccgggagg

SEQ ID NO: 32465 - DNA, 50 bp, unidentified
  source 1..50: mol_type = unassigned DNA; note = donor_32debff
  misc_feature 1..23: note = RE
  misc_feature 24..25: note = Core
  misc_feature 26..50: note = LE
atgcttgactttcaagacagttgcttgtatctagctgacgagcggatttt

SEQ ID NO: 32466 - DNA, 50 bp, unidentified
  source 1..50: mol_type = unassigned DNA; note = donor_32e0920
  misc_feature 1..23: note = RE
  misc_feature 24..25: note = Core
  misc_feature 26..50: note = LE
gcaaaacggctggcatccacacaagatggggtggatgccagccttcttcg

SEQ ID NO: 32467 - DNA, 50 bp, unidentified
  source 1..50: mol_type = unassigned DNA; note = donor_32e207f
  misc_feature 1..24: note = RE
  misc_feature 25: note = Core
  misc_feature 26..50: note = LE
gtcactccgggaggcgtccatataatggtatggacgcctccccccggcaa

SEQ ID NO: 32468 - DNA, 50 bp, unidentified
  source 1..50: mol_type = unassigned DNA; note = donor_32f11ad
  misc_feature 1..23: note = RE
  misc_feature 24..25: note = Core
  misc_feature 26..50: note = LE
gcacttcgggcggcaaccacagaagatgggatggttgccgccctccccaa

SEQ ID NO: 32469 - DNA, 50 bp, unidentified
  source 1..50: mol_type = unassigned DNA; note = donor_32f5e42
  misc_feature 1..23: note = RE
  misc_feature 24..25: note = Core
  misc_feature 26..50: note = LE
acacttgactttttattagcaggctcctaatatataagtgtaggttttca

SEQ ID NO: 32470 - DNA, 50 bp, unidentified
  source 1..50: mol_type = unassigned DNA; note = donor_32f7be5
  misc_feature 1..23: note = RE
  misc_feature 24..25: note = Core
  misc_feature 26..50: note = LE
tacgcttgacgacaagacagttacttgtatcttctcttcggcacctgcct

SEQ ID NO: 32471 - DNA, 50 bp, unidentified
  source 1..50: mol_type = unassigned DNA; note = donor_3300fb9
  misc_feature 1..24: note = RE
  misc_feature 25: note = Core
  misc_feature 26..50: note = LE
tgcaaaaacgggggtgaccatagataatgagatggtcacccccaccctac

SEQ ID NO: 32472 - DNA, 50 bp, unidentified
  source 1..50: mol_type = unassigned DNA; note = donor_330aeca
  misc_feature 1..22: note = RE
  misc_feature 23..25: note = Core
  misc_feature 26..50: note = LE
tgtcagagggggcgtccacatatgatgatgtggacgcccccgccacagcg

SEQ ID NO: 32473 - DNA, 50 bp, unidentified
  source 1..50: mol_type = unassigned DNA; note = donor_330fa83
  misc_feature 1..23: note = RE
  misc_feature 24..25: note = Core
  misc_feature 26..50: note = LE
ctcgatagcctccaagacggtatcttgtatctcgactaacgcccctaagc

SEQ ID NO: 32474 - DNA, 50 bp, unidentified
  source 1..50: mol_type = unassigned DNA; note = donor_331332c
  misc_feature 1..23: note = RE
  misc_feature 24..25: note = Core
  misc_feature 26..50: note = LE
tctcttgacattttaccgaatgactcgtataatatattttgtaaagatga

SEQ ID NO: 32475 - DNA, 50 bp, unidentified
  source 1..50: mol_type = unassigned DNA; note = donor_33155ea
  misc_feature 1..23: note = RE
  misc_feature 24..25: note = Core
  misc_feature 26..50: note = LE
gacctcaaatggccgattagagaagatgggataatcggccggccagcttg

SEQ ID NO: 32476 - DNA, 50 bp, unidentified
  source 1..50: mol_type = unassigned DNA; note = donor_332383d
  misc_feature 1..24: note = RE
  misc_feature 25: note = Core
  misc_feature 26..50: note = LE
ggccctcttgacacaaagaggattctgcctgagacttctggcggacgcga

SEQ ID NO: 32477 - DNA, 50 bp, unidentified
  source 1..50: mol_type = unassigned DNA; note = donor_332478f
  misc_feature 1..23: note = RE
  misc_feature 24..25: note = Core
  misc_feature 26..50: note = LE
agaaaatcgtattaaactgagggagcattcctgtagagagttaattattg

SEQ ID NO: 32478 - DNA, 50 bp, unidentified
  source 1..50: mol_type = unassigned DNA; note = donor_332f21a
  misc_feature 1..24: note = RE
  misc_feature 25: note = Core
  misc_feature 26..50: note = LE
ctattgacatttcttagctggacttagtataataatgatatagccacaag

SEQ ID NO: 32479 - DNA, 50 bp, unidentified
  source 1..50: mol_type = unassigned DNA; note = donor_3341e06
  misc_feature 1..23: note = RE
  misc_feature 24..25: note = Core
  misc_feature 26..50: note = LE
catgggctgtctcaagatggttgcttatatcttcgatttgcttcaaactt

SEQ ID NO: 32480 - DNA, 50 bp, unidentified
  source 1..50: mol_type = unassigned DNA; note = donor_3349505
  misc_feature 1..23: note = RE
  misc_feature 24..25: note = Core
  misc_feature 26..50: note = LE
cttgacagaaaaatccccatacaagaagctatggggagagcggcgtgggc

SEQ ID NO: 32481 - DNA, 50 bp, unidentified
  source 1..50: mol_type = unassigned DNA; note = donor_33506a9
  misc_feature 1..23: note = RE
  misc_feature 24..25: note = Core
  misc_feature 26..50: note = LE
gcatgacgggcggcaaccacagaagatgggatggttgccgccctccccag

SEQ ID NO: 32482 - DNA, 50 bp, unidentified
  source 1..50: mol_type = unassigned DNA; note = donor_3357e51
  misc_feature 1..23: note = RE
  misc_feature 24..25: note = Core
  misc_feature 26..50: note = LE
gcattacgggggcagaccatacattaatgggatggtctgcccccgtatcc

SEQ ID NO: 32483 - DNA, 50 bp, unidentified
  source 1..50: mol_type = unassigned DNA; note = donor_3358074
  misc_feature 1..24: note = RE
  misc_feature 25: note = Core
  misc_feature 26..50: note = LE
aaaccgttgacaaccacataggggccgttaccttgttcgtgaccccaggt

SEQ ID NO: 32484 - DNA, 50 bp, unidentified
  source 1..50: mol_type = unassigned DNA; note = donor_3359654
  misc_feature 1..21: note = RE
  misc_feature 22..25: note = Core
  misc_feature 26..50: note = LE
gcttgacacctatttgcaggtttgctacaatgagtttgccccctgaaaca

SEQ ID NO: 32485 - DNA, 50 bp, unidentified
  source 1..50: mol_type = unassigned DNA; note = donor_3359b06
  misc_feature 1..24: note = RE
  misc_feature 25: note = Core
  misc_feature 26..50: note = LE
cttgaattgagtcggtgtccatatatggacacctccctaaaacggcttca

SEQ ID NO: 32486 - DNA, 50 bp, unidentified; identical to SEQ ID NO: 31076
  source 1..50: mol_type = unassigned DNA; note = donor_3370394
  misc_feature 1..24: note = RE
  misc_feature 25: note = Core
  misc_feature 26..50: note = LE

SEQ ID NO: 32487 - DNA, 50 bp, unidentified; identical to SEQ ID NO: 32122
  source 1..50: mol_type = unassigned DNA; note = donor_3374b86
  misc_feature 1..24: note = RE
  misc_feature 25: note = Core
  misc_feature 26..50: note = LE

SEQ ID NO: 32488 - DNA, 50 bp, unidentified
  source 1..50: mol_type = unassigned DNA; note = donor_337d9f6
  misc_feature 1..23: note = RE
  misc_feature 24..25: note = Core
  misc_feature 26..50: note = LE
ccttgacaaggctcatagaaagtcttatattaggtttgttgcagattgtc

SEQ ID NO: 32489 - DNA, 50 bp, unidentified
  source 1..50: mol_type = unassigned DNA; note = donor_3380e6e
  misc_feature 1..23: note = RE
  misc_feature 24..25: note = Core
  misc_feature 26..50: note = LE
ccccttgactttttattagcaggctcctataataaagtcgtagggtaaag

SEQ ID NO: 32490 - DNA, 50 bp, unidentified
  source 1..50: mol_type = unassigned DNA; note = donor_338acc7
  misc_feature 1..23: note = RE
  misc_feature 24..25: note = Core
  misc_feature 26..50: note = LE
gtctgcacctgataagacagttgcttatctcttgccgatctggcacttta

SEQ ID NO: 32491 - DNA, 50 bp, unidentified
  source 1..50: mol_type = unassigned DNA; note = donor_3390638
  misc_feature 1..23: note = RE
  misc_feature 24..25: note = Core
  misc_feature 26..50: note = LE
tgacagatagaaccaagggacgtctaatggggttgcactggtccccgagg

SEQ ID NO: 32492 - DNA, 50 bp, unidentified
  source 1..50: mol_type = unassigned DNA; note = donor_339b0b1
  misc_feature 1..24: note = RE
  misc_feature 25: note = Core
  misc_feature 26..50: note = LE
gcaaaattcgggctggccatagattaatgaaatggccagcccgatccccg

SEQ ID NO: 32493 - DNA, 50 bp, unidentified
  source 1..50: mol_type = unassigned DNA; note = donor_339bb6f
  misc_feature 1..23: note = RE
  misc_feature 24..25: note = Core
  misc_feature 26..50: note = LE
atggttgcaggcgttcacagtatcttgtatgattactccgtcagaaagaa

SEQ ID NO: 32494 - DNA, 50 bp, unidentified
  source 1..50: mol_type = unassigned DNA; note = donor_33a00b2
  misc_feature 1..22: note = RE
  misc_feature 23..25: note = Core
  misc_feature 26..50: note = LE
agcttgacttttaatagttaatcttgtattataaagtagtagtttataga

SEQ ID NO: 32495 - DNA, 50 bp, unidentified
  source 1..50: mol_type = unassigned DNA; note = donor_33a7cbd
  misc_feature 1..21: note = RE
  misc_feature 22..25: note = Core
  misc_feature 26..50: note = LE
cttgacaacaagacagggacaccccttaccttccttgtaggccgtgagca

SEQ ID NO: 32496 - DNA, 50 bp, unidentified
  source 1..50: mol_type = unassigned DNA; note = donor_33a9fe9
  misc_feature 1..23: note = RE
  misc_feature 24..25: note = Core
  misc_feature 26..50: note = LE
gcaataacgaggcggaccatacattaattagatggtccgcctcacctcta

SEQ ID NO: 32497 - DNA, 50 bp, unidentified
  source 1..50: mol_type = unassigned DNA; note = donor_33b55c3
  misc_feature 1..24: note = RE
  misc_feature 25: note = Core
  misc_feature 26..50: note = LE
ttgacaaccgggggaatccatgtagaatgacatggattccccctcccgag

SEQ ID NO: 32498 - DNA, 50 bp, unidentified
  source 1..50: mol_type = unassigned DNA; note = donor_33b79cc
  misc_feature 1..23: note = RE
  misc_feature 24..25: note = Core
  misc_feature 26..50: note = LE
acttgaaaattcaagcgggatgttctaccattgtatttttacaggtgaca

SEQ ID NO: 32499 - DNA, 50 bp, unidentified
  source 1..50: mol_type = unassigned DNA; note = donor_33c2c4d
  misc_feature 1..23: note = RE
  misc_feature 24..25: note = Core
  misc_feature 26..50: note = LE
gttgacactggggagtccacataagataattggactccccgcactcatag

SEQ ID NO: 32500 - DNA, 50 bp, unidentified
  source 1..50: mol_type = unassigned DNA; note = donor_33c66a2
  misc_feature 1..23: note = RE
  misc_feature 24..25: note = Core
  misc_feature 26..50: note = LE
gcgtccaaaggggcgtccacagatgatggggtggacgcccccggcggcat

SEQ ID NO: 32501 - DNA, 50 bp, unidentified
  source 1..50: mol_type = unassigned DNA; note = donor_33c6bfe
  misc_feature 1..24: note = RE
  misc_feature 25: note = Core
  misc_feature 26..50: note = LE
atggttgacttttcatagctggtcttgtatgataattaggaagttaatta

SEQ ID NO: 32502 - DNA, 50 bp, unidentified
  source 1..50: mol_type = unassigned DNA; note = donor_33d31eb
  misc_feature 1..24: note = RE
  misc_feature 25: note = Core
  misc_feature 26..50: note = LE
ggccggttgacaacagaggggagcctactagacgattcccgtaggaccgg

SEQ ID NO: 32503 - DNA, 50 bp, unidentified
  source 1..50: mol_type = unassigned DNA; note = donor_33e3765
  misc_feature 1..24: note = RE
  misc_feature 25: note = Core
  misc_feature 26..50: note = LE
gcaaatctcgggctggccatagattaatgaaatggccagcccgatccccg

SEQ ID NO: 32504 - DNA, 50 bp, unidentified
  source 1..50: mol_type = unassigned DNA; note = donor_33f55c6
  misc_feature 1..23: note = RE
  misc_feature 24..25: note = Core
  misc_feature 26..50: note = LE
aactcgcttgatcaagacggatacttgtcttatgacgtccctcgcccttt

SEQ ID NO: 32505 - DNA, 50 bp, unidentified
  source 1..50: mol_type = unassigned DNA; note = donor_34095b6
  misc_feature 1..22: note = RE
  misc_feature 23..25: note = Core
  misc_feature 26..50: note = LE
attgactttccttatagtttgtcttatattatatttagtgcagttagcta

SEQ ID NO: 32506 - DNA, 50 bp, unidentified
  source 1..50: mol_type = unassigned DNA; note = donor_340d6c7
  misc_feature 1..22: note = RE
  misc_feature 23..25: note = Core
  misc_feature 26..50: note = LE
tgtcacttttttaatatagttcgttgtatattcaaaatattttttgtacc

SEQ ID NO: 32507 - DNA, 50 bp, unidentified
  source 1..50: mol_type = unassigned DNA; note = donor_341022f
  misc_feature 1..24: note = RE
  misc_feature 25: note = Core
  misc_feature 26..50: note = LE
gcgctcaatggggaagcccttgtagaatgaaagggacttccccgtcccga

SEQ ID NO: 32508 - DNA, 50 bp, unidentified
  source 1..50: mol_type = unassigned DNA; note = donor_3419832
  misc_feature 1..23: note = RE
  misc_feature 24..25: note = Core
  misc_feature 26..50: note = LE
ttgcaaacgggatgtgttcatataaatgtaatgaacacatcccccattaa

SEQ ID NO: 32509 - DNA, 50 bp, unidentified
  source 1..50: mol_type = unassigned DNA; note = donor_341fd7c
  misc_feature 1..23: note = RE
  misc_feature 24..25: note = Core
  misc_feature 26..50: note = LE
gcaccaacgggggcatccatacatgatggcgtggatgccccctcctgacg

SEQ ID NO: 32510 - DNA, 50 bp, unidentified
  source 1..50: mol_type = unassigned DNA; note = donor_342140c
  misc_feature 1..23: note = RE
  misc_feature 24..25: note = Core
  misc_feature 26..50: note = LE
attgactttctttaatagttagtctactattaaatgtgtgatagccatat

SEQ ID NO: 32511 - DNA, 50 bp, unidentified
  source 1..50: mol_type = unassigned DNA; note = donor_346eb79
  misc_feature 1..24: note = RE
  misc_feature 25: note = Core
  misc_feature 26..50: note = LE
cggcctgttgacacagaggggtgcctacgtgtttcattgacgtcaggagc

SEQ ID NO: 32512 - DNA, 50 bp, unidentified
  source 1..50: mol_type = unassigned DNA; note = donor_3471c12
  misc_feature 1..23: note = RE
  misc_feature 24..25: note = Core
  misc_feature 26..50: note = LE
caaattgaaattcaagagagaatcttgtatcttgcttgcatctccccggt

SEQ ID NO: 32513 - DNA, 50 bp, unidentified
  source 1..50: mol_type = unassigned DNA; note = donor_3478065
  misc_feature 1..24: note = RE
  misc_feature 25: note = Core
  misc_feature 26..50: note = LE
cgccgcttgacaaaaacataggggcgttaccttgttcatgtccccggatg

SEQ ID NO: 32514 - DNA, 50 bp, unidentified
  source 1..50: mol_type = unassigned DNA; note = donor_347b07b
  misc_feature 1..24: note = RE
  misc_feature 25: note = Core
  misc_feature 26..50: note = LE
attgaacccttgacaaatcgtaggaaaaacatactaagattagctgtgaa

SEQ ID NO: 32515 - DNA, 50 bp, unidentified
  source 1..50: mol_type = unassigned DNA; note = donor_348c445
  misc_feature 1..23: note = RE
  misc_feature 24..25: note = Core
  misc_feature 26..50: note = LE
gccaacagggagccgtccacacatgatgcagtggacggctcccacccaac

SEQ ID NO: 32516 - DNA, 50 bp, unidentified
  source 1..50: mol_type = unassigned DNA; note = donor_3490d5e
  misc_feature 1..22: note = RE
  misc_feature 23..25: note = Core
  misc_feature 26..50: note = LE
acaagttaggaccgtgggatatctaatggggatcgaccaccccattccgt

SEQ ID NO: 32517 - DNA, 50 bp, unidentified
  source 1..50: mol_type = unassigned DNA; note = donor_3491540
  misc_feature 1..22: note = RE
  misc_feature 23..25: note = Core
  misc_feature 26..50: note = LE
catgccgggggccatccacacatgatggggtggatggccccctcacggca

SEQ ID NO: 32518 - DNA, 50 bp, unidentified
  source 1..50: mol_type = unassigned DNA; note = donor_34947e1
  misc_feature 1..24: note = RE
  misc_feature 25: note = Core
  misc_feature 26..50: note = LE
cgccggttgacaacagaggggagcctactagacgattcccgcaggaccgg

SEQ ID NO: 32519 - DNA, 50 bp, unidentified
  source 1..50: mol_type = unassigned DNA; note = donor_3498df9
  misc_feature 1..24: note = RE
  misc_feature 25: note = Core
  misc_feature 26..50: note = LE
ttggcaaataggggcgaccatgtataatggaatggtcgccccttccttac

SEQ ID NO: 32520 - DNA, 50 bp, unidentified
  source 1..50: mol_type = unassigned DNA; note = donor_349eae5
  misc_feature 1..24: note = RE
  misc_feature 25: note = Core
  misc_feature 26..50: note = LE
tgcagaaactgggaggaccatagataatgaaatggtcctcccaggactcc

SEQ ID NO: 32521 - DNA, 50 bp, unidentified
  source 1..50: mol_type = unassigned DNA; note = donor_34a1da1
  misc_feature 1..23: note = RE
  misc_feature 24..25: note = Core
  misc_feature 26..50: note = LE
tcgcttgaggataaccatagaatcttgtatggttagacttgaaggggtgg

SEQ ID NO: 32522 - DNA, 50 bp, unidentified
  source 1..50: mol_type = unassigned DNA; note = donor_34a83c5
  misc_feature 1..23: note = RE
  misc_feature 24..25: note = Core
  misc_feature 26..50: note = LE
gacaactaaacgacatgggatgtctaatgggagctgccgggtcggtgttg

SEQ ID NO: 32523 - DNA, 50 bp, unidentified; identical to SEQ ID NO: 32339
  source 1..50: mol_type = unassigned DNA; note = donor_34b383e
  misc_feature 1..23: note = RE
  misc_feature 24..25: note = Core
  misc_feature 26..50: note = LE

SEQ ID NO: 32524 - DNA, 50 bp, unidentified; identical to SEQ ID NO: 30493
  source 1..50: mol_type = unassigned DNA; note = donor_34bd28d
  misc_feature 1..23: note = RE
  misc_feature 24..25: note = Core
  misc_feature 26..50: note = LE

SEQ ID NO: 32525 - DNA, 50 bp, unidentified
  source 1..50: mol_type = unassigned DNA; note = donor_34cc0a8
  misc_feature 1..24: note = RE
  misc_feature 25: note = Core
  misc_feature 26..50: note = LE
gaacttgacggaccataggagcgtctgtgaggatccacctcgcagcccag

SEQ ID NO: 32526 - DNA, 50 bp, unidentified
  source 1..50: mol_type = unassigned DNA; note = donor_34d9e2e
  misc_feature 1..23: note = RE
  misc_feature 24..25: note = Core
  misc_feature 26..50: note = LE
cccgtacttgaccaacacggatacttgtcttatgacattggctgccgaac

SEQ ID NO: 32527 - DNA, 50 bp, unidentified
  source 1..50: mol_type = unassigned DNA; note = donor_34de4df
  misc_feature 1..24: note = RE
  misc_feature 25: note = Core
  misc_feature 26..50: note = LE
cttacctctactttctttcacactatctccattccgcaggcaagccgcgg

SEQ ID NO: 32528 - DNA, 50 bp, unidentified
  source 1..50: mol_type = unassigned DNA; note = donor_34e0b2d
  misc_feature 1..24: note = RE
  misc_feature 25: note = Core
  misc_feature 26..50: note = LE
ccgcttgacaacgccatagagacaccgttaccttcttgatcaaccccgga

SEQ ID NO: 32529 - DNA, 50 bp, unidentified
  source 1..50: mol_type = unassigned DNA; note = donor_34eb85b
  misc_feature 1..24: note = RE
  misc_feature 25: note = Core
  misc_feature 26..50: note = LE
gcaaaccgggggcgtccatgcatgatggaatggacgcccccacccgaatg

SEQ ID NO: 32530 - DNA, 50 bp, unidentified
  source 1..50: mol_type = unassigned DNA; note = donor_34eb91d
  misc_feature 1..20: note = RE
  misc_feature 21..25: note = Core
  misc_feature 26..50: note = LE
cttgacttcatatagctggtctcctacattaaatacgttgcatttttcag

SEQ ID NO: 32531 - DNA, 50 bp, unidentified
  source 1..50: mol_type = unassigned DNA; note = donor_34f85a2
  misc_feature 1..23: note = RE
  misc_feature 24..25: note = Core
  misc_feature 26..50: note = LE
gacaacccagagccgtccacacatgatgctgtggacggctcctccaccgg

SEQ ID NO: 32532 - DNA, 50 bp, unidentified
  source 1..50: mol_type = unassigned DNA; note = donor_34f8980
  misc_feature 1..23: note = RE
  misc_feature 24..25: note = Core
  misc_feature 26..50: note = LE
tttgtcttgacagaacacggtagcttgtatgtaataagcatgtggtggtt

SEQ ID NO: 32533 - DNA, 50 bp, unidentified
  source 1..50: mol_type = unassigned DNA; note = donor_34f9729
  misc_feature 1..23: note = RE
  misc_feature 24..25: note = Core
  misc_feature 26..50: note = LE
agggttgtcctgcaacatagaatcttgtatgtttagacttgaaggggtgg

SEQ ID NO: 32534 - DNA, 50 bp, unidentified
  source 1..50: mol_type = unassigned DNA; note = donor_350d4d6
  misc_feature 1..23: note = RE
  misc_feature 24..25: note = Core
  misc_feature 26..50: note = LE
ggggttgacttttgatagttagtctcgtataataaaagtagtagttttta

SEQ ID NO: 32535 - DNA, 50 bp, unidentified
  source 1..50: mol_type = unassigned DNA; note = donor_3515782
  misc_feature 1..23: note = RE
  misc_feature 24..25: note = Core
  misc_feature 26..50: note = LE
aaccggcttgatcaaaacggatacttgtcttatgactatctgcgcttctt

SEQ ID NO: 32536 - DNA, 50 bp, unidentified
  source 1..50: mol_type = unassigned DNA; note = donor_3517d15
  misc_feature 1..23: note = RE
  misc_feature 24..25: note = Core
  misc_feature 26..50: note = LE
caccttgactttttaatagctggcttgtatactaaatctatcttagtata

SEQ ID NO: 32537 - DNA, 50 bp, unidentified
  source 1..50: mol_type = unassigned DNA; note = donor_3517d25
  misc_feature 1..24: note = RE
  misc_feature 25: note = Core
  misc_feature 26..50: note = LE
atattgacaggctattagctggtatcgtattatgaggtcaccagatcttt

SEQ ID NO: 32538 - DNA, 50 bp, unidentified
  source 1..50: mol_type = unassigned DNA; note = donor_351cb6d
  misc_feature 1..23: note = RE
  misc_feature 24..25: note = Core
  misc_feature 26..50: note = LE
gccttgacaggtcaaaacatatcagacatgatgttttgacctgcccatca

SEQ ID NO: 32539 - DNA, 50 bp, unidentified
  source 1..50: mol_type = unassigned DNA; note = donor_3529a1a
  misc_feature 1..24: note = RE
  misc_feature 25: note = Core
  misc_feature 26..50: note = LE
aacgcttgacgaaacacataggggcgttactatcttcgtgccccaataat

SEQ ID NO: 32540 - DNA, 50 bp, unidentified
  source 1..50: mol_type = unassigned DNA; note = donor_353c23f
  misc_feature 1..23: note = RE
  misc_feature 24..25: note = Core
  misc_feature 26..50: note = LE
ttgcaaacggggtgggtccatatataatggaatggacccacccctttcaa

SEQ ID NO: 32541 - DNA, 50 bp, unidentified
  source 1..50: mol_type = unassigned DNA; note = donor_35479a1
  misc_feature 1..23: note = RE
  misc_feature 24..25: note = Core
  misc_feature 26..50: note = LE
ttatttggagaggacttagaattcatttacatttgcagtattaatattct

SEQ ID NO: 32542 - DNA, 50 bp, unidentified
  source 1..50: mol_type = unassigned DNA; note = donor_354af47
  misc_feature 1..24: note = RE
  misc_feature 25: note = Core
  misc_feature 26..50: note = LE
ttgcaattaggcggggtccatatacaatggtatggaccccgccgacctcg

SEQ ID NO: 32543 - DNA, 50 bp, unidentified
  source 1..50: mol_type = unassigned DNA; note = donor_3551122
  misc_feature 1..24: note = RE
  misc_feature 25: note = Core
  misc_feature 26..50: note = LE
gatgttgacagctattagctggtatcgtattatatggttaaccaatcatt

SEQ ID NO: 32544 - DNA, 50 bp, unidentified
  source 1..50: mol_type = unassigned DNA; note = donor_3553076
  misc_feature 1..23: note = RE
  misc_feature 24..25: note = Core
  misc_feature 26..50: note = LE
tgacatccaaaagcatgggatgtctaatgggacgtaccgggtcgctctag

SEQ ID NO: 32545 - DNA, 50 bp, unidentified
  source 1..50: mol_type = unassigned DNA; note = donor_35554f0
  misc_feature 1..24: note = RE
  misc_feature 25: note = Core
  misc_feature 26..50: note = LE
tgcaccgacggggcggaccatacataatgggatggtccgccccgtctccc

SEQ ID NO: 32546 - DNA, 50 bp, unidentified
  source 1..50: mol_type = unassigned DNA; note = donor_355f97e
  misc_feature 1..22: note = RE
  misc_feature 23..25: note = Core
  misc_feature 26..50: note = LE
ttacctcaagtcttttcacggaaaacaattatgactttacagtcacaccc

SEQ ID NO: 32547 - DNA, 50 bp, unidentified
  source 1..50: mol_type = unassigned DNA; note = donor_3571ec8
  misc_feature 1..23: note = RE
  misc_feature 24..25: note = Core
  misc_feature 26..50: note = LE
tcacttgaccgagcagacggtatcttgtatgttgagtcagcgagcgttcc

SEQ ID NO: 32548 - DNA, 50 bp, unidentified
  source 1..50: mol_type = unassigned DNA; note = donor_3576c6d
  misc_feature 1..24: note = RE
  misc_feature 25: note = Core
  misc_feature 26..50: note = LE
tgcaaacgagggggagtccatatacaatgggatggactccccctcaccca

SEQ ID NO: 32549 - DNA, 50 bp, unidentified
  source 1..50: mol_type = unassigned DNA; note = donor_35812cb
  misc_feature 1..24: note = RE
  misc_feature 25: note = Core
  misc_feature 26..50: note = LE
tgctaatttggatatcctagaatacctttggaccttcaaagaaacattta

SEQ ID NO: 32550 - DNA, 50 bp, unidentified
  source 1..50: mol_type = unassigned DNA; note = donor_3586756
  misc_feature 1..24: note = RE
  misc_feature 25: note = Core
  misc_feature 26..50: note = LE
tgcagtcgcgcggcggaccatacataatgagatggtccgccgctttcatc

SEQ ID NO: 32551 - DNA, 50 bp, unidentified
  source 1..50: mol_type = unassigned DNA; note = donor_35929f7
  misc_feature 1..24: note = RE
  misc_feature 25: note = Core
  misc_feature 26..50: note = LE
tgcagtcgcgcggcggaccatacataatgagatggtccgccgcttgatta

SEQ ID NO: 32552 - DNA, 50 bp, unidentified
  source 1..50: mol_type = unassigned DNA; note = donor_3595881
  misc_feature 1..22: note = RE
  misc_feature 23..25: note = Core
  misc_feature 26..50: note = LE
ttagggcttgacaatagagggtcttatacattaaactaaaaccaagccct

SEQ ID NO: 32553 - DNA, 50 bp, unidentified
  source 1..50: mol_type = unassigned DNA; note = donor_3597f6b
  misc_feature 1..22: note = RE
  misc_feature 23..25: note = Core
  misc_feature 26..50: note = LE
tgcttgacaaaacattagcaagattcttaatatatgagtagagacttttc

SEQ ID NO: 32554 - DNA, 50 bp, unidentified
  source 1..50: mol_type = unassigned DNA; note = donor_35a934e
  misc_feature 1..21: note = RE
  misc_feature 22..25: note = Core
  misc_feature 26..50: note = LE
gcggaggttgacacagggcaactcactggtctaccttccaggtgtcggct

SEQ ID NO: 32555 - DNA, 50 bp, unidentified
  source 1..50: mol_type = unassigned DNA; note = donor_35abd0a
  misc_feature 1..23: note = RE
  misc_feature 24..25: note = Core
  misc_feature 26..50: note = LE
gcatcgaagggggcatccaaacatgatggggtggatgcccccgcccgacg

SEQ ID NO: 32556 - DNA, 50 bp, unidentified
  source 1..50: mol_type = unassigned DNA; note = donor_35b0d9a
  misc_feature 1..23: note = RE
  misc_feature 24..25: note = Core
  misc_feature 26..50: note = LE
caccttcgattgacacagaggcgctgacttgtttagatgacggcaagccg

SEQ ID NO: 32557 - DNA, 50 bp, unidentified
  source 1..50: mol_type = unassigned DNA; note = donor_35b3ec5
  misc_feature 1..23: note = RE
  misc_feature 24..25: note = Core
  misc_feature 26..50: note = LE
ctgcttgacaacgtcattgggaagtcctaccttcttagttgtgggtctga

SEQ ID NO: 32558 - DNA, 50 bp, unidentified
  source 1..50: mol_type = unassigned DNA; note = donor_35b4ea0
  misc_feature 1..23: note = RE
  misc_feature 24..25: note = Core
  misc_feature 26..50: note = LE
cgccttgactttttatttgcaggctactacaatatatttgtggttaataa

SEQ ID NO: 32559 - DNA, 50 bp, unidentified
  source 1..50: mol_type = unassigned DNA; note = donor_35bf270
  misc_feature 1..24: note = RE
  misc_feature 25: note = Core
  misc_feature 26..50: note = LE
tgcggatcaggggcggaccatacataatgggatggtccgcccccgttctc

SEQ ID NO: 32560 - DNA, 50 bp, unidentified; identical to SEQ ID NO: 31144
  source 1..50: mol_type = unassigned DNA; note = donor_35c0be4
  misc_feature 1..23: note = RE
  misc_feature 24..25: note = Core
  misc_feature 26..50: note = LE

SEQ ID NO: 32561 - DNA, 50 bp, unidentified
  source 1..50: mol_type = unassigned DNA; note = donor_35d3ff5
  misc_feature 1..23: note = RE
  misc_feature 24..25: note = Core
  misc_feature 26..50: note = LE
caatcacggagccatccacacaggatggtgtggatggctcctacacctcg

SEQ ID NO: 32562 - DNA, 50 bp, unidentified
  source 1..50: mol_type = unassigned DNA; note = donor_35d4384
  misc_feature 1..23: note = RE
  misc_feature 24..25: note = Core
  misc_feature 26..50: note = LE
gggcttgacttttaatagttagtcttgtattatagagtagtagtttttat

SEQ ID NO: 32563 - DNA, 50 bp, unidentified
  source 1..50: mol_type = unassigned DNA; note = donor_35d48d0
  misc_feature 1..24: note = RE
  misc_feature 25: note = Core
  misc_feature 26..50: note = LE
tcatttgttttttagcacagttcttcttaagtttacaatctcttatattt

SEQ ID NO: 32564 - DNA, 50 bp, unidentified
  source 1..50: mol_type = unassigned DNA; note = donor_35dc75e
  misc_feature 1..24: note = RE
  misc_feature 25: note = Core
  misc_feature 26..50: note = LE
tggtcgtttatatatcctagaatacctttggactttcaaaggagatattc

SEQ ID NO: 32565 - DNA, 50 bp, unidentified
  source 1..50: mol_type = unassigned DNA; note = donor_35eb678
  misc_feature 1..23: note = RE
  misc_feature 24..25: note = Core
  misc_feature 26..50: note = LE
cttgacaagacgcctcccatatcagacggtatgggggctggggcctcact

SEQ ID NO: 32566 - DNA, 50 bp, unidentified
  source 1..50: mol_type = unassigned DNA; note = donor_35ebc83
  misc_feature 1..22: note = RE
  misc_feature 23..25: note = Core
  misc_feature 26..50: note = LE
tgtcacttttttaatatagttcgttgtatatttaaattatttttattatc

SEQ ID NO: 32567 - DNA, 50 bp, unidentified; identical to SEQ ID NO: 31272
  source 1..50: mol_type = unassigned DNA; note = donor_35ffb6b
  misc_feature 1..24: note = RE
  misc_feature 25: note = Core
  misc_feature 26..50: note = LE

SEQ ID NO: 32568 - DNA, 50 bp, unidentified
  source 1..50: mol_type = unassigned DNA; note = donor_3600832
  misc_feature 1..22: note = RE
  misc_feature 23..25: note = Core
  misc_feature 26..50: note = LE
attacaactgggagtccatataagatgtatggactccctctcctcggaga

SEQ ID NO: 32569 - DNA, 50 bp, unidentified
  source 1..50: mol_type = unassigned DNA; note = donor_3609a58
  misc_feature 1..23: note = RE
  misc_feature 24..25: note = Core
  misc_feature 26..50: note = LE
cctcgcctcttgacatagaggcgctgacttgtttagatgcgcacagcacc

SEQ ID NO: 32570 - DNA, 50 bp, unidentified
  source 1..50: mol_type = unassigned DNA; note = donor_361bf55
  misc_feature 1..24: note = RE
  misc_feature 25: note = Core
  misc_feature 26..50: note = LE
tggtggtttggatatcctagaatacctttggacctgtattaagatattta

SEQ ID NO: 32571 - DNA, 50 bp, unidentified
  source 1..50: mol_type = unassigned DNA; note = donor_3621146
  misc_feature 1..23: note = RE
  misc_feature 24..25: note = Core
  misc_feature 26..50: note = LE
acacttgacttttaatagttagtctcgtattataaagtagtagttattta

SEQ ID NO: 32572 - DNA, 50 bp, unidentified
  source 1..50: mol_type = unassigned DNA; note = donor_3625240
  misc_feature 1..23: note = RE
  misc_feature 24..25: note = Core
  misc_feature 26..50: note = LE
aagatttggttttatcatagaaatcctttagatttgttttttgaaatttg

SEQ ID NO: 32573 - DNA, 50 bp, unidentified
  source 1..50: mol_type = unassigned DNA; note = donor_362e136
  misc_feature 1..23: note = RE
  misc_feature 24..25: note = Core
  misc_feature 26..50: note = LE
gcacaaaacggggcatccacacatgatggagtggatgcccctccccgcag

SEQ ID NO: 32574 - DNA, 50 bp, unidentified
  source 1..50: mol_type = unassigned DNA; note = donor_363212a
  misc_feature 1..24: note = RE
  misc_feature 25: note = Core
  misc_feature 26..50: note = LE
ttgcaaaacggggcgtaccatacataattagatggtacgccccacaccta

SEQ ID NO: 32575 - DNA, 50 bp, unidentified
  source 1..50: mol_type = unassigned DNA; note = donor_3632cc2
  misc_feature 1..23: note = RE
  misc_feature 24..25: note = Core
  misc_feature 26..50: note = LE
gcaaaaacgggggtgaccatagattaatgagatggtcacccacaccctgt

SEQ ID NO: 32576 - DNA, 50 bp, unidentified
  source 1..50: mol_type = unassigned DNA; note = donor_3636a1f
  misc_feature 1..24: note = RE
  misc_feature 25: note = Core
  misc_feature 26..50: note = LE
tgcggcgacgcggcggaccatacataatgggatggtccgccgctttcact

SEQ ID NO: 32577 - DNA, 50 bp, unidentified
  source 1..50: mol_type = unassigned DNA; note = donor_363b4ee
  misc_feature 1..23: note = RE
  misc_feature 24..25: note = Core
  misc_feature 26..50: note = LE
aactcctcggcgtttaatggttgcttgtaatagcgcaatcagatattgtc

SEQ ID NO: 32578 - DNA, 50 bp, unidentified
  source 1..50: mol_type = unassigned DNA; note = donor_363f02d
  misc_feature 1..23: note = RE
  misc_feature 24..25: note = Core
  misc_feature 26..50: note = LE
ggcaaacgggaggcgtccatataagatggtatggacgcctccctttctga

SEQ ID NO: 32579 - DNA, 50 bp, unidentified
  source 1..50: mol_type = unassigned DNA; note = donor_36411b1
  misc_feature 1..24: note = RE
  misc_feature 25: note = Core
  misc_feature 26..50: note = LE
tgccacacgggaggcgtccatataatggtatggacgcctccccctcgctg

SEQ ID NO: 32580 - DNA, 50 bp, unidentified
  source 1..50: mol_type = unassigned DNA; note = donor_364de3e
  misc_feature 1..23: note = RE
  misc_feature 24..25: note = Core
  misc_feature 26..50: note = LE
gaccaaagaacgccgaatagagaagatggggtattcggcttgcgccccac

SEQ ID NO: 32581 - DNA, 50 bp, unidentified
  source 1..50: mol_type = unassigned DNA; note = donor_3655b24
  misc_feature 1..23: note = RE
  misc_feature 24..25: note = Core
  misc_feature 26..50: note = LE
ttaattgtaaatcaacacagaatctcctatgtttgcaaagttataaattc

SEQ ID NO: 32582 - DNA, 50 bp, unidentified
  source 1..50: mol_type = unassigned DNA; note = donor_365981c
  misc_feature 1..23: note = RE
  misc_feature 24..25: note = Core
  misc_feature 26..50: note = LE
tgacaaaacaaaacctgggatgtctaatgggttccagccgagcttctggc

SEQ ID NO: 32583 - DNA, 50 bp, unidentified
  source 1..50: mol_type = unassigned DNA; note = donor_3661928
  misc_feature 1..24: note = RE
  misc_feature 25: note = Core
  misc_feature 26..50: note = LE
tgcaacacacggccggtccatacataatgggatggaccggccgtgctcct

SEQ ID NO: 32584 - DNA, 50 bp, unidentified
  source 1..50: mol_type = unassigned DNA; note = donor_366d007
  misc_feature 1..21: note = RE
  misc_feature 22..25: note = Core
  misc_feature 26..50: note = LE
gcaggggttgacacaggaagtctcactggtgtacctcttgcggtcgggag

SEQ ID NO: 32585 - DNA, 50 bp, unidentified
  source 1..50: mol_type = unassigned DNA; note = donor_366d4b4
  misc_feature 1..24: note = RE
  misc_feature 25: note = Core
  misc_feature 26..50: note = LE
agccggttgacaacagaagggagcctactagccgattcccgtagggccgg

SEQ ID NO: 32586 - DNA, 50 bp, unidentified
  source 1..50: mol_type = unassigned DNA; note = donor_3671cb6
  misc_feature 1..23: note = RE
  misc_feature 24..25: note = Core
  misc_feature 26..50: note = LE
agacttgacttttaatagttagtctcgtattatatagtagtagtgtttat

SEQ ID NO: 32587 - DNA, 50 bp, unidentified
  source 1..50: mol_type = unassigned DNA; note = donor_367246b
  misc_feature 1..24: note = RE
  misc_feature 25: note = Core
  misc_feature 26..50: note = LE
ccacttgaccatctatacgagcatcagtgaagatggggcggtccccgatg

SEQ ID NO: 32588 - DNA, 50 bp, unidentified
  source 1..50: mol_type = unassigned DNA; note = donor_36758cb
  misc_feature 1..24: note = RE
  misc_feature 25: note = Core
  misc_feature 26..50: note = LE
tgcgacgcacggccggtccatacataatgggatggaccggccgtgcttac

SEQ ID NO: 32589 - DNA, 50 bp, unidentified
  source 1..50: mol_type = unassigned DNA; note = donor_368056f
  misc_feature 1..23: note = RE
  misc_feature 24..25: note = Core
  misc_feature 26..50: note = LE
gaaagtgggggcgagtccatacataattagatggactcgcccaagccgag

SEQ ID NO: 32590 - DNA, 50 bp, unidentified
  source 1..50: mol_type = unassigned DNA; note = donor_368e8d5
  misc_feature 1..23: note = RE
  misc_feature 24..25: note = Core
  misc_feature 26..50: note = LE
agacttgcgttttaagagagtatcttgtatattaaatgtatctcttaaac

SEQ ID NO: 32591 - DNA, 50 bp, unidentified; identical to SEQ ID NO: 30770
  source 1..50: mol_type = unassigned DNA; note = donor_3697fa2
  misc_feature 1..24: note = RE
  misc_feature 25: note = Core
  misc_feature 26..50: note = LE

SEQ ID NO: 32592 - DNA, 50 bp, unidentified
  source 1..50: mol_type = unassigned DNA; note = donor_36985b4
  misc_feature 1..23: note = RE
  misc_feature 24..25: note = Core
  misc_feature 26..50: note = LE
tttattgactattcatagttggtcttgtatgatgtatttaagtctaaata

SEQ ID NO: 32593 - DNA, 50 bp, unidentified
  source 1..50: mol_type = unassigned DNA; note = donor_369a6dd
  misc_feature 1..23: note = RE
  misc_feature 24..25: note = Core
  misc_feature 26..50: note = LE
cgcttgacgggagataggagcatcaaacatgatggtaggagtctcgtgga

SEQ ID NO: 32594 - DNA, 50 bp, unidentified
  source 1..50: mol_type = unassigned DNA; note = donor_369fb51
  misc_feature 1..24: note = RE
  misc_feature 25: note = Core
  misc_feature 26..50: note = LE
gcccgccgcttgacagaggggggcctacttgtttagaaacacctcctaga

SEQ ID NO: 32595 - DNA, 50 bp, unidentified
  source 1..50: mol_type = unassigned DNA; note = donor_369fbce
  misc_feature 1..24: note = RE
  misc_feature 25: note = Core
  misc_feature 26..50: note = LE
tgccgcggcttgacataggagcaactgagtgtcactctcctctacgtctc

SEQ ID NO: 32596 - DNA, 50 bp, unidentified
  source 1..50: mol_type = unassigned DNA; note = donor_36a5830
  misc_feature 1..24: note = RE
  misc_feature 25: note = Core
  misc_feature 26..50: note = LE
tgcacggacagggcgggtcatacataatgggatgacccgccccgtcctct

SEQ ID NO: 32597 - DNA, 50 bp, unidentified
  source 1..50: mol_type = unassigned DNA; note = donor_36a751d
  misc_feature 1..23: note = RE
  misc_feature 24..25: note = Core
  misc_feature 26..50: note = LE
ggccttgtgttttaagagagtatcttgtatattaaaagatatcttcaaac

SEQ ID NO: 32598 - DNA, 50 bp, unidentified
  source 1..50: mol_type = unassigned DNA; note = donor_36af25f
  misc_feature 1..23: note = RE
  misc_feature 24..25: note = Core
  misc_feature 26..50: note = LE
tgatttgacatttaatagttagtctcgtataatatttatataataattta

SEQ ID NO: 32599 - DNA, 50 bp, unidentified
  source 1..50: mol_type = unassigned DNA; note = donor_36b01a6
  misc_feature 1..24: note = RE
  misc_feature 25: note = Core
  misc_feature 26..50: note = LE
tggcgcatcgggggcgttcatataatggaatgaacgcccccacctacccg

SEQ ID NO: 32600 - DNA, 50 bp, unidentified
  source 1..50: mol_type = unassigned DNA; note = donor_36b16c8
  misc_feature 1..23: note = RE
  misc_feature 24..25: note = Core
  misc_feature 26..50: note = LE
cggcttgacatcggcattgggaagtcctaccttccaagcgtggttctgtg

SEQ ID NO: 32601 - DNA, 50 bp, unidentified
  source 1..50: mol_type = unassigned DNA; note = donor_36b3583
  misc_feature 1..21: note = RE
  misc_feature 22..25: note = Core
  misc_feature 26..50: note = LE
gtgagggttgacacaggatgtctcactggactaccctcccgcgaaagtcc

SEQ ID NO: 32602 - DNA, 50 bp, unidentified
  source 1..50: mol_type = unassigned DNA; note = donor_36b9cde
  misc_feature 1..23: note = RE
  misc_feature 24..25: note = Core
  misc_feature 26..50: note = LE
atacttgacatatcaccgctggactcgtataatatcttttagatacaata

SEQ ID NO: 32603 - DNA, 50 bp, unidentified
  source 1..50: mol_type = unassigned DNA; note = donor_36ba787
  misc_feature 1..24: note = RE
  misc_feature 25: note = Core
  misc_feature 26..50: note = LE
aaaattggtttttaactcagttcttcttaagtttgtattttataaattta

SEQ ID NO: 32604 - DNA, 50 bp, unidentified
  source 1..50: mol_type = unassigned DNA; note = donor_36cdac0
  misc_feature 1..24: note = RE
  misc_feature 25: note = Core
  misc_feature 26..50: note = LE
cacaccttgacaagagaggggagcctacttaacactggtgtcagggccta

SEQ ID NO: 32605 - DNA, 50 bp, unidentified
  source 1..50: mol_type = unassigned DNA; note = donor_36d1cfe
  misc_feature 1..24: note = RE
  misc_feature 25: note = Core
  misc_feature 26..50: note = LE
tgcaaaaaaaggggtgaccatagataatgagatggtcgcccccacaccct

SEQ ID NO: 32606 - DNA, 50 bp, unidentified
  source 1..50: mol_type = unassigned DNA; note = donor_36d567f
  misc_feature 1..24: note = RE
  misc_feature 25: note = Core
  misc_feature 26..50: note = LE
ttggcaatgcatgtgttccatagaagtaaagccaagcctttgtcttgatt

SEQ ID NO: 32607 - DNA, 50 bp, unidentified
  source 1..50: mol_type = unassigned DNA; note = donor_36e58c8
  misc_feature 1..24: note = RE
  misc_feature 25: note = Core
  misc_feature 26..50: note = LE
ttgactaatggggaagcccttgtagaatgaaagggacttccccgtcccgg

SEQ ID NO: 32608 - DNA, 50 bp, unidentified
  source 1..50: mol_type = unassigned DNA; note = donor_36f1a89
  misc_feature 1..21: note = RE
  misc_feature 22..25: note = Core
  misc_feature 26..50: note = LE
caaccgaaggggcgtccacagatgatggggtggacgccccccgacggcat

SEQ ID NO: 32609 - DNA, 50 bp, unidentified
  source 1..50: mol_type = unassigned DNA; note = donor_36f2fa0
  misc_feature 1..23: note = RE
  misc_feature 24..25: note = Core
  misc_feature 26..50: note = LE
ccctcgggtgaacatcacagttgcctgtctgatgcgacggtggtatgaag

SEQ ID NO: 32610 - DNA, 50 bp, unidentified
  source 1..50: mol_type = unassigned DNA; note = donor_36f5bad
  misc_feature 1..23: note = RE
  misc_feature 24..25: note = Core
  misc_feature 26..50: note = LE
gcatcacgggcggcaaccaaagaagatgggatggttgccgccctccccag

SEQ ID NO: 32611 - DNA, 50 bp, unidentified
  source 1..50: mol_type = unassigned DNA; note = donor_371465c
  misc_feature 1..22: note = RE
  misc_feature 23..25: note = Core
  misc_feature 26..50: note = LE
ctattgactatttatagtttgacacgtataatccaattatcagtagatga

SEQ ID NO: 32612 - DNA, 50 bp, unidentified
  source 1..50: mol_type = unassigned DNA; note = donor_3715d2f
  misc_feature 1..23: note = RE
  misc_feature 24..25: note = Core
  misc_feature 26..50: note = LE
ttgcaaacgggatgcgttcatataaatgtaatgaacgcatcccacttctt

SEQ ID NO: 32613 - DNA, 50 bp, unidentified
  source 1..50: mol_type = unassigned DNA; note = donor_3717739
  misc_feature 1..22: note = RE
  misc_feature 23..25: note = Core
  misc_feature 26..50: note = LE
ctcttgactttttatagttagtcttatataatttatttaggttgataaag

SEQ ID NO: 32614 - DNA, 50 bp, unidentified
  source 1..50: mol_type = unassigned DNA; note = donor_3719ddf
  misc_feature 1..24: note = RE
  misc_feature 25: note = Core
  misc_feature 26..50: note = LE
gcaaaatcgggaggcgtccatgtaatgtcatggacgcctccctctctcag

SEQ ID NO: 32615 - DNA, 50 bp, unidentified
  source 1..50: mol_type = unassigned DNA; note = donor_371c27f
  misc_feature 1..23: note = RE
  misc_feature 24..25: note = Core
  misc_feature 26..50: note = LE
cgaggtgagggttaagacggtatcttgtatctcgactacagcctttcagt

SEQ ID NO: 32616 - DNA, 50 bp, unidentified
  source 1..50: mol_type = unassigned DNA; note = donor_371c8e7
  misc_feature 1..23: note = RE
  misc_feature 24..25: note = Core
  misc_feature 26..50: note = LE
gacaccggaaggcccgttacagaagatggggtaacgggccggcttggaag

SEQ ID NO: 32617 - DNA, 50 bp, unidentified
  source 1..50: mol_type = unassigned DNA; note = donor_372dc4b
  misc_feature 1..23: note = RE
  misc_feature 24..25: note = Core
  misc_feature 26..50: note = LE
ttacctctactttctttcacactaatctccattccgcaggcaagccgcag

SEQ ID NO: 32618 - DNA, 50 bp, unidentified
  source 1..50: mol_type = unassigned DNA; note = donor_3734a8a
  misc_feature 1..24: note = RE
  misc_feature 25: note = Core
  misc_feature 26..50: note = LE
cgcaaaaatgggggggaccatagataatgagatggtcaccacaccctaac

SEQ ID NO: 32619 - DNA, 50 bp, unidentified; identical to SEQ ID NO: 30522
  source 1..50: mol_type = unassigned DNA; note = donor_3736c00
  misc_feature 1..23: note = RE
  misc_feature 24..25: note = Core
  misc_feature 26..50: note = LE

SEQ ID NO: 32620 - DNA, 50 bp, unidentified
  source 1..50: mol_type = unassigned DNA; note = donor_3741bca
  misc_feature 1..23: note = RE
  misc_feature 24..25: note = Core
  misc_feature 26..50: note = LE
gacgatcaaaggcccattacagaagatgccgtaatgggccggcatctcaa

SEQ ID NO: 32621 - DNA, 50 bp, unidentified
  source 1..50: mol_type = unassigned DNA; note = donor_3742100
  misc_feature 1..22: note = RE
  misc_feature 23..25: note = Core
  misc_feature 26..50: note = LE
attgacaaatcgctttaacaggcatataaaggaactgcccttcggagctt

SEQ ID NO: 32622 - DNA, 50 bp, unidentified
  source 1..50: mol_type = unassigned DNA; note = donor_3742edd
  misc_feature 1..24: note = RE
  misc_feature 25: note = Core
  misc_feature 26..50: note = LE
tgcaaaagaggaggagtccatatacaatgggatggactccccctccccga

SEQ ID NO: 32623 - DNA, 50 bp, unidentified
  source 1..50: mol_type = unassigned DNA; note = donor_374544f
  misc_feature 1..24: note = RE
  misc_feature 25: note = Core
  misc_feature 26..50: note = LE
tgcaaacggggaggactccatatacaatgggatggagtcctccccaccct

SEQ ID NO: 32624 - DNA, 50 bp, unidentified; identical to SEQ ID NO: 32577
  source 1..50: mol_type = unassigned DNA; note = donor_37461e9
  misc_feature 1..23: note = RE
  misc_feature 24..25: note = Core
  misc_feature 26..50: note = LE

SEQ ID NO: 32625 - DNA, 50 bp, unidentified
  source 1..50: mol_type = unassigned DNA; note = donor_37463b1
  misc_feature 1..24: note = RE
  misc_feature 25: note = Core
  misc_feature 26..50: note = LE
gacgcgcttgacacaaagaggattctgatggaggatgtgaagcaaggcgt

SEQ ID NO: 32626 - DNA, 50 bp, unidentified; identical to SEQ ID NO: 30636
  source 1..50: mol_type = unassigned DNA; note = donor_3749a19
  misc_feature 1..24: note = RE
  misc_feature 25: note = Core
  misc_feature 26..50: note = LE

SEQ ID NO: 32627 - DNA, 50 bp, unidentified
  source 1..50: mol_type = unassigned DNA; note = donor_374a0ab
  misc_feature 1..23: note = RE
  misc_feature 24..25: note = Core
  misc_feature 26..50: note = LE
ccgcttgactcttaggagagcatcagtgagactgcttgtgctggtgttct

SEQ ID NO: 32628 - DNA, 50 bp, unidentified
  source 1..50: mol_type = unassigned DNA; note = donor_374b7d1
  misc_feature 1..24: note = RE
  misc_feature 25: note = Core
  misc_feature 26..50: note = LE
ttacttgttttttaacacagttcttcttaagttagctttattaaatatta

SEQ ID NO: 32629 - DNA, 50 bp, unidentified
  source 1..50: mol_type = unassigned DNA; note = donor_3750d57
  misc_feature 1..24: note = RE
  misc_feature 25: note = Core
  misc_feature 26..50: note = LE
gcaataacgggacgtaccatatattaatgagatggtacgtccctccctgc

SEQ ID NO: 32630 - DNA, 50 bp, unidentified
  source 1..50: mol_type = unassigned DNA; note = donor_37544b2
  misc_feature 1..23: note = RE
  misc_feature 24..25: note = Core
  misc_feature 26..50: note = LE
ttgcttgaccaagaccatagaatcttgtatggtgtggatgcgtctttcga

SEQ ID NO: 32631 - DNA, 50 bp, unidentified; identical to SEQ ID NO: 30466
  source 1..50: mol_type = unassigned DNA; note = donor_3756e29
  misc_feature 1..23: note = RE
  misc_feature 24..25: note = Core
  misc_feature 26..50: note = LE

SEQ ID NO: 32632 - DNA, 50 bp, unidentified
  source 1..50: mol_type = unassigned DNA; note = donor_375a1db
  misc_feature 1..23: note = RE
  misc_feature 24..25: note = Core
  misc_feature 26..50: note = LE
gcgccagttcaccaagacagttgcttgtgtccggagaatcaattacaggc

SEQ ID NO: 32633 - DNA, 50 bp, unidentified
  source 1..50: mol_type = unassigned DNA; note = donor_37614dd
  misc_feature 1..22: note = RE
  misc_feature 23..25: note = Core
  misc_feature 26..50: note = LE
ttaccctattgacatagaaggtcttatctgttaaactcaacttagacagc

SEQ ID NO: 32634 - DNA, 50 bp, unidentified
  source 1..50: mol_type = unassigned DNA; note = donor_3766a2a
  misc_feature 1..22: note = RE
  misc_feature 23..25: note = Core
  misc_feature 26..50: note = LE
gactaggggcgccgtccagacatgatggggtggacggcgccccgacggca

SEQ ID NO: 32635 - DNA, 50 bp, unidentified
  source 1..50: mol_type = unassigned DNA; note = donor_376b2c9
  misc_feature 1..22: note = RE
  misc_feature 23..25: note = Core
  misc_feature 26..50: note = LE
ctgcttgatttcctcattgaaactccgtaagttgttggatggtccggaag

SEQ ID NO: 32636 - DNA, 50 bp, unidentified
  source 1..50: mol_type = unassigned DNA; note = donor_376c3a8
  misc_feature 1..23: note = RE
  misc_feature 24..25: note = Core
  misc_feature 26..50: note = LE
atacttgactggcaacacggttacttgtatcttgctcatgtcgtgattag

SEQ ID NO: 32637 - DNA, 50 bp, unidentified
  source 1..50: mol_type = unassigned DNA; note = donor_3773e74
  misc_feature 1..23: note = RE
  misc_feature 24..25: note = Core
  misc_feature 26..50: note = LE
cctcttgacatttcaccgctggactcgtataatatctttatagatatatt

SEQ ID NO: 32638 - DNA, 50 bp, unidentified
  source 1..50: mol_type = unassigned DNA; note = donor_3782587
  misc_feature 1..23: note = RE
  misc_feature 24..25: note = Core
  misc_feature 26..50: note = LE
gcgttatgtagtgcgattagacgacatggggtaatcgcgggagcgagtcg

SEQ ID NO: 32639 - DNA, 50 bp, unidentified; identical to SEQ ID NO: 32586
  source 1..50: mol_type = unassigned DNA; note = donor_3784958
  misc_feature 1..22: note = RE
  misc_feature 23..25: note = Core
  misc_feature 26..50: note = LE

SEQ ID NO: 32640 - DNA, 50 bp, unidentified
  source 1..50: mol_type = unassigned DNA; note = donor_3785833
  misc_feature 1..23: note = RE
  misc_feature 24..25: note = Core
  misc_feature 26..50: note = LE
ttgcagacggggtgggccatacgttatggatggcccacccctcatcatcg

SEQ ID NO: 32641 - DNA, 50 bp, unidentified
  source 1..50: mol_type = unassigned DNA; note = donor_378b404
  misc_feature 1..23: note = RE
  misc_feature 24..25: note = Core
  misc_feature 26..50: note = LE
tgcagaaaagggggtaaccatagatgaaatggctacccccccgctgcccc

SEQ ID NO: 32642 - DNA, 50 bp, unidentified
  source 1..50: mol_type = unassigned DNA; note = donor_3791536
  misc_feature 1..23: note = RE
  misc_feature 24..25: note = Core
  misc_feature 26..50: note = LE
tggcttgctgaaaaccatagaatcttgtatggttagacttgaaggggtgg

SEQ ID NO: 32643 - DNA, 50 bp, unidentified
  source 1..50: mol_type = unassigned DNA; note = donor_3796b43
  misc_feature 1..23: note = RE
  misc_feature 24..25: note = Core
  misc_feature 26..50: note = LE
tcgcttgactttcaatagctggtctggtaaaataaagtagaattgtacca

SEQ ID NO: 32644 - DNA, 50 bp, unidentified; identical to SEQ ID NO: 30458
  source 1..50: mol_type = unassigned DNA; note = donor_379be3e
  misc_feature 1..23: note = RE
  misc_feature 24..25: note = Core
  misc_feature 26..50: note = LE

SEQ ID NO: 32645 - DNA, 50 bp, unidentified
  source 1..50: mol_type = unassigned DNA; note = donor_37a960a
  misc_feature 1..23: note = RE
  misc_feature 24..25: note = Core
  misc_feature 26..50: note = LE
gccaacgcggagccgtccacacatgatgctgtggacggctccttcaacgg

SEQ ID NO: 32646 - DNA, 50 bp, unidentified
  source 1..50: mol_type = unassigned DNA; note = donor_37b89e7
  misc_feature 1..23: note = RE
  misc_feature 24..25: note = Core
  misc_feature 26..50: note = LE
gcgcttgactcggaagacggttacttgtatctttagaccagaccagcgcg

SEQ ID NO: 32647 - DNA, 50 bp, unidentified
  source 1..50: mol_type = unassigned DNA; note = donor_37b90c3
  misc_feature 1..23: note = RE
  misc_feature 24..25: note = Core
  misc_feature 26..50: note = LE
tctattgacatcacaccattagactcgtataataagttataaagtaaata

SEQ ID NO: 32648 - DNA, 50 bp, unidentified
  source 1..50: mol_type = unassigned DNA; note = donor_37bc599
  misc_feature 1..23: note = RE
  misc_feature 24..25: note = Core
  misc_feature 26..50: note = LE
gacttgacaaaccgatagggacaccattaccatgttaagtaggttccaaa

SEQ ID NO: 32649 - DNA, 50 bp, unidentified
  source 1..50: mol_type = unassigned DNA; note = donor_37c2aa5
  misc_feature 1..24: note = RE
  misc_feature 25: note = Core
  misc_feature 26..50: note = LE
catttgacttataatagttagtcttcgtataatagagtagtagtgattta

SEQ ID NO: 32650 - DNA, 50 bp, unidentified
  source 1..50: mol_type = unassigned DNA; note = donor_37c8212
  misc_feature 1..23: note = RE
  misc_feature 24..25: note = Core
  misc_feature 26..50: note = LE
cctcttgacatatcaccgctggactcgtataataagtttatagttaatag

SEQ ID NO: 32651 - DNA, 50 bp, unidentified
  source 1..50: mol_type = unassigned DNA; note = donor_37c8627
  misc_feature 1..23: note = RE
  misc_feature 24..25: note = Core
  misc_feature 26..50: note = LE
agcattgcagggcaccatagaatcttgtatggttacccggcaagtcttag

SEQ ID NO: 32652 - DNA, 50 bp, unidentified
  source 1..50: mol_type = unassigned DNA; note = donor_37cb857
  misc_feature 1..24: note = RE
  misc_feature 25: note = Core
  misc_feature 26..50: note = LE
aactacttgacttttaatagtttgtcacgtataatccaattatcgggtga

SEQ ID NO: 32653 - DNA, 50 bp, unidentified
  source 1..50: mol_type = unassigned DNA; note = donor_37cb893
  misc_feature 1..23: note = RE
  misc_feature 24..25: note = Core
  misc_feature 26..50: note = LE
gcattatcggcggcaaccacagaagatggggtggttgccgccctcccttg

SEQ ID NO: 32654 - DNA, 50 bp, unidentified
  source 1..50: mol_type = unassigned DNA; note = donor_37d2d78
  misc_feature 1..23: note = RE
  misc_feature 24..25: note = Core
  misc_feature 26..50: note = LE
cttgcgcatggggcagttatacatgatgatgtgaccgctccctgacggca

SEQ ID NO: 32655 - DNA, 50 bp, unidentified
  source 1..50: mol_type = unassigned DNA; note = donor_37d3272
  misc_feature 1..21: note = RE
  misc_feature 22..25: note = Core
  misc_feature 26..50: note = LE
ttgacaaagtcgtttaacaggcatataaaagaagtagccctaaataacat

SEQ ID NO: 32656 - DNA, 50 bp, unidentified
  source 1..50: mol_type = unassigned DNA; note = donor_37d6fc8
  misc_feature 1..23: note = RE
  misc_feature 24..25: note = Core
  misc_feature 26..50: note = LE
gccacgcgggagccatccatacatgatggagtggatggctcccgctcccg

SEQ ID NO: 32657 - DNA, 50 bp, unidentified
  source 1..50: mol_type = unassigned DNA; note = donor_37df897
  misc_feature 1..23: note = RE
  misc_feature 24..25: note = Core
  misc_feature 26..50: note = LE
cctcttgactttgaagacagttgcttgtatctttaatttgatgtgtgtgt

SEQ ID NO: 32658 - DNA, 50 bp, unidentified
  source 1..50: mol_type = unassigned DNA; note = donor_37e03ae
  misc_feature 1..23: note = RE
  misc_feature 24..25: note = Core
  misc_feature 26..50: note = LE
gcaccgggatgggcgtccacagatgatggggtggacgcccccaaacggca

SEQ ID NO: 32659 - DNA, 50 bp, unidentified
  source 1..50: mol_type = unassigned DNA; note = donor_3800fbb
  misc_feature 1..23: note = RE
  misc_feature 24..25: note = Core
  misc_feature 26..50: note = LE
gactcgtcgaggcccgttacagaagatggggtaacggtccggcgccaggg

SEQ ID NO: 32660 - DNA, 50 bp, unidentified
  source 1..50: mol_type = unassigned DNA; note = donor_380b62f
  misc_feature 1..24: note = RE
  misc_feature 25: note = Core
  misc_feature 26..50: note = LE
tgcagcgaagaggaagtccttatagaatgaaagggacttccccgagccgg

SEQ ID NO: 32661 - DNA, 50 bp, unidentified
  source 1..50: mol_type = unassigned DNA; note = donor_380c2f3
  misc_feature 1..24: note = RE
  misc_feature 25: note = Core
  misc_feature 26..50: note = LE
tggaaatatggcaaacctagaatacctttggtctaataaagatacttttt

SEQ ID NO: 32662 - DNA, 50 bp, unidentified
  source 1..50: mol_type = unassigned DNA; note = donor_381aea3
  misc_feature 1..23: note = RE
  misc_feature 24..25: note = Core
  misc_feature 26..50: note = LE
tgacatcaaacctcctgggatgtctaatcagtcatgggagtgagcccatt

SEQ ID NO: 32663 - DNA, 50 bp, unidentified
  source 1..50: mol_type = unassigned DNA; note = donor_381cd09
  misc_feature 1..23: note = RE
  misc_feature 24..25: note = Core
  misc_feature 26..50: note = LE
ctgcttgacgaaaaacatagaaccttgtatgtttagaggtgtcggggtga

SEQ ID NO: 32664 - DNA, 50 bp, unidentified
  source 1..50: mol_type = unassigned DNA; note = donor_3826ac5
  misc_feature 1..23: note = RE
  misc_feature 24..25: note = Core
  misc_feature 26..50: note = LE
gacctcaacacgccgattagagaagatggggtaatcggcttagaacccca

SEQ ID NO: 32665 - DNA, 50 bp, unidentified
  source 1..50: mol_type = unassigned DNA; note = donor_382c2f3
  misc_feature 1..24: note = RE
  misc_feature 25: note = Core
  misc_feature 26..50: note = LE
ccgcgtcttgacacagaagggagcctacttgtttcattgacgtaaggacc

SEQ ID NO: 32666 - DNA, 50 bp, unidentified
  source 1..50: mol_type = unassigned DNA; note = donor_38399c1
  misc_feature 1..24: note = RE
  misc_feature 25: note = Core
  misc_feature 26..50: note = LE
tccgattgacatccataggagcatcagtgatgatggaggggtgagcgctt

SEQ ID NO: 32667 - DNA, 50 bp, unidentified
  source 1..50: mol_type = unassigned DNA; note = donor_383c7ec
  misc_feature 1..24: note = RE
  misc_feature 25: note = Core
  misc_feature 26..50: note = LE
ccggcttgacatccataggagcatcagtgagaatgccgtagggcctgcac

SEQ ID NO: 32668 - DNA, 50 bp, unidentified
  source 1..50: mol_type = unassigned DNA; note = donor_38456af
  misc_feature 1..24: note = RE
  misc_feature 25: note = Core
  misc_feature 26..50: note = LE
cagcttgacgtttaagacggtagcttgtatcttgaaccctgtagtaggtg

SEQ ID NO: 32669 - DNA, 50 bp, unidentified; identical to SEQ ID NO: 31731
  source 1..50: mol_type = unassigned DNA; note = donor_385ee67
  misc_feature 1..23: note = RE
  misc_feature 24..25: note = Core
  misc_feature 26..50: note = LE

SEQ ID NO: 32670 - DNA, 50 bp, unidentified
  source 1..50: mol_type = unassigned DNA; note = donor_38641a8
  misc_feature 1..23: note = RE
  misc_feature 24..25: note = Core
  misc_feature 26..50: note = LE
gcaaaaatgggggtgaccatagattaatgagatggtcaccccacaccctg

SEQ ID NO: 32671 - DNA, 50 bp, unidentified
  source 1..50: mol_type = unassigned DNA; note = donor_3868a9a
  misc_feature 1..22: note = RE
  misc_feature 23..25: note = Core
  misc_feature 26..50: note = LE
catcacgggcggcaaccacagaagatggggtggttgccgccctcccgaac

SEQ ID NO: 32672 - DNA, 50 bp, unidentified
  source 1..50: mol_type = unassigned DNA; note = donor_3871135
  misc_feature 1..23: note = RE
  misc_feature 24..25: note = Core
  misc_feature 26..50: note = LE
cctattgactttttatttgcaggctactacaataagatttgttgggaaag

SEQ ID NO: 32673 - DNA, 50 bp, unidentified
  source 1..50: mol_type = unassigned DNA; note = donor_387488a
  misc_feature 1..23: note = RE
  misc_feature 24..25: note = Core
  misc_feature 26..50: note = LE
atgcttgcgtctgaacagggtatcttgtatgttgctaacgcgtcacatgg

SEQ ID NO: 32674 - DNA, 50 bp, unidentified
  source 1..50: mol_type = unassigned DNA; note = donor_387a9d0
  misc_feature 1..23: note = RE
  misc_feature 24..25: note = Core
  misc_feature 26..50: note = LE
tgcaaaccgggccgttccacatatgatggtgtggaacggcccttcgaggc

SEQ ID NO: 32675 - DNA, 50 bp, unidentified
  source 1..50: mol_type = unassigned DNA; note = donor_3899688
  misc_feature 1..23: note = RE
  misc_feature 24..25: note = Core
  misc_feature 26..50: note = LE
gacacccttagctctaggggtgtctaatgggtgttaccgggtcggtcgct

SEQ ID NO: 32676 - DNA, 50 bp, unidentified
  source 1..50: mol_type = unassigned DNA; note = donor_38a51c7
  misc_feature 1..23: note = RE
  misc_feature 24..25: note = Core
  misc_feature 26..50: note = LE
gcctctcgggggccatccacacatgatggggtggatggccccctcagcgg

SEQ ID NO: 32677 - DNA, 50 bp, unidentified
  source 1..50: mol_type = unassigned DNA; note = donor_38a9aac
  misc_feature 1..23: note = RE
  misc_feature 24..25: note = Core
  misc_feature 26..50: note = LE
gcataacagggggcatccacacatgatagagtggatgccccctcccgacg

SEQ ID NO: 32678 - DNA, 50 bp, unidentified
  source 1..50: mol_type = unassigned DNA; note = donor_38c0a86
  misc_feature 1..23: note = RE
  misc_feature 24..25: note = Core
  misc_feature 26..50: note = LE
tgacacgcgggccgttccacatatgatgaggtggaacagcccgctacgac

SEQ ID NO: 32679 - DNA, 50 bp, unidentified
  source 1..50: mol_type = unassigned DNA; note = donor_38c37a2
  misc_feature 1..23: note = RE
  misc_feature 24..25: note = Core
  misc_feature 26..50: note = LE
gacacgctatgggcgtgggatgtctaatggggatcgaccacctccttcgt

SEQ ID NO: 32680 - DNA, 50 bp, unidentified
  source 1..50: mol_type = unassigned DNA; note = donor_38d44a5
  misc_feature 1..23: note = RE
  misc_feature 24..25: note = Core
  misc_feature 26..50: note = LE
ttgcaaaagggaggcgtccatatagaatgaaatggacgcctcccacctga

SEQ ID NO: 32681 - DNA, 50 bp, unidentified
  source 1..50: mol_type = unassigned DNA; note = donor_38d8539
  misc_feature 1..23: note = RE
  misc_feature 24..25: note = Core
  misc_feature 26..50: note = LE
ccacttgactgccaagacggtatcttgtatcttgaaggcggtggtgatta

SEQ ID NO: 32682 - DNA, 50 bp, unidentified
  source 1..50: mol_type = unassigned DNA; note = donor_38d9b4b
  misc_feature 1..23: note = RE
  misc_feature 24..25: note = Core
  misc_feature 26..50: note = LE
gacctcaccgggccgtccacacatgttggggtggacggccctacggcatc

SEQ ID NO: 32683 - DNA, 50 bp, unidentified
  source 1..50: mol_type = unassigned DNA; note = donor_38ebcde
  misc_feature 1..23: note = RE
  misc_feature 24..25: note = Core
  misc_feature 26..50: note = LE
gtacgactgggggcatccatacatgatggagtggatgccccctcccgacg

SEQ ID NO: 32684 - DNA, 50 bp, unidentified; identical to SEQ ID NO: 30847
  source 1..50: mol_type = unassigned DNA; note = donor_38eda4a
  misc_feature 1..24: note = RE
  misc_feature 25: note = Core
  misc_feature 26..50: note = LE

SEQ ID NO: 32685 - DNA, 50 bp, unidentified
  source 1..50: mol_type = unassigned DNA; note = donor_38f0d09
  misc_feature 1..23: note = RE
  misc_feature 24..25: note = Core
  misc_feature 26..50: note = LE
ccgcttgactttcaagacagttgcttgtatctagcactcgagagagtttg

SEQ ID NO: 32686 - DNA, 50 bp, unidentified
  source 1..50: mol_type = unassigned DNA; note = donor_38f3aea
  misc_feature 1..23: note = RE
  misc_feature 24..25: note = Core
  misc_feature 26..50: note = LE
tgccggcagggagcgtccacatatgatggagtggatgctccctgctcacc

SEQ ID NO: 32687 - DNA, 50 bp, unidentified
  source 1..50: mol_type = unassigned DNA; note = donor_38f5bc9
  misc_feature 1..23: note = RE
  misc_feature 24..25: note = Core
  misc_feature 26..50: note = LE
gcatcgtcagggccgtccacacatgatgttgtggacggcccccgcacgaa

SEQ ID NO: 32688 - DNA, 50 bp, unidentified
  source 1..50: mol_type = unassigned DNA; note = donor_38ff1f2
  misc_feature 1..23: note = RE
  misc_feature 24..25: note = Core
  misc_feature 26..50: note = LE
tcagttgactttaaacacagctgcttgtatgtttaaagtcacttcagtta

SEQ ID NO: 32689 - DNA, 50 bp, unidentified
  source 1..50: mol_type = unassigned DNA; note = donor_390c23b
  misc_feature 1..24: note = RE
  misc_feature 25: note = Core
  misc_feature 26..50: note = LE
cttgccgacggggcgggccatacgtatggatggcccgccgcttaagcgag

SEQ ID NO: 32690 - DNA, 50 bp, unidentified
  source 1..50: mol_type = unassigned DNA; note = donor_390ce9b
  misc_feature 1..23: note = RE
  misc_feature 24..25: note = Core
  misc_feature 26..50: note = LE
caaaactaaggctgaccatacatttaatgagatggtcagcctgaccgaaa

SEQ ID NO: 32691 - DNA, 50 bp, unidentified
  source 1..50: mol_type = unassigned DNA; note = donor_390dd2b
  misc_feature 1..23: note = RE
  misc_feature 24..25: note = Core
  misc_feature 26..50: note = LE
acaacttgcaaatgtcatagaaatcctttagatttatactaggaaaaata

SEQ ID NO: 32692 - DNA, 50 bp, unidentified
  source 1..50: mol_type = unassigned DNA; note = donor_3911a92
  misc_feature 1..24: note = RE
  misc_feature 25: note = Core
  misc_feature 26..50: note = LE
ccgtctcttgacacagcggggtgcctacttatctactggtgctacgaccg

SEQ ID NO: 32693 - DNA, 50 bp, unidentified
  source 1..50: mol_type = unassigned DNA; note = donor_3912646
  misc_feature 1..20: note = RE
  misc_feature 21..25: note = Core
  misc_feature 26..50: note = LE
ttgacaacgacatagagacacccccgttaccttcttgatcaagcccggtg

SEQ ID NO: 32694 - DNA, 50 bp, unidentified
  source 1..50: mol_type = unassigned DNA; note = donor_3918348
  misc_feature 1..23: note = RE
  misc_feature 24..25: note = Core
  misc_feature 26..50: note = LE
gacgagcaagggcccattacagaagatgccgtaatgggccggcactcctc

SEQ ID NO: 32695 - DNA, 50 bp, unidentified
  source 1..50: mol_type = unassigned DNA; note = donor_391ac67
  misc_feature 1..23: note = RE
  misc_feature 24..25: note = Core
  misc_feature 26..50: note = LE
gcacaatatgaggagtccatataagatgtatggactcctccccttaacgg

SEQ ID NO: 32696 - DNA, 50 bp, unidentified
  source 1..50: mol_type = unassigned DNA; note = donor_391af82
  misc_feature 1..24: note = RE
  misc_feature 25: note = Core
  misc_feature 26..50: note = LE
ttatttggattttaacatagaaagctctaactttgcataggattgcgacg

SEQ ID NO: 32697 - DNA, 50 bp, unidentified
  source 1..50: mol_type = unassigned DNA; note = donor_39321f4
  misc_feature 1..24: note = RE
  misc_feature 25: note = Core
  misc_feature 26..50: note = LE
cacccttgacaggcatagaaggatctgtgaggattgtggtggctggtctg

SEQ ID NO: 32698 - DNA, 50 bp, unidentified
  source 1..50: mol_type = unassigned DNA; note = donor_3933dca
  misc_feature 1..23: note = RE
  misc_feature 24..25: note = Core
  misc_feature 26..50: note = LE
cctattgacttttatttgcaggtctactataataaaattagtcggtaaat

SEQ ID NO: 32699 - DNA, 50 bp, unidentified
  source 1..50: mol_type = unassigned DNA; note = donor_3935bcf
  misc_feature 1..24: note = RE
  misc_feature 25: note = Core
  misc_feature 26..50: note = LE
tgcaaacgaggaggggtccatatacaatgggatggacccctcctcaccta

SEQ ID NO: 32700 - DNA, 50 bp, unidentified
  source 1..50: mol_type = unassigned DNA; note = donor_393e36d
  misc_feature 1..23: note = RE
  misc_feature 24..25: note = Core
  misc_feature 26..50: note = LE
ggacttgactaacaacacggttacttgtatctttctcacgtagtgattag

SEQ ID NO: 32701 - DNA, 50 bp, unidentified
  source 1..50: mol_type = unassigned DNA; note = donor_3944f6b
  misc_feature 1..23: note = RE
  misc_feature 24..25: note = Core
  misc_feature 26..50: note = LE
gggctaggcatgaaccatagaatcttgtatggtaggacttgaagggagga

SEQ ID NO: 32702 - DNA, 50 bp, unidentified
  source 1..50: mol_type = unassigned DNA; note = donor_3947597
  misc_feature 1..22: note = RE
  misc_feature 23..25: note = Core
  misc_feature 26..50: note = LE
ggaaataaatttagttcattagaaaccgtcactaagtgaacttacccaat

SEQ ID NO: 32703 - DNA, 50 bp, unidentified
  source 1..50: mol_type = unassigned DNA; note = donor_394a61b
  misc_feature 1..23: note = RE
  misc_feature 24..25: note = Core
  misc_feature 26..50: note = LE
cggcccttgacacagagaggcgtcaacttgttgaattggggtcaggaggg

SEQ ID NO: 32704 - DNA, 50 bp, unidentified; identical to SEQ ID NO: 30828
  source 1..50: mol_type = unassigned DNA; note = donor_394bcf8
  misc_feature 1..23: note = RE
  misc_feature 24..25: note = Core
  misc_feature 26..50: note = LE

SEQ ID NO: 32705 - DNA, 50 bp, unidentified
  source 1..50: mol_type = unassigned DNA; note = donor_39600ee
  misc_feature 1..23: note = RE
  misc_feature 24..25: note = Core
  misc_feature 26..50: note = LE
tgacatcccggctccagggatgtctaatgggaggtaccgggtcggctgat

SEQ ID NO: 32706 - DNA, 50 bp, unidentified
  source 1..50: mol_type = unassigned DNA; note = donor_39603cd
  misc_feature 1..24: note = RE
  misc_feature 25: note = Core
  misc_feature 26..50: note = LE
tgcccgggcggggcaggccatacataatgggatggcctgccccgccctcc

SEQ ID NO: 32707 - DNA, 50 bp, unidentified
  source 1..50: mol_type = unassigned DNA; note = donor_39633b8
  misc_feature 1..23: note = RE
  misc_feature 24..25: note = Core
  misc_feature 26..50: note = LE
aggcttgacaggtgagacggtatcttgtatcttgaacgtgttggtggtta

SEQ ID NO: 32708 - DNA, 50 bp, unidentified
  source 1..50: mol_type = unassigned DNA; note = donor_3972111
  misc_feature 1..23: note = RE
  misc_feature 24..25: note = Core
  misc_feature 26..50: note = LE
tgacatgaatcggcatgggatgtctaatgagagaagccgggccacttgct

SEQ ID NO: 32709 - DNA, 50 bp, unidentified
  source 1..50: mol_type = unassigned DNA; note = donor_397575f
  misc_feature 1..23: note = RE
  misc_feature 24..25: note = Core
  misc_feature 26..50: note = LE
gacaaccaagcgccatggggagtctaatgggggctaccgggttggcctgc

SEQ ID NO: 32710 - DNA, 50 bp, unidentified
  source 1..50: mol_type = unassigned DNA; note = donor_397d4dd
  misc_feature 1..23: note = RE
  misc_feature 24..25: note = Core
  misc_feature 26..50: note = LE
gcaaggcggaggccgtccacatatgttggtgtggacggcctccgtacggc

SEQ ID NO: 32711 - DNA, 50 bp, unidentified
  source 1..50: mol_type = unassigned DNA; note = donor_3981ade
  misc_feature 1..23: note = RE
  misc_feature 24..25: note = Core
  misc_feature 26..50: note = LE
gctccagttgggggcgccatatcagacaaaatagcgccccttctgggctt

SEQ ID NO: 32712 - DNA, 50 bp, unidentified
  source 1..50: mol_type = unassigned DNA; note = donor_3989179
  misc_feature 1..22: note = RE
  misc_feature 23..25: note = Core
  misc_feature 26..50: note = LE
caccaagggcggcaaccagagaagatgggatggttgccgccctcccccga

SEQ ID NO: 32713 - DNA, 50 bp, unidentified; identical to SEQ ID NO: 30604
  source 1..50: mol_type = unassigned DNA; note = donor_3999b33
  misc_feature 1..23: note = RE
  misc_feature 24..25: note = Core
  misc_feature 26..50: note = LE

SEQ ID NO: 32714 - DNA, 50 bp, unidentified
  source 1..50: mol_type = unassigned DNA; note = donor_399ac73
  misc_feature 1..23: note = RE
  misc_feature 24..25: note = Core
  misc_feature 26..50: note = LE
ttctttggagattaacacagaatctcttacctttgcaccagattatagat

SEQ ID NO: 32715 - DNA, 50 bp, unidentified; identical to SEQ ID NO: 31939
  source 1..50: mol_type = unassigned DNA; note = donor_399cde1
  misc_feature 1..22: note = RE
  misc_feature 23..25: note = Core
  misc_feature 26..50: note = LE

SEQ ID NO: 32716 - DNA, 50 bp, unidentified
  source 1..50: mol_type = unassigned DNA; note = donor_39a9525
  misc_feature 1..23: note = RE
  misc_feature 24..25: note = Core
  misc_feature 26..50: note = LE
atgcttgactttttatttgcagactactacaatgtatttatggttagtat

SEQ ID NO: 32717 - DNA, 50 bp, unidentified
  source 1..50: mol_type = unassigned DNA; note = donor_39b2162
  misc_feature 1..23: note = RE
  misc_feature 24..25: note = Core
  misc_feature 26..50: note = LE
acttgacaatccaagagggatgttctaccattggatttttcgcggagaca

SEQ ID NO: 32718 - DNA, 50 bp, unidentified; identical to SEQ ID NO: 30432
  source 1..50: mol_type = unassigned DNA; note = donor_39b2934
  misc_feature 1..24: note = RE
  misc_feature 25: note = Core
  misc_feature 26..50: note = LE

SEQ ID NO: 32719 - DNA, 50 bp, unidentified
  source 1..50: mol_type = unassigned DNA; note = donor_39b4cc5
  misc_feature 1..23: note = RE
  misc_feature 24..25: note = Core
  misc_feature 26..50: note = LE
atcgtttgcaaatgtcatagaaatcctttagacttgtatagttatattta

SEQ ID NO: 32720 - DNA, 50 bp, unidentified
  source 1..50: mol_type = unassigned DNA; note = donor_39c35e4
  misc_feature 1..23: note = RE
  misc_feature 24..25: note = Core
  misc_feature 26..50: note = LE
gcacccaaagggccgtccacacatgttggggtggacggccccgcggcatc

SEQ ID NO: 32721 - DNA, 50 bp, unidentified
  source 1..50: mol_type = unassigned DNA; note = donor_39c67c7
  misc_feature 1..23: note = RE
  misc_feature 24..25: note = Core
  misc_feature 26..50: note = LE
gcaaatcgggaggcgtccatgtaagatgtaatggacgccctcccttctta

SEQ ID NO: 32722 - DNA, 50 bp, unidentified
  source 1..50: mol_type = unassigned DNA; note = donor_39c9985
  misc_feature 1..23: note = RE
  misc_feature 24..25: note = Core
  misc_feature 26..50: note = LE
aggcttgcgcgaaaccatagaatcttgtatggttctatagccctcaccga

SEQ ID NO: 32723 - DNA, 50 bp, unidentified
  source 1..50: mol_type = unassigned DNA; note = donor_39d8ef4
  misc_feature 1..23: note = RE
  misc_feature 24..25: note = Core
  misc_feature 26..50: note = LE
ggtgttgcgtagcaacatagaatcttgtatgttcgaaacttgaaggggtg

SEQ ID NO: 32724 - DNA, 50 bp, unidentified
  source 1..50: mol_type = unassigned DNA; note = donor_39dc3de
  misc_feature 1..22: note = RE
  misc_feature 23..25: note = Core
  misc_feature 26..50: note = LE
cccaacaggggccgtccacacatgatgaggtggacggcccctgacccagc

SEQ ID NO: 32725 - DNA, 50 bp, unidentified
  source 1..50: mol_type = unassigned DNA; note = donor_39dccc1
  misc_feature 1..23: note = RE
  misc_feature 24..25: note = Core
  misc_feature 26..50: note = LE
ccaatacgggcggcgttcatataagatgacatgaacgccgcccgtccttt

SEQ ID NO: 32726 - DNA, 50 bp, unidentified
  source 1..50: mol_type = unassigned DNA; note = donor_39e58d2
  misc_feature 1..23: note = RE
  misc_feature 24..25: note = Core
  misc_feature 26..50: note = LE
aattggggcttgacaaagtacgtcctattagtgtatactggtagcagggc

SEQ ID NO: 32727 - DNA, 50 bp, unidentified
  source 1..50: mol_type = unassigned DNA; note = donor_39e691e
  misc_feature 1..23: note = RE
  misc_feature 24..25: note = Core
  misc_feature 26..50: note = LE
gacattaacaggggatccatataagatgtatggactcctccccctaacgg

SEQ ID NO: 32728 - DNA, 50 bp, unidentified; identical to SEQ ID NO: 30711
  source 1..50: mol_type = unassigned DNA; note = donor_39e8ac2
  misc_feature 1..24: note = RE
  misc_feature 25: note = Core
  misc_feature 26..50: note = LE

SEQ ID NO: 32729 - DNA, 50 bp, unidentified
  source 1..50: mol_type = unassigned DNA; note = donor_39f8bff
  misc_feature 1..23: note = RE
  misc_feature 24..25: note = Core
  misc_feature 26..50: note = LE
gcaaacggggaggagaccatatacgatgtgatggtctcctcccctcctaa

SEQ ID NO: 32730 - DNA, 50 bp, unidentified
  source 1..50: mol_type = unassigned DNA; note = donor_39fcf7b
  misc_feature 1..24: note = RE
  misc_feature 25: note = Core
  misc_feature 26..50: note = LE
cttggcatagggggcgtccatgtacaatgggatggacgcccccacccgta

SEQ ID NO: 32731 - DNA, 50 bp, unidentified
  source 1..50: mol_type = unassigned DNA; note = donor_3a0a2f9
  misc_feature 1..23: note = RE
  misc_feature 24..25: note = Core
  misc_feature 26..50: note = LE
cgacttgacaacggcattgggaagtcctacgtttcaagggcgggctcggg

SEQ ID NO: 32732 - DNA, 50 bp, unidentified
  source 1..50: mol_type = unassigned DNA; note = donor_3a0b712
  misc_feature 1..23: note = RE
  misc_feature 24..25: note = Core
  misc_feature 26..50: note = LE
cctcttgactttttattagcaggctcctataatgtatttatggtggttag

SEQ ID NO: 32733 - DNA, 50 bp, unidentified
  source 1..50: mol_type = unassigned DNA; note = donor_3a0d9ec
  misc_feature 1..23: note = RE
  misc_feature 24..25: note = Core
  misc_feature 26..50: note = LE
gccagcagggggccgtccacatatgttggggtggacggcccccgacggca

SEQ ID NO: 32734 - DNA, 50 bp, unidentified
  source 1..50: mol_type = unassigned DNA; note = donor_3a0df94
  misc_feature 1..21: note = RE
  misc_feature 22..25: note = Core
  misc_feature 26..50: note = LE
aaaaggggttgacttagggaactcattgctgcaccatggatggtgcgacc

SEQ ID NO: 32735 - DNA, 50 bp, unidentified
  source 1..50: mol_type = unassigned DNA; note = donor_3a1561b
  misc_feature 1..23: note = RE
  misc_feature 24..25: note = Core
  misc_feature 26..50: note = LE
gcgaaacgggggccgtccacatatgttggggtggacggcccccctacggc

SEQ ID NO: 32736 - DNA, 50 bp, unidentified
  source 1..50: mol_type = unassigned DNA; note = donor_3a1c284
  misc_feature 1..23: note = RE
  misc_feature 24..25: note = Core
  misc_feature 26..50: note = LE
gcatcacgggcggcaaccacagaagatggggtggttgccgccctcccaga

SEQ ID NO: 32737 - DNA, 50 bp, unidentified
  source 1..50: mol_type = unassigned DNA; note = donor_3a1dcf2
  misc_feature 1..23: note = RE
  misc_feature 24..25: note = Core
  misc_feature 26..50: note = LE
tgacatccaagctcatgggatgtctaatgagaggtgagcctgccggttcg

SEQ ID NO: 32738 - DNA, 50 bp, unidentified
  source 1..50: mol_type = unassigned DNA; note = donor_3a24c56
  misc_feature 1..24: note = RE
  misc_feature 25: note = Core
  misc_feature 26..50: note = LE
gtattgacatttattagctggacttagtataataatggtatagtcaatca

SEQ ID NO: 32739 - DNA, 50 bp, unidentified
  source 1..50: mol_type = unassigned DNA; note = donor_3a27b02
  misc_feature 1..23: note = RE
  misc_feature 24..25: note = Core
  misc_feature 26..50: note = LE
gttgacaagggggagtccacataagataattggactcccccatattctga

SEQ ID NO: 32740 - DNA, 50 bp, unidentified
  source 1..50: mol_type = unassigned DNA; note = donor_3a28b94
  misc_feature 1..23: note = RE
  misc_feature 24..25: note = Core
  misc_feature 26..50: note = LE
gtgcttgaccgtcaagacggttgcttgtatctttaggcctcggaccagct

SEQ ID NO: 32741 - DNA, 50 bp, unidentified
  source 1..50: mol_type = unassigned DNA; note = donor_3a2dd5d
  misc_feature 1..22: note = RE
  misc_feature 23..25: note = Core
  misc_feature 26..50: note = LE
catcacgggcggcaaccacagaagatgggatggttgccgccctcccctga

SEQ ID NO: 32742 - DNA, 50 bp, unidentified
  source 1..50: mol_type = unassigned DNA; note = donor_3a2e42e
  misc_feature 1..24: note = RE
  misc_feature 25: note = Core
  misc_feature 26..50: note = LE
ttgcaaagaggaggagtccatatacaatgggatggactcctcctctcctt

SEQ ID NO: 32743 - DNA, 50 bp, unidentified
  source 1..50: mol_type = unassigned DNA; note = donor_3a32738
  misc_feature 1..22: note = RE
  misc_feature 23..25: note = Core
  misc_feature 26..50: note = LE
atgttgactaactattagctggtttcgtattataaaggtcagccagttat

SEQ ID NO: 32744 - DNA, 50 bp, unidentified
  source 1..50: mol_type = unassigned DNA; note = donor_3a35b83
  misc_feature 1..22: note = RE
  misc_feature 23..25: note = Core
  misc_feature 26..50: note = LE
acctcaacacgccgaatagagaagatggggtattcggcttgagccccatc

SEQ ID NO: 32745 - DNA, 50 bp, unidentified
  source 1..50: mol_type = unassigned DNA; note = donor_3a383e8
  misc_feature 1..20: note = RE
  misc_feature 21..25: note = Core
  misc_feature 26..50: note = LE
cttgacaacacgattgggaagtcctacctttcgaagcgtgggtttgatcg

SEQ ID NO: 32746 - DNA, 50 bp, unidentified; identical to SEQ ID NO: 32248
  source 1..50: mol_type = unassigned DNA; note = donor_3a3a37d
  misc_feature 1..24: note = RE
  misc_feature 25: note = Core
  misc_feature 26..50: note = LE

SEQ ID NO: 32747 - DNA, 50 bp, unidentified
  source 1..50: mol_type = unassigned DNA; note = donor_3a48183
  misc_feature 1..21: note = RE
  misc_feature 22..25: note = Core
  misc_feature 26..50: note = LE
ccgcagcttgacacagggctactcactggtgcaccatccttaggtctgtg

SEQ ID NO: 32748 - DNA, 50 bp, unidentified
  source 1..50: mol_type = unassigned DNA; note = donor_3a4900c
  misc_feature 1..23: note = RE
  misc_feature 24..25: note = Core
  misc_feature 26..50: note = LE
gccaggcggaggccgtccatacatgatggggtggacggcctccgctcctg

SEQ ID NO: 32749 - DNA, 50 bp, unidentified; identical to SEQ ID NO: 32363
  source 1..50: mol_type = unassigned DNA; note = donor_3a4aef8
  misc_feature 1..24: note = RE
  misc_feature 25: note = Core
  misc_feature 26..50: note = LE

SEQ ID NO: 32750 - DNA, 50 bp, unidentified
  source 1..50: mol_type = unassigned DNA; note = donor_3a4e417
  misc_feature 1..23: note = RE
  misc_feature 24..25: note = Core
  misc_feature 26..50: note = LE
cttgcgcaaggggcggttatacatgatgatgtgaccgccccccgacggca

SEQ ID NO: 32751 - DNA, 50 bp, unidentified
  source 1..50: mol_type = unassigned DNA; note = donor_3a59ba2
  misc_feature 1..23: note = RE
  misc_feature 24..25: note = Core
  misc_feature 26..50: note = LE
gcaagccgggggccgtccacatatgttggtgtggacggccccctaccggc

SEQ ID NO: 32752 - DNA, 50 bp, unidentified; identical to SEQ ID NO: 31021
  source 1..50: mol_type = unassigned DNA; note = donor_3a61d31
  misc_feature 1..23: note = RE
  misc_feature 24..25: note = Core
  misc_feature 26..50: note = LE

SEQ ID NO: 32753 - DNA, 50 bp, unidentified
  source 1..50: mol_type = unassigned DNA; note = donor_3a6987d
  misc_feature 1..23: note = RE
  misc_feature 24..25: note = Core
  misc_feature 26..50: note = LE
gcattacccggggcgtccatatatgatgtgatggacgccctttcctgaag

SEQ ID NO: 32754 - DNA, 50 bp, unidentified
  source 1..50: mol_type = unassigned DNA; note = donor_3a6b00e
  misc_feature 1..24: note = RE
  misc_feature 25: note = Core
  misc_feature 26..50: note = LE
tgcaacgcacggcgggtccatacataatgggatggacccgccgtgctcct

SEQ ID NO: 32755 - DNA, 50 bp, unidentified
  source 1..50: mol_type = unassigned DNA; note = donor_3a6e27c
  misc_feature 1..24: note = RE
  misc_feature 25: note = Core
  misc_feature 26..50: note = LE
ctattgacttttaatagttagtcttcgtattatatagtagtagtttttat

SEQ ID NO: 32756 - DNA, 50 bp, unidentified
  source 1..50: mol_type = unassigned DNA; note = donor_3a7df02
  misc_feature 1..23: note = RE
  misc_feature 24..25: note = Core
  misc_feature 26..50: note = LE
gcactccaggggccgtccacacatgttggggtggacggccctgcggcatc

SEQ ID NO: 32757 - DNA, 50 bp, unidentified
  source 1..50: mol_type = unassigned DNA; note = donor_3a7e514
  misc_feature 1..23: note = RE
  misc_feature 24..25: note = Core
  misc_feature 26..50: note = LE
gccaacggggcgccgtccacacatgatgctgtggacggctcctccaccgg

SEQ ID NO: 32758 - DNA, 50 bp, unidentified
  source 1..50: mol_type = unassigned DNA; note = donor_3a8673c
  misc_feature 1..23: note = RE
  misc_feature 24..25: note = Core
  misc_feature 26..50: note = LE
ccgcattcgcatgaacacagttgcctgtgtgttggttctggtgtatggtt

SEQ ID NO: 32759 - DNA, 50 bp, unidentified
  source 1..50: mol_type = unassigned DNA; note = donor_3a92762
  misc_feature 1..23: note = RE
  misc_feature 24..25: note = Core
  misc_feature 26..50: note = LE
taacttgactctttataggatgtctggtattatcttcactcagtacatga

SEQ ID NO: 32760 - DNA, 50 bp, unidentified
  source 1..50: mol_type = unassigned DNA; note = donor_3a93939
  misc_feature 1..24: note = RE
  misc_feature 25: note = Core
  misc_feature 26..50: note = LE
tgcaactctgcggcggaccatacataatgggatggtccgccgcagatctc

SEQ ID NO: 32761 - DNA, 50 bp, unidentified
  source 1..50: mol_type = unassigned DNA; note = donor_3a99366
  misc_feature 1..24: note = RE
  misc_feature 25: note = Core
  misc_feature 26..50: note = LE
cggcttgacgaaccataggagcgtctgtgagggttgcctcgtcagttcct

SEQ ID NO: 32762 - DNA, 50 bp, unidentified
  source 1..50: mol_type = unassigned DNA; note = donor_3a9a3bd
  misc_feature 1..23: note = RE
  misc_feature 24..25: note = Core
  misc_feature 26..50: note = LE
agaaaactatatcgtatcgagggagcattcctgtagagcgttaattatca

SEQ ID NO: 32763 - DNA, 50 bp, unidentified
  source 1..50: mol_type = unassigned DNA; note = donor_3a9e04e
  misc_feature 1..24: note = RE
  misc_feature 25: note = Core
  misc_feature 26..50: note = LE
atattgacagcctattagctggtatcgtattatgaggtcaccagattctt

SEQ ID NO: 32764 - DNA, 50 bp, unidentified
  source 1..50: mol_type = unassigned DNA; note = donor_3aa8426
  misc_feature 1..23: note = RE
  misc_feature 24..25: note = Core
  misc_feature 26..50: note = LE
attgtttgttttagtcttagaattcctttagattagcaaaatattttaaa

SEQ ID NO: 32765 - DNA, 50 bp, unidentified
  source 1..50: mol_type = unassigned DNA; note = donor_3abbb61
  misc_feature 1..23: note = RE
  misc_feature 24..25: note = Core
  misc_feature 26..50: note = LE
tgacactcaaaaacatgggatgtctaataggttcttgtcagcctgctggt

SEQ ID NO: 32766 - DNA, 50 bp, unidentified
  source 1..50: mol_type = unassigned DNA; note = donor_3abc09a
  misc_feature 1..24: note = RE
  misc_feature 25: note = Core
  misc_feature 26..50: note = LE
tggcataatgtgggcgtccatgtataatggaatggacgctcactccccaa

SEQ ID NO: 32767 - DNA, 50 bp, unidentified
  source 1..50: mol_type = unassigned DNA; note = donor_3acc119
  misc_feature 1..23: note = RE
  misc_feature 24..25: note = Core
  misc_feature 26..50: note = LE
cagtgcttgacaaaggacatcagagaccgtatgtccttcccttgaagagg

SEQ ID NO: 32768 - DNA, 50 bp, unidentified; identical to SEQ ID NO: 30381
  source 1..50: mol_type = unassigned DNA; note = donor_3ace35d
  misc_feature 1..24: note = RE
  misc_feature 25: note = Core
  misc_feature 26..50: note = LE

SEQ ID NO: 32769 - DNA, 50 bp, unidentified; identical to SEQ ID NO: 31810
  source 1..50: mol_type = unassigned DNA; note = donor_3ace4d4
  misc_feature 1..23: note = RE
  misc_feature 24..25: note = Core
  misc_feature 26..50: note = LE

SEQ ID NO: 32770 - DNA, 50 bp, unidentified
  source 1..50: mol_type = unassigned DNA; note = donor_3ad6ba0
  misc_feature 1..24: note = RE
  misc_feature 25: note = Core
  misc_feature 26..50: note = LE
atgtttggataaaatcataggaagctttaactttgcagtctataataaga

SEQ ID NO: 32771 - DNA, 50 bp, unidentified
  source 1..50: mol_type = unassigned DNA; note = donor_3adb02e
  misc_feature 1..23: note = RE
  misc_feature 24..25: note = Core
  misc_feature 26..50: note = LE
tgcctgcagggccgttccacatatgatgtgtggaacggccccgctatcgc

SEQ ID NO: 32772 - DNA, 50 bp, unidentified
  source 1..50: mol_type = unassigned DNA; note = donor_3ade78a
  misc_feature 1..23: note = RE
  misc_feature 24..25: note = Core
  misc_feature 26..50: note = LE
actattgacttttcatagttggtcttgtatgatgtatttagatattaaat

SEQ ID NO: 32773 - DNA, 50 bp, unidentified
  source 1..50: mol_type = unassigned DNA; note = donor_3ae1cda
  misc_feature 1..23: note = RE
  misc_feature 24..25: note = Core
  misc_feature 26..50: note = LE
ggtcttgacttttaatagttagtcttgtattatagagtagtagtttttat

SEQ ID NO: 32774 - DNA, 50 bp, unidentified
  source 1..50: mol_type = unassigned DNA; note = donor_3ae488c
  misc_feature 1..23: note = RE
  misc_feature 24..25: note = Core
  misc_feature 26..50: note = LE
tgacatctaagctcctgggatgtctaataactcttatcgggtccgccatt

SEQ ID NO: 32775 - DNA, 50 bp, unidentified
  source 1..50: mol_type = unassigned DNA; note = donor_3af3211
  misc_feature 1..22: note = RE
  misc_feature 23..25: note = Core
  misc_feature 26..50: note = LE
caatccgggaggcgtccacataagatggtatggacgcctccccccggtaa

SEQ ID NO: 32776 - DNA, 50 bp, unidentified
  source 1..50: mol_type = unassigned DNA; note = donor_3afc435
  misc_feature 1..23: note = RE
  misc_feature 24..25: note = Core
  misc_feature 26..50: note = LE
catagcccagtccaagacggtatcttatgtcttggagccagtccttgtgg

SEQ ID NO: 32777 - DNA, 50 bp, unidentified
  source 1..50: mol_type = unassigned DNA; note = donor_3b125db
  misc_feature 1..23: note = RE
  misc_feature 24..25: note = Core
  misc_feature 26..50: note = LE
gggcttgacttttatttgcaggtctgttacaatataattgacgggtaaaa

SEQ ID NO: 32778 - DNA, 50 bp, unidentified
  source 1..50: mol_type = unassigned DNA; note = donor_3b165a9
  misc_feature 1..23: note = RE
  misc_feature 24..25: note = Core
  misc_feature 26..50: note = LE
ttgctgcgggaggcgtccatagattatgggatggacgcctcccgctccgc

SEQ ID NO: 32779 - DNA, 50 bp, unidentified
  source 1..50: mol_type = unassigned DNA; note = donor_3b1df6e
  misc_feature 1..24: note = RE
  misc_feature 25: note = Core
  misc_feature 26..50: note = LE
ccacttgacaggtcgttccatatcagtcaccatggaacgaccggctcccg

SEQ ID NO: 32780 - DNA, 50 bp, unidentified
  source 1..50: mol_type = unassigned DNA; note = donor_3b1e4df
  misc_feature 1..23: note = RE
  misc_feature 24..25: note = Core
  misc_feature 26..50: note = LE
gttgacatgggggagtccacataagataattggactcccccgcacctgaa

SEQ ID NO: 32781 - DNA, 50 bp, unidentified
  source 1..50: mol_type = unassigned DNA; note = donor_3b2435f
  misc_feature 1..21: note = RE
  misc_feature 22..25: note = Core
  misc_feature 26..50: note = LE
cttgaggttgacacagggggtgtcactggtgcaccctccttggtgcgggc

SEQ ID NO: 32782 - DNA, 50 bp, unidentified
  source 1..50: mol_type = unassigned DNA; note = donor_3b2f077
  misc_feature 1..23: note = RE
  misc_feature 24..25: note = Core
  misc_feature 26..50: note = LE
gcaaaaatgggggcgaccatagattaatgggatggtcgcccccgcctccc

SEQ ID NO: 32783 - DNA, 50 bp, unidentified
  source 1..50: mol_type = unassigned DNA; note = donor_3b2f41b
  misc_feature 1..23: note = RE
  misc_feature 24..25: note = Core
  misc_feature 26..50: note = LE
gttgacaaagaaagtcccatacaagatgctatggggcgagcggcgaggac

SEQ ID NO: 32784 - DNA, 50 bp, unidentified
  source 1..50: mol_type = unassigned DNA; note = donor_3b31563
  misc_feature 1..23: note = RE
  misc_feature 24..25: note = Core
  misc_feature 26..50: note = LE
tcttgacaagtttcatagaaagtcttatattagcaccattgcagattgac

SEQ ID NO: 32785 - DNA, 50 bp, unidentified
  source 1..50: mol_type = unassigned DNA; note = donor_3b32723
  misc_feature 1..22: note = RE
  misc_feature 23..25: note = Core
  misc_feature 26..50: note = LE
atattgacaacctattagctggtttcgtattataaggtcaaccagatatt

SEQ ID NO: 32786 - DNA, 50 bp, unidentified
  source 1..50: mol_type = unassigned DNA; note = donor_3b41e3e
  misc_feature 1..22: note = RE
  misc_feature 23..25: note = Core
  misc_feature 26..50: note = LE
atatttgcttttaaacacagttcatcctatgtttgcggggagttgcaata

SEQ ID NO: 32787 - DNA, 50 bp, unidentified
  source 1..50: mol_type = unassigned DNA; note = donor_3b4363a
  misc_feature 1..24: note = RE
  misc_feature 25: note = Core
  misc_feature 26..50: note = LE
tggacaagtgggggcgtccatgtacaatgggatggacgcccccaccctct

SEQ ID NO: 32788 - DNA, 50 bp, unidentified
  source 1..50: mol_type = unassigned DNA; note = donor_3b45ed8
  misc_feature 1..23: note = RE
  misc_feature 24..25: note = Core
  misc_feature 26..50: note = LE
gacaaaccgaggcccgttacagaagatggggtaacgggccgcggccgggg

SEQ ID NO: 32789 - DNA, 50 bp, unidentified
  source 1..50: mol_type = unassigned DNA; note = donor_3b5883a
  misc_feature 1..23: note = RE
  misc_feature 24..25: note = Core
  misc_feature 26..50: note = LE
gccaggaagggggcgtccacagatgatggggtggacgccccccgacggca

SEQ ID NO: 32790 - DNA, 50 bp, unidentified; identical to SEQ ID NO: 30631
  source 1..50: mol_type = unassigned DNA; note = donor_3b605f9
  misc_feature 1..23: note = RE
  misc_feature 24..25: note = Core
  misc_feature 26..50: note = LE

SEQ ID NO: 32791 - DNA, 50 bp, unidentified
  source 1..50: mol_type = unassigned DNA; note = donor_3b6cba5
  misc_feature 1..24: note = RE
  misc_feature 25: note = Core
  misc_feature 26..50: note = LE
accacttgaccagctagacagtcgccttgtatctggacgctagcgccgaa

SEQ ID NO: 32792 - DNA, 50 bp, unidentified
  source 1..50: mol_type = unassigned DNA; note = donor_3b6d65f
  misc_feature 1..22: note = RE
  misc_feature 23..25: note = Core
  misc_feature 26..50: note = LE
cgcttgacttttcatagctggtcttgtataataaattaaagatttgaatt

SEQ ID NO: 32793 - DNA, 50 bp, unidentified; identical to SEQ ID NO: 30804
  source 1..50: mol_type = unassigned DNA; note = donor_3b79837
  misc_feature 1..24: note = RE
  misc_feature 25: note = Core
  misc_feature 26..50: note = LE

SEQ ID NO: 32794 - DNA, 50 bp, unidentified; identical to SEQ ID NO: 31204
  source 1..50: mol_type = unassigned DNA; note = donor_3b7d65c
  misc_feature 1..22: note = RE
  misc_feature 23..25: note = Core
  misc_feature 26..50: note = LE

SEQ ID NO: 32795 - DNA, 50 bp, unidentified
  source 1..50: mol_type = unassigned DNA; note = donor_3b80355
  misc_feature 1..24: note = RE
  misc_feature 25: note = Core
  misc_feature 26..50: note = LE
tgcaaaaacggagcggaccatacataatgggatggtccgctccggtctat

SEQ ID NO: 32796 - DNA, 50 bp, unidentified
  source 1..50: mol_type = unassigned DNA; note = donor_3b8195e
  misc_feature 1..22: note = RE
  misc_feature 23..25: note = Core
  misc_feature 26..50: note = LE
caatacgggaggagaccatatatgatgtgatggtctcctccctaattcgg

SEQ ID NO: 32797 - DNA, 50 bp, unidentified
  source 1..50: mol_type = unassigned DNA; note = donor_3b878bc
  misc_feature 1..23: note = RE
  misc_feature 24..25: note = Core
  misc_feature 26..50: note = LE
aattttaacgttcaagacagttgcttgtatcttgaaaacggtttaaaata

SEQ ID NO: 32798 - DNA, 50 bp, unidentified
  source 1..50: mol_type = unassigned DNA; note = donor_3b92c8c
  misc_feature 1..23: note = RE
  misc_feature 24..25: note = Core
  misc_feature 26..50: note = LE
acgccgcttgacacacagaggcgctgacttgttgaatgacagacagccgg

SEQ ID NO: 32799 - DNA, 50 bp, unidentified
  source 1..50: mol_type = unassigned DNA; note = donor_3b9cf59
  misc_feature 1..23: note = RE
  misc_feature 24..25: note = Core
  misc_feature 26..50: note = LE
ggggttgacttttatttgcaggtctgttacaatataattgacgggtaaaa

SEQ ID NO: 32800 - DNA, 50 bp, unidentified
  source 1..50: mol_type = unassigned DNA; note = donor_3b9f8c4
  misc_feature 1..24: note = RE
  misc_feature 25: note = Core
  misc_feature 26..50: note = LE
tttgtcttaaatggtgttttcaggagactcccatgacaaaaaaatttcgt

SEQ ID NO: 32801 - DNA, 50 bp, unidentified
  source 1..50: mol_type = unassigned DNA; note = donor_3ba9cae
  misc_feature 1..21: note = RE
  misc_feature 22..25: note = Core
  misc_feature 26..50: note = LE
ccaagcgggggccatccacacatgatgaggtggatggccccctggcggca

SEQ ID NO: 32802 - DNA, 50 bp, unidentified
  source 1..50: mol_type = unassigned DNA; note = donor_3bae67c
  misc_feature 1..22: note = RE
  misc_feature 23..25: note = Core
  misc_feature 26..50: note = LE
aaattttgaaatcaacacagaatctcctatgtttgcgaaagttattggtt

SEQ ID NO: 32803 - DNA, 50 bp, unidentified
  source 1..50: mol_type = unassigned DNA; note = donor_3baec39
  misc_feature 1..22: note = RE
  misc_feature 23..25: note = Core
  misc_feature 26..50: note = LE
tcaaaatggagccgtccacacatgatgctgtggacggctcctccgccggc

SEQ ID NO: 32804 - DNA, 50 bp, unidentified
  source 1..50: mol_type = unassigned DNA; note = donor_3bafea8
  misc_feature 1..24: note = RE
  misc_feature 25: note = Core
  misc_feature 26..50: note = LE
tgcacggccggggcgggtcatacataatgggatgacccgccccgtcctct

SEQ ID NO: 32805 - DNA, 50 bp, unidentified
  source 1..50: mol_type = unassigned DNA; note = donor_3bb72b0
  misc_feature 1..23: note = RE
  misc_feature 24..25: note = Core
  misc_feature 26..50: note = LE
ctacttgacttttaatagttagtctcgtattatatagtagtagtttttag

SEQ ID NO: 32806 - DNA, 50 bp, unidentified
  source 1..50: mol_type = unassigned DNA; note = donor_3bbb621
  misc_feature 1..23: note = RE
  misc_feature 24..25: note = Core
  misc_feature 26..50: note = LE
cttgccaaccgggcgtctacacatgatgatgtagacgcccgcgacgatcc

SEQ ID NO: 32807 - DNA, 50 bp, unidentified
  source 1..50: mol_type = unassigned DNA; note = donor_3bc48dc
  misc_feature 1..23: note = RE
  misc_feature 24..25: note = Core
  misc_feature 26..50: note = LE
gacataaaggggctgtccacacatgatgaggtggacagcccctttcatgc

SEQ ID NO: 32808 - DNA, 50 bp, unidentified
  source 1..50: mol_type = unassigned DNA; note = donor_3bc8a96
  misc_feature 1..24: note = RE
  misc_feature 25: note = Core
  misc_feature 26..50: note = LE
cggcttgacaacttcattgaggatccttacctttctttcagggtgttcga

SEQ ID NO: 32809 - DNA, 50 bp, unidentified
  source 1..50: mol_type = unassigned DNA; note = donor_3bcc335
  misc_feature 1..23: note = RE
  misc_feature 24..25: note = Core
  misc_feature 26..50: note = LE
gcgccgtagggggcgtccacagatgatggggtggacgccccctacggcat

SEQ ID NO: 32810 - DNA, 50 bp, unidentified
  source 1..50: mol_type = unassigned DNA; note = donor_3bce2bc
  misc_feature 1..22: note = RE
  misc_feature 23..25: note = Core
  misc_feature 26..50: note = LE
atcagcgggcggcgtccagacatgatggtgtggacgacgcccgcgcggca

SEQ ID NO: 32811 - DNA, 50 bp, unidentified
  source 1..50: mol_type = unassigned DNA; note = donor_3bcf72e
  misc_feature 1..23: note = RE
  misc_feature 24..25: note = Core
  misc_feature 26..50: note = LE
cgcttgacaacaagacagggacaccttaccttgttcgtgggctccggtca

SEQ ID NO: 32812 - DNA, 50 bp, unidentified
  source 1..50: mol_type = unassigned DNA; note = donor_3bcfd97
  misc_feature 1..23: note = RE
  misc_feature 24..25: note = Core
  misc_feature 26..50: note = LE
atgcttgacgcgcaagagagaatcttgtatcttgcggattgaggcgtgaa

SEQ ID NO: 32813 - DNA, 50 bp, unidentified
  source 1..50: mol_type = unassigned DNA; note = donor_3bd568b
  misc_feature 1..24: note = RE
  misc_feature 25: note = Core
  misc_feature 26..50: note = LE
gccgcttgacacaccacataggggcgttaccttgttggtggtcctgggac

SEQ ID NO: 32814 - DNA, 50 bp, unidentified
  source 1..50: mol_type = unassigned DNA; note = donor_3bd686c
  misc_feature 1..23: note = RE
  misc_feature 24..25: note = Core
  misc_feature 26..50: note = LE
gaccccaaacggccgattagagaagatggggtaatcggccggcccagctt

SEQ ID NO: 32815 - DNA, 50 bp, unidentified
  source 1..50: mol_type = unassigned DNA; note = donor_3bd99c9
  misc_feature 1..22: note = RE
  misc_feature 23..25: note = Core
  misc_feature 26..50: note = LE
tagcttgacaactattagctggtttcgtattattaggtcaaccagagatt

SEQ ID NO: 32816 - DNA, 50 bp, unidentified
  source 1..50: mol_type = unassigned DNA; note = donor_3bdaba8
  misc_feature 1..24: note = RE
  misc_feature 25: note = Core
  misc_feature 26..50: note = LE
tggcaagccgggggcgtccatgtacaatgggatggacgcccccactcgta

SEQ ID NO: 32817 - DNA, 50 bp, unidentified
  source 1..50: mol_type = unassigned DNA; note = donor_3be780c
  misc_feature 1..23: note = RE
  misc_feature 24..25: note = Core
  misc_feature 26..50: note = LE
gccaacggagcgccgtccacacatgatgctgtggacggctcttcaccacc

SEQ ID NO: 32818 - DNA, 50 bp, unidentified
  source 1..50: mol_type = unassigned DNA; note = donor_3bee175
  misc_feature 1..22: note = RE
  misc_feature 23..25: note = Core
  misc_feature 26..50: note = LE
cagagcaggggccgtccaaagatgatggggtggacggcccctgtttccgg

SEQ ID NO: 32819 - DNA, 50 bp, unidentified
  source 1..50: mol_type = unassigned DNA; note = donor_3bee4fd
  misc_feature 1..23: note = RE
  misc_feature 24..25: note = Core
  misc_feature 26..50: note = LE
ggcgcttgactcgacagaggttacttgtatgtttcaaaccagaccatcgc

SEQ ID NO: 32820 - DNA, 50 bp, unidentified
  source 1..50: mol_type = unassigned DNA; note = donor_3bf6717
  misc_feature 1..23: note = RE
  misc_feature 24..25: note = Core
  misc_feature 26..50: note = LE
acaggggaattcatgatagttgactcctaccatgaattcgtgtatagaat

SEQ ID NO: 32821 - DNA, 50 bp, unidentified
  source 1..50: mol_type = unassigned DNA; note = donor_3c0b885
  misc_feature 1..23: note = RE
  misc_feature 24..25: note = Core
  misc_feature 26..50: note = LE
aaaaaacacttgacatagttagtctcgtatgttaaattattattagttcc

SEQ ID NO: 32822 - DNA, 50 bp, unidentified
  source 1..50: mol_type = unassigned DNA; note = donor_3c144c4
  misc_feature 1..22: note = RE
  misc_feature 23..25: note = Core
  misc_feature 26..50: note = LE
gacaagttaggcgcaaggggtgtctaatgggatgggacttcgtcgtttag

SEQ ID NO: 32823 - DNA, 50 bp, unidentified
  source 1..50: mol_type = unassigned DNA; note = donor_3c1781f
  misc_feature 1..22: note = RE
  misc_feature 23..25: note = Core
  misc_feature 26..50: note = LE
acctcaacacgccgaatagagaagatggggtattcggcttgagcccctcg

SEQ ID NO: 32824 - DNA, 50 bp, unidentified
  source 1..50: mol_type = unassigned DNA; note = donor_3c17f00
  misc_feature 1..22: note = RE
  misc_feature 23..25: note = Core
  misc_feature 26..50: note = LE
tacttgacagattcatagctggtcttgtatgatacaaacgtaccttgttg

SEQ ID NO: 32825 - DNA, 50 bp, unidentified
  source 1..50: mol_type = unassigned DNA; note = donor_3c199c2
  misc_feature 1..23: note = RE
  misc_feature 24..25: note = Core
  misc_feature 26..50: note = LE
ccccttgacttttatttgcaggtctactataataaaattagtcgttaaaa

SEQ ID NO: 32826 - DNA, 50 bp, unidentified
  source 1..50: mol_type = unassigned DNA; note = donor_3c1e80a
  misc_feature 1..23: note = RE
  misc_feature 24..25: note = Core
  misc_feature 26..50: note = LE
gccacgcggaggccgtccatacatgatgtggtggacggtctccgctcccg

SEQ ID NO: 32827 - DNA, 50 bp, unidentified
  source 1..50: mol_type = unassigned DNA; note = donor_3c241f5
  misc_feature 1..22: note = RE
  misc_feature 23..25: note = Core
  misc_feature 26..50: note = LE
aatttgcatattaacatagttcgtcgtacgtttgcatcttgaaaaataaa

SEQ ID NO: 32828 - DNA, 50 bp, unidentified
  source 1..50: mol_type = unassigned DNA; note = donor_3c28aa5
  misc_feature 1..22: note = RE
  misc_feature 23..25: note = Core
  misc_feature 26..50: note = LE
ctcttctggagacgtccatgtaagatggcatggacgtctccacctacacc

SEQ ID NO: 32829 - DNA, 50 bp, unidentified
  source 1..50: mol_type = unassigned DNA; note = donor_3c30fe3
  misc_feature 1..23: note = RE
  misc_feature 24..25: note = Core
  misc_feature 26..50: note = LE
ataatttggttttatcatagaaatcctttagacttgtaaaataaatatgt

SEQ ID NO: 32830 - DNA, 50 bp, unidentified
  source 1..50: mol_type = unassigned DNA; note = donor_3c31514
  misc_feature 1..24: note = RE
  misc_feature 25: note = Core
  misc_feature 26..50: note = LE
ttgacaaaccggggcgtccatatataatggtatggacgcccccctacccg

SEQ ID NO: 32831 - DNA, 50 bp, unidentified
  source 1..50: mol_type = unassigned DNA; note = donor_3c36848
  misc_feature 1..22: note = RE
  misc_feature 23..25: note = Core
  misc_feature 26..50: note = LE
ctaaacgggggccgtccacacatgatggggtggacggccccgacctacgg

SEQ ID NO: 32832 - DNA, 50 bp, unidentified
  source 1..50: mol_type = unassigned DNA; note = donor_3c3a454
  misc_feature 1..23: note = RE
  misc_feature 24..25: note = Core
  misc_feature 26..50: note = LE
aagaggcttgcgcatgacggatacttgtcttatggaaagggtggcttttg

SEQ ID NO: 32833 - DNA, 50 bp, unidentified
  source 1..50: mol_type = unassigned DNA; note = donor_3c3e5f0
  misc_feature 1..23: note = RE
  misc_feature 24..25: note = Core
  misc_feature 26..50: note = LE
gcaaaaacggggccgtccacacatgatgtggtggacggccccacccctga

SEQ ID NO: 32834 - DNA, 50 bp, unidentified
  source 1..50: mol_type = unassigned DNA; note = donor_3c3f83f
  misc_feature 1..23: note = RE
  misc_feature 24..25: note = Core
  misc_feature 26..50: note = LE
gcagaaacggggtgaccataaatttaatgagatggtcatccccaccctcc

SEQ ID NO: 32835 - DNA, 50 bp, unidentified
  source 1..50: mol_type = unassigned DNA; note = donor_3c47d23
  misc_feature 1..23: note = RE
  misc_feature 24..25: note = Core
  misc_feature 26..50: note = LE
cctattgactttttatttgcaggctactacaataattttataggttatgg

SEQ ID NO: 32836 - DNA, 50 bp, unidentified
  source 1..50: mol_type = unassigned DNA; note = donor_3c56249
  misc_feature 1..24: note = RE
  misc_feature 25: note = Core
  misc_feature 26..50: note = LE
cggcttgacgaaccataggagcgtctgtgaggatggtgaagctggctcag

SEQ ID NO: 32837 - DNA, 50 bp, unidentified; identical to SEQ ID NO: 31124
  source 1..50: mol_type = unassigned DNA; note = donor_3c57d67
  misc_feature 1..22: note = RE
  misc_feature 23..25: note = Core
  misc_feature 26..50: note = LE

SEQ ID NO: 32838 - DNA, 50 bp, unidentified
  source 1..50: mol_type = unassigned DNA; note = donor_3c58194
  misc_feature 1..24: note = RE
  misc_feature 25: note = Core
  misc_feature 26..50: note = LE
tgcaacgcacggccggaccatacataatgggatggtccggccgtgctccg

SEQ ID NO: 32839 - DNA, 50 bp, unidentified
  source 1..50: mol_type = unassigned DNA; note = donor_3c5b3b7
  misc_feature 1..24: note = RE
  misc_feature 25: note = Core
  misc_feature 26..50: note = LE
accgcttgcggggagagtccatatatgctgtaatggactctccttgcacc

SEQ ID NO: 32840 - DNA, 50 bp, unidentified
  source 1..50: mol_type = unassigned DNA; note = donor_3c68266
  misc_feature 1..24: note = RE
  misc_feature 25: note = Core
  misc_feature 26..50: note = LE
ccgcctcttgacacagaagggagcctactaagagacttccggtcaggatc

SEQ ID NO: 32841 - DNA, 50 bp, unidentified
  source 1..50: mol_type = unassigned DNA; note = donor_3c6bd47
  misc_feature 1..23: note = RE
  misc_feature 24..25: note = Core
  misc_feature 26..50: note = LE
attcttgacaaactattagctggttcgtattataaggtcagccagatatt

SEQ ID NO: 32842 - DNA, 50 bp, unidentified
  source 1..50: mol_type = unassigned DNA; note = donor_3c6eb7e
  misc_feature 1..23: note = RE
  misc_feature 24..25: note = Core
  misc_feature 26..50: note = LE
ttactattgactttttatagttggtatactatatttaggttaataaaggc

SEQ ID NO: 32843 - DNA, 50 bp, unidentified
  source 1..50: mol_type = unassigned DNA; note = donor_3c70c80
  misc_feature 1..24: note = RE
  misc_feature 25: note = Core
  misc_feature 26..50: note = LE
ccacttgttttttacctcagttcttcttaacttagctattcattaaatta

SEQ ID NO: 32844 - DNA, 50 bp, unidentified
  source 1..50: mol_type = unassigned DNA; note = donor_3c7118f
  misc_feature 1..21: note = RE
  misc_feature 22..25: note = Core
  misc_feature 26..50: note = LE
gcgatggttgacacaggatgtctcactggactaccctccgacgaaagtcg

SEQ ID NO: 32845 - DNA, 50 bp, unidentified
  source 1..50: mol_type = unassigned DNA; note = donor_3c72d27
  misc_feature 1..22: note = RE
  misc_feature 23..25: note = Core
  misc_feature 26..50: note = LE
tgcttgatattcaagatcatcgcttgtatcttaagagcagagagatagac

SEQ ID NO: 32846 - DNA, 50 bp, unidentified
  source 1..50: mol_type = unassigned DNA; note = donor_3c7d404
  misc_feature 1..23: note = RE
  misc_feature 24..25: note = Core
  misc_feature 26..50: note = LE
gacttgactgtatcatagttagtcttgtatgatacagttaagagttttga

SEQ ID NO: 32847 - DNA, 50 bp, unidentified
  source 1..50: mol_type = unassigned DNA; note = donor_3c8a225
  misc_feature 1..21: note = RE
  misc_feature 22..25: note = Core
  misc_feature 26..50: note = LE
ggcttgacacggtcattgagattccctaagaatgtgaggcggtccgggag

SEQ ID NO: 32848 - DNA, 50 bp, unidentified
  source 1..50: mol_type = unassigned DNA; note = donor_3c9e871
  misc_feature 1..23: note = RE
  misc_feature 24..25: note = Core
  misc_feature 26..50: note = LE
gcatcccagggggcgtccacagatgatggggtggacgcccccgacggcat

SEQ ID NO: 32849 - DNA, 50 bp, unidentified
  source 1..50: mol_type = unassigned DNA; note = donor_3ca74c8
  misc_feature 1..23: note = RE
  misc_feature 24..25: note = Core
  misc_feature 26..50: note = LE
gcatactgaggtgcgtccatatatgatgtgatggacgcacctcccttcta

SEQ ID NO: 32850 - DNA, 50 bp, unidentified
  source 1..50: mol_type = unassigned DNA; note = donor_3caa3e9
  misc_feature 1..24: note = RE
  misc_feature 25: note = Core
  misc_feature 26..50: note = LE
tgcaaaactggggcggaccatagataatgacatggtccgccccgcctcac

SEQ ID NO: 32851 - DNA, 50 bp, unidentified
  source 1..50: mol_type = unassigned DNA; note = donor_3caba02
  misc_feature 1..23: note = RE
  misc_feature 24..25: note = Core
  misc_feature 26..50: note = LE
gcgtcttacggggcgtccacagatgatggggtggacgcccccgtcggcat

SEQ ID NO: 32852 - DNA, 50 bp, unidentified
  source 1..50: mol_type = unassigned DNA; note = donor_3caec02
  misc_feature 1..23: note = RE
  misc_feature 24..25: note = Core
  misc_feature 26..50: note = LE
tatacttgacttttcatagctggtcatatagtcacttgtatgatgtttat

SEQ ID NO: 32853 - DNA, 50 bp, unidentified
  source 1..50: mol_type = unassigned DNA; note = donor_3cb9e22
  misc_feature 1..24: note = RE
  misc_feature 25: note = Core
  misc_feature 26..50: note = LE
ttgacagcgacagcaaagaggactctaattgaaccccgagggcgctgcgg

SEQ ID NO: 32854 - DNA, 50 bp, unidentified
  source 1..50: mol_type = unassigned DNA; note = donor_3cc1e88
  misc_feature 1..23: note = RE
  misc_feature 24..25: note = Core
  misc_feature 26..50: note = LE
gcattcccggaggtgtccacacacgatggggtggacacctcctaacggca

SEQ ID NO: 32855 - DNA, 50 bp, unidentified
  source 1..50: mol_type = unassigned DNA; note = donor_3ccac5b
  misc_feature 1..23: note = RE
  misc_feature 24..25: note = Core
  misc_feature 26..50: note = LE
gacaccaaagcggcatgggatgtctaatgggggctcactcgggtcggctc

SEQ ID NO: 32856 - DNA, 50 bp, unidentified
  source 1..50: mol_type = unassigned DNA; note = donor_3ccda67
  misc_feature 1..23: note = RE
  misc_feature 24..25: note = Core
  misc_feature 26..50: note = LE
cttgacttcttttaatagttagtctactattatattgtcatagtcattct

SEQ ID NO: 32857 - DNA, 50 bp, unidentified
  source 1..50: mol_type = unassigned DNA; note = donor_3cd8382
  misc_feature 1..23: note = RE
  misc_feature 24..25: note = Core
  misc_feature 26..50: note = LE
tctattgactattcatagttggtcttgtatgatgtatttgtaattaaata

SEQ ID NO: 32858 - DNA, 50 bp, unidentified
  source 1..50: mol_type = unassigned DNA; note = donor_3cdb967
  misc_feature 1..22: note = RE
  misc_feature 23..25: note = Core
  misc_feature 26..50: note = LE
atatttgtttatatcttagaatgctattagattagcattctatatttaca

SEQ ID NO: 32859 - DNA, 50 bp, unidentified
  source 1..50: mol_type = unassigned DNA; note = donor_3cdf184
  misc_feature 1..24: note = RE
  misc_feature 25: note = Core
  misc_feature 26..50: note = LE
accttgactttttatagttagtcttcgtataatatagtcatagcttaggt

SEQ ID NO: 32860 - DNA, 50 bp, unidentified
  source 1..50: mol_type = unassigned DNA; note = donor_3ce0556
  misc_feature 1..23: note = RE
  misc_feature 24..25: note = Core
  misc_feature 26..50: note = LE
cggcttgacaaggtcattgagaatccttacctttcttcttgggtgctgga

SEQ ID NO: 32861 - DNA, 50 bp, unidentified
  source 1..50: mol_type = unassigned DNA; note = donor_3ce5693
  misc_feature 1..21: note = RE
  misc_feature 22..25: note = Core
  misc_feature 26..50: note = LE
cttgacgaacgccatagggacacccgttacctttttgatcgtccccagcc

SEQ ID NO: 32862 - DNA, 50 bp, unidentified
  source 1..50: mol_type = unassigned DNA; note = donor_3cef7cf
  misc_feature 1..24: note = RE
  misc_feature 25: note = Core
  misc_feature 26..50: note = LE
tgcaaaccgggaggagtccatatacaatgggatggactcctccctcctga

SEQ ID NO: 32863 - DNA, 50 bp, unidentified
  source 1..50: mol_type = unassigned DNA; note = donor_3cfa6d6
  misc_feature 1..24: note = RE
  misc_feature 25: note = Core
  misc_feature 26..50: note = LE
agcaagtggggaggggtccatatacaatgggatggacccctcctcacgcc

SEQ ID NO: 32864 - DNA, 50 bp, unidentified; identical to SEQ ID NO: 31591
  source 1..50: mol_type = unassigned DNA; note = donor_3cfb0f5
  misc_feature 1..23: note = RE
  misc_feature 24..25: note = Core
  misc_feature 26..50: note = LE

SEQ ID NO: 32865 - DNA, 50 bp, unidentified
  source 1..50: mol_type = unassigned DNA; note = donor_3d0b6f8
  misc_feature 1..22: note = RE
  misc_feature 23..25: note = Core
  misc_feature 26..50: note = LE
gataatacttgattttaggtagaaacatactaacctagtgttggatcatg

SEQ ID NO: 32866 - DNA, 50 bp, unidentified; identical to SEQ ID NO: 32285
  source 1..50: mol_type = unassigned DNA; note = donor_3d0bec0
  misc_feature 1..24: note = RE
  misc_feature 25: note = Core
  misc_feature 26..50: note = LE

SEQ ID NO: 32867 - DNA, 50 bp, unidentified; identical to SEQ ID NO: 31667
  source 1..50: mol_type = unassigned DNA; note = donor_3d0e819
  misc_feature 1..23: note = RE
  misc_feature 24..25: note = Core
  misc_feature 26..50: note = LE

SEQ ID NO: 32868 - DNA, 50 bp, unidentified
  source 1..50: mol_type = unassigned DNA; note = donor_3d10b4b
  misc_feature 1..24: note = RE
  misc_feature 25: note = Core
  misc_feature 26..50: note = LE
tgcaatcctgcggcggaccatacataatgagatggtccgccgcggcgtct

SEQ ID NO: 32869 - DNA, 50 bp, unidentified
  source 1..50: mol_type = unassigned DNA; note = donor_3d11573
  misc_feature 1..24: note = RE
  misc_feature 25: note = Core
  misc_feature 26..50: note = LE
tgcaactctgcggcggaccatacataatgggatcgtccgccgcaggaact

SEQ ID NO: 32870 - DNA, 50 bp, unidentified
  source 1..50: mol_type = unassigned DNA; note = donor_3d15298
  misc_feature 1..24: note = RE
  misc_feature 25: note = Core
  misc_feature 26..50: note = LE
cgcttgacaagaaccatagggacacgttacctaatgaacgtccccagccg

SEQ ID NO: 32871 - DNA, 50 bp, unidentified
  source 1..50: mol_type = unassigned DNA; note = donor_3d162cd
  misc_feature 1..24: note = RE
  misc_feature 25: note = Core
  misc_feature 26..50: note = LE
ttgcaatcaggcggggtccatatacaatggtatggaccccgccgccttcg

SEQ ID NO: 32872 - DNA, 50 bp, unidentified
  source 1..50: mol_type = unassigned DNA; note = donor_3d1ce4a
  misc_feature 1..24: note = RE
  misc_feature 25: note = Core
  misc_feature 26..50: note = LE
gccacttgacatctatacgagcatcagtgaagatgacgcctggctcgttc

SEQ ID NO: 32873 - DNA, 50 bp, unidentified
  source 1..50: mol_type = unassigned DNA; note = donor_3d203b1
  misc_feature 1..23: note = RE
  misc_feature 24..25: note = Core
  misc_feature 26..50: note = LE
ttaataggttatcaacacagaatctcctatgtttacgaagctaactcagt

SEQ ID NO: 32874 - DNA, 50 bp, unidentified
  source 1..50: mol_type = unassigned DNA; note = donor_3d220dd
  misc_feature 1..24: note = RE
  misc_feature 25: note = Core
  misc_feature 26..50: note = LE
tgcgacgcacggccggatcatacataatggaatggtccggccgtgctcct

SEQ ID NO: 32875 - DNA, 50 bp, unidentified
  source 1..50: mol_type = unassigned DNA; note = donor_3d27722
  misc_feature 1..24: note = RE
  misc_feature 25: note = Core
  misc_feature 26..50: note = LE
tggcataccgggggcgtccatgtacaatgggatggacgccccctcctaaa

SEQ ID NO: 32876 - DNA, 50 bp, unidentified
  source 1..50: mol_type = unassigned DNA; note = donor_3d280d4
  misc_feature 1..23: note = RE
  misc_feature 24..25: note = Core
  misc_feature 26..50: note = LE
gcaaaaatcgggctgaccatagattaatgagatggtcagctcgatccccg

SEQ ID NO: 32877 - DNA, 50 bp, unidentified
  source 1..50: mol_type = unassigned DNA; note = donor_3d2a0df
  misc_feature 1..23: note = RE
  misc_feature 24..25: note = Core
  misc_feature 26..50: note = LE
cttgacagaaaccatagggacacccgttatcttttaggtggtccttgaaa

SEQ ID NO: 32878 - DNA, 50 bp, unidentified
  source 1..50: mol_type = unassigned DNA; note = donor_3d2c286
  misc_feature 1..23: note = RE
  misc_feature 24..25: note = Core
  misc_feature 26..50: note = LE
gctccaacgggggcgtccacacatgatggggtggacgccccccacggcat

SEQ ID NO: 32879 - DNA, 50 bp, unidentified
  source 1..50: mol_type = unassigned DNA; note = donor_3d4bc73
  misc_feature 1..24: note = RE
  misc_feature 25: note = Core
  misc_feature 26..50: note = LE
tggatttggatttatcataggatactttagttttgttctatagatgaaat

SEQ ID NO: 32880 - DNA, 50 bp, unidentified
  source 1..50: mol_type = unassigned DNA; note = donor_3d517cf
  misc_feature 1..22: note = RE
  misc_feature 23..25: note = Core
  misc_feature 26..50: note = LE
aggtatggatgaaagacagttggcttgtgtctttaggtgagatagattca

SEQ ID NO: 32881 - DNA, 50 bp, unidentified
  source 1..50: mol_type = unassigned DNA; note = donor_3d58024
  misc_feature 1..23: note = RE
  misc_feature 24..25: note = Core
  misc_feature 26..50: note = LE
atcccgccgcgacttaatggttgcttgtaatagcgaatccgaattatcgt

SEQ ID NO: 32882 - DNA, 50 bp, unidentified
  source 1..50: mol_type = unassigned DNA; note = donor_3d59002
  misc_feature 1..23: note = RE
  misc_feature 24..25: note = Core
  misc_feature 26..50: note = LE
gacccaaaccggccgattagagaagatggggtaatcggccggcgctattg

SEQ ID NO: 32883 - DNA, 50 bp, unidentified
  source 1..50: mol_type = unassigned DNA; note = donor_3d5c24a
  misc_feature 1..24: note = RE
  misc_feature 25: note = Core
  misc_feature 26..50: note = LE
gaaacttgtttaattagagtaaagctattatatttgcaaaaaaaataaga

SEQ ID NO: 32884 - DNA, 50 bp, unidentified
  source 1..50: mol_type = unassigned DNA; note = donor_3d5cdec
  misc_feature 1..23: note = RE
  misc_feature 24..25: note = Core
  misc_feature 26..50: note = LE
aggcttgacaaaaaacatagaaccttgtatgtttaaggggctggggtgga

SEQ ID NO: 32885 - DNA, 50 bp, unidentified
  source 1..50: mol_type = unassigned DNA; note = donor_3d64fec
  misc_feature 1..23: note = RE
  misc_feature 24..25: note = Core
  misc_feature 26..50: note = LE
gacacccacagaacctgggatgtctaatggctttcccgttgctgcttcgg

SEQ ID NO: 32886 - DNA, 50 bp, unidentified
  source 1..50: mol_type = unassigned DNA; note = donor_3d68b05
  misc_feature 1..23: note = RE
  misc_feature 24..25: note = Core
  misc_feature 26..50: note = LE
ttgacagcggattgggtcatatgagacactatgacccaatccaggggcac

SEQ ID NO: 32887 - DNA, 50 bp, unidentified; identical to SEQ ID NO: 30847
  source 1..50: mol_type = unassigned DNA; note = donor_3d6dab1
  misc_feature 1..24: note = RE
  misc_feature 25: note = Core
  misc_feature 26..50: note = LE

SEQ ID NO: 32888 - DNA, 50 bp, unidentified
  source 1..50: mol_type = unassigned DNA; note = donor_3d73f21
  misc_feature 1..22: note = RE
  misc_feature 23..25: note = Core
  misc_feature 26..50: note = LE
tttcttgacattctattagctggttcgtattataaggtcagccagataac

SEQ ID NO: 32889 - DNA, 50 bp, unidentified
  source 1..50: mol_type = unassigned DNA; note = donor_3d760d4
  misc_feature 1..23: note = RE
  misc_feature 24..25: note = Core
  misc_feature 26..50: note = LE
gcccaccgggcggcgtccatataagatgacatggacgccgccctcttcta

SEQ ID NO: 32890 - DNA, 50 bp, unidentified
  source 1..50: mol_type = unassigned DNA; note = donor_3d7fa6e
  misc_feature 1..23: note = RE
  misc_feature 24..25: note = Core
  misc_feature 26..50: note = LE
acgcttgacatttcatagttggtctcgtatgattaagttaggttttttag

SEQ ID NO: 32891 - DNA, 50 bp, unidentified
  source 1..50: mol_type = unassigned DNA; note = donor_3d8d715
  misc_feature 1..23: note = RE
  misc_feature 24..25: note = Core
  misc_feature 26..50: note = LE
agacttgacatatgttagcaagtctggtaccatataaatgtaataattaa

SEQ ID NO: 32892 - DNA, 50 bp, unidentified
  source 1..50: mol_type = unassigned DNA; note = donor_3d93709
  misc_feature 1..23: note = RE
  misc_feature 24..25: note = Core
  misc_feature 26..50: note = LE
cgcatgaggttgacagagggtgtctgatggcactaccttctttcgtcatc

SEQ ID NO: 32893 - DNA, 50 bp, unidentified
  source 1..50: mol_type = unassigned DNA; note = donor_3d94e14
  misc_feature 1..23: note = RE
  misc_feature 24..25: note = Core
  misc_feature 26..50: note = LE
catcttgacttattaccacatgactcgtattctataaatatatccttacg

SEQ ID NO: 32894 - DNA, 50 bp, unidentified
  source 1..50: mol_type = unassigned DNA; note = donor_3da1f90
  misc_feature 1..23: note = RE
  misc_feature 24..25: note = Core
  misc_feature 26..50: note = LE
ctgcttgatctttaacacggtatcttgtatctttaatcatgatggcaagc

SEQ ID NO: 32895 - DNA, 50 bp, unidentified; identical to SEQ ID NO: 31984
  source 1..50: mol_type = unassigned DNA; note = donor_3dad120
  misc_feature 1..22: note = RE
  misc_feature 23..25: note = Core
  misc_feature 26..50: note = LE

SEQ ID NO: 32896 - DNA, 50 bp, unidentified
  source 1..50: mol_type = unassigned DNA; note = donor_3db2479
  misc_feature 1..23: note = RE
  misc_feature 24..25: note = Core
  misc_feature 26..50: note = LE
tgacaaacaaccttcagggatgtctaatgggagctaccgggtctggtcga

SEQ ID NO: 32897 - DNA, 50 bp, unidentified; identical to SEQ ID NO: 30389
  source 1..50: mol_type = unassigned DNA; note = donor_3db4bb6
  misc_feature 1..23: note = RE
  misc_feature 24..25: note = Core
  misc_feature 26..50: note = LE

SEQ ID NO: 32898 - DNA, 50 bp, unidentified
  source 1..50: mol_type = unassigned DNA; note = donor_3db55d3
  misc_feature 1..23: note = RE
  misc_feature 24..25: note = Core
  misc_feature 26..50: note = LE
caacgcgggagccatccacacaagatggggtcgatggctcccgctcccgg

SEQ ID NO: 32899 - DNA, 50 bp, unidentified
  source 1..50: mol_type = unassigned DNA; note = donor_3dd0d7d
  misc_feature 1..24: note = RE
  misc_feature 25: note = Core
  misc_feature 26..50: note = LE
gctgcttgacgaaaaccatagaggcgttaccttcttcccagctcctccgt

SEQ ID NO: 32900 - DNA, 50 bp, unidentified
  source 1..50: mol_type = unassigned DNA; note = donor_3dd808c
  misc_feature 1..23: note = RE
  misc_feature 24..25: note = Core
  misc_feature 26..50: note = LE
gacatccaaaggcccgttacagaagatggcgtaacgggccgtgctgggta

SEQ ID NO: 32901 - DNA, 50 bp, unidentified
  source 1..50: mol_type = unassigned DNA; note = donor_3dd82b6
  misc_feature 1..24: note = RE
  misc_feature 25: note = Core
  misc_feature 26..50: note = LE
tggcaatccggggacgaccatctataatgggatggtcgcccctccccaaa

SEQ ID NO: 32902 - DNA, 50 bp, unidentified
  source 1..50: mol_type = unassigned DNA; note = donor_3de3629
  misc_feature 1..24: note = RE
  misc_feature 25: note = Core
  misc_feature 26..50: note = LE
tgcaaatgtggagcggaccatacataatgggatggtccgctccgctcata

SEQ ID NO: 32903 - DNA, 50 bp, unidentified
  source 1..50: mol_type = unassigned DNA; note = donor_3df0412
  misc_feature 1..23: note = RE
  misc_feature 24..25: note = Core
  misc_feature 26..50: note = LE
gacttgacaagaccctatgggatctgatatacgtccttgctgcggggtcg

SEQ ID NO: 32904 - DNA, 50 bp, unidentified
  source 1..50: mol_type = unassigned DNA; note = donor_3dfe5f6
  misc_feature 1..21: note = RE
  misc_feature 22..25: note = Core
  misc_feature 26..50: note = LE
ccagctgggggccatccacacatgatggggtggatggcccccttgcggca

SEQ ID NO: 32905 - DNA, 50 bp, unidentified
  source 1..50: mol_type = unassigned DNA; note = donor_3e024a1
  misc_feature 1..23: note = RE
  misc_feature 24..25: note = Core
  misc_feature 26..50: note = LE
gcatctcgggcggcaaccacagaagatggggtggttgccgccctctctcg

SEQ ID NO: 32906 - DNA, 50 bp, unidentified
  source 1..50: mol_type = unassigned DNA; note = donor_3e06671
  misc_feature 1..24: note = RE
  misc_feature 25: note = Core
  misc_feature 26..50: note = LE
tgcaaaaatgtgggcgtccatgtataatggaatggactctcctacccaaa

SEQ ID NO: 32907 - DNA, 50 bp, unidentified
  source 1..50: mol_type = unassigned DNA; note = donor_3e0667f
  misc_feature 1..22: note = RE
  misc_feature 23..25: note = Core
  misc_feature 26..50: note = LE
aaatgttgacaactattagctggttcgtaatataaggttagccagatttt

SEQ ID NO: 32908 - DNA, 50 bp, unidentified
  source 1..50: mol_type = unassigned DNA; note = donor_3e075af
  misc_feature 1..22: note = RE
  misc_feature 23..25: note = Core
  misc_feature 26..50: note = LE
gcaaacgggacgcgttcatataaaatgtaatgaacgcgccccattcattt

SEQ ID NO: 32909 - DNA, 50 bp, unidentified
  source 1..50: mol_type = unassigned DNA; note = donor_3e0d0ba
  misc_feature 1..24: note = RE
  misc_feature 25: note = Core
  misc_feature 26..50: note = LE
atttttgcttgacttattatagtaatatttcgtatcataaatttaggtca

SEQ ID NO: 32910 - DNA, 50 bp, unidentified
  source 1..50: mol_type = unassigned DNA; note = donor_3e10ed5
  misc_feature 1..23: note = RE
  misc_feature 24..25: note = Core
  misc_feature 26..50: note = LE
gacctcgacacgccgaatagagaagatggggtattcggcttgagccagcc

SEQ ID NO: 32911 - DNA, 50 bp, unidentified
  source 1..50: mol_type = unassigned DNA; note = donor_3e18a84
  misc_feature 1..23: note = RE
  misc_feature 24..25: note = Core
  misc_feature 26..50: note = LE
atgccccttgccaataacggatacttgtcttatgactttttgcgccgttt

SEQ ID NO: 32912 - DNA, 50 bp, unidentified
  source 1..50: mol_type = unassigned DNA; note = donor_3e1fd45
  misc_feature 1..23: note = RE
  misc_feature 24..25: note = Core
  misc_feature 26..50: note = LE
ttgacacgtggggagtccacataagataattggactccccacacctaaat

SEQ ID NO: 32913 - DNA, 50 bp, unidentified
  source 1..50: mol_type = unassigned DNA; note = donor_3e25e56
  misc_feature 1..24: note = RE
  misc_feature 25: note = Core
  misc_feature 26..50: note = LE
tgcagtcgtgcggcggaccatacataatgggatggtccgccgcttgattc

SEQ ID NO: 32914 - DNA, 50 bp, unidentified
  source 1..50: mol_type = unassigned DNA; note = donor_3e28e5e
  misc_feature 1..23: note = RE
  misc_feature 24..25: note = Core
  misc_feature 26..50: note = LE
tgacaactaagcccatgggatgtctaatgggggctaccgggtcgtcgtag

SEQ ID NO: 32915 - DNA, 50 bp, unidentified
  source 1..50: mol_type = unassigned DNA; note = donor_3e29542
  misc_feature 1..23: note = RE
  misc_feature 24..25: note = Core
  misc_feature 26..50: note = LE
gcgcaacggacggcaaccacagaagatggggtggttgccgtcctccccta

SEQ ID NO: 32916 - DNA, 50 bp, unidentified
  source 1..50: mol_type = unassigned DNA; note = donor_3e2e7b9
  misc_feature 1..24: note = RE
  misc_feature 25: note = Core
  misc_feature 26..50: note = LE
tttatattgacttttcatagttggtgtatgataaaagtatagtaaattat

SEQ ID NO: 32917 - DNA, 50 bp, unidentified
  source 1..50: mol_type = unassigned DNA; note = donor_3e30e71
  misc_feature 1..23: note = RE
  misc_feature 24..25: note = Core
  misc_feature 26..50: note = LE
aaacttccctaaaaccatagaatcttgtatggttagacttgaagggagga

SEQ ID NO: 32918 - DNA, 50 bp, unidentified
  source 1..50: mol_type = unassigned DNA; note = donor_3e34f5b
  misc_feature 1..24: note = RE
  misc_feature 25: note = Core
  misc_feature 26..50: note = LE
tcgcgcccgcataaactgacttggttgtctctcaaatctatgctttactg

SEQ ID NO: 32919 - DNA, 50 bp, unidentified
  source 1..50: mol_type = unassigned DNA; note = donor_3e3df38
  misc_feature 1..23: note = RE
  misc_feature 24..25: note = Core
  misc_feature 26..50: note = LE
ccacttgactttgaagacagttgcttgtatcttcaatttagtgtttcagt

SEQ ID NO: 32920 - DNA, 50 bp, unidentified
  source 1..50: mol_type = unassigned DNA; note = donor_3e40b9c
  misc_feature 1..22: note = RE
  misc_feature 23..25: note = Core
  misc_feature 26..50: note = LE
atcttgacaagatattagctggtttcgtattatgagttcagccagttttt

SEQ ID NO: 32921 - DNA, 50 bp, unidentified
  source 1..50: mol_type = unassigned DNA; note = donor_3e4933d
  misc_feature 1..23: note = RE
  misc_feature 24..25: note = Core
  misc_feature 26..50: note = LE
actcaccccttgacatagaggcgctgagttgtttcaatcggtgccagcac

SEQ ID NO: 32922 - DNA, 50 bp, unidentified
  source 1..50: mol_type = unassigned DNA; note = donor_3e590a3
  misc_feature 1..24: note = RE
  misc_feature 25: note = Core
  misc_feature 26..50: note = LE
tgccaagggagagccgtccacacatgatgctgtggacggctctcatccca

SEQ ID NO: 32923 - DNA, 50 bp, unidentified
  source 1..50: mol_type = unassigned DNA; note = donor_3e5caee
  misc_feature 1..22: note = RE
  misc_feature 23..25: note = Core
  misc_feature 26..50: note = LE
aggcttgacaaacattagctggtttcgtattattaggtcagccagaaatt

SEQ ID NO: 32924 - DNA, 50 bp, unidentified
  source 1..50: mol_type = unassigned DNA; note = donor_3e6096b
  misc_feature 1..22: note = RE
  misc_feature 23..25: note = Core
  misc_feature 26..50: note = LE
ctcgacgggcggcaaccacagaagatggagtggttgccgccctccccaga

SEQ ID NO: 32925 - DNA, 50 bp, unidentified
  source 1..50: mol_type = unassigned DNA; note = donor_3e62eca
  misc_feature 1..23: note = RE
  misc_feature 24..25: note = Core
  misc_feature 26..50: note = LE
gtggcatgggggccgtccacatatgatggggtggacggccccctacggca

SEQ ID NO: 32926 - DNA, 50 bp, unidentified
  source 1..50: mol_type = unassigned DNA; note = donor_3e66f2e
  misc_feature 1..23: note = RE
  misc_feature 24..25: note = Core
  misc_feature 26..50: note = LE
cggcttgacacgatcattgagattccttaagaatgttggcggtccggaag

SEQ ID NO: 32927 - DNA, 50 bp, unidentified
  source 1..50: mol_type = unassigned DNA; note = donor_3e7da1f
  misc_feature 1..24: note = RE
  misc_feature 25: note = Core
  misc_feature 26..50: note = LE
ttgcaatagggaggagtccatatataatggaatggactcctcccctttaa

SEQ ID NO: 32928 - DNA, 50 bp, unidentified
  source 1..50: mol_type = unassigned DNA; note = donor_3e80b5b
  misc_feature 1..23: note = RE
  misc_feature 24..25: note = Core
  misc_feature 26..50: note = LE
acgcttgacgcgcaagacggtatcttgtatcttatcgaatgtgatggtta

SEQ ID NO: 32929 - DNA, 50 bp, unidentified
  source 1..50: mol_type = unassigned DNA; note = donor_3e8ad33
  misc_feature 1..23: note = RE
  misc_feature 24..25: note = Core
  misc_feature 26..50: note = LE
ttgcaaccggggcgggccatacgttatggatggcccgcccctcctgccgg

SEQ ID NO: 32930 - DNA, 50 bp, unidentified
  source 1..50: mol_type = unassigned DNA; note = donor_3e8b4d7
  misc_feature 1..22: note = RE
  misc_feature 23..25: note = Core
  misc_feature 26..50: note = LE
taatggagggtttgtttcctgttagttccccaccggcgtttccgacctgc

SEQ ID NO: 32931 - DNA, 50 bp, unidentified
  source 1..50: mol_type = unassigned DNA; note = donor_3e9fd00
  misc_feature 1..23: note = RE
  misc_feature 24..25: note = Core
  misc_feature 26..50: note = LE
cttgcggaggggcgagccatacgttatggaatggctcgcccaccgaacat

SEQ ID NO: 32932 - DNA, 50 bp, unidentified
  source 1..50: mol_type = unassigned DNA; note = donor_3ea6b5d
  misc_feature 1..21: note = RE
  misc_feature 22..25: note = Core
  misc_feature 26..50: note = LE
cctgaggttgactcaggaagtgtcactagggcaccattctttctacggac

SEQ ID NO: 32933 - DNA, 50 bp, unidentified
  source 1..50: mol_type = unassigned DNA; note = donor_3ea79c8
  misc_feature 1..24: note = RE
  misc_feature 25: note = Core
  misc_feature 26..50: note = LE
tgcaacaaggcggcggaccatacataattggaatggtccgccccctgccc

SEQ ID NO: 32934 - DNA, 50 bp, unidentified
  source 1..50: mol_type = unassigned DNA; note = donor_3eabde9
  misc_feature 1..23: note = RE
  misc_feature 24..25: note = Core
  misc_feature 26..50: note = LE
gacaccaaccacccgtgggatgtctaatgggtctcgatcattcggctctc

SEQ ID NO: 32935 - DNA, 50 bp, unidentified
  source 1..50: mol_type = unassigned DNA; note = donor_3eace41
  misc_feature 1..24: note = RE
  misc_feature 25: note = Core
  misc_feature 26..50: note = LE
gggcttgacttttgacacactatcttgtatgttatcctctgttgttattt

SEQ ID NO: 32936 - DNA, 50 bp, unidentified
  source 1..50: mol_type = unassigned DNA; note = donor_3eadc2c
  misc_feature 1..23: note = RE
  misc_feature 24..25: note = Core
  misc_feature 26..50: note = LE
atacttgacttttcatagctggtcttgtatgatgttgttagaagcaaaaa

SEQ ID NO: 32937 - DNA, 50 bp, unidentified
  source 1..50: mol_type = unassigned DNA; note = donor_3eaf365
  misc_feature 1..20: note = RE
  misc_feature 21..25: note = Core
  misc_feature 26..50: note = LE
ctcttgactatttatagtttgtcacgtataatccaatcatattagatagt

SEQ ID NO: 32938 - DNA, 50 bp, unidentified
  source 1..50: mol_type = unassigned DNA; note = donor_3eb1f2f
  misc_feature 1..23: note = RE
  misc_feature 24..25: note = Core
  misc_feature 26..50: note = LE
gcaccgaagggggcgtccacacatgatggggtggacgccccccgacggca

SEQ ID NO: 32939 - DNA, 50 bp, unidentified
  source 1..50: mol_type = unassigned DNA; note = donor_3eb2ae9
  misc_feature 1..23: note = RE
  misc_feature 24..25: note = Core
  misc_feature 26..50: note = LE
gggcttgacttttatttgcaggtctgttacaataaaattggtcgtataaa

SEQ ID NO: 32940 - DNA, 50 bp, unidentified
  source 1..50: mol_type = unassigned DNA; note = donor_3eb3463
  misc_feature 1..23: note = RE
  misc_feature 24..25: note = Core
  misc_feature 26..50: note = LE
acgcttgaccttcaagacggttgcttgtatctttaggcctcggaccggcc

SEQ ID NO: 32941 - DNA, 50 bp, unidentified
  source 1..50: mol_type = unassigned DNA; note = donor_3eb48cf
  misc_feature 1..24: note = RE
  misc_feature 25: note = Core
  misc_feature 26..50: note = LE
tgggcttgactttttatttgcaggcctgttactatatatttgccccttga

SEQ ID NO: 32942 - DNA, 50 bp, unidentified
  source 1..50: mol_type = unassigned DNA; note = donor_3eb6d87
  misc_feature 1..22: note = RE
  misc_feature 23..25: note = Core
  misc_feature 26..50: note = LE
acattaatagggagtccatataagatgtatggactcccacttccatcaga

SEQ ID NO: 32943 - DNA, 50 bp, unidentified; identical to SEQ ID NO: 30838
  source 1..50: mol_type = unassigned DNA; note = donor_3ec40e4
  misc_feature 1..23: note = RE
  misc_feature 24..25: note = Core
  misc_feature 26..50: note = LE

SEQ ID NO: 32944 - DNA, 50 bp, unidentified
  source 1..50: mol_type = unassigned DNA; note = donor_3ec8eb0
  misc_feature 1..24: note = RE
  misc_feature 25: note = Core
  misc_feature 26..50: note = LE
tcgcaaacgggaggcgttcatataaaatgtaatgaacgcctcccacccga

SEQ ID NO: 32945 - DNA, 50 bp, unidentified
  source 1..50: mol_type = unassigned DNA; note = donor_3ecf8cc
  misc_feature 1..22: note = RE
  misc_feature 23..25: note = Core
  misc_feature 26..50: note = LE
gggttccccccaaacatagaatctcgcttgtatgtttagacttgaagggg

SEQ ID NO: 32946 - DNA, 50 bp, unidentified
  source 1..50: mol_type = unassigned DNA; note = donor_3ed031c
  misc_feature 1..23: note = RE
  misc_feature 24..25: note = Core
  misc_feature 26..50: note = LE
gcatcaaagcgggcatccacacatgatggtgtggatgccccaccccggaa

SEQ ID NO: 32947 - DNA, 50 bp, unidentified
  source 1..50: mol_type = unassigned DNA; note = donor_3ed8126
  misc_feature 1..23: note = RE
  misc_feature 24..25: note = Core
  misc_feature 26..50: note = LE
ttgcttgacatggaagacggtatcttgtatcattctttctgtgatggtta

SEQ ID NO: 32948 - DNA, 50 bp, unidentified
  source 1..50: mol_type = unassigned DNA; note = donor_3edb1fc
  misc_feature 1..22: note = RE
  misc_feature 23..25: note = Core
  misc_feature 26..50: note = LE
agacttgacaaacattagctagattggtaatatataagcgagggtttaac

SEQ ID NO: 32949 - DNA, 50 bp, unidentified
  source 1..50: mol_type = unassigned DNA; note = donor_3ee33d4
  misc_feature 1..24: note = RE
  misc_feature 25: note = Core
  misc_feature 26..50: note = LE
ttctattgactttttctttgcaggcctattacaatgtatttatggctata

SEQ ID NO: 32950 - DNA, 50 bp, unidentified
  source 1..50: mol_type = unassigned DNA; note = donor_3ee6fea
  misc_feature 1..21: note = RE
  misc_feature 22..25: note = Core
  misc_feature 26..50: note = LE
tgcttgacttttaatagttagtcacgtataatcaatcttaaggaattatt

SEQ ID NO: 32951 - DNA, 50 bp, unidentified
  source 1..50: mol_type = unassigned DNA; note = donor_3ee7637
  misc_feature 1..22: note = RE
  misc_feature 23..25: note = Core
  misc_feature 26..50: note = LE
ggctcgacatcctcattgagagtccttaagttcgtaggtgcagttacttc

SEQ ID NO: 32952 - DNA, 50 bp, unidentified
  source 1..50: mol_type = unassigned DNA; note = donor_3eeb818
  misc_feature 1..23: note = RE
  misc_feature 24..25: note = Core
  misc_feature 26..50: note = LE
tgacaaaattcaggatgggatgtctaatgagatgggccgggcgtccatgg

SEQ ID NO: 32953 - DNA, 50 bp, unidentified
  source 1..50: mol_type = unassigned DNA; note = donor_3eed674
  misc_feature 1..23: note = RE
  misc_feature 24..25: note = Core
  misc_feature 26..50: note = LE
tgacatctcagctcctgggatgtctaatgagacctagccgggccgccata

SEQ ID NO: 32954 - DNA, 50 bp, unidentified
  source 1..50: mol_type = unassigned DNA; note = donor_3ef40b8
  misc_feature 1..23: note = RE
  misc_feature 24..25: note = Core
  misc_feature 26..50: note = LE
ccacttgacattgaagacagttgcttgtatctttattttgaagtatatgg

SEQ ID NO: 32955 - DNA, 50 bp, unidentified
  source 1..50: mol_type = unassigned DNA; note = donor_3ef46d8
  misc_feature 1..23: note = RE
  misc_feature 24..25: note = Core
  misc_feature 26..50: note = LE
gcccatagggcggcgtccatataagatgagatggacgccgcccgtcttta

SEQ ID NO: 32956 - DNA, 50 bp, unidentified
  source 1..50: mol_type = unassigned DNA; note = donor_3ef6b89
  misc_feature 1..22: note = RE
  misc_feature 23..25: note = Core
  misc_feature 26..50: note = LE
caagccgggggccatccacacatgatggggtggatggcccccttccggca

SEQ ID NO: 32957 - DNA, 50 bp, unidentified
  source 1..50: mol_type = unassigned DNA; note = donor_3eff622
  misc_feature 1..23: note = RE
  misc_feature 24..25: note = Core
  misc_feature 26..50: note = LE
gacacaggagggcccgttacagaagatggggtaacgggccggcgccaggt

SEQ ID NO: 32958 - DNA, 50 bp, unidentified
  source 1..50: mol_type = unassigned DNA; note = donor_3eff7af
  misc_feature 1..23: note = RE
  misc_feature 24..25: note = Core
  misc_feature 26..50: note = LE
gcagaaggtgggctgaccatacattaatgacatggtcagcccgcagcggg

SEQ ID NO: 32959 - DNA, 50 bp, unidentified
  source 1..50: mol_type = unassigned DNA; note = donor_3f09baa
  misc_feature 1..23: note = RE
  misc_feature 24..25: note = Core
  misc_feature 26..50: note = LE
gagacttgacttttaatagttagtcgtattatatagtagtagtgtttata

SEQ ID NO: 32960 - DNA, 50 bp, unidentified
  source 1..50: mol_type = unassigned DNA; note = donor_3f162d7
  misc_feature 1..22: note = RE
  misc_feature 23..25: note = Core
  misc_feature 26..50: note = LE
atccttgacaagtattagctggtttcgtattatcaggttagccagcaatt

SEQ ID NO: 32961 - DNA, 50 bp, unidentified
  source 1..50: mol_type = unassigned DNA; note = donor_3f23656
  misc_feature 1..23: note = RE
  misc_feature 24..25: note = Core
  misc_feature 26..50: note = LE
ttacttgatttatttatagtaggctcgtataatataaattgttcataaat

SEQ ID NO: 32962 - DNA, 50 bp, unidentified
  source 1..50: mol_type = unassigned DNA; note = donor_3f38005
  misc_feature 1..23: note = RE
  misc_feature 24..25: note = Core
  misc_feature 26..50: note = LE
cttgcccgggaggcgtccatagattatgggatggacgcctccctcctcgc

SEQ ID NO: 32963 - DNA, 50 bp, unidentified
  source 1..50: mol_type = unassigned DNA; note = donor_3f39663
  misc_feature 1..23: note = RE
  misc_feature 24..25: note = Core
  misc_feature 26..50: note = LE
gcacccaaggggccgtccacacatgttggggtggacggccccgcggcatc

SEQ ID NO: 32964 - DNA, 50 bp, unidentified
  source 1..50: mol_type = unassigned DNA; note = donor_3f42f19
  misc_feature 1..23: note = RE
  misc_feature 24..25: note = Core
  misc_feature 26..50: note = LE
taatttgcaaaataacatagaacatggtaagtttgtattaagaaaaataa

SEQ ID NO: 32965 - DNA, 50 bp, unidentified
  source 1..50: mol_type = unassigned DNA; note = donor_3f44103
  misc_feature 1..23: note = RE
  misc_feature 24..25: note = Core
  misc_feature 26..50: note = LE
gcaatcgcgaggggaaccatacattaatgagatggttcccctcgctttcc

SEQ ID NO: 32966 - DNA, 50 bp, unidentified
  source 1..50: mol_type = unassigned DNA; note = donor_3f4b536
  misc_feature 1..21: note = RE
  misc_feature 22..25: note = Core
  misc_feature 26..50: note = LE
aggcggcttgacacagggctactcactggtgcacccttgtcgtgtcggtg

SEQ ID NO: 32967 - DNA, 50 bp, unidentified
  source 1..50: mol_type = unassigned DNA; note = donor_3f5b11d
  misc_feature 1..22: note = RE
  misc_feature 23..25: note = Core
  misc_feature 26..50: note = LE
gatttccgtgggttttcatgcgaaacccacatgaacacattgctcatgca

SEQ ID NO: 32968 - DNA, 50 bp, unidentified
  source 1..50: mol_type = unassigned DNA; note = donor_3f644ed
  misc_feature 1..23: note = RE
  misc_feature 24..25: note = Core
  misc_feature 26..50: note = LE
aaacttgaaattcaagagagaatcttgtatcttgcttgcatctccccgat

SEQ ID NO: 32969 - DNA, 50 bp, unidentified
  source 1..50: mol_type = unassigned DNA; note = donor_3f6d465
  misc_feature 1..23: note = RE
  misc_feature 24..25: note = Core
  misc_feature 26..50: note = LE
ttgacacaacgacccattacagaagatacggtaatgggccgcgcctccag

SEQ ID NO: 32970 - DNA, 50 bp, unidentified
  source 1..50: mol_type = unassigned DNA; note = donor_3f6fe28
  misc_feature 1..24: note = RE
  misc_feature 25: note = Core
  misc_feature 26..50: note = LE
tgcaatagaggaggagtccatacacaatgggatggactcctcctcacctc

SEQ ID NO: 32971 - DNA, 50 bp, unidentified; identical to SEQ ID NO: 30869
  source 1..50: mol_type = unassigned DNA; note = donor_3f71793
  misc_feature 1..24: note = RE
  misc_feature 25: note = Core
  misc_feature 26..50: note = LE

SEQ ID NO: 32972 - DNA, 50 bp, unidentified
  source 1..50: mol_type = unassigned DNA; note = donor_3f76350
  misc_feature 1..23: note = RE
  misc_feature 24..25: note = Core
  misc_feature 26..50: note = LE
cctattgacatttcttagctggactagtataataatggtgtagtcaagaa

SEQ ID NO: 32973 - DNA, 50 bp, unidentified
  source 1..50: mol_type = unassigned DNA; note = donor_3f78298
  misc_feature 1..24: note = RE
  misc_feature 25: note = Core
  misc_feature 26..50: note = LE
ttgcaatggggaggagtccatatacaatgggatggactcctccccgccct

SEQ ID NO: 32974 - DNA, 50 bp, unidentified
  source 1..50: mol_type = unassigned DNA; note = donor_3f79023
  misc_feature 1..19: note = RE
  misc_feature 20..25: note = Core
  misc_feature 26..50: note = LE
cttgacttcgtcattgagagtccttaagttcgtaggtgcagttacttcgt

SEQ ID NO: 32975 - DNA, 50 bp, unidentified
  source 1..50: mol_type = unassigned DNA; note = donor_3f7bd52
  misc_feature 1..24: note = RE
  misc_feature 25: note = Core
  misc_feature 26..50: note = LE
acctggcatgggggcgtccatgtacaatgggatggacgcccccacccgta

SEQ ID NO: 32976 - DNA, 50 bp, unidentified
  source 1..50: mol_type = unassigned DNA; note = donor_3f7ed55
  misc_feature 1..24: note = RE
  misc_feature 25: note = Core
  misc_feature 26..50: note = LE
ttgcaaaacgggggcgtccatgtataatgacatggacgcccctacctgcg

SEQ ID NO: 32977 - DNA, 50 bp, unidentified
  source 1..50: mol_type = unassigned DNA; note = donor_3f89c93
  misc_feature 1..24: note = RE
  misc_feature 25: note = Core
  misc_feature 26..50: note = LE
tgcaaccggggaggagtccctatacaatgaaagggactcctcccctctcg

SEQ ID NO: 32978 - DNA, 50 bp, unidentified
  source 1..50: mol_type = unassigned DNA; note = donor_3f8eafa
  misc_feature 1..23: note = RE
  misc_feature 24..25: note = Core
  misc_feature 26..50: note = LE
aagcttgaccacgaacagagtatcttgtatgttgtgcctggcctggcgag

SEQ ID NO: 32979 - DNA, 50 bp, unidentified
  source 1..50: mol_type = unassigned DNA; note = donor_3f8ed1b
  misc_feature 1..24: note = RE
  misc_feature 25: note = Core
  misc_feature 26..50: note = LE
tggcaaacagggggcgaccatctataatggaatggtcgcccctaccttaa

SEQ ID NO: 32980 - DNA, 50 bp, unidentified
  source 1..50: mol_type = unassigned DNA; note = donor_3f8fd4c
  misc_feature 1..22: note = RE
  misc_feature 23..25: note = Core
  misc_feature 26..50: note = LE
agttgacaaaaacataggaacacccattaccatgtttggtaggccccgat

SEQ ID NO: 32981 - DNA, 50 bp, unidentified
  source 1..50: mol_type = unassigned DNA; note = donor_3f90abc
  misc_feature 1..23: note = RE
  misc_feature 24..25: note = Core
  misc_feature 26..50: note = LE
tcggttgacgctgaagacggtatcttgtatctttttctccgtggtggtta

SEQ ID NO: 32982 - DNA, 50 bp, unidentified
  source 1..50: mol_type = unassigned DNA; note = donor_3fa6cbd
  misc_feature 1..23: note = RE
  misc_feature 24..25: note = Core
  misc_feature 26..50: note = LE
ccgccacttgacacacagaggcgctgacttgttgaatgtgatgaggccgt

SEQ ID NO: 32983 - DNA, 50 bp, unidentified
  source 1..50: mol_type = unassigned DNA; note = donor_3fb7255
  misc_feature 1..24: note = RE
  misc_feature 25: note = Core
  misc_feature 26..50: note = LE
tataattttcacattcaagacagttccttgtatattgaaaattgtttaaa

SEQ ID NO: 32984 - DNA, 50 bp, unidentified
  source 1..50: mol_type = unassigned DNA; note = donor_3fbb19e
  misc_feature 1..24: note = RE
  misc_feature 25: note = Core
  misc_feature 26..50: note = LE
cctgtggacggggcgggccatacgtataggatggcccgcccctctcgaag

SEQ ID NO: 32985 - DNA, 50 bp, unidentified
  source 1..50: mol_type = unassigned DNA; note = donor_3fc35ad
  misc_feature 1..24: note = RE
  misc_feature 25: note = Core
  misc_feature 26..50: note = LE
ttgcaaacgggatgtgttcatataaaatgtaatgaacacatcccacttaa

SEQ ID NO: 32986 - DNA, 50 bp, unidentified
  source 1..50: mol_type = unassigned DNA; note = donor_3fcabda
  misc_feature 1..24: note = RE
  misc_feature 25: note = Core
  misc_feature 26..50: note = LE
tggcgaagcgtgggcgtccatgtataatgggatggacgcccccactctga

SEQ ID NO: 32987 - DNA, 50 bp, unidentified
  source 1..50: mol_type = unassigned DNA; note = donor_3fcb386
  misc_feature 1..23: note = RE
  misc_feature 24..25: note = Core
  misc_feature 26..50: note = LE
tgcagttcggcggcggaccatacataatgagatggtccgctgcctagtaa

SEQ ID NO: 32988 - DNA, 50 bp, unidentified; identical to SEQ ID NO: 31619
  source 1..50: mol_type = unassigned DNA; note = donor_3fcda79
  misc_feature 1..23: note = RE
  misc_feature 24..25: note = Core
  misc_feature 26..50: note = LE

SEQ ID NO: 32989 - DNA, 50 bp, unidentified
  source 1..50: mol_type = unassigned DNA; note = donor_3fd1624
  misc_feature 1..23: note = RE
  misc_feature 24..25: note = Core
  misc_feature 26..50: note = LE
aggcttgaccgcgaacataggatcttgtatgttcctcccggctcctacga

SEQ ID NO: 32990 - DNA, 50 bp, unidentified
  source 1..50: mol_type = unassigned DNA; note = donor_3fd5a92
  misc_feature 1..23: note = RE
  misc_feature 24..25: note = Core
  misc_feature 26..50: note = LE
gacatgtcgacgcccgttacagaagatggggtaacgggcctcggccctgc

SEQ ID NO: 32991 - DNA, 50 bp, unidentified
  source 1..50: mol_type = unassigned DNA; note = donor_3fd5e8b
  misc_feature 1..24: note = RE
  misc_feature 25: note = Core
  misc_feature 26..50: note = LE
tggcaaaccgggggcgaccatctataatgggatggtcgcccctccccaaa

SEQ ID NO: 32992 - DNA, 50 bp, unidentified
  source 1..50: mol_type = unassigned DNA; note = donor_3fde9e0
  misc_feature 1..23: note = RE
  misc_feature 24..25: note = Core
  misc_feature 26..50: note = LE
ggcgtcacgggggcgtccatagatgatggagtggacgccccctcccggcg

SEQ ID NO: 32993 - DNA, 50 bp, unidentified
  source 1..50: mol_type = unassigned DNA; note = donor_3fdeb2c
  misc_feature 1..23: note = RE
  misc_feature 24..25: note = Core
  misc_feature 26..50: note = LE
ctacttgatttttatatagttagctggtataatgtaattgactcatctaa

SEQ ID NO: 32994 - DNA, 50 bp, unidentified
  source 1..50: mol_type = unassigned DNA; note = donor_3fe0d8e
  misc_feature 1..23: note = RE
  misc_feature 24..25: note = Core
  misc_feature 26..50: note = LE
tatattgactccatatagttagtcttgtataatggagtcatagtaaaaat

SEQ ID NO: 32995 - DNA, 50 bp, unidentified
  source 1..50: mol_type = unassigned DNA; note = donor_3fea323
  misc_feature 1..23: note = RE
  misc_feature 24..25: note = Core
  misc_feature 26..50: note = LE
ttgcggcgggaggcgtccatagattatgggatggacgcctcccgcttccc

SEQ ID NO: 32996 - DNA, 50 bp, unidentified
  source 1..50: mol_type = unassigned DNA; note = donor_3ff0b81
  misc_feature 1..23: note = RE
  misc_feature 24..25: note = Core
  misc_feature 26..50: note = LE
ttgacaagaggtcattccatatcagacaatatggaatgaccggctctcca

SEQ ID NO: 32997 - DNA, 50 bp, unidentified
  source 1..50: mol_type = unassigned DNA; note = donor_3ff0c40
  misc_feature 1..23: note = RE
  misc_feature 24..25: note = Core
  misc_feature 26..50: note = LE
actaggatttgatcttggaatacgtctttattttgatttattaatttaat

SEQ ID NO: 32998 - DNA, 50 bp, unidentified
  source 1..50: mol_type = unassigned DNA; note = donor_3ff1d88
  misc_feature 1..23: note = RE
  misc_feature 24..25: note = Core
  misc_feature 26..50: note = LE
gcgaacatggaggcatccatataagatgtaatggatgcctccccctacag

SEQ ID NO: 32999 - DNA, 50 bp, unidentified
  source 1..50: mol_type = unassigned DNA; note = donor_3ff94d2
  misc_feature 1..24: note = RE
  misc_feature 25: note = Core
  misc_feature 26..50: note = LE
ttgcagtgcgggacggaccatatataatgggatggtccgtcccgctcctc

SEQ ID NO: 33000 - DNA, 50 bp, unidentified
  source 1..50: mol_type = unassigned DNA; note = donor_3ffb6c6
  misc_feature 1..23: note = RE
  misc_feature 24..25: note = Core
  misc_feature 26..50: note = LE
ttgcaaccggggcgggccatacgttatggatggcccgcccctcccgccga

SEQ ID NO: 33001 - DNA, 50 bp, unidentified
  source 1..50: mol_type = unassigned DNA; note = donor_3ffebc8
  misc_feature 1..23: note = RE
  misc_feature 24..25: note = Core
  misc_feature 26..50: note = LE
gccacacgggaggcgtccatataagatggtgtggacgcctcccacccaca

SEQ ID NO: 33002 - DNA, 50 bp, unidentified
  source 1..50: mol_type = unassigned DNA; note = donor_3fffa8a
  misc_feature 1..23: note = RE
  misc_feature 24..25: note = Core
  misc_feature 26..50: note = LE
ataattaggttagatcatagaaatcctttagatttgtatttaaataaaag

SEQ ID NO: 33003 - DNA, 50 bp, unidentified
  source 1..50: mol_type = unassigned DNA; note = donor_400627e
  misc_feature 1..23: note = RE
  misc_feature 24..25: note = Core
  misc_feature 26..50: note = LE
ggacttgtattttaagagagtatcttgtatattaaacgcatctcttaaac

SEQ ID NO: 33004 - DNA, 50 bp, unidentified
  source 1..50: mol_type = unassigned DNA; note = donor_400e921
  misc_feature 1..23: note = RE
  misc_feature 24..25: note = Core
  misc_feature 26..50: note = LE
tgacatttcagctcctgggatgtctaatcagttctgggagtgagccatcc

SEQ ID NO: 33005 - DNA, 50 bp, unidentified
  source 1..50: mol_type = unassigned DNA; note = donor_4016684
  misc_feature 1..22: note = RE
  misc_feature 23..25: note = Core
  misc_feature 26..50: note = LE
cgaaaacggagccgtccacacatgatggtgtggacggctccacccgaacg

SEQ ID NO: 33006 - DNA, 50 bp, unidentified
  source 1..50: mol_type = unassigned DNA; note = donor_4016d40
  misc_feature 1..23: note = RE
  misc_feature 24..25: note = Core
  misc_feature 26..50: note = LE
cgacctctactttctttcacactaatctccattccgcgcgccttcgggtg

SEQ ID NO: 33007 - DNA, 50 bp, unidentified
  source 1..50: mol_type = unassigned DNA; note = donor_401d5ae
  misc_feature 1..23: note = RE
  misc_feature 24..25: note = Core
  misc_feature 26..50: note = LE
ttacttgatttttatatagttagctggtatattgtaaaagactcatctag

SEQ ID NO: 33008 - DNA, 50 bp, unidentified
  source 1..50: mol_type = unassigned DNA; note = donor_401f253
  misc_feature 1..23: note = RE
  misc_feature 24..25: note = Core
  misc_feature 26..50: note = LE
ttgacaaactattagctggtttagtattataaggtcagccagatatttct

SEQ ID NO: 33009 - DNA, 50 bp, unidentified
  source 1..50: mol_type = unassigned DNA; note = donor_4023a7e
  misc_feature 1..23: note = RE
  misc_feature 24..25: note = Core
  misc_feature 26..50: note = LE
gacaaaccaaggcccgttacagaagatggggtaacgggccggaccccagc

SEQ ID NO: 33010 - DNA, 50 bp, unidentified
  source 1..50: mol_type = unassigned DNA; note = donor_402df8c
  misc_feature 1..24: note = RE
  misc_feature 25: note = Core
  misc_feature 26..50: note = LE
tccccttgacatccataggagcatcagtgacaatggtgtgtgtggggcca

SEQ ID NO: 33011 - DNA, 50 bp, unidentified; identical to SEQ ID NO: 32606
  source 1..50: mol_type = unassigned DNA; note = donor_402fdec
  misc_feature 1..24: note = RE
  misc_feature 25: note = Core
  misc_feature 26..50: note = LE

SEQ ID NO: 33012 - DNA, 50 bp, unidentified
  source 1..50: mol_type = unassigned DNA; note = donor_403e64d
  misc_feature 1..24: note = RE
  misc_feature 25: note = Core
  misc_feature 26..50: note = LE
tcgctgcgacaagatgacagttgcttgtatgacgggaaaggagcattgtg

SEQ ID NO: 33013 - DNA, 50 bp, unidentified
  source 1..50: mol_type = unassigned DNA; note = donor_4040ce5
  misc_feature 1..23: note = RE
  misc_feature 24..25: note = Core
  misc_feature 26..50: note = LE
tgcttgacagcccaagacagttgcttgtatcttgcgccgaaggcggccat

SEQ ID NO: 33014 - DNA, 50 bp, unidentified
  source 1..50: mol_type = unassigned DNA; note = donor_4048e22
  misc_feature 1..23: note = RE
  misc_feature 24..25: note = Core
  misc_feature 26..50: note = LE
agacttgacttttaatagttagtctcgtattataaagtagtagttattaa

SEQ ID NO: 33015 - DNA, 50 bp, unidentified
  source 1..50: mol_type = unassigned DNA; note = donor_40605de
  misc_feature 1..23: note = RE
  misc_feature 24..25: note = Core
  misc_feature 26..50: note = LE
gcatcgaacggggcgtccacacacgatggggtggacgccccccgacggca

SEQ ID NO: 33016 - DNA, 50 bp, unidentified
  source 1..50: mol_type = unassigned DNA; note = donor_40626b1
  misc_feature 1..24: note = RE
  misc_feature 25: note = Core
  misc_feature 26..50: note = LE
ggcaaggctgggggcgtccatgtacaatgtgatggacgcccccatcctcc

SEQ ID NO: 33017 - DNA, 50 bp, unidentified
  source 1..50: mol_type = unassigned DNA; note = donor_4064ca2
  misc_feature 1..22: note = RE
  misc_feature 23..25: note = Core
  misc_feature 26..50: note = LE
ctgcttgacttttgttagcaggtctattacaataagtttgggtggaagtc

SEQ ID NO: 33018 - DNA, 50 bp, unidentified
  source 1..50: mol_type = unassigned DNA; note = donor_4068d91
  misc_feature 1..24: note = RE
  misc_feature 25: note = Core
  misc_feature 26..50: note = LE
ttgcaatcgggcggggtccatatacaatggtatggaccccgcccttgccg

SEQ ID NO: 33019 - DNA, 50 bp, unidentified
  source 1..50: mol_type = unassigned DNA; note = donor_4068e28
  misc_feature 1..24: note = RE
  misc_feature 25: note = Core
  misc_feature 26..50: note = LE
ttgacttgtggggaagcccttgtagaatgaaagggacttccccgtccctg

SEQ ID NO: 33020 - DNA, 50 bp, unidentified
  source 1..50: mol_type = unassigned DNA; note = donor_406ab74
  misc_feature 1..21: note = RE
  misc_feature 22..25: note = Core
  misc_feature 26..50: note = LE
cccaagaggggccgtccatacatgatgggtggacggccccttgcggcatc

SEQ ID NO: 33021 - DNA, 50 bp, unidentified
  source 1..50: mol_type = unassigned DNA; note = donor_406fc5f
  misc_feature 1..23: note = RE
  misc_feature 24..25: note = Core
  misc_feature 26..50: note = LE
tgacacttaagctcctgggatgtctaatgagtctcagggagcccgccgtc

SEQ ID NO: 33022 - DNA, 50 bp, unidentified
  source 1..50: mol_type = unassigned DNA; note = donor_407555f
  misc_feature 1..22: note = RE
  misc_feature 23..25: note = Core
  misc_feature 26..50: note = LE
ctattgacttttcatagcacgtcttgtactatatagttagtttttttagc

SEQ ID NO: 33023 - DNA, 50 bp, unidentified
  source 1..50: mol_type = unassigned DNA; note = donor_40798af
  misc_feature 1..23: note = RE
  misc_feature 24..25: note = Core
  misc_feature 26..50: note = LE
agcttgacgagaccctatgggatctgatataccgccttgtggaggtcgat

SEQ ID NO: 33024 - DNA, 50 bp, unidentified
  source 1..50: mol_type = unassigned DNA; note = donor_407c792
  misc_feature 1..23: note = RE
  misc_feature 24..25: note = Core
  misc_feature 26..50: note = LE
gccatgcgggggccgtccacacatgatggggtggacggcccccgctcccg

SEQ ID NO: 33025 - DNA, 50 bp, unidentified
  source 1..50: mol_type = unassigned DNA; note = donor_4082507
  misc_feature 1..23: note = RE
  misc_feature 24..25: note = Core
  misc_feature 26..50: note = LE
agggttgacttttcatagttggtcttgtatgatgttttcagaagcaaaaa

SEQ ID NO: 33026 - DNA, 50 bp, unidentified
  source 1..50: mol_type = unassigned DNA; note = donor_40828bc
  misc_feature 1..21: note = RE
  misc_feature 22..25: note = Core
  misc_feature 26..50: note = LE
gcggcgggaggcgtccatagattatgggatggacgcctcccgtcttccag

SEQ ID NO: 33027 - DNA, 50 bp, unidentified; identical to SEQ ID NO: 30604
  source 1..50: mol_type = unassigned DNA; note = donor_409919e
  misc_feature 1..23: note = RE
  misc_feature 24..25: note = Core
  misc_feature 26..50: note = LE

SEQ ID NO: 33028 - DNA, 50 bp, unidentified
  source 1..50: mol_type = unassigned DNA; note = donor_409f754
  misc_feature 1..23: note = RE
  misc_feature 24..25: note = Core
  misc_feature 26..50: note = LE
caacgcgggagccatccagacaggatgagttggatggctcccgctcacgg

SEQ ID NO: 33029 - DNA, 50 bp, unidentified
  source 1..50: mol_type = unassigned DNA; note = donor_40a233a
  misc_feature 1..24: note = RE
  misc_feature 25: note = Core
  misc_feature 26..50: note = LE
tgcaatcgggcgggggtccatatacaatggtatggaccccgccctcgcga

SEQ ID NO: 33030 - DNA, 50 bp, unidentified
  source 1..50: mol_type = unassigned DNA; note = donor_40a3f4c
  misc_feature 1..24: note = RE
  misc_feature 25: note = Core
  misc_feature 26..50: note = LE
tggcaaaccgggggcgtccatgtacaatgggatggacgcccccacccgca

SEQ ID NO: 33031 - DNA, 50 bp, unidentified
  source 1..50: mol_type = unassigned DNA; note = donor_40a4624
  misc_feature 1..23: note = RE
  misc_feature 24..25: note = Core
  misc_feature 26..50: note = LE
gcgccaacgggggcgtccatacatgatggggtggacgccccctcgacggc

SEQ ID NO: 33032 - DNA, 50 bp, unidentified
  source 1..50: mol_type = unassigned DNA; note = donor_40a6deb
  misc_feature 1..23: note = RE
  misc_feature 24..25: note = Core
  misc_feature 26..50: note = LE
gcattcatgggggcgtccacacacgatgggatggacgccccccggcggca

SEQ ID NO: 33033 - DNA, 50 bp, unidentified
  source 1..50: mol_type = unassigned DNA; note = donor_40a8806
  misc_feature 1..22: note = RE
  misc_feature 23..25: note = Core
  misc_feature 26..50: note = LE
aaacagcctgatcaagacagttgcttgtgtcttgaggtaggaatagaatc

SEQ ID NO: 33034 - DNA, 50 bp, unidentified
  source 1..50: mol_type = unassigned DNA; note = donor_40b0a73
  misc_feature 1..23: note = RE
  misc_feature 24..25: note = Core
  misc_feature 26..50: note = LE
agcccggataggagagacggtatcttgtgtctctccgcagggtgatgatt

SEQ ID NO: 33035 - DNA, 50 bp, unidentified
  source 1..50: mol_type = unassigned DNA; note = donor_40b6a33
  misc_feature 1..23: note = RE
  misc_feature 24..25: note = Core
  misc_feature 26..50: note = LE
cagttgacaaaactataggaacaccattacagtttgagaagtagttagcc

SEQ ID NO: 33036 - DNA, 50 bp, unidentified
  source 1..50: mol_type = unassigned DNA; note = donor_40b8523
  misc_feature 1..23: note = RE
  misc_feature 24..25: note = Core
  misc_feature 26..50: note = LE
gctacgagttttattttcgtagcaacgaatcatgaaagcttatctcagcc

SEQ ID NO: 33037 - DNA, 50 bp, unidentified
  source 1..50: mol_type = unassigned DNA; note = donor_40b8565
  misc_feature 1..24: note = RE
  misc_feature 25: note = Core
  misc_feature 26..50: note = LE
cttgacacagggggagtccatgtagaatgatatggactccccctccccct

SEQ ID NO: 33038 - DNA, 50 bp, unidentified
  source 1..50: mol_type = unassigned DNA; note = donor_40c403a
  misc_feature 1..23: note = RE
  misc_feature 24..25: note = Core
  misc_feature 26..50: note = LE
gactcatcgaggcccgttacagaagatggggtaacgggccccggtctgcc

SEQ ID NO: 33039 - DNA, 50 bp, unidentified
  source 1..50: mol_type = unassigned DNA; note = donor_40cabdc
  misc_feature 1..24: note = RE
  misc_feature 25: note = Core
  misc_feature 26..50: note = LE
tgcaaaaatgggagggaccatagataatgggatggtccctcccgccctcg

SEQ ID NO: 33040 - DNA, 50 bp, unidentified
  source 1..50: mol_type = unassigned DNA; note = donor_40cd737
  misc_feature 1..22: note = RE
  misc_feature 23..25: note = Core
  misc_feature 26..50: note = LE
attcagtttttatattatagttcattgtataatttttaattattatattt

SEQ ID NO: 33041 - DNA, 50 bp, unidentified
  source 1..50: mol_type = unassigned DNA; note = donor_40e9a4b
  misc_feature 1..22: note = RE
  misc_feature 23..25: note = Core
  misc_feature 26..50: note = LE
actcttgacttttattggcaggtttgttacaatatatttgccgggtaaag

SEQ ID NO: 33042 - DNA, 50 bp, unidentified
  source 1..50: mol_type = unassigned DNA; note = donor_40f5bd7
  misc_feature 1..24: note = RE
  misc_feature 25: note = Core
  misc_feature 26..50: note = LE
cttgtggacggggcgggccatacgtatggaaaggcccgccccacctctcc

SEQ ID NO: 33043 - DNA, 50 bp, unidentified
  source 1..50: mol_type = unassigned DNA; note = donor_40fdb92
  misc_feature 1..23: note = RE
  misc_feature 24..25: note = Core
  misc_feature 26..50: note = LE
agtacttgacttttgttagcaggttagtaccataaaagtgtagttgttag

SEQ ID NO: 33044 - DNA, 50 bp, unidentified
  source 1..50: mol_type = unassigned DNA; note = donor_4102f8f
  misc_feature 1..22: note = RE
  misc_feature 23..25: note = Core
  misc_feature 26..50: note = LE
taaaaggcttgacatagagagtcttatacattaaactaagaacaagccgt

SEQ ID NO: 33045 - DNA, 50 bp, unidentified
  source 1..50: mol_type = unassigned DNA; note = donor_4103758
  misc_feature 1..23: note = RE
  misc_feature 24..25: note = Core
  misc_feature 26..50: note = LE
ggcttgactttttaatagttagtctcgtataataaaatagtagtatttat

SEQ ID NO: 33046 - DNA, 50 bp, unidentified
  source 1..50: mol_type = unassigned DNA; note = donor_410e4a8
  misc_feature 1..23: note = RE
  misc_feature 24..25: note = Core
  misc_feature 26..50: note = LE
ctgcttgactttttatttgcagactactacaatatatttatggttaatac

SEQ ID NO: 33047 - DNA, 50 bp, unidentified
  source 1..50: mol_type = unassigned DNA; note = donor_4113291
  misc_feature 1..24: note = RE
  misc_feature 25: note = Core
  misc_feature 26..50: note = LE
tggaaatatgccaaacctagaatacctttggttttacaaagatagttttt

SEQ ID NO: 33048 - DNA, 50 bp, unidentified
  source 1..50: mol_type = unassigned DNA; note = donor_41180da
  misc_feature 1..18: note = RE
  misc_feature 19..25: note = Core
  misc_feature 26..50: note = LE
cttgacttcttcattgagagtccttaagttcgtagttgcagtttcttcgt

SEQ ID NO: 33049 - DNA, 50 bp, unidentified
  source 1..50: mol_type = unassigned DNA; note = donor_41192ac
  misc_feature 1..23: note = RE
  misc_feature 24..25: note = Core
  misc_feature 26..50: note = LE
ttaacccttgacgaagacggatacttgtcttatgagttttttggtttcca

SEQ ID NO: 33050 - DNA, 50 bp, unidentified
  source 1..50: mol_type = unassigned DNA; note = donor_412ed2b
  misc_feature 1..23: note = RE
  misc_feature 24..25: note = Core
  misc_feature 26..50: note = LE
acacttgatttttatatagttagctggtatattgtaattgactcatctaa

SEQ ID NO: 33051 - DNA, 50 bp, unidentified
  source 1..50: mol_type = unassigned DNA; note = donor_4133452
  misc_feature 1..23: note = RE
  misc_feature 24..25: note = Core
  misc_feature 26..50: note = LE
tgacatttaagctcctgggatgtctaatgagtgttagcgagcctgctgtc

SEQ ID NO: 33052 - DNA, 50 bp, unidentified; identical to SEQ ID NO: 30383
  source 1..50: mol_type = unassigned DNA; note = donor_413f7d2
  misc_feature 1..23: note = RE
  misc_feature 24..25: note = Core
  misc_feature 26..50: note = LE

SEQ ID NO: 33053 - DNA, 50 bp, unidentified
  source 1..50: mol_type = unassigned DNA; note = donor_41428a9
  misc_feature 1..23: note = RE
  misc_feature 24..25: note = Core
  misc_feature 26..50: note = LE
gcatgacgggcggcaaccaaagaagatgggatggttgccgccctccccgg

SEQ ID NO: 33054 - DNA, 50 bp, unidentified
  source 1..50: mol_type = unassigned DNA; note = donor_41479a5
  misc_feature 1..24: note = RE
  misc_feature 25: note = Core
  misc_feature 26..50: note = LE
gcaattagtggggaagcccttgtagaatgaaagggacttccccgtcccga

SEQ ID NO: 33055 - DNA, 50 bp, unidentified
  source 1..50: mol_type = unassigned DNA; note = donor_4148f73
  misc_feature 1..23: note = RE
  misc_feature 24..25: note = Core
  misc_feature 26..50: note = LE
acacccttgacacagagaggcgtcaacttgttgaattgggagcaagagag

SEQ ID NO: 33056 - DNA, 50 bp, unidentified
  source 1..50: mol_type = unassigned DNA; note = donor_414e38a
  misc_feature 1..22: note = RE
  misc_feature 23..25: note = Core
  misc_feature 26..50: note = LE
tgcttgactttttatttgcagactactacaatatatttatggttgatacc

SEQ ID NO: 33057 - DNA, 50 bp, unidentified
  source 1..50: mol_type = unassigned DNA; note = donor_4154ef2
  misc_feature 1..23: note = RE
  misc_feature 24..25: note = Core
  misc_feature 26..50: note = LE
tcacgggcggcaaccacagaagaagatggggtggttgccgccctccctcg

SEQ ID NO: 33058 - DNA, 50 bp, unidentified
  source 1..50: mol_type = unassigned DNA; note = donor_415603b
  misc_feature 1..23: note = RE
  misc_feature 24..25: note = Core
  misc_feature 26..50: note = LE
tcaccgtctagacttaatggttgcttgtattaacgagatttggtattctg

SEQ ID NO: 33059 - DNA, 50 bp, unidentified
  source 1..50: mol_type = unassigned DNA; note = donor_415dafc
  misc_feature 1..23: note = RE
  misc_feature 24..25: note = Core
  misc_feature 26..50: note = LE
gggcttgacaattcatagttgatcttgtatgatagatatataaataatta

SEQ ID NO: 33060 - DNA, 50 bp, unidentified
  source 1..50: mol_type = unassigned DNA; note = donor_415e4bc
  misc_feature 1..23: note = RE
  misc_feature 24..25: note = Core
  misc_feature 26..50: note = LE
tgacaatctaagccctgggatgtctaatgagatgtagcgggcctgccgat

SEQ ID NO: 33061 - DNA, 50 bp, unidentified
  source 1..50: mol_type = unassigned DNA; note = donor_4164e51
  misc_feature 1..23: note = RE
  misc_feature 24..25: note = Core
  misc_feature 26..50: note = LE
gcaccaacgggggcgtccacacatgatggggtggacgccccctcacggca

SEQ ID NO: 33062 - DNA, 50 bp, unidentified
  source 1..50: mol_type = unassigned DNA; note = donor_4166ad7
  misc_feature 1..23: note = RE
  misc_feature 24..25: note = Core
  misc_feature 26..50: note = LE
aaggatgaattgatgatagttgactcctaccatcaattcatagtataagt

SEQ ID NO: 33063 - DNA, 50 bp, unidentified
  source 1..50: mol_type = unassigned DNA; note = donor_416fc32
  misc_feature 1..23: note = RE
  misc_feature 24..25: note = Core
  misc_feature 26..50: note = LE
gcaaaatgacgcgcgattagacgacattggggaatcgcgggagcgagtcg

SEQ ID NO: 33064 - DNA, 50 bp, unidentified
  source 1..50: mol_type = unassigned DNA; note = donor_417025d
  misc_feature 1..23: note = RE
  misc_feature 24..25: note = Core
  misc_feature 26..50: note = LE
tgacagaattcaggatgggatgtctaatgagatcagcggggcttcttctg

SEQ ID NO: 33065 - DNA, 50 bp, unidentified
  source 1..50: mol_type = unassigned DNA; note = donor_41712e1
  misc_feature 1..23: note = RE
  misc_feature 24..25: note = Core
  misc_feature 26..50: note = LE
ccgtttgacaacagcattaggaagctctaccttcttgatcgggttgatcg

SEQ ID NO: 33066 - DNA, 50 bp, unidentified
  source 1..50: mol_type = unassigned DNA; note = donor_41716c9
  misc_feature 1..22: note = RE
  misc_feature 23..25: note = Core
  misc_feature 26..50: note = LE
catcgacgggggcatccatacatgatggggtggatgccccctcccgacgg

SEQ ID NO: 33067 - DNA, 50 bp, unidentified
  source 1..50: mol_type = unassigned DNA; note = donor_4173b9b
  misc_feature 1..23: note = RE
  misc_feature 24..25: note = Core
  misc_feature 26..50: note = LE
gcgaaagtcaggctgaccatagattaatgagatggtcagcctgaccgaaa

SEQ ID NO: 33068 - DNA, 50 bp, unidentified
  source 1..50: mol_type = unassigned DNA; note = donor_4176d3c
  misc_feature 1..24: note = RE
  misc_feature 25: note = Core
  misc_feature 26..50: note = LE
gcacaaacgggagacgttcatataatggtatgaacgtctcccacccgtga

SEQ ID NO: 33069 - DNA, 50 bp, unidentified
  source 1..50: mol_type = unassigned DNA; note = donor_417c1fd
  misc_feature 1..23: note = RE
  misc_feature 24..25: note = Core
  misc_feature 26..50: note = LE
cgcactgaccggcaagacggtatcttgtatctcgacagtcatccagttta

SEQ ID NO: 33070 - DNA, 50 bp, unidentified
  source 1..50: mol_type = unassigned DNA; note = donor_417ccad
  misc_feature 1..23: note = RE
  misc_feature 24..25: note = Core
  misc_feature 26..50: note = LE
ggtcttgacttttaatagttagtctcgtattattaaatagtagtatttat

SEQ ID NO: 33071 - DNA, 50 bp, unidentified
  source 1..50: mol_type = unassigned DNA; note = donor_417e955
  misc_feature 1..23: note = RE
  misc_feature 24..25: note = Core
  misc_feature 26..50: note = LE
agatattcgtatcaaactgagggagcattcctgtagatcgttaaatatca

SEQ ID NO: 33072 - DNA, 50 bp, unidentified
  source 1..50: mol_type = unassigned DNA; note = donor_4183121
  misc_feature 1..24: note = RE
  misc_feature 25: note = Core
  misc_feature 26..50: note = LE
gaccctcttgacacaaagaggcttctgattgatacttgtggtgggtgttg

SEQ ID NO: 33073 - DNA, 50 bp, unidentified
  source 1..50: mol_type = unassigned DNA; note = donor_419066f
  misc_feature 1..24: note = RE
  misc_feature 25: note = Core
  misc_feature 26..50: note = LE
ttgacaaaaaggggcgtccatatataatggtatggacgcccccctacccg

SEQ ID NO: 33074 - DNA, 50 bp, unidentified; identical to SEQ ID NO: 30604
  source 1..50: mol_type = unassigned DNA; note = donor_419865c
  misc_feature 1..23: note = RE
  misc_feature 24..25: note = Core
  misc_feature 26..50: note = LE

SEQ ID NO: 33075 - DNA, 50 bp, unidentified
  source 1..50: mol_type = unassigned DNA; note = donor_419bd13
  misc_feature 1..24: note = RE
  misc_feature 25: note = Core
  misc_feature 26..50: note = LE
gggttgacaacctatataggaacacattacgttgttggcagttccgctta

SEQ ID NO: 33076 - DNA, 50 bp, unidentified
  source 1..50: mol_type = unassigned DNA; note = donor_41a3cf4
  misc_feature 1..23: note = RE
  misc_feature 24..25: note = Core
  misc_feature 26..50: note = LE
tcacttgacaattcatagttggtcttgtatgatatagttagtaactaaat

SEQ ID NO: 33077 - DNA, 50 bp, unidentified
  source 1..50: mol_type = unassigned DNA; note = donor_41b25b3
  misc_feature 1..22: note = RE
  misc_feature 23..25: note = Core
  misc_feature 26..50: note = LE
cagtacgggaggagaccatatatgatgtgatggtctcctcccaccttacg

SEQ ID NO: 33078 - DNA, 50 bp, unidentified; identical to SEQ ID NO: 32623
  source 1..50: mol_type = unassigned DNA; note = donor_41c010f
  misc_feature 1..24: note = RE
  misc_feature 25: note = Core
  misc_feature 26..50: note = LE

SEQ ID NO: 33079 - DNA, 50 bp, unidentified
  source 1..50: mol_type = unassigned DNA; note = donor_41d36de
  misc_feature 1..22: note = RE
  misc_feature 23..25: note = Core
  misc_feature 26..50: note = LE
caccgcagcggccgtccacacatgatggggtggacggcccctgcaacggc

SEQ ID NO: 33080 - DNA, 50 bp, unidentified
  source 1..50: mol_type = unassigned DNA; note = donor_41d70ae
  misc_feature 1..23: note = RE
  misc_feature 24..25: note = Core
  misc_feature 26..50: note = LE
cctcttgacttcataccattagactcgtataataagttttgcagacgatt

SEQ ID NO: 33081 - DNA, 50 bp, unidentified
  source 1..50: mol_type = unassigned DNA; note = donor_41ddd46
  misc_feature 1..23: note = RE
  misc_feature 24..25: note = Core
  misc_feature 26..50: note = LE
tgcaaacgggatgcgttcatataaaatgtaatgaacgcattccacttcct

SEQ ID NO: 33082 - DNA, 50 bp, unidentified
  source 1..50: mol_type = unassigned DNA; note = donor_41ebdc5
  misc_feature 1..22: note = RE
  misc_feature 23..25: note = Core
  misc_feature 26..50: note = LE
tttgtttggattttaaatggaaagttcctatgtttaaaatcggaagtgac

SEQ ID NO: 33083 - DNA, 50 bp, unidentified
  source 1..50: mol_type = unassigned DNA; note = donor_41f0242
  misc_feature 1..24: note = RE
  misc_feature 25: note = Core
  misc_feature 26..50: note = LE
cagcttcttgacacagaggggagcctacttgtttcattgacgcaggaccg

SEQ ID NO: 33084 - DNA, 50 bp, unidentified; identical to SEQ ID NO: 30409
  source 1..50: mol_type = unassigned DNA; note = donor_41f9b09
  misc_feature 1..24: note = RE
  misc_feature 25: note = Core
  misc_feature 26..50: note = LE

SEQ ID NO: 33085 - DNA, 50 bp, unidentified
  source 1..50: mol_type = unassigned DNA; note = donor_41fe91d
  misc_feature 1..21: note = RE
  misc_feature 22..25: note = Core
  misc_feature 26..50: note = LE
cggcggcttgacacagggctactcactggtgcaccatccttgtgtcggtg

SEQ ID NO: 33086 - DNA, 50 bp, unidentified
  source 1..50: mol_type = unassigned DNA; note = donor_41ffbee
  misc_feature 1..23: note = RE
  misc_feature 24..25: note = Core
  misc_feature 26..50: note = LE
cggccagacccacataacagttgcctgtgtctgagagacctgtcatgatg

SEQ ID NO: 33087 - DNA, 50 bp, unidentified
  source 1..50: mol_type = unassigned DNA; note = donor_4206ccd
  misc_feature 1..23: note = RE
  misc_feature 24..25: note = Core
  misc_feature 26..50: note = LE
gcaccaacagggccgtccacacacgttggggtggacggcccctcgcggca

SEQ ID NO: 33088 - DNA, 50 bp, unidentified
  source 1..50: mol_type = unassigned DNA; note = donor_4209389
  misc_feature 1..23: note = RE
  misc_feature 24..25: note = Core
  misc_feature 26..50: note = LE
cttgcgcgggaggcgtccatagattatgggatggacgcctcccgcttcca

SEQ ID NO: 33089 - DNA, 50 bp, unidentified
  source 1..50: mol_type = unassigned DNA; note = donor_420b5c0
  misc_feature 1..24: note = RE
  misc_feature 25: note = Core
  misc_feature 26..50: note = LE
acgcgtcttgacacagaggggagcctacttgtttcattgcggtagcgacc

SEQ ID NO: 33090 - DNA, 50 bp, unidentified
  source 1..50: mol_type = unassigned DNA; note = donor_421299f
  misc_feature 1..24: note = RE
  misc_feature 25: note = Core
  misc_feature 26..50: note = LE
ttcttgacctcctattagctggtatcgtattatgaggtttgccagttata

SEQ ID NO: 33091 - DNA, 50 bp, unidentified
  source 1..50: mol_type = unassigned DNA; note = donor_421c148
  misc_feature 1..22: note = RE
  misc_feature 23..25: note = Core
  misc_feature 26..50: note = LE
acccttgacaaccaacacggtatcttgtatgttgccgtcatcgcttgact

SEQ ID NO: 33092 - DNA, 50 bp, unidentified
  source 1..50: mol_type = unassigned DNA; note = donor_421f995
  misc_feature 1..23: note = RE
  misc_feature 24..25: note = Core
  misc_feature 26..50: note = LE
acagcttgacaaaatcatagtgttccattagacttgtttattgtaaatat

SEQ ID NO: 33093 - DNA, 50 bp, unidentified
  source 1..50: mol_type = unassigned DNA; note = donor_422a75a
  misc_feature 1..24: note = RE
  misc_feature 25: note = Core
  misc_feature 26..50: note = LE
tggaaatatattaaacctagaatacctttggtctaaaagaagacaattac

SEQ ID NO: 33094 - DNA, 50 bp, unidentified
  source 1..50: mol_type = unassigned DNA; note = donor_4236b74
  misc_feature 1..21: note = RE
  misc_feature 22..25: note = Core
  misc_feature 26..50: note = LE
aaaacttgcaaaaaccataagaataccttagatttgcgcagtaaacagga

SEQ ID NO: 33095 - DNA, 50 bp, unidentified; identical to SEQ ID NO: 30383
  source 1..50: mol_type = unassigned DNA; note = donor_423b1e6
  misc_feature 1..23: note = RE
  misc_feature 24..25: note = Core
  misc_feature 26..50: note = LE

SEQ ID NO: 33096 - DNA, 50 bp, unidentified
  source 1..50: mol_type = unassigned DNA; note = donor_423cb6b
  misc_feature 1..23: note = RE
  misc_feature 24..25: note = Core
  misc_feature 26..50: note = LE
acacttgactttttattagcaggctcctaatatataagtgtagggtttca

SEQ ID NO: 33097 - DNA, 50 bp, unidentified
  source 1..50: mol_type = unassigned DNA; note = donor_423d37d
  misc_feature 1..23: note = RE
  misc_feature 24..25: note = Core
  misc_feature 26..50: note = LE
taacttgattttttatttgcaggctactacaatatatttatggttaatat

SEQ ID NO: 33098 - DNA, 50 bp, unidentified
  source 1..50: mol_type = unassigned DNA; note = donor_4241f5b
  misc_feature 1..22: note = RE
  misc_feature 23..25: note = Core
  misc_feature 26..50: note = LE
agttcttgactcctattagctggttcgtattatagagttaaccagttttt

SEQ ID NO: 33099 - DNA, 50 bp, unidentified
  source 1..50: mol_type = unassigned DNA; note = donor_4251b4f
  misc_feature 1..22: note = RE
  misc_feature 23..25: note = Core
  misc_feature 26..50: note = LE
caccgcgggggccgtccatacatgatggggtggacggcccccgctcctga

SEQ ID NO: 33100 - DNA, 50 bp, unidentified
  source 1..50: mol_type = unassigned DNA; note = donor_42545c6
  misc_feature 1..24: note = RE
  misc_feature 25: note = Core
  misc_feature 26..50: note = LE
ctcttgactgtttatagtttgtcacgtataatccaattatcttagatggt

SEQ ID NO: 33101 - DNA, 50 bp, unidentified
  source 1..50: mol_type = unassigned DNA; note = donor_4255379
  misc_feature 1..23: note = RE
  misc_feature 24..25: note = Core
  misc_feature 26..50: note = LE
ggcctgaggttgacagagggtgtctgatggcactaccttctttcgtcatc

SEQ ID NO: 33102 - DNA, 50 bp, unidentified
  source 1..50: mol_type = unassigned DNA; note = donor_4255fb6
  misc_feature 1..22: note = RE
  misc_feature 23..25: note = Core
  misc_feature 26..50: note = LE
actattgatttttcttagcaggtttggtacgataaaagtgtaaatgcaag

SEQ ID NO: 33103 - DNA, 50 bp, unidentified
  source 1..50: mol_type = unassigned DNA; note = donor_4262f94
  misc_feature 1..22: note = RE
  misc_feature 23..25: note = Core
  misc_feature 26..50: note = LE
atgtttgacaaactattagctggttcgtattataaggttgaccaagttaa

SEQ ID NO: 33104 - DNA, 50 bp, unidentified
  source 1..50: mol_type = unassigned DNA; note = donor_4264a71
  misc_feature 1..22: note = RE
  misc_feature 23..25: note = Core
  misc_feature 26..50: note = LE
ctttccttggggtgaccatgtaagatggcatggtcaccccacccacaccg

SEQ ID NO: 33105 - DNA, 50 bp, unidentified
  source 1..50: mol_type = unassigned DNA; note = donor_4275d8f
  misc_feature 1..23: note = RE
  misc_feature 24..25: note = Core
  misc_feature 26..50: note = LE
tcccttgactttcaagacaatcgcttgtatcttacagaggtaggtaaccc

SEQ ID NO: 33106 - DNA, 50 bp, unidentified
  source 1..50: mol_type = unassigned DNA; note = donor_428d327
  misc_feature 1..22: note = RE
  misc_feature 23..25: note = Core
  misc_feature 26..50: note = LE
atattgacttcctattagctggtttcgtattataaggttagccagttttt

SEQ ID NO: 33107 - DNA, 50 bp, unidentified
  source 1..50: mol_type = unassigned DNA; note = donor_428e0da
  misc_feature 1..24: note = RE
  misc_feature 25: note = Core
  misc_feature 26..50: note = LE
ggagttgacaaaaacataggaacacattaccatgtttagtaggttctgat

SEQ ID NO: 33108 - DNA, 50 bp, unidentified
  source 1..50: mol_type = unassigned DNA; note = donor_4292c26
  misc_feature 1..23: note = RE
  misc_feature 24..25: note = Core
  misc_feature 26..50: note = LE
gcgagccgggggccatccacacatgatggggtggatggccccctcacagc

SEQ ID NO: 33109 - DNA, 50 bp, unidentified
  source 1..50: mol_type = unassigned DNA; note = donor_429abbf
  misc_feature 1..24: note = RE
  misc_feature 25: note = Core
  misc_feature 26..50: note = LE
gcaagctgagggggagtccatatacaatgggatggactcctcctccccta

SEQ ID NO: 33110 - DNA, 50 bp, unidentified
  source 1..50: mol_type = unassigned DNA; note = donor_42ac1f5
  misc_feature 1..22: note = RE
  misc_feature 23..25: note = Core
  misc_feature 26..50: note = LE
cactacgggcggcaaccatagaagatgggatggttgccgccctcccgaaa

SEQ ID NO: 33111 - DNA, 50 bp, unidentified
  source 1..50: mol_type = unassigned DNA; note = donor_42accc4
  misc_feature 1..24: note = RE
  misc_feature 25: note = Core
  misc_feature 26..50: note = LE
tgcaaccgaggaggggtccatatacaatgggatggacccctcctcaccta

SEQ ID NO: 33112 - DNA, 50 bp, unidentified
  source 1..50: mol_type = unassigned DNA; note = donor_42ad79f
  misc_feature 1..23: note = RE
  misc_feature 24..25: note = Core
  misc_feature 26..50: note = LE
gccgcgaaggctgggtccatatataatgaaatgggcccagccttcttccc

SEQ ID NO: 33113 - DNA, 50 bp, unidentified
  source 1..50: mol_type = unassigned DNA; note = donor_42adaba
  misc_feature 1..23: note = RE
  misc_feature 24..25: note = Core
  misc_feature 26..50: note = LE
acaacaggcggccttctcatggaagatgggatgagaaggccgctctccgc

SEQ ID NO: 33114 - DNA, 50 bp, unidentified
  source 1..50: mol_type = unassigned DNA; note = donor_42b1bc5
  misc_feature 1..23: note = RE
  misc_feature 24..25: note = Core
  misc_feature 26..50: note = LE
aaatcggtttggagagatggtatcttgtatctctccagatagagtaataa

SEQ ID NO: 33115 - DNA, 50 bp, unidentified
  source 1..50: mol_type = unassigned DNA; note = donor_42bddc2
  misc_feature 1..24: note = RE
  misc_feature 25: note = Core
  misc_feature 26..50: note = LE
ttgcaatcgggcggggtccatatacaatggtatggaccccgcccttcgca

SEQ ID NO: 33116 - DNA, 50 bp, unidentified; identical to SEQ ID NO: 32196
  source 1..50: mol_type = unassigned DNA; note = donor_42be7c7
  misc_feature 1..23: note = RE
  misc_feature 24..25: note = Core
  misc_feature 26..50: note = LE

SEQ ID NO: 33117 - DNA, 50 bp, unidentified
  source 1..50: mol_type = unassigned DNA; note = donor_42cb2a4
  misc_feature 1..23: note = RE
  misc_feature 24..25: note = Core
  misc_feature 26..50: note = LE
tttttcttgactttacacggtagcttgtatgtaataggcatgtggtggtt

SEQ ID NO: 33118 - DNA, 50 bp, unidentified
  source 1..50: mol_type = unassigned DNA; note = donor_42d6a7e
  misc_feature 1..23: note = RE
  misc_feature 24..25: note = Core
  misc_feature 26..50: note = LE
tgaccctgcgaaccatgggatgtctaatggggcttaccgggccttccggt

SEQ ID NO: 33119 - DNA, 50 bp, unidentified
  source 1..50: mol_type = unassigned DNA; note = donor_42dacc2
  misc_feature 1..22: note = RE
  misc_feature 23..25: note = Core
  misc_feature 26..50: note = LE
tgactactttttaatatagttcgttgtatattatttgtatattcaaaata

SEQ ID NO: 33120 - DNA, 50 bp, unidentified
  source 1..50: mol_type = unassigned DNA; note = donor_42dd145
  misc_feature 1..24: note = RE
  misc_feature 25: note = Core
  misc_feature 26..50: note = LE
cgcaacgcgggagccatccacacgcgaaggggtggatggctcccgctcac

SEQ ID NO: 33121 - DNA, 50 bp, unidentified
  source 1..50: mol_type = unassigned DNA; note = donor_42e6701
  misc_feature 1..23: note = RE
  misc_feature 24..25: note = Core
  misc_feature 26..50: note = LE
gccagcagggtgccgtccacacatgatgctgtggacggcgcccgaccggc

SEQ ID NO: 33122 - DNA, 50 bp, unidentified
  source 1..50: mol_type = unassigned DNA; note = donor_42e8faf
  misc_feature 1..23: note = RE
  misc_feature 24..25: note = Core
  misc_feature 26..50: note = LE
cagtcgcttgacacacagaggcgctgacttgttgaatcgaccccagacgc

SEQ ID NO: 33123 - DNA, 50 bp, unidentified
  source 1..50: mol_type = unassigned DNA; note = donor_42f5e7e
  misc_feature 1..24: note = RE
  misc_feature 25: note = Core
  misc_feature 26..50: note = LE
gtgctgaatggggaagcccttgtagaatgaaagggacttccccatcccga

SEQ ID NO: 33124 - DNA, 50 bp, unidentified
  source 1..50: mol_type = unassigned DNA; note = donor_42f9b53
  misc_feature 1..23: note = RE
  misc_feature 24..25: note = Core
  misc_feature 26..50: note = LE
tgccaaccgggccgttccacatatgatggtgtggaacggcccttcgaggc

SEQ ID NO: 33125 - DNA, 50 bp, unidentified
  source 1..50: mol_type = unassigned DNA; note = donor_430258d
  misc_feature 1..24: note = RE
  misc_feature 25: note = Core
  misc_feature 26..50: note = LE
cgcggcttgacaaacagacgggcgtagtcagaagatggtcgctagttccc

SEQ ID NO: 33126 - DNA, 50 bp, unidentified
  source 1..50: mol_type = unassigned DNA; note = donor_4311bcc
  misc_feature 1..23: note = RE
  misc_feature 24..25: note = Core
  misc_feature 26..50: note = LE
tctcttgatttatttatagtaggctcgtataatatatttgtattaattat

SEQ ID NO: 33127 - DNA, 50 bp, unidentified
  source 1..50: mol_type = unassigned DNA; note = donor_431b306
  misc_feature 1..22: note = RE
  misc_feature 23..25: note = Core
  misc_feature 26..50: note = LE
aaatttgtttttgatcttggaatgcctttagtttgtattctaattaaata

SEQ ID NO: 33128 - DNA, 50 bp, unidentified
  source 1..50: mol_type = unassigned DNA; note = donor_43271de
  misc_feature 1..23: note = RE
  misc_feature 24..25: note = Core
  misc_feature 26..50: note = LE
gccacacgggaggtgtccatgtaagatggcatggacacctcccacccgat

SEQ ID NO: 33129 - DNA, 50 bp, unidentified
  source 1..50: mol_type = unassigned DNA; note = donor_432b263
  misc_feature 1..23: note = RE
  misc_feature 24..25: note = Core
  misc_feature 26..50: note = LE
gacgccaacacgccgaatagagaagatggggtattcggctttcgccccat

SEQ ID NO: 33130 - DNA, 50 bp, unidentified
  source 1..50: mol_type = unassigned DNA; note = donor_43323a9
  misc_feature 1..23: note = RE
  misc_feature 24..25: note = Core
  misc_feature 26..50: note = LE
aaacttgcttctcaagagagaatcttgtatctttcgaagtgaagcgtaaa

SEQ ID NO: 33131 - DNA, 50 bp, unidentified; identical to SEQ ID NO: 32695
  source 1..50: mol_type = unassigned DNA; note = donor_4338d05
  misc_feature 1..23: note = RE
  misc_feature 24..25: note = Core
  misc_feature 26..50: note = LE

SEQ ID NO: 33132 - DNA, 50 bp, unidentified
  source 1..50: mol_type = unassigned DNA; note = donor_4348633
  misc_feature 1..23: note = RE
  misc_feature 24..25: note = Core
  misc_feature 26..50: note = LE
tacattgacttattaccacatgactcgtattatataaattaaattattgt

SEQ ID NO: 33133 - DNA, 50 bp, unidentified
  source 1..50: mol_type = unassigned DNA; note = donor_435165e
  misc_feature 1..23: note = RE
  misc_feature 24..25: note = Core
  misc_feature 26..50: note = LE
gacccaaaccggccgattagagaagatggggtaatcggccggcgttgttg

SEQ ID NO: 33134 - DNA, 50 bp, unidentified
  source 1..50: mol_type = unassigned DNA; note = donor_435e84d
  misc_feature 1..23: note = RE
  misc_feature 24..25: note = Core
  misc_feature 26..50: note = LE
gacacctctgcctttttcatagaagatgggatgaaagagggcgtaccttc

SEQ ID NO: 33135 - DNA, 50 bp, unidentified
  source 1..50: mol_type = unassigned DNA; note = donor_437012f
  misc_feature 1..23: note = RE
  misc_feature 24..25: note = Core
  misc_feature 26..50: note = LE
tcgcttgacttgagacacggttgcttgtatgtttcgttttgctggacaag

SEQ ID NO: 33136 - DNA, 50 bp, unidentified
  source 1..50: mol_type = unassigned DNA; note = donor_43840fc
  misc_feature 1..23: note = RE
  misc_feature 24..25: note = Core
  misc_feature 26..50: note = LE
agtgttgacaaatcttagaatgtcacgtataatgtatttagtaaattgat

SEQ ID NO: 33137 - DNA, 50 bp, unidentified
  source 1..50: mol_type = unassigned DNA; note = donor_4388714
  misc_feature 1..23: note = RE
  misc_feature 24..25: note = Core
  misc_feature 26..50: note = LE
gattcaggattgacatagaggcgctgacttgtttggatgcatggacgccg

SEQ ID NO: 33138 - DNA, 50 bp, unidentified
  source 1..50: mol_type = unassigned DNA; note = donor_4397a62
  misc_feature 1..23: note = RE
  misc_feature 24..25: note = Core
  misc_feature 26..50: note = LE
cggtggtggttgacaaagggtgtctgatggctctaccctcccttcttgag

SEQ ID NO: 33139 - DNA, 50 bp, unidentified
  source 1..50: mol_type = unassigned DNA; note = donor_43a0277
  misc_feature 1..23: note = RE
  misc_feature 24..25: note = Core
  misc_feature 26..50: note = LE
gtaacggagggcgagtccatacataattggatggactcgcccccgccgag

SEQ ID NO: 33140 - DNA, 50 bp, unidentified
  source 1..50: mol_type = unassigned DNA; note = donor_43a92b6
  misc_feature 1..23: note = RE
  misc_feature 24..25: note = Core
  misc_feature 26..50: note = LE
aattattacgttcaagacagttgcttgtatcttaaaaaaactttaaaata

SEQ ID NO: 33141 - DNA, 50 bp, unidentified
  source 1..50: mol_type = unassigned DNA; note = donor_43ab0e6
  misc_feature 1..23: note = RE
  misc_feature 24..25: note = Core
  misc_feature 26..50: note = LE
tctcttgacttcatatagttagtcttgtataatgaaaaccaagtaataat

SEQ ID NO: 33142 - DNA, 50 bp, unidentified
  source 1..50: mol_type = unassigned DNA; note = donor_43aef10
  misc_feature 1..24: note = RE
  misc_feature 25: note = Core
  misc_feature 26..50: note = LE
ttgacaaccgggggagtccatgtagaatgacatggactccccctcatcag

SEQ ID NO: 33143 - DNA, 50 bp, unidentified
  source 1..50: mol_type = unassigned DNA; note = donor_43c1159
  misc_feature 1..23: note = RE
  misc_feature 24..25: note = Core
  misc_feature 26..50: note = LE
tatcgcctcttgacatagaggcgctgacttgtttagatgagcccagcacc

SEQ ID NO: 33144 - DNA, 50 bp, unidentified
  source 1..50: mol_type = unassigned DNA; note = donor_43c8be5
  misc_feature 1..22: note = RE
  misc_feature 23..25: note = Core
  misc_feature 26..50: note = LE
tttagggcttgacatagagagtcttatacagtaaactaaaagcaagccct

SEQ ID NO: 33145 - DNA, 50 bp, unidentified
  source 1..50: mol_type = unassigned DNA; note = donor_43f855c
  misc_feature 1..23: note = RE
  misc_feature 24..25: note = Core
  misc_feature 26..50: note = LE
gcccccctccaacaacacagttgcttatctgttcggaatctggcagtttg

SEQ ID NO: 33146 - DNA, 50 bp, unidentified
  source 1..50: mol_type = unassigned DNA; note = donor_43f8fb8
  misc_feature 1..22: note = RE
  misc_feature 23..25: note = Core
  misc_feature 26..50: note = LE
ggcttgacatcagcattgggaagccctactttcttgatcgtgggttcgaa

SEQ ID NO: 33147 - DNA, 50 bp, unidentified
  source 1..50: mol_type = unassigned DNA; note = donor_4405262
  misc_feature 1..23: note = RE
  misc_feature 24..25: note = Core
  misc_feature 26..50: note = LE
cggtctacctcacaacacagttgcttgtgtccaggaaatctggcaggatg

SEQ ID NO: 33148 - DNA, 50 bp, unidentified
  source 1..50: mol_type = unassigned DNA; note = donor_440b167
  misc_feature 1..24: note = RE
  misc_feature 25: note = Core
  misc_feature 26..50: note = LE
tggcaaaacgggagcgtccatgtacaatgggatggacgctcccaccttaa

SEQ ID NO: 33149 - DNA, 50 bp, unidentified
  source 1..50: mol_type = unassigned DNA; note = donor_441d2e1
  misc_feature 1..23: note = RE
  misc_feature 24..25: note = Core
  misc_feature 26..50: note = LE
ctaatttgcttttatcatagaaatcctttagattagcataattaatttag

SEQ ID NO: 33150 - DNA, 50 bp, unidentified
  source 1..50: mol_type = unassigned DNA; note = donor_44218d4
  misc_feature 1..23: note = RE
  misc_feature 24..25: note = Core
  misc_feature 26..50: note = LE
cggcttgacgaaaacaatagaaccttgtattgtttgaggtgtcggggtga

SEQ ID NO: 33151 - DNA, 50 bp, unidentified
  source 1..50: mol_type = unassigned DNA; note = donor_442ec0a
  misc_feature 1..23: note = RE
  misc_feature 24..25: note = Core
  misc_feature 26..50: note = LE
gacctcttgacataccccatacaagatgctatggggcagaccgcggcgag

SEQ ID NO: 33152 - DNA, 50 bp, unidentified; identical to SEQ ID NO: 31549
  source 1..50: mol_type = unassigned DNA; note = donor_44317ea
  misc_feature 1..22: note = RE
  misc_feature 23..25: note = Core
  misc_feature 26..50: note = LE

SEQ ID NO: 33153 - DNA, 50 bp, unidentified
  source 1..50: mol_type = unassigned DNA; note = donor_4444dc2
  misc_feature 1..21: note = RE
  misc_feature 22..25: note = Core
  misc_feature 26..50: note = LE
cttgacgaaccccatagggacacccgttaccttctaggtgctcccgctcc

SEQ ID NO: 33154 - DNA, 50 bp, unidentified
  source 1..50: mol_type = unassigned DNA; note = donor_444ec12
  misc_feature 1..22: note = RE
  misc_feature 23..25: note = Core
  misc_feature 26..50: note = LE
tgccatagggggcgtccacatatgatgatgtggacgcccccgcccagcgc

SEQ ID NO: 33155 - DNA, 50 bp, unidentified
  source 1..50: mol_type = unassigned DNA; note = donor_4451c29
  misc_feature 1..23: note = RE
  misc_feature 24..25: note = Core
  misc_feature 26..50: note = LE
cggcttgacaacctcattgagaatccttacctttcttcatgggtgttcgt

SEQ ID NO: 33156 - DNA, 50 bp, unidentified
  source 1..50: mol_type = unassigned DNA; note = donor_4456f09
  misc_feature 1..20: note = RE
  misc_feature 21..25: note = Core
  misc_feature 26..50: note = LE
tgacgaaaaccatagaggcacccccgttaccttcttcgtggctcctggat

SEQ ID NO: 33157 - DNA, 50 bp, unidentified
  source 1..50: mol_type = unassigned DNA; note = donor_445e795
  misc_feature 1..22: note = RE
  misc_feature 23..25: note = Core
  misc_feature 26..50: note = LE
ccaaacaggcgccatccagacatgatgtcgtggatggcgccctccaccag

SEQ ID NO: 33158 - DNA, 50 bp, unidentified
  source 1..50: mol_type = unassigned DNA; note = donor_44690e0
  misc_feature 1..23: note = RE
  misc_feature 24..25: note = Core
  misc_feature 26..50: note = LE
tgactggtggagggagatggtatcttgtatctctctcgatatactattta

SEQ ID NO: 33159 - DNA, 50 bp, unidentified
  source 1..50: mol_type = unassigned DNA; note = donor_4487e5d
  misc_feature 1..24: note = RE
  misc_feature 25: note = Core
  misc_feature 26..50: note = LE
tcttgacaatggctttctcatattagacgatatgagaaagccattgaggg

SEQ ID NO: 33160 - DNA, 50 bp, unidentified
  source 1..50: mol_type = unassigned DNA; note = donor_449829c
  misc_feature 1..23: note = RE
  misc_feature 24..25: note = Core
  misc_feature 26..50: note = LE
ttatttggaaattaacacagaatctcctatgtttaccccgttatccgatt

SEQ ID NO: 33161 - DNA, 50 bp, unidentified
  source 1..50: mol_type = unassigned DNA; note = donor_449a8c8
  misc_feature 1..22: note = RE
  misc_feature 23..25: note = Core
  misc_feature 26..50: note = LE
accaaggggcgccgtccagacatgatggggtggacggcgccccgaacggc

SEQ ID NO: 33162 - DNA, 50 bp, unidentified
  source 1..50: mol_type = unassigned DNA; note = donor_449acf1
  misc_feature 1..23: note = RE
  misc_feature 24..25: note = Core
  misc_feature 26..50: note = LE
ccgcttgacgaaaaacatagaaccttgtatgttctggttgtcggggtgga

SEQ ID NO: 33163 - DNA, 50 bp, unidentified
  source 1..50: mol_type = unassigned DNA; note = donor_449b15a
  misc_feature 1..23: note = RE
  misc_feature 24..25: note = Core
  misc_feature 26..50: note = LE
ccagatagctggcaagacggtatcttatatcttgatctctttcctcatag

SEQ ID NO: 33164 - DNA, 50 bp, unidentified
  source 1..50: mol_type = unassigned DNA; note = donor_449e35c
  misc_feature 1..24: note = RE
  misc_feature 25: note = Core
  misc_feature 26..50: note = LE
ttgacaaagaacatagggacaccccgttacctttcttatagcccctgaac

SEQ ID NO: 33165 - DNA, 50 bp, unidentified; identical to SEQ ID NO: 30373
  source 1..50: mol_type = unassigned DNA; note = donor_44a4a42
  misc_feature 1..23: note = RE
  misc_feature 24..25: note = Core
  misc_feature 26..50: note = LE

SEQ ID NO: 33166 - DNA, 50 bp, unidentified; identical to SEQ ID NO: 32496
  source 1..50: mol_type = unassigned DNA; note = donor_44a6a9c
  misc_feature 1..23: note = RE
  misc_feature 24..25: note = Core
  misc_feature 26..50: note = LE

SEQ ID NO: 33167 - DNA, 50 bp, unidentified
  source 1..50: mol_type = unassigned DNA; note = donor_44b0c00
  misc_feature 1..23: note = RE
  misc_feature 24..25: note = Core
  misc_feature 26..50: note = LE
gggcttgacttttcttagcaggtctgttataatatatataccggcaaaac

SEQ ID NO: 33168 - DNA, 50 bp, unidentified
  source 1..50: mol_type = unassigned DNA; note = donor_44b9bdf
  misc_feature 1..22: note = RE
  misc_feature 23..25: note = Core
  misc_feature 26..50: note = LE
caatactggaggagaccatatatgatgtaatggtctcctccctatacggc

SEQ ID NO: 33169 - DNA, 50 bp, unidentified
  source 1..50: mol_type = unassigned DNA; note = donor_44bef2f
  misc_feature 1..23: note = RE
  misc_feature 24..25: note = Core
  misc_feature 26..50: note = LE
ccgcttgacatctccattaggaatccctaccttgttgatcgggctgagcg

SEQ ID NO: 33170 - DNA, 50 bp, unidentified
  source 1..50: mol_type = unassigned DNA; note = donor_44c8f89
  misc_feature 1..23: note = RE
  misc_feature 24..25: note = Core
  misc_feature 26..50: note = LE
cttgcgcaaggggcggttatacatgatggtgtaaccgccccccgacggca

SEQ ID NO: 33171 - DNA, 50 bp, unidentified
  source 1..50: mol_type = unassigned DNA; note = donor_44d02c3
  misc_feature 1..23: note = RE
  misc_feature 24..25: note = Core
  misc_feature 26..50: note = LE
ttagttggaaatcaacacagaatctcctatgtttgcgaagttattgattt

SEQ ID NO: 33172 - DNA, 50 bp, unidentified
  source 1..50: mol_type = unassigned DNA; note = donor_44d6a45
  misc_feature 1..23: note = RE
  misc_feature 24..25: note = Core
  misc_feature 26..50: note = LE
tgacatctaagctcctggggtgtctaatgagtcttagggagccggccgtc

SEQ ID NO: 33173 - DNA, 50 bp, unidentified
  source 1..50: mol_type = unassigned DNA; note = donor_44d7cb6
  misc_feature 1..23: note = RE
  misc_feature 24..25: note = Core
  misc_feature 26..50: note = LE
gcaggtgaattcatgatagttgactcctaccatgaattggtatagaatga

SEQ ID NO: 33174 - DNA, 50 bp, unidentified; identical to SEQ ID NO: 30383
  source 1..50: mol_type = unassigned DNA; note = donor_44de54c
  misc_feature 1..23: note = RE
  misc_feature 24..25: note = Core
  misc_feature 26..50: note = LE

SEQ ID NO: 33175 - DNA, 50 bp, unidentified
  source 1..50: mol_type = unassigned DNA; note = donor_44df944
  misc_feature 1..22: note = RE
  misc_feature 23..25: note = Core
  misc_feature 26..50: note = LE
ggcttgacttcgtcattgagagtccttaagttcgtaggtgcagttactgc

SEQ ID NO: 33176 - DNA, 50 bp, unidentified
  source 1..50: mol_type = unassigned DNA; note = donor_44edb2d
  misc_feature 1..24: note = RE
  misc_feature 25: note = Core
  misc_feature 26..50: note = LE
gccaaaccgggaggcgtccatataatggtatggacgcctccctcccgccg

SEQ ID NO: 33177 - DNA, 50 bp, unidentified
  source 1..50: mol_type = unassigned DNA; note = donor_44f1b75
  misc_feature 1..22: note = RE
  misc_feature 23..25: note = Core
  misc_feature 26..50: note = LE
aaacttgcttttatcttagaatgctattagattagcatcgataaatttaa

SEQ ID NO: 33178 - DNA, 50 bp, unidentified
  source 1..50: mol_type = unassigned DNA; note = donor_44f9b73
  misc_feature 1..23: note = RE
  misc_feature 24..25: note = Core
  misc_feature 26..50: note = LE
aggcttgacttcgaagacggttacttgtatgttcaaaccagaccagcgcg

SEQ ID NO: 33179 - DNA, 50 bp, unidentified
  source 1..50: mol_type = unassigned DNA; note = donor_44facc5
  misc_feature 1..23: note = RE
  misc_feature 24..25: note = Core
  misc_feature 26..50: note = LE
catcttgacaaaacttagcaggtctattacaataaatttggacaggaaag

SEQ ID NO: 33180 - DNA, 50 bp, unidentified
  source 1..50: mol_type = unassigned DNA; note = donor_4500692
  misc_feature 1..24: note = RE
  misc_feature 25: note = Core
  misc_feature 26..50: note = LE
ggcttgacaacacccatagggacacgttacctttctgatcaaccccgatg

SEQ ID NO: 33181 - DNA, 50 bp, unidentified
  source 1..50: mol_type = unassigned DNA; note = donor_45349ce
  misc_feature 1..23: note = RE
  misc_feature 24..25: note = Core
  misc_feature 26..50: note = LE
ttttatttgacttttaatagttggtataatgtatttaggttatttattag

SEQ ID NO: 33182 - DNA, 50 bp, unidentified
  source 1..50: mol_type = unassigned DNA; note = donor_45367dd
  misc_feature 1..23: note = RE
  misc_feature 24..25: note = Core
  misc_feature 26..50: note = LE
caacgcaggggccgtccacacaggatggggtggacggcccctgctcactg

SEQ ID NO: 33183 - DNA, 50 bp, unidentified
  source 1..50: mol_type = unassigned DNA; note = donor_453a15a
  misc_feature 1..23: note = RE
  misc_feature 24..25: note = Core
  misc_feature 26..50: note = LE
tcgccaaggtccccacagggctactcactgaaggacctcgccgacgtgtg

SEQ ID NO: 33184 - DNA, 50 bp, unidentified
  source 1..50: mol_type = unassigned DNA; note = donor_453edbd
  misc_feature 1..24: note = RE
  misc_feature 25: note = Core
  misc_feature 26..50: note = LE
gcaacgcacggcgggtccatacattaatgggatggacccgccgtgctcct

SEQ ID NO: 33185 - DNA, 50 bp, unidentified
  source 1..50: mol_type = unassigned DNA; note = donor_45409b7
  misc_feature 1..23: note = RE
  misc_feature 24..25: note = Core
  misc_feature 26..50: note = LE
aaactgcttgatcaagacggatacttgtcttatcaaaaccgcaggcttcc

SEQ ID NO: 33186 - DNA, 50 bp, unidentified; identical to SEQ ID NO: 32270
  source 1..50: mol_type = unassigned DNA; note = donor_4541207
  misc_feature 1..21: note = RE
  misc_feature 22..25: note = Core
  misc_feature 26..50: note = LE

SEQ ID NO: 33187 - DNA, 50 bp, unidentified
  source 1..50: mol_type = unassigned DNA; note = donor_454e464
  misc_feature 1..23: note = RE
  misc_feature 24..25: note = Core
  misc_feature 26..50: note = LE
tgacattcaagctcctgggatgtctaatgagtgttagcgagtcgccatcc

SEQ ID NO: 33188 - DNA, 50 bp, unidentified
  source 1..50: mol_type = unassigned DNA; note = donor_454f743
  misc_feature 1..23: note = RE
  misc_feature 24..25: note = Core
  misc_feature 26..50: note = LE
atgcttgcattgcaagagagaatcttgtatcttctccacagaggcgtgag

SEQ ID NO: 33189 - DNA, 50 bp, unidentified
  source 1..50: mol_type = unassigned DNA; note = donor_455a4e0
  misc_feature 1..23: note = RE
  misc_feature 24..25: note = Core
  misc_feature 26..50: note = LE
gaccccgaatggccgattagagaagatggggtaatcggccgacgagcttg

SEQ ID NO: 33190 - DNA, 50 bp, unidentified
  source 1..50: mol_type = unassigned DNA; note = donor_455c1d5
  misc_feature 1..24: note = RE
  misc_feature 25: note = Core
  misc_feature 26..50: note = LE
gtgctcaacggggaagcccttgtagaatgaaagggacttccccgtcccgt

SEQ ID NO: 33191 - DNA, 50 bp, unidentified
  source 1..50: mol_type = unassigned DNA; note = donor_455f098
  misc_feature 1..23: note = RE
  misc_feature 24..25: note = Core
  misc_feature 26..50: note = LE
gcatccagggaggcgtccacacacgatggggtggacgcctccatccgacg

SEQ ID NO: 33192 - DNA, 50 bp, unidentified
  source 1..50: mol_type = unassigned DNA; note = donor_4571131
  misc_feature 1..24: note = RE
  misc_feature 25: note = Core
  misc_feature 26..50: note = LE
tgcagttcggtggcggaccatacataatgagatggtccgccgccgagtaa

SEQ ID NO: 33193 - DNA, 50 bp, unidentified
  source 1..50: mol_type = unassigned DNA; note = donor_4571adf
  misc_feature 1..23: note = RE
  misc_feature 24..25: note = Core
  misc_feature 26..50: note = LE
tagtctcgctcaaaagacagttgcttgtatctcgaaagtggattactatg

SEQ ID NO: 33194 - DNA, 50 bp, unidentified
  source 1..50: mol_type = unassigned DNA; note = donor_4573a46
  misc_feature 1..22: note = RE
  misc_feature 23..25: note = Core
  misc_feature 26..50: note = LE
ctattgacattttaccgtaggactcgtataatagattttagggtagtttc

SEQ ID NO: 33195 - DNA, 50 bp, unidentified
  source 1..50: mol_type = unassigned DNA; note = donor_4576a61
  misc_feature 1..23: note = RE
  misc_feature 24..25: note = Core
  misc_feature 26..50: note = LE
gaccagttacacccatggggtgtctaatgggggtgtaccggccggtttgg

SEQ ID NO: 33196 - DNA, 50 bp, unidentified
  source 1..50: mol_type = unassigned DNA; note = donor_4576b6f
  misc_feature 1..22: note = RE
  misc_feature 23..25: note = Core
  misc_feature 26..50: note = LE
tttgactcttgacatagagggtcttatatgttactattttttcagaccct

SEQ ID NO: 33197 - DNA, 50 bp, unidentified
  source 1..50: mol_type = unassigned DNA; note = donor_45774a2
  misc_feature 1..23: note = RE
  misc_feature 24..25: note = Core
  misc_feature 26..50: note = LE
gacaacagggagtcgtccatacatgatgtgatggacgactcccgctaccg

SEQ ID NO: 33198 - DNA, 50 bp, unidentified
  source 1..50: mol_type = unassigned DNA; note = donor_45857ca
  misc_feature 1..22: note = RE
  misc_feature 23..25: note = Core
  misc_feature 26..50: note = LE
aaataaatttctaaagacagttgcttgtgtcttcaaggtctcttaaactc

SEQ ID NO: 33199 - DNA, 50 bp, unidentified
  source 1..50: mol_type = unassigned DNA; note = donor_45c3620
  misc_feature 1..23: note = RE
  misc_feature 24..25: note = Core
  misc_feature 26..50: note = LE
gccaacggagggccgtccacacatgatgccgtggacggctctccaccccc

SEQ ID NO: 33200 - DNA, 50 bp, unidentified
  source 1..50: mol_type = unassigned DNA; note = donor_45c3842
  misc_feature 1..24: note = RE
  misc_feature 25: note = Core
  misc_feature 26..50: note = LE
attgactaatcgaggcccgttacagtagatggggtaacgggccccggtct

SEQ ID NO: 33201 - DNA, 50 bp, unidentified
  source 1..50: mol_type = unassigned DNA; note = donor_45c5e6b
  misc_feature 1..23: note = RE
  misc_feature 24..25: note = Core
  misc_feature 26..50: note = LE
ggcggcttgacaatagagaggcaccgacttatgttcgtgtcatcggtccg

SEQ ID NO: 33202 - DNA, 50 bp, unidentified
  source 1..50: mol_type = unassigned DNA; note = donor_45c6df7
  misc_feature 1..21: note = RE
  misc_feature 22..25: note = Core
  misc_feature 26..50: note = LE
gttgacaaaaacataggaacaccccattaccatgtttagtaggtcctgat

SEQ ID NO: 33203 - DNA, 50 bp, unidentified
  source 1..50: mol_type = unassigned DNA; note = donor_45cb15b
  misc_feature 1..24: note = RE
  misc_feature 25: note = Core
  misc_feature 26..50: note = LE
tggcaaaccgggggcgtccatgtacaatgggatggacgcccccactcgta

SEQ ID NO: 33204 - DNA, 50 bp, unidentified
  source 1..50: mol_type = unassigned DNA; note = donor_45cd6fc
  misc_feature 1..23: note = RE
  misc_feature 24..25: note = Core
  misc_feature 26..50: note = LE
accaccaagcatgaacacagttgcttgtgtgtttggcttctggcataatg

SEQ ID NO: 33205 - DNA, 50 bp, unidentified
  source 1..50: mol_type = unassigned DNA; note = donor_45d09ec
  misc_feature 1..24: note = RE
  misc_feature 25: note = Core
  misc_feature 26..50: note = LE
cacaggggtgggggcgtccatgtataatggaatggacgcccccgctttta

SEQ ID NO: 33206 - DNA, 50 bp, unidentified
  source 1..50: mol_type = unassigned DNA; note = donor_45d0df0
  misc_feature 1..23: note = RE
  misc_feature 24..25: note = Core
  misc_feature 26..50: note = LE
atatttggatcgcatcacagaatctatgtttgttatccagataaaaagca

SEQ ID NO: 33207 - DNA, 50 bp, unidentified
  source 1..50: mol_type = unassigned DNA; note = donor_45d67e0
  misc_feature 1..22: note = RE
  misc_feature 23..25: note = Core
  misc_feature 26..50: note = LE
gacccaaacgcccgattagagaagcatgggtaatcgggctgaccgggttg

SEQ ID NO: 33208 - DNA, 50 bp, unidentified
  source 1..50: mol_type = unassigned DNA; note = donor_45d6faf
  misc_feature 1..23: note = RE
  misc_feature 24..25: note = Core
  misc_feature 26..50: note = LE
tgacatttaagctcctgggatgtctaatgagagttagcgagtcgccatcc

SEQ ID NO: 33209 - DNA, 50 bp, unidentified
  source 1..50: mol_type = unassigned DNA; note = donor_45dfb2d
  misc_feature 1..24: note = RE
  misc_feature 25: note = Core
  misc_feature 26..50: note = LE
tgcgccttgacacgagaggggagcctacttaacactggtgccaggacctg

SEQ ID NO: 33210 - DNA, 50 bp, unidentified
  source 1..50: mol_type = unassigned DNA; note = donor_45e47d8
  misc_feature 1..23: note = RE
  misc_feature 24..25: note = Core
  misc_feature 26..50: note = LE
atccagcttgaccaatacggatacttgtcttatgattttggcagttccta

SEQ ID NO: 33211 - DNA, 50 bp, unidentified
  source 1..50: mol_type = unassigned DNA; note = donor_45e635b
  misc_feature 1..20: note = RE
  misc_feature 21..25: note = Core
  misc_feature 26..50: note = LE
cttgacaaacccatagccgactgctataaataagatgtgtagaatctctc

SEQ ID NO: 33212 - DNA, 50 bp, unidentified
  source 1..50: mol_type = unassigned DNA; note = donor_45e6907
  misc_feature 1..24: note = RE
  misc_feature 25: note = Core
  misc_feature 26..50: note = LE
attgcttgactttcaacataggggcgttatgttgttgagagctccttaac

SEQ ID NO: 33213 - DNA, 50 bp, unidentified
  source 1..50: mol_type = unassigned DNA; note = donor_46018df
  misc_feature 1..23: note = RE
  misc_feature 24..25: note = Core
  misc_feature 26..50: note = LE
gatcttgacttttaatagttagtctcgtattatatagtagtagtgtttat

SEQ ID NO: 33214 - DNA, 50 bp, unidentified
  source 1..50: mol_type = unassigned DNA; note = donor_4601f95
  misc_feature 1..21: note = RE
  misc_feature 22..25: note = Core
  misc_feature 26..50: note = LE
cacatataacttggaataaccatagctatctcttaggtttgcagtgtgaa

SEQ ID NO: 33215 - DNA, 50 bp, unidentified
  source 1..50: mol_type = unassigned DNA; note = donor_4605604
  misc_feature 1..23: note = RE
  misc_feature 24..25: note = Core
  misc_feature 26..50: note = LE
gggcttcccctcaaccatagaatcttgtatggtaggacttgaagggagga

SEQ ID NO: 33216 - DNA, 50 bp, unidentified
  source 1..50: mol_type = unassigned DNA; note = donor_46099e9
  misc_feature 1..24: note = RE
  misc_feature 25: note = Core
  misc_feature 26..50: note = LE
tgcaacagggcggcggaccatacataatgggatggtccgcctcctctcac

SEQ ID NO: 33217 - DNA, 50 bp, unidentified
  source 1..50: mol_type = unassigned DNA; note = donor_460b044
  misc_feature 1..24: note = RE
  misc_feature 25: note = Core
  misc_feature 26..50: note = LE
gcggcttgacgaaaaccatagaggcgttaccttttcggcggcgcctggat

SEQ ID NO: 33218 - DNA, 50 bp, unidentified
  source 1..50: mol_type = unassigned DNA; note = donor_461dd5d
  misc_feature 1..23: note = RE
  misc_feature 24..25: note = Core
  misc_feature 26..50: note = LE
gcataacgggcggcaaccacagaagatgggatggttgccgccctccccaa

SEQ ID NO: 33219 - DNA, 50 bp, unidentified
  source 1..50: mol_type = unassigned DNA; note = donor_462994f
  misc_feature 1..24: note = RE
  misc_feature 25: note = Core
  misc_feature 26..50: note = LE
tggcaaaccgggagcgtccatatacaatgggatggacgctcccaccttac

SEQ ID NO: 33220 - DNA, 50 bp, unidentified
  source 1..50: mol_type = unassigned DNA; note = donor_462d3c4
  misc_feature 1..22: note = RE
  misc_feature 23..25: note = Core
  misc_feature 26..50: note = LE
ggcttgacttcgtcatagagagtccttaagtttgtaggtgcagttgctgc

SEQ ID NO: 33221 - DNA, 50 bp, unidentified
  source 1..50: mol_type = unassigned DNA; note = donor_463975c
  misc_feature 1..23: note = RE
  misc_feature 24..25: note = Core
  misc_feature 26..50: note = LE
attatttgatgttaacacagaatctcctatgtttgtcatcaaataaaaaa

SEQ ID NO: 33222 - DNA, 50 bp, unidentified
  source 1..50: mol_type = unassigned DNA; note = donor_464b5bf
  misc_feature 1..23: note = RE
  misc_feature 24..25: note = Core
  misc_feature 26..50: note = LE
tgacacatcagctcctgggatgtctaatgagttctgggagcccgccatcc

SEQ ID NO: 33223 - DNA, 50 bp, unidentified
  source 1..50: mol_type = unassigned DNA; note = donor_464b821
  misc_feature 1..22: note = RE
  misc_feature 23..25: note = Core
  misc_feature 26..50: note = LE
tattcaaaaatctattatagttcattgtatcttcttttttttagtatatt

SEQ ID NO: 33224 - DNA, 50 bp, unidentified
  source 1..50: mol_type = unassigned DNA; note = donor_464bfb5
  misc_feature 1..23: note = RE
  misc_feature 24..25: note = Core
  misc_feature 26..50: note = LE
cagtggtggttgacaaagggtgtctgatggctctaccctcctctcttgag

SEQ ID NO: 33225 - DNA, 50 bp, unidentified
  source 1..50: mol_type = unassigned DNA; note = donor_46507e0
  misc_feature 1..23: note = RE
  misc_feature 24..25: note = Core
  misc_feature 26..50: note = LE
tgacacctacagccgtgggatgtctaataggggttgatcgtcgtggccgg

SEQ ID NO: 33226 - DNA, 50 bp, unidentified
  source 1..50: mol_type = unassigned DNA; note = donor_465393c
  misc_feature 1..22: note = RE
  misc_feature 23..25: note = Core
  misc_feature 26..50: note = LE
tcttgacaaatacattagcaagattcataatgtaagagtaaggtctatcc

SEQ ID NO: 33227 - DNA, 50 bp, unidentified; identical to SEQ ID NO: 31401
  source 1..50: mol_type = unassigned DNA; note = donor_4663210
  misc_feature 1..23: note = RE
  misc_feature 24..25: note = Core
  misc_feature 26..50: note = LE

SEQ ID NO: 33228 - DNA, 50 bp, unidentified
  source 1..50: mol_type = unassigned DNA; note = donor_4666120
  misc_feature 1..23: note = RE
  misc_feature 24..25: note = Core
  misc_feature 26..50: note = LE
aaagttgactttcaagacggtatcttgtatcttaattctcgttatggtta

SEQ ID NO: 33229 - DNA, 50 bp, unidentified
  source 1..50: mol_type = unassigned DNA; note = donor_46670cf
  misc_feature 1..21: note = RE
  misc_feature 22..25: note = Core
  misc_feature 26..50: note = LE
ccagccgggggccatccacacatgatggggtggatggccccctttcacgg

SEQ ID NO: 33230 - DNA, 50 bp, unidentified
  source 1..50: mol_type = unassigned DNA; note = donor_466b676
  misc_feature 1..24: note = RE
  misc_feature 25: note = Core
  misc_feature 26..50: note = LE
acgcttgacaaacaagacagtcgctgtaacttccctttgtccgctcctgg

SEQ ID NO: 33231 - DNA, 50 bp, unidentified
  source 1..50: mol_type = unassigned DNA; note = donor_4679907
  misc_feature 1..21: note = RE
  misc_feature 22..25: note = Core
  misc_feature 26..50: note = LE
cctgaggttgacacagggagtgtcactagggcaccctctttctcatgggc

SEQ ID NO: 33232 - DNA, 50 bp, unidentified
  source 1..50: mol_type = unassigned DNA; note = donor_468c2b8
  misc_feature 1..23: note = RE
  misc_feature 24..25: note = Core
  misc_feature 26..50: note = LE
tacttgacggaggagtccagatacgatggaatggactcctcctgccgatg

SEQ ID NO: 33233 - DNA, 50 bp, unidentified
  source 1..50: mol_type = unassigned DNA; note = donor_469162f
  misc_feature 1..24: note = RE
  misc_feature 25: note = Core
  misc_feature 26..50: note = LE
ccgcctcttgacacagaggggtgcctacttgtttcattgaagtacgacca

SEQ ID NO: 33234 - DNA, 50 bp, unidentified
  source 1..50: mol_type = unassigned DNA; note = donor_469f6df
  misc_feature 1..21: note = RE
  misc_feature 22..25: note = Core
  misc_feature 26..50: note = LE
gtaggggttgactcaggaagtgtcactagggcaccatccttattgcggat

SEQ ID NO: 33235 - DNA, 50 bp, unidentified
  source 1..50: mol_type = unassigned DNA; note = donor_46a2894
  misc_feature 1..23: note = RE
  misc_feature 24..25: note = Core
  misc_feature 26..50: note = LE
gcatcatgaggtgcgtccatatatgatgtgatggacgcacctcctttcta

SEQ ID NO: 33236 - DNA, 50 bp, unidentified
  source 1..50: mol_type = unassigned DNA; note = donor_46afaed
  misc_feature 1..24: note = RE
  misc_feature 25: note = Core
  misc_feature 26..50: note = LE
ccgcctcttgacacagaggggtgcctacgtgtttcattgactgcaggatc

SEQ ID NO: 33237 - DNA, 50 bp, unidentified
  source 1..50: mol_type = unassigned DNA; note = donor_46b837f
  misc_feature 1..23: note = RE
  misc_feature 24..25: note = Core
  misc_feature 26..50: note = LE
gttgacacaggggagtccacataagataattggactcccctacaccatta

SEQ ID NO: 33238 - DNA, 50 bp, unidentified
  source 1..50: mol_type = unassigned DNA; note = donor_46c6593
  misc_feature 1..22: note = RE
  misc_feature 23..25: note = Core
  misc_feature 26..50: note = LE
tttgttgtaaatcaacacagaatctcctatgtttgctaagttatagattt

SEQ ID NO: 33239 - DNA, 50 bp, unidentified
  source 1..50: mol_type = unassigned DNA; note = donor_46df353
  misc_feature 1..24: note = RE
  misc_feature 25: note = Core
  misc_feature 26..50: note = LE
tgcaaaaggtgtcgggtccatacatactgagatggacccgacaccaccga

SEQ ID NO: 33240 - DNA, 50 bp, unidentified
  source 1..50: mol_type = unassigned DNA; note = donor_46e7e8c
  misc_feature 1..23: note = RE
  misc_feature 24..25: note = Core
  misc_feature 26..50: note = LE
agggtgagtgaaagacagtatcagttacgtcttgacattccccctttccc

SEQ ID NO: 33241 - DNA, 50 bp, unidentified
  source 1..50: mol_type = unassigned DNA; note = donor_46e89aa
  misc_feature 1..23: note = RE
  misc_feature 24..25: note = Core
  misc_feature 26..50: note = LE
cctcttgacatttcttagctggactagtataataatggtgtagtcaataa

SEQ ID NO: 33242 - DNA, 50 bp, unidentified
  source 1..50: mol_type = unassigned DNA; note = donor_46eec83
  misc_feature 1..23: note = RE
  misc_feature 24..25: note = Core
  misc_feature 26..50: note = LE
aaagggcttgatcaagacggatacttgtcttatgaatttctgagcttttg

SEQ ID NO: 33243 - DNA, 50 bp, unidentified
  source 1..50: mol_type = unassigned DNA; note = donor_46f8701
  misc_feature 1..24: note = RE
  misc_feature 25: note = Core
  misc_feature 26..50: note = LE
gcactcagttgacagtaggagcatcagggatgttcaatggcgacgtactc

SEQ ID NO: 33244 - DNA, 50 bp, unidentified
  source 1..50: mol_type = unassigned DNA; note = donor_46f989e
  misc_feature 1..22: note = RE
  misc_feature 23..25: note = Core
  misc_feature 26..50: note = LE
aagcttgacaaacattagctggtttcgtattatcaggtcaaccagagatt

SEQ ID NO: 33245 - DNA, 50 bp, unidentified
  source 1..50: mol_type = unassigned DNA; note = donor_46fbe06
  misc_feature 1..23: note = RE
  misc_feature 24..25: note = Core
  misc_feature 26..50: note = LE
gcgtcttacggggcgtccacagatgatggggtggacgcccccggcggcat

SEQ ID NO: 33246 - DNA, 50 bp, unidentified
  source 1..50: mol_type = unassigned DNA; note = donor_4702b37
  misc_feature 1..22: note = RE
  misc_feature 23..25: note = Core
  misc_feature 26..50: note = LE
aaatttggaaataaacacagttcatcctatgtttgcactaggaaaagata

SEQ ID NO: 33247 - DNA, 50 bp, unidentified
  source 1..50: mol_type = unassigned DNA; note = donor_4707936
  misc_feature 1..23: note = RE
  misc_feature 24..25: note = Core
  misc_feature 26..50: note = LE
cggcttgacttcctcattgggaagtcctaccgttcaagcgggccggatct

SEQ ID NO: 33248 - DNA, 50 bp, unidentified
  source 1..50: mol_type = unassigned DNA; note = donor_470aea5
  misc_feature 1..23: note = RE
  misc_feature 24..25: note = Core
  misc_feature 26..50: note = LE
gctattgactttttatttgcaggctactacaatatatttatggttaatat

SEQ ID NO: 33249 - DNA, 50 bp, unidentified
  source 1..50: mol_type = unassigned DNA; note = donor_4712f23
  misc_feature 1..23: note = RE
  misc_feature 24..25: note = Core
  misc_feature 26..50: note = LE
gcgtcaccaggggcgtctacacatgatggggtagacgcccccccaacggc

SEQ ID NO: 33250 - DNA, 50 bp, unidentified
  source 1..50: mol_type = unassigned DNA; note = donor_4715a53
  misc_feature 1..23: note = RE
  misc_feature 24..25: note = Core
  misc_feature 26..50: note = LE
gcattatgggcggcaaccacagaagatgggatggttgccgccctacctga

SEQ ID NO: 33251 - DNA, 50 bp, unidentified
  source 1..50: mol_type = unassigned DNA; note = donor_471ceb1
  misc_feature 1..24: note = RE
  misc_feature 25: note = Core
  misc_feature 26..50: note = LE
cggccagttgacacagaggggcgcctacttgtttcattgacctcaggtgc

SEQ ID NO: 33252 - DNA, 50 bp, unidentified
  source 1..50: mol_type = unassigned DNA; note = donor_47227ce
  misc_feature 1..24: note = RE
  misc_feature 25: note = Core
  misc_feature 26..50: note = LE
tgcaaaagctggggtgtccatagataatgaaatggacacccctttatact

SEQ ID NO: 33253 - DNA, 50 bp, unidentified
  source 1..50: mol_type = unassigned DNA; note = donor_472c41c
  misc_feature 1..24: note = RE
  misc_feature 25: note = Core
  misc_feature 26..50: note = LE
cgcttgacgaaacccatagggacacgttacctttattgtcgtccccagcc

SEQ ID NO: 33254 - DNA, 50 bp, unidentified
  source 1..50: mol_type = unassigned DNA; note = donor_472dd94
  misc_feature 1..24: note = RE
  misc_feature 25: note = Core
  misc_feature 26..50: note = LE
tgcaaaacggggcgtaccatacattaattagatggtacgccccacaccta

SEQ ID NO: 33255 - DNA, 50 bp, unidentified
  source 1..50: mol_type = unassigned DNA; note = donor_472eeb5
  misc_feature 1..23: note = RE
  misc_feature 24..25: note = Core
  misc_feature 26..50: note = LE
cagaaacgggggtgaccatagatttaatgagatggtcacccccacaccct

SEQ ID NO: 33256 - DNA, 50 bp, unidentified; identical to SEQ ID NO: 32345
  source 1..50: mol_type = unassigned DNA; note = donor_473209b
  misc_feature 1..24: note = RE
  misc_feature 25: note = Core
  misc_feature 26..50: note = LE

SEQ ID NO: 33257 - DNA, 50 bp, unidentified
  source 1..50: mol_type = unassigned DNA; note = donor_4737d4e
  misc_feature 1..23: note = RE
  misc_feature 24..25: note = Core
  misc_feature 26..50: note = LE
tggttgtgtcagatagatggtatcttgtatcttgaagttttggatgatta

SEQ ID NO: 33258 - DNA, 50 bp, unidentified
  source 1..50: mol_type = unassigned DNA; note = donor_473aaa7
  misc_feature 1..23: note = RE
  misc_feature 24..25: note = Core
  misc_feature 26..50: note = LE
agacttgacttttaatagttagtcttgtattatagagtagtagtgattag

SEQ ID NO: 33259 - DNA, 50 bp, unidentified
  source 1..50: mol_type = unassigned DNA; note = donor_473d6f5
  misc_feature 1..24: note = RE
  misc_feature 25: note = Core
  misc_feature 26..50: note = LE
ggcttgacgtcaggcatagggacaccgttaccttcctgctggccccgcgc

SEQ ID NO: 33260 - DNA, 50 bp, unidentified
  source 1..50: mol_type = unassigned DNA; note = donor_474417a
  misc_feature 1..23: note = RE
  misc_feature 24..25: note = Core
  misc_feature 26..50: note = LE
caaaagtcaggctgaccatagatttaatgagatggtcagcctgaccgaaa

SEQ ID NO: 33261 - DNA, 50 bp, unidentified
  source 1..50: mol_type = unassigned DNA; note = donor_475097c
  misc_feature 1..23: note = RE
  misc_feature 24..25: note = Core
  misc_feature 26..50: note = LE
gcacctcgggcggcaaccacagaagatggggtggttgccgccctcttcaa

SEQ ID NO: 33262 - DNA, 50 bp, unidentified
  source 1..50: mol_type = unassigned DNA; note = donor_4752046
  misc_feature 1..24: note = RE
  misc_feature 25: note = Core
  misc_feature 26..50: note = LE
ctcttgacgaaaaacataggggcaccgttaccttttaggagtccccgcaa

SEQ ID NO: 33263 - DNA, 50 bp, unidentified
  source 1..50: mol_type = unassigned DNA; note = donor_4752d19
  misc_feature 1..23: note = RE
  misc_feature 24..25: note = Core
  misc_feature 26..50: note = LE
caccccttgacacaaagaggtcctctgactgagacttcttgcggatgctg

SEQ ID NO: 33264 - DNA, 50 bp, unidentified
  source 1..50: mol_type = unassigned DNA; note = donor_4783c0d
  misc_feature 1..23: note = RE
  misc_feature 24..25: note = Core
  misc_feature 26..50: note = LE
aaacggcttgatcaagacggatacttgtcttatgcagatcccggctctta

SEQ ID NO: 33265 - DNA, 50 bp, unidentified
  source 1..50: mol_type = unassigned DNA; note = donor_479a713
  misc_feature 1..23: note = RE
  misc_feature 24..25: note = Core
  misc_feature 26..50: note = LE
cttgcgcttggggcggttacacatgatgatgtaaccgcccccgacggcat

SEQ ID NO: 33266 - DNA, 50 bp, unidentified
  source 1..50: mol_type = unassigned DNA; note = donor_479ce47
  misc_feature 1..23: note = RE
  misc_feature 24..25: note = Core
  misc_feature 26..50: note = LE
gacctttcgaggcccgttacagaagatggggtaacgggcccgggtctgcc

SEQ ID NO: 33267 - DNA, 50 bp, unidentified
  source 1..50: mol_type = unassigned DNA; note = donor_479ffd2
  misc_feature 1..22: note = RE
  misc_feature 23..25: note = Core
  misc_feature 26..50: note = LE
caccgcgggggccgtccatacatgatggggtggacggcccccgctccgag

SEQ ID NO: 33268 - DNA, 50 bp, unidentified
  source 1..50: mol_type = unassigned DNA; note = donor_47b5154
  misc_feature 1..23: note = RE
  misc_feature 24..25: note = Core
  misc_feature 26..50: note = LE
taacccaccactactttcgtattagcgtgtgagcgccgctggcgcgccgt

SEQ ID NO: 33269 - DNA, 50 bp, unidentified
  source 1..50: mol_type = unassigned DNA; note = donor_47bc693
  misc_feature 1..24: note = RE
  misc_feature 25: note = Core
  misc_feature 26..50: note = LE
ttgacaccaccagcaaagaggactctaattgtgactgaggatgctgcggt

SEQ ID NO: 33270 - DNA, 50 bp, unidentified
  source 1..50: mol_type = unassigned DNA; note = donor_47be464
  misc_feature 1..23: note = RE
  misc_feature 24..25: note = Core
  misc_feature 26..50: note = LE
gttgacagcggggagtctacataagataattagactccccgcacctaacc

SEQ ID NO: 33271 - DNA, 50 bp, unidentified
  source 1..50: mol_type = unassigned DNA; note = donor_47d8656
  misc_feature 1..24: note = RE
  misc_feature 25: note = Core
  misc_feature 26..50: note = LE
tggcaaaccgggggcgtccatgtacaatgggatggacgctccctccttaa

SEQ ID NO: 33272 - DNA, 50 bp, unidentified
  source 1..50: mol_type = unassigned DNA; note = donor_47e65c7
  misc_feature 1..23: note = RE
  misc_feature 24..25: note = Core
  misc_feature 26..50: note = LE
gcaagcgaattcattatagttgactcctaccatgaattcgtatatggaga

SEQ ID NO: 33273 - DNA, 50 bp, unidentified
  source 1..50: mol_type = unassigned DNA; note = donor_47e78f8
  misc_feature 1..23: note = RE
  misc_feature 24..25: note = Core
  misc_feature 26..50: note = LE
tcatttgacttattaccacatgactcgtattatataaattgtaattagtc

SEQ ID NO: 33274 - DNA, 50 bp, unidentified
  source 1..50: mol_type = unassigned DNA; note = donor_47ecc3a
  misc_feature 1..23: note = RE
  misc_feature 24..25: note = Core
  misc_feature 26..50: note = LE
tgacaattaagctcctgggatgtctaatgagagttaccgggtcgccgtcc

SEQ ID NO: 33275 - DNA, 50 bp, unidentified
  source 1..50: mol_type = unassigned DNA; note = donor_47f4f2f
  misc_feature 1..23: note = RE
  misc_feature 24..25: note = Core
  misc_feature 26..50: note = LE
gcaccgcaggggccgtccacacatgatggggtggacggctcctgctcccg

SEQ ID NO: 33276 - DNA, 50 bp, unidentified
  source 1..50: mol_type = unassigned DNA; note = donor_47f5c3b
  misc_feature 1..22: note = RE
  misc_feature 23..25: note = Core
  misc_feature 26..50: note = LE
aaaaaggcttgacatagagagtcttatacagtaaactagatacaagccct

SEQ ID NO: 33277 - DNA, 50 bp, unidentified
  source 1..50: mol_type = unassigned DNA; note = donor_47fa3dc
  misc_feature 1..24: note = RE
  misc_feature 25: note = Core
  misc_feature 26..50: note = LE
ttgactccctgggaagcccttgtagaatggaagggacttccccgtcccga

SEQ ID NO: 33278 - DNA, 50 bp, unidentified
  source 1..50: mol_type = unassigned DNA; note = donor_47fe011
  misc_feature 1..22: note = RE
  misc_feature 23..25: note = Core
  misc_feature 26..50: note = LE
gacgtggagagccgcttcacagaagatgggatgaagcggctggccgccac

SEQ ID NO: 33279 - DNA, 50 bp, unidentified
  source 1..50: mol_type = unassigned DNA; note = donor_480242f
  misc_feature 1..24: note = RE
  misc_feature 25: note = Core
  misc_feature 26..50: note = LE
cttgcagacggggcgggccatacgtatggaatggcccgcccctttccgga

SEQ ID NO: 33280 - DNA, 50 bp, unidentified
  source 1..50: mol_type = unassigned DNA; note = donor_4802c29
  misc_feature 1..24: note = RE
  misc_feature 25: note = Core
  misc_feature 26..50: note = LE
agagttgttttttacctcagttcttcttaagtttacaatctctaatttta

SEQ ID NO: 33281 - DNA, 50 bp, unidentified
  source 1..50: mol_type = unassigned DNA; note = donor_4805c89
  misc_feature 1..22: note = RE
  misc_feature 23..25: note = Core
  misc_feature 26..50: note = LE
gtcgcctgcttttctacatagcagtaattatgtaagaaaagcatagcgca

SEQ ID NO: 33282 - DNA, 50 bp, unidentified
  source 1..50: mol_type = unassigned DNA; note = donor_4805e5a
  misc_feature 1..22: note = RE
  misc_feature 23..25: note = Core
  misc_feature 26..50: note = LE
ccaaaagggagccgtccacacatgatgcggtggacggctcccaccaccgg

SEQ ID NO: 33283 - DNA, 50 bp, unidentified; identical to SEQ ID NO: 30934
  source 1..50: mol_type = unassigned DNA; note = donor_48209b4
  misc_feature 1..23: note = RE
  misc_feature 24..25: note = Core
  misc_feature 26..50: note = LE

SEQ ID NO: 33284 - DNA, 50 bp, unidentified
  source 1..50: mol_type = unassigned DNA; note = donor_4827478
  misc_feature 1..24: note = RE
  misc_feature 25: note = Core
  misc_feature 26..50: note = LE
cttgcaggcggggcgagccatacgtatggaatggctcgcccctttccctc

SEQ ID NO: 33285 - DNA, 50 bp, unidentified
  source 1..50: mol_type = unassigned DNA; note = donor_482cf73
  misc_feature 1..24: note = RE
  misc_feature 25: note = Core
  misc_feature 26..50: note = LE
ttgacagcagccgcaaagaggactctaattgttcctgagggcgcttcggg

SEQ ID NO: 33286 - DNA, 50 bp, unidentified; identical to SEQ ID NO: 31591
  source 1..50: mol_type = unassigned DNA; note = donor_483ae76
  misc_feature 1..23: note = RE
  misc_feature 24..25: note = Core
  misc_feature 26..50: note = LE

SEQ ID NO: 33287 - DNA, 50 bp, unidentified
  source 1..50: mol_type = unassigned DNA; note = donor_483b057
  misc_feature 1..24: note = RE
  misc_feature 25: note = Core
  misc_feature 26..50: note = LE
gcttgacaacggggagtccatgtagaatgatatggactccccatccaatt

SEQ ID NO: 33288 - DNA, 50 bp, unidentified
  source 1..50: mol_type = unassigned DNA; note = donor_483e47f
  misc_feature 1..24: note = RE
  misc_feature 25: note = Core
  misc_feature 26..50: note = LE
caacgccttgacatagaggggagcctagtaagagactggtgtcaggatcg

SEQ ID NO: 33289 - DNA, 50 bp, unidentified
  source 1..50: mol_type = unassigned DNA; note = donor_4842688
  misc_feature 1..24: note = RE
  misc_feature 25: note = Core
  misc_feature 26..50: note = LE
tggcaaactggaggcgtccatgtacaatggaatggacgcctccacccaca

SEQ ID NO: 33290 - DNA, 50 bp, unidentified
  source 1..50: mol_type = unassigned DNA; note = donor_484bdaa
  misc_feature 1..24: note = RE
  misc_feature 25: note = Core
  misc_feature 26..50: note = LE
ttgacaatttgggaagcccttgtagaatgaaagggacttccccgtcccga

SEQ ID NO: 33291 - DNA, 50 bp, unidentified
  source 1..50: mol_type = unassigned DNA; note = donor_4855543
  misc_feature 1..24: note = RE
  misc_feature 25: note = Core
  misc_feature 26..50: note = LE
cttgacaaagaccatagggacacccgttaccttcttcgtaccccggaagc

SEQ ID NO: 33292 - DNA, 50 bp, unidentified
  source 1..50: mol_type = unassigned DNA; note = donor_4858e27
  misc_feature 1..23: note = RE
  misc_feature 24..25: note = Core
  misc_feature 26..50: note = LE
aagtattgactttcattagcaggttggtactgtataagtgtaagtgttaa

SEQ ID NO: 33293 - DNA, 50 bp, unidentified
  source 1..50: mol_type = unassigned DNA; note = donor_48613b6
  misc_feature 1..23: note = RE
  misc_feature 24..25: note = Core
  misc_feature 26..50: note = LE
aaggttgccgggcaacatagaatcttgtatgtttagacttgaaggggtgg

SEQ ID NO: 33294 - DNA, 50 bp, unidentified
  source 1..50: mol_type = unassigned DNA; note = donor_4862be1
  misc_feature 1..23: note = RE
  misc_feature 24..25: note = Core
  misc_feature 26..50: note = LE
gcaccgcgggggccgtccacacatgatggggtggacggcccccgcaccga

SEQ ID NO: 33295 - DNA, 50 bp, unidentified
  source 1..50: mol_type = unassigned DNA; note = donor_4863415
  misc_feature 1..23: note = RE
  misc_feature 24..25: note = Core
  misc_feature 26..50: note = LE
aagacttgatttttattagcaggttggtactctataagtgtagatataga

SEQ ID NO: 33296 - DNA, 50 bp, unidentified; identical to SEQ ID NO: 30437
  source 1..50: mol_type = unassigned DNA; note = donor_487b02a
  misc_feature 1..21: note = RE
  misc_feature 22..25: note = Core
  misc_feature 26..50: note = LE

SEQ ID NO: 33297 - DNA, 50 bp, unidentified
  source 1..50: mol_type = unassigned DNA; note = donor_487e63a
  misc_feature 1..24: note = RE
  misc_feature 25: note = Core
  misc_feature 26..50: note = LE
ttgacaatcgggggagtccatgtagaatggcatggactccccctcatcag

SEQ ID NO: 33298 - DNA, 50 bp, unidentified
  source 1..50: mol_type = unassigned DNA; note = donor_487e923
  misc_feature 1..24: note = RE
  misc_feature 25: note = Core
  misc_feature 26..50: note = LE
gcagcttgacgaaaaccatagaggccgttagcttctaagtgcaccggtta

SEQ ID NO: 33299 - DNA, 50 bp, unidentified
  source 1..50: mol_type = unassigned DNA; note = donor_4882dc5
  misc_feature 1..24: note = RE
  misc_feature 25: note = Core
  misc_feature 26..50: note = LE
tgcatatatggtaaacctagaatacctttggtttaaaggatgtccaatta

SEQ ID NO: 33300 - DNA, 50 bp, unidentified
  source 1..50: mol_type = unassigned DNA; note = donor_488345f
  misc_feature 1..24: note = RE
  misc_feature 25: note = Core
  misc_feature 26..50: note = LE
cgcgccttgacacgagaggggagcctacttagcattggtgcctgggcctg

SEQ ID NO: 33301 - DNA, 50 bp, unidentified
  source 1..50: mol_type = unassigned DNA; note = donor_48916b5
  misc_feature 1..24: note = RE
  misc_feature 25: note = Core
  misc_feature 26..50: note = LE
ttgcaatgaggaggagtccatatacaatgggatggactcctgctctcttt

SEQ ID NO: 33302 - DNA, 50 bp, unidentified; identical to SEQ ID NO: 30885
  source 1..50: mol_type = unassigned DNA; note = donor_4897801
  misc_feature 1..23: note = RE
  misc_feature 24..25: note = Core
  misc_feature 26..50: note = LE

SEQ ID NO: 33303 - DNA, 50 bp, unidentified
  source 1..50: mol_type = unassigned DNA; note = donor_489888b
  misc_feature 1..23: note = RE
  misc_feature 24..25: note = Core
  misc_feature 26..50: note = LE
ccccttgacttttatttgcaggtctactataatatatttgtcgggtaaat

SEQ ID NO: 33304 - DNA, 50 bp, unidentified
  source 1..50: mol_type = unassigned DNA; note = donor_489b382
  misc_feature 1..20: note = RE
  misc_feature 21..25: note = Core
  misc_feature 26..50: note = LE
tgacgaaggacatagaggcacccccgttatgttttccgcggtcctgcaag

SEQ ID NO: 33305 - DNA, 50 bp, unidentified
  source 1..50: mol_type = unassigned DNA; note = donor_48aa5dd
  misc_feature 1..24: note = RE
  misc_feature 25: note = Core
  misc_feature 26..50: note = LE
ggcaaggttgggggcgtccatgtacaatgggatggacgcccccaccctca

SEQ ID NO: 33306 - DNA, 50 bp, unidentified
  source 1..50: mol_type = unassigned DNA; note = donor_48b4921
  misc_feature 1..23: note = RE
  misc_feature 24..25: note = Core
  misc_feature 26..50: note = LE
aaaccattgactgcgatcatgagagaccttatgatcgcgtccaacgtcaa

SEQ ID NO: 33307 - DNA, 50 bp, unidentified
  source 1..50: mol_type = unassigned DNA; note = donor_48be344
  misc_feature 1..24: note = RE
  misc_feature 25: note = Core
  misc_feature 26..50: note = LE
ggcaaatcaggatgcgtccatgtataatggaaatgggacgaatccttcct

SEQ ID NO: 33308 - DNA, 50 bp, unidentified
  source 1..50: mol_type = unassigned DNA; note = donor_48be619
  misc_feature 1..24: note = RE
  misc_feature 25: note = Core
  misc_feature 26..50: note = LE
ttgcaacacgggggcgtccatgtataatggcatggacgcccctgcttggc

SEQ ID NO: 33309 - DNA, 50 bp, unidentified
  source 1..50: mol_type = unassigned DNA; note = donor_48bf9cf
  misc_feature 1..22: note = RE
  misc_feature 23..25: note = Core
  misc_feature 26..50: note = LE
tctcttgacttctcttagcaggttttgtaccataaaagtgtaagtaaaga

SEQ ID NO: 33310 - DNA, 50 bp, unidentified
  source 1..50: mol_type = unassigned DNA; note = donor_48c2df8
  misc_feature 1..23: note = RE
  misc_feature 24..25: note = Core
  misc_feature 26..50: note = LE
agacttgactttttattagcaggctcctataataggttttgtggtagtta

SEQ ID NO: 33311 - DNA, 50 bp, unidentified; identical to SEQ ID NO: 31427
  source 1..50: mol_type = unassigned DNA; note = donor_48d031f
  misc_feature 1..22: note = RE
  misc_feature 23..25: note = Core
  misc_feature 26..50: note = LE

SEQ ID NO: 33312 - DNA, 50 bp, unidentified
  source 1..50: mol_type = unassigned DNA; note = donor_48d09e2
  misc_feature 1..23: note = RE
  misc_feature 24..25: note = Core
  misc_feature 26..50: note = LE
tgacatccaacgtcatgggatgtctaatgggacctgccgggctcggatag

SEQ ID NO: 33313 - DNA, 50 bp, unidentified
  source 1..50: mol_type = unassigned DNA; note = donor_48d148f
  misc_feature 1..23: note = RE
  misc_feature 24..25: note = Core
  misc_feature 26..50: note = LE
atacttgactttttattagtagactcctaatataaaagtgtagtggttat

SEQ ID NO: 33314 - DNA, 50 bp, unidentified
  source 1..50: mol_type = unassigned DNA; note = donor_48d8946
  misc_feature 1..23: note = RE
  misc_feature 24..25: note = Core
  misc_feature 26..50: note = LE
agcggcttgacataggagaaacgcagtgtgaaggtgaggtgccgcgtagt

SEQ ID NO: 33315 - DNA, 50 bp, unidentified
  source 1..50: mol_type = unassigned DNA; note = donor_48e44f8
  misc_feature 1..23: note = RE
  misc_feature 24..25: note = Core
  misc_feature 26..50: note = LE
gccccttgagttctttcattggagaggtggcatgaaagaggccgcgcccg

SEQ ID NO: 33316 - DNA, 50 bp, unidentified; identical to SEQ ID NO: 30373
  source 1..50: mol_type = unassigned DNA; note = donor_48e4814
  misc_feature 1..23: note = RE
  misc_feature 24..25: note = Core
  misc_feature 26..50: note = LE

SEQ ID NO: 33317 - DNA, 50 bp, unidentified
  source 1..50: mol_type = unassigned DNA; note = donor_48e9a25
  misc_feature 1..23: note = RE
  misc_feature 24..25: note = Core
  misc_feature 26..50: note = LE
tgacattcaagctcctgggatgtctaatgagttctgggagtaagccatcc

SEQ ID NO: 33318 - DNA, 50 bp, unidentified; identical to SEQ ID NO: 31374
  source 1..50: mol_type = unassigned DNA; note = donor_48eca66
  misc_feature 1..23: note = RE
  misc_feature 24..25: note = Core
  misc_feature 26..50: note = LE

SEQ ID NO: 33319 - DNA, 50 bp, unidentified
  source 1..50: mol_type = unassigned DNA; note = donor_48ecc43
  misc_feature 1..24: note = RE
  misc_feature 25: note = Core
  misc_feature 26..50: note = LE
gaaatttggaattatcataggatactttagatttgtcatatagtatttat

SEQ ID NO: 33320 - DNA, 50 bp, unidentified
  source 1..50: mol_type = unassigned DNA; note = donor_48fa54d
  misc_feature 1..24: note = RE
  misc_feature 25: note = Core
  misc_feature 26..50: note = LE
ttggcaaaagggggcgtccatgtacaatgggatggacgcccccacccgac

SEQ ID NO: 33321 - DNA, 50 bp, unidentified
  source 1..50: mol_type = unassigned DNA; note = donor_48fab52
  misc_feature 1..24: note = RE
  misc_feature 25: note = Core
  misc_feature 26..50: note = LE
tgcagtcgcgcggcggaccatacataatgagatggtccgccgcttgatct

SEQ ID NO: 33322 - DNA, 50 bp, unidentified
  source 1..50: mol_type = unassigned DNA; note = donor_48fcad2
  misc_feature 1..23: note = RE
  misc_feature 24..25: note = Core
  misc_feature 26..50: note = LE
tcgtttgaccggaaagacggtatcttgtatctttctttccgtggtggtta

SEQ ID NO: 33323 - DNA, 50 bp, unidentified
  source 1..50: mol_type = unassigned DNA; note = donor_4904c28
  misc_feature 1..23: note = RE
  misc_feature 24..25: note = Core
  misc_feature 26..50: note = LE
cctattgactttttatttgcaggctactacaatatatttatggtcatagt

SEQ ID NO: 33324 - DNA, 50 bp, unidentified
  source 1..50: mol_type = unassigned DNA; note = donor_4906219
  misc_feature 1..22: note = RE
  misc_feature 23..25: note = Core
  misc_feature 26..50: note = LE
gcaaatgggaggcgaccatataagatggaatggtcgcctcccgccttaat

SEQ ID NO: 33325 - DNA, 50 bp, unidentified
  source 1..50: mol_type = unassigned DNA; note = donor_4906e9b
  misc_feature 1..24: note = RE
  misc_feature 25: note = Core
  misc_feature 26..50: note = LE
acatttgcaaattttcataggaagctttaactttgcagcctaaaaagagt

SEQ ID NO: 33326 - DNA, 50 bp, unidentified
  source 1..50: mol_type = unassigned DNA; note = donor_490b814
  misc_feature 1..23: note = RE
  misc_feature 24..25: note = Core
  misc_feature 26..50: note = LE
tgacattcaagctcctgggatgtctaatgggtgttagggagtcggccgtc

SEQ ID NO: 33327 - DNA, 50 bp, unidentified
  source 1..50: mol_type = unassigned DNA; note = donor_4916f16
  misc_feature 1..24: note = RE
  misc_feature 25: note = Core
  misc_feature 26..50: note = LE
cagcctcttgacacagagaggagcctgcttgttgtattgcctttaggacc

SEQ ID NO: 33328 - DNA, 50 bp, unidentified
  source 1..50: mol_type = unassigned DNA; note = donor_493019c
  misc_feature 1..23: note = RE
  misc_feature 24..25: note = Core
  misc_feature 26..50: note = LE
tgcagacggggtgggccatacgtttatggatggcccacccctcaccaccg

SEQ ID NO: 33329 - DNA, 50 bp, unidentified
  source 1..50: mol_type = unassigned DNA; note = donor_493a868
  misc_feature 1..22: note = RE
  misc_feature 23..25: note = Core
  misc_feature 26..50: note = LE
aaaataaataagaaagtatagagagcattcctgtaattcagaaataacgt

SEQ ID NO: 33330 - DNA, 50 bp, unidentified
  source 1..50: mol_type = unassigned DNA; note = donor_493bbdc
  misc_feature 1..23: note = RE
  misc_feature 24..25: note = Core
  misc_feature 26..50: note = LE
gctatgcaggggctatccacacatgatggggtggatagctcctgctccaa

SEQ ID NO: 33331 - DNA, 50 bp, unidentified
  source 1..50: mol_type = unassigned DNA; note = donor_4940c73
  misc_feature 1..23: note = RE
  misc_feature 24..25: note = Core
  misc_feature 26..50: note = LE
cttgcaaatcccgctattagacgacatggggtaatcgcgggagcggtcac

SEQ ID NO: 33332 - DNA, 50 bp, unidentified; identical to SEQ ID NO: 32172
  source 1..50: mol_type = unassigned DNA; note = donor_4947ada
  misc_feature 1..24: note = RE
  misc_feature 25: note = Core
  misc_feature 26..50: note = LE

SEQ ID NO: 33333 - DNA, 50 bp, unidentified
  source 1..50: mol_type = unassigned DNA; note = donor_4947fa8
  misc_feature 1..21: note = RE
  misc_feature 22..25: note = Core
  misc_feature 26..50: note = LE
ggcttgacttcatcattgagactccgtaagttgttaggcggcccgggagg

SEQ ID NO: 33334 - DNA, 50 bp, unidentified
  source 1..50: mol_type = unassigned DNA; note = donor_494a5b0
  misc_feature 1..23: note = RE
  misc_feature 24..25: note = Core
  misc_feature 26..50: note = LE
caaccacgccaacataacagttgccctgtgtcttgaagatctgtcaggat

SEQ ID NO: 33335 - DNA, 50 bp, unidentified
  source 1..50: mol_type = unassigned DNA; note = donor_494af4c
  misc_feature 1..22: note = RE
  misc_feature 23..25: note = Core
  misc_feature 26..50: note = LE
aagcttgacaaacattagctggtttcgtattatcaggtcaaccagtcttt

SEQ ID NO: 33336 - DNA, 50 bp, unidentified
  source 1..50: mol_type = unassigned DNA; note = donor_494df9e
  misc_feature 1..23: note = RE
  misc_feature 24..25: note = Core
  misc_feature 26..50: note = LE
tggcttgacatcctgattgggaagtccaacccttcaagcgcgggtttgat

SEQ ID NO: 33337 - DNA, 50 bp, unidentified
  source 1..50: mol_type = unassigned DNA; note = donor_4951cf5
  misc_feature 1..24: note = RE
  misc_feature 25: note = Core
  misc_feature 26..50: note = LE
ttgcaaaacggggcgtaccatacataataagatggtacgccccacccaca

SEQ ID NO: 33338 - DNA, 50 bp, unidentified
  source 1..50: mol_type = unassigned DNA; note = donor_495a39b
  misc_feature 1..23: note = RE
  misc_feature 24..25: note = Core
  misc_feature 26..50: note = LE
tgcggacggggcgggccatacgtttatggatggcccgcccctcaccgggc

SEQ ID NO: 33339 - DNA, 50 bp, unidentified
  source 1..50: mol_type = unassigned DNA; note = donor_495b4cf
  misc_feature 1..24: note = RE
  misc_feature 25: note = Core
  misc_feature 26..50: note = LE
gcggcttgactaaaaccatagaggccccccgttagcttctaaggacaccg

SEQ ID NO: 33340 - DNA, 50 bp, unidentified
  source 1..50: mol_type = unassigned DNA; note = donor_495e699
  misc_feature 1..24: note = RE
  misc_feature 25: note = Core
  misc_feature 26..50: note = LE
ttgtttgctttttacctcagttcttcttaagtttgatttttattaaattg

SEQ ID NO: 33341 - DNA, 50 bp, unidentified
  source 1..50: mol_type = unassigned DNA; note = donor_495fa0b
  misc_feature 1..22: note = RE
  misc_feature 23..25: note = Core
  misc_feature 26..50: note = LE
aagtttgtttttaacttagaatgctattagttttacattttatatttaca

SEQ ID NO: 33342 - DNA, 50 bp, unidentified
  source 1..50: mol_type = unassigned DNA; note = donor_496304f
  misc_feature 1..24: note = RE
  misc_feature 25: note = Core
  misc_feature 26..50: note = LE
ttgaaatatgataaacctagaatacctttggttaaataatgtaatgatct

SEQ ID NO: 33343 - DNA, 50 bp, unidentified
  source 1..50: mol_type = unassigned DNA; note = donor_49645bc
  misc_feature 1..23: note = RE
  misc_feature 24..25: note = Core
  misc_feature 26..50: note = LE
gcgcaaagggggccgttcatgtagaatggaatgaacggcccccgccaacg

SEQ ID NO: 33344 - DNA, 50 bp, unidentified
  source 1..50: mol_type = unassigned DNA; note = donor_4974031
  misc_feature 1..22: note = RE
  misc_feature 23..25: note = Core
  misc_feature 26..50: note = LE
ttatttgtttttgtcttagaatgctattagttttgcattattatatttac

SEQ ID NO: 33345 - DNA, 50 bp, unidentified
  source 1..50: mol_type = unassigned DNA; note = donor_498717b
  misc_feature 1..23: note = RE
  misc_feature 24..25: note = Core
  misc_feature 26..50: note = LE
cgcactgaccggcaagacggtatcttgtatctcgacaatcactcagttac

SEQ ID NO: 33346 - DNA, 50 bp, unidentified
  source 1..50: mol_type = unassigned DNA; note = donor_49a1689
  misc_feature 1..24: note = RE
  misc_feature 25: note = Core
  misc_feature 26..50: note = LE
gtgcaaactgtgggcgtccatgtataatggaatggacgccccctctcctg

SEQ ID NO: 33347 - DNA, 50 bp, unidentified
  source 1..50: mol_type = unassigned DNA; note = donor_49a63cd
  misc_feature 1..24: note = RE
  misc_feature 25: note = Core
  misc_feature 26..50: note = LE
tgggcttgactttttatttgcaggcctgttactataaatttgccccttga

SEQ ID NO: 33348 - DNA, 50 bp, unidentified
  source 1..50: mol_type = unassigned DNA; note = donor_49b0ef7
  misc_feature 1..22: note = RE
  misc_feature 23..25: note = Core
  misc_feature 26..50: note = LE
cactacgggcggcaaccacagaagatggagtggttgccgccctccccaga

SEQ ID NO: 33349 - DNA, 50 bp, unidentified
  source 1..50: mol_type = unassigned DNA; note = donor_49b3089
  misc_feature 1..22: note = RE
  misc_feature 23..25: note = Core
  misc_feature 26..50: note = LE
ataatacttgaattaaagtagaaaacatactaacctaagtattgggttga

SEQ ID NO: 33350 - DNA, 50 bp, unidentified
  source 1..50: mol_type = unassigned DNA; note = donor_49ba79d
  misc_feature 1..23: note = RE
  misc_feature 24..25: note = Core
  misc_feature 26..50: note = LE
gcaggaggtgggctgaccatacattaatgagatggtcagcccgggtcgag

SEQ ID NO: 33351 - DNA, 50 bp, unidentified; identical to SEQ ID NO: 32149
  source 1..50: mol_type = unassigned DNA; note = donor_49beff1
  misc_feature 1..24: note = RE
  misc_feature 25: note = Core
  misc_feature 26..50: note = LE

SEQ ID NO: 33352 - DNA, 50 bp, unidentified
  source 1..50: mol_type = unassigned DNA; note = donor_49bf852
  misc_feature 1..23: note = RE
  misc_feature 24..25: note = Core
  misc_feature 26..50: note = LE
cacctcatagggcaagacggtatcttgtgtcttgcggttcacggatcgct

SEQ ID NO: 33353 - DNA, 50 bp, unidentified; identical to SEQ ID NO: 32384
  source 1..50: mol_type = unassigned DNA; note = donor_49cdbaa
  misc_feature 1..21: note = RE
  misc_feature 22..25: note = Core
  misc_feature 26..50: note = LE

SEQ ID NO: 33354 - DNA, 50 bp, unidentified
  source 1..50: mol_type = unassigned DNA; note = donor_49cf8cc
  misc_feature 1..23: note = RE
  misc_feature 24..25: note = Core
  misc_feature 26..50: note = LE
cttgactttctttaatagttagtctactattaaataagtcatagcctatc

SEQ ID NO: 33355 - DNA, 50 bp, unidentified
  source 1..50: mol_type = unassigned DNA; note = donor_49d1c3f
  misc_feature 1..23: note = RE
  misc_feature 24..25: note = Core
  misc_feature 26..50: note = LE
aatatttgcgcaggtcttagaattcctttagatttgcatcataataaata

SEQ ID NO: 33356 - DNA, 50 bp, unidentified
  source 1..50: mol_type = unassigned DNA; note = donor_49d2e83
  misc_feature 1..23: note = RE
  misc_feature 24..25: note = Core
  misc_feature 26..50: note = LE
tatatttggttttgtcttagaatacgcctttagatttacgttttaataat

SEQ ID NO: 33357 - DNA, 50 bp, unidentified
  source 1..50: mol_type = unassigned DNA; note = donor_49e05c1
  misc_feature 1..23: note = RE
  misc_feature 24..25: note = Core
  misc_feature 26..50: note = LE
cggttgacatcaacatagggacaccgttaccttcttcgtagtcccgcacc

SEQ ID NO: 33358 - DNA, 50 bp, unidentified; identical to SEQ ID NO: 32493
  source 1..50: mol_type = unassigned DNA; note = donor_49ead00
  misc_feature 1..23: note = RE
  misc_feature 24..25: note = Core
  misc_feature 26..50: note = LE

SEQ ID NO: 33359 - DNA, 50 bp, unidentified
  source 1..50: mol_type = unassigned DNA; note = donor_49ecda3
  misc_feature 1..23: note = RE
  misc_feature 24..25: note = Core
  misc_feature 26..50: note = LE
gcaagcaggaggccgtccacatatgttggggtggacggcctccgaacggc

SEQ ID NO: 33360 - DNA, 50 bp, unidentified
  source 1..50: mol_type = unassigned DNA; note = donor_49ef377
  misc_feature 1..22: note = RE
  misc_feature 23..25: note = Core
  misc_feature 26..50: note = LE
caatgcaggggccgtccacacatgatggggtcgggccctgctcaccggca

SEQ ID NO: 33361 - DNA, 50 bp, unidentified
  source 1..50: mol_type = unassigned DNA; note = donor_49f01a7
  misc_feature 1..23: note = RE
  misc_feature 24..25: note = Core
  misc_feature 26..50: note = LE
gcaggccgggggccgtccacatatgttggggtggacggcccccgacggca

SEQ ID NO: 33362 - DNA, 50 bp, unidentified
  source 1..50: mol_type = unassigned DNA; note = donor_49f120b
  misc_feature 1..23: note = RE
  misc_feature 24..25: note = Core
  misc_feature 26..50: note = LE
gggctttgccaaaaccatagaatcttgtatggtaagacttgaagggagga

SEQ ID NO: 33363 - DNA, 50 bp, unidentified
  source 1..50: mol_type = unassigned DNA; note = donor_49f12f2
  misc_feature 1..23: note = RE
  misc_feature 24..25: note = Core
  misc_feature 26..50: note = LE
gcaaacggggaggagaccatatacgatgagatggtctcctcccctcctaa

SEQ ID NO: 33364 - DNA, 50 bp, unidentified
  source 1..50: mol_type = unassigned DNA; note = donor_49fa876
  misc_feature 1..23: note = RE
  misc_feature 24..25: note = Core
  misc_feature 26..50: note = LE
gacaatatttcgccatgggatgtctaatgagagctaccgggttcgtcgtt

SEQ ID NO: 33365 - DNA, 50 bp, unidentified
  source 1..50: mol_type = unassigned DNA; note = donor_4a08703
  misc_feature 1..22: note = RE
  misc_feature 23..25: note = Core
  misc_feature 26..50: note = LE
cgctaacgggggcatccatacatgatggattggatgccccctcccgacgg

SEQ ID NO: 33366 - DNA, 50 bp, unidentified
  source 1..50: mol_type = unassigned DNA; note = donor_4a10dd2
  misc_feature 1..23: note = RE
  misc_feature 24..25: note = Core
  misc_feature 26..50: note = LE
gacccagaacggccgattagagaagatggggtaatcggccgacgagcttg

SEQ ID NO: 33367 - DNA, 50 bp, unidentified
  source 1..50: mol_type = unassigned DNA; note = donor_4a14d08
  misc_feature 1..23: note = RE
  misc_feature 24..25: note = Core
  misc_feature 26..50: note = LE
ttatttgctttccaatacagttcgtcgtacatttgtcataagtaaaacaa

SEQ ID NO: 33368 - DNA, 50 bp, unidentified; identical to SEQ ID NO: 31849
  source 1..50: mol_type = unassigned DNA; note = donor_4a1bfea
  misc_feature 1..24: note = RE
  misc_feature 25: note = Core
  misc_feature 26..50: note = LE

SEQ ID NO: 33369 - DNA, 50 bp, unidentified
  source 1..50: mol_type = unassigned DNA; note = donor_4a1e190
  misc_feature 1..23: note = RE
  misc_feature 24..25: note = Core
  misc_feature 26..50: note = LE
gcgagacgggggccgtccacatatgttggggtggacggcccccgaacggc

SEQ ID NO: 33370 - DNA, 50 bp, unidentified; identical to SEQ ID NO: 30383
  source 1..50: mol_type = unassigned DNA; note = donor_4a2e877
  misc_feature 1..23: note = RE
  misc_feature 24..25: note = Core
  misc_feature 26..50: note = LE

SEQ ID NO: 33371 - DNA, 50 bp, unidentified
  source 1..50: mol_type = unassigned DNA; note = donor_4a366c8
  misc_feature 1..22: note = RE
  misc_feature 23..25: note = Core
  misc_feature 26..50: note = LE
tgacaatctacatagggacacccccgttaccttgatcgtgtccccataag

SEQ ID NO: 33372 - DNA, 50 bp, unidentified
  source 1..50: mol_type = unassigned DNA; note = donor_4a3726e
  misc_feature 1..22: note = RE
  misc_feature 23..25: note = Core
  misc_feature 26..50: note = LE
gcaaatgggcggcgaccatataagatggaatggtcgcctcccgccttagc

SEQ ID NO: 33373 - DNA, 50 bp, unidentified
  source 1..50: mol_type = unassigned DNA; note = donor_4a38bee
  misc_feature 1..24: note = RE
  misc_feature 25: note = Core
  misc_feature 26..50: note = LE
cttgcatcggagcggtgtccatatatggaaacctccccataccggcttca

SEQ ID NO: 33374 - DNA, 50 bp, unidentified
  source 1..50: mol_type = unassigned DNA; note = donor_4a3b476
  misc_feature 1..21: note = RE
  misc_feature 22..25: note = Core
  misc_feature 26..50: note = LE
agttgacttcgaaacacagtacattgtatattgactacaaatataataaa

SEQ ID NO: 33375 - DNA, 50 bp, unidentified
  source 1..50: mol_type = unassigned DNA; note = donor_4a3ee70
  misc_feature 1..23: note = RE
  misc_feature 24..25: note = Core
  misc_feature 26..50: note = LE
tgacttgacttttaatagttagtcttgtattatagagtagtagttattaa

SEQ ID NO: 33376 - DNA, 50 bp, unidentified
  source 1..50: mol_type = unassigned DNA; note = donor_4a48278
  misc_feature 1..23: note = RE
  misc_feature 24..25: note = Core
  misc_feature 26..50: note = LE
caatgcaggtgccacccacacaggatgaggtgggtggcacctgctccacc

SEQ ID NO: 33377 - DNA, 50 bp, unidentified
  source 1..50: mol_type = unassigned DNA; note = donor_4a4f8f4
  misc_feature 1..23: note = RE
  misc_feature 24..25: note = Core
  misc_feature 26..50: note = LE
agaaaattaaagtatagagaggaagcattcctgttataaagtaaaatgaa

SEQ ID NO: 33378 - DNA, 50 bp, unidentified
  source 1..50: mol_type = unassigned DNA; note = donor_4a51412
  misc_feature 1..23: note = RE
  misc_feature 24..25: note = Core
  misc_feature 26..50: note = LE
gacacccctggcacatgggatgtctaatgagtgctaggagctgccggatc

SEQ ID NO: 33379 - DNA, 50 bp, unidentified
  source 1..50: mol_type = unassigned DNA; note = donor_4a5461a
  misc_feature 1..24: note = RE
  misc_feature 25: note = Core
  misc_feature 26..50: note = LE
tgcaaaacggaggtagtccatagataatgggatggactacctcctccctt

SEQ ID NO: 33380 - DNA, 50 bp, unidentified
  source 1..50: mol_type = unassigned DNA; note = donor_4a640fa
  misc_feature 1..23: note = RE
  misc_feature 24..25: note = Core
  misc_feature 26..50: note = LE
aatccaacctaacaatacagttgcctgtgtatttgaactgtggtagaagg

SEQ ID NO: 33381 - DNA, 50 bp, unidentified
  source 1..50: mol_type = unassigned DNA; note = donor_4a6a60c
  misc_feature 1..23: note = RE
  misc_feature 24..25: note = Core
  misc_feature 26..50: note = LE
gaatctcatgattataccattagatcgtatattagttattagtggatttc

SEQ ID NO: 33382 - DNA, 50 bp, unidentified
  source 1..50: mol_type = unassigned DNA; note = donor_4a6bffd
  misc_feature 1..22: note = RE
  misc_feature 23..25: note = Core
  misc_feature 26..50: note = LE
ataagatttccttattacagttcattgtatatttaaattaaataattact

SEQ ID NO: 33383 - DNA, 50 bp, unidentified
  source 1..50: mol_type = unassigned DNA; note = donor_4a6e722
  misc_feature 1..24: note = RE
  misc_feature 25: note = Core
  misc_feature 26..50: note = LE
acttgattgacaaacacataggggcgttaccttcttcccgccccggttat

SEQ ID NO: 33384 - DNA, 50 bp, unidentified
  source 1..50: mol_type = unassigned DNA; note = donor_4a7884e
  misc_feature 1..24: note = RE
  misc_feature 25: note = Core
  misc_feature 26..50: note = LE
ttgtaagcgaggggccgtccacatatgttggggtggacggcccccaaacg

SEQ ID NO: 33385 - DNA, 50 bp, unidentified
  source 1..50: mol_type = unassigned DNA; note = donor_4a8b27b
  misc_feature 1..22: note = RE
  misc_feature 23..25: note = Core
  misc_feature 26..50: note = LE
catcgaacggggcatccaaacatgatgggttggatgcccctcccaccggc

SEQ ID NO: 33386 - DNA, 50 bp, unidentified
  source 1..50: mol_type = unassigned DNA; note = donor_4a91bf0
  misc_feature 1..24: note = RE
  misc_feature 25: note = Core
  misc_feature 26..50: note = LE
tgcaaaaagcgtcgggtccatacatactgagatggacccgacgcaccttc

SEQ ID NO: 33387 - DNA, 50 bp, unidentified
  source 1..50: mol_type = unassigned DNA; note = donor_4a93ef9
  misc_feature 1..24: note = RE
  misc_feature 25: note = Core
  misc_feature 26..50: note = LE
caccggttgacaacagaagggagcctactagacgattcccctaggaccgg

SEQ ID NO: 33388 - DNA, 50 bp, unidentified
  source 1..50: mol_type = unassigned DNA; note = donor_4a9442f
  misc_feature 1..21: note = RE
  misc_feature 22..25: note = Core
  misc_feature 26..50: note = LE
gggcggcttgacacagggctactcactggtgcaccatccttgtgtcggtg

SEQ ID NO: 33389 - DNA, 50 bp, unidentified
  source 1..50: mol_type = unassigned DNA; note = donor_4a9913f
  misc_feature 1..23: note = RE
  misc_feature 24..25: note = Core
  misc_feature 26..50: note = LE
aaagcttgatctggaacagagtatccttgtatgttctcaacacacccacg

SEQ ID NO: 33390 - DNA, 50 bp, unidentified; identical to SEQ ID NO: 30668
  source 1..50: mol_type = unassigned DNA; note = donor_4a9a3a5
  misc_feature 1..23: note = RE
  misc_feature 24..25: note = Core
  misc_feature 26..50: note = LE

SEQ ID NO: 33391 - DNA, 50 bp, unidentified
  source 1..50: mol_type = unassigned DNA; note = donor_4aa297c
  misc_feature 1..23: note = RE
  misc_feature 24..25: note = Core
  misc_feature 26..50: note = LE
tgacgacttgacacacagaggcgctgacttgtctactgggggcaggcgct

SEQ ID NO: 33392 - DNA, 50 bp, unidentified
  source 1..50: mol_type = unassigned DNA; note = donor_4aad75c
  misc_feature 1..23: note = RE
  misc_feature 24..25: note = Core
  misc_feature 26..50: note = LE
caaaaacgggggtgaccatagatttaatgagatggtcacccccaccctgt

SEQ ID NO: 33393 - DNA, 50 bp, unidentified
  source 1..50: mol_type = unassigned DNA; note = donor_4ab670e
  misc_feature 1..23: note = RE
  misc_feature 24..25: note = Core
  misc_feature 26..50: note = LE
tgcagaaaagggggtaaccatagatgaaatggctacccccgctgccccct

SEQ ID NO: 33394 - DNA, 50 bp, unidentified
  source 1..50: mol_type = unassigned DNA; note = donor_4abd5d0
  misc_feature 1..23: note = RE
  misc_feature 24..25: note = Core
  misc_feature 26..50: note = LE
tctcttgacatcacaccgctggactcgtataatatcttttagatacataa

SEQ ID NO: 33395 - DNA, 50 bp, unidentified
  source 1..50: mol_type = unassigned DNA; note = donor_4abf7dd
  misc_feature 1..22: note = RE
  misc_feature 23..25: note = Core
  misc_feature 26..50: note = LE
ccaacagagcgccgtccacacatgatggtgtggacggcgctcgcgagcgg

SEQ ID NO: 33396 - DNA, 50 bp, unidentified
  source 1..50: mol_type = unassigned DNA; note = donor_4ac0e89
  misc_feature 1..23: note = RE
  misc_feature 24..25: note = Core
  misc_feature 26..50: note = LE
aaattttttaaaaaacatagttgattgtaagttaaaaacatgatataaat

SEQ ID NO: 33397 - DNA, 50 bp, unidentified
  source 1..50: mol_type = unassigned DNA; note = donor_4ac6402
  misc_feature 1..23: note = RE
  misc_feature 24..25: note = Core
  misc_feature 26..50: note = LE
gctatgcaggagccatccacacatgatggggtggatggctcctgctccaa

SEQ ID NO: 33398 - DNA, 50 bp, unidentified; identical to SEQ ID NO: 32423
  source 1..50: mol_type = unassigned DNA; note = donor_4acc85e
  misc_feature 1..24: note = RE
  misc_feature 25: note = Core
  misc_feature 26..50: note = LE

SEQ ID NO: 33399 - DNA, 50 bp, unidentified
  source 1..50: mol_type = unassigned DNA; note = donor_4ad5f1b
  misc_feature 1..23: note = RE
  misc_feature 24..25: note = Core
  misc_feature 26..50: note = LE
gactaatcgaggcccgttacagaagatggtgtaacgggccggccgaacca

SEQ ID NO: 33400 - DNA, 50 bp, unidentified
  source 1..50: mol_type = unassigned DNA; note = donor_4adad24
  misc_feature 1..23: note = RE
  misc_feature 24..25: note = Core
  misc_feature 26..50: note = LE
gcatttactggggcatccacagatgatggagtggatgcccctcccgacgg

SEQ ID NO: 33401 - DNA, 50 bp, unidentified
  source 1..50: mol_type = unassigned DNA; note = donor_4ae3461
  misc_feature 1..24: note = RE
  misc_feature 25: note = Core
  misc_feature 26..50: note = LE
tgcagttcggcgacggaccatacataatgatatggtcctccgtcaagaag

SEQ ID NO: 33402 - DNA, 50 bp, unidentified
  source 1..50: mol_type = unassigned DNA; note = donor_4ae73ce
  misc_feature 1..24: note = RE
  misc_feature 25: note = Core
  misc_feature 26..50: note = LE
atattttgttttttctataggaagctttaactttgcagtaaatattctaa

SEQ ID NO: 33403 - DNA, 50 bp, unidentified
  source 1..50: mol_type = unassigned DNA; note = donor_4ae7dbe
  misc_feature 1..23: note = RE
  misc_feature 24..25: note = Core
  misc_feature 26..50: note = LE
gggattgacttctaatagttaatcttgtattatagagtagtagttattaa

SEQ ID NO: 33404 - DNA, 50 bp, unidentified
  source 1..50: mol_type = unassigned DNA; note = donor_4aede08
  misc_feature 1..22: note = RE
  misc_feature 23..25: note = Core
  misc_feature 26..50: note = LE
catcccgggcggcaaccacagaagatggggtggttgccgtcctccccaga

SEQ ID NO: 33405 - DNA, 50 bp, unidentified
  source 1..50: mol_type = unassigned DNA; note = donor_4af68db
  misc_feature 1..24: note = RE
  misc_feature 25: note = Core
  misc_feature 26..50: note = LE
tttcttgcatatgaacatagaatgcattaagtttgcagcatcgttgcaga

SEQ ID NO: 33406 - DNA, 50 bp, unidentified
  source 1..50: mol_type = unassigned DNA; note = donor_4af6c38
  misc_feature 1..24: note = RE
  misc_feature 25: note = Core
  misc_feature 26..50: note = LE
ttggcaaacgggggcgtccatgtataatggaatggacgcccccaccatca

SEQ ID NO: 33407 - DNA, 50 bp, unidentified
  source 1..50: mol_type = unassigned DNA; note = donor_4affdde
  misc_feature 1..23: note = RE
  misc_feature 24..25: note = Core
  misc_feature 26..50: note = LE
aggcttgacttttaatagttagtctcgtattatatagtagtagtttttag

SEQ ID NO: 33408 - DNA, 50 bp, unidentified
  source 1..50: mol_type = unassigned DNA; note = donor_4b045ec
  misc_feature 1..21: note = RE
  misc_feature 22..25: note = Core
  misc_feature 26..50: note = LE
gcttgacttttatttgcaggactcctacaatatagattacggtgaaaggc

SEQ ID NO: 33409 - DNA, 50 bp, unidentified
  source 1..50: mol_type = unassigned DNA; note = donor_4b0b2ad
  misc_feature 1..24: note = RE
  misc_feature 25: note = Core
  misc_feature 26..50: note = LE
gccgttgacaacaacatagccccccgttactatgttcataccccagaatg

SEQ ID NO: 33410 - DNA, 50 bp, unidentified
  source 1..50: mol_type = unassigned DNA; note = donor_4b1e62f
  misc_feature 1..23: note = RE
  misc_feature 24..25: note = Core
  misc_feature 26..50: note = LE
aagccaacccaacataacagttgccctgtgtcttggaagtctgtcaggat

SEQ ID NO: 33411 - DNA, 50 bp, unidentified
  source 1..50: mol_type = unassigned DNA; note = donor_4b21380
  misc_feature 1..21: note = RE
  misc_feature 22..25: note = Core
  misc_feature 26..50: note = LE
gcttgacacctattagcaggtttgctacaatatgtttgaccccaagaacg

SEQ ID NO: 33412 - DNA, 50 bp, unidentified
  source 1..50: mol_type = unassigned DNA; note = donor_4b26f0b
  misc_feature 1..24: note = RE
  misc_feature 25: note = Core
  misc_feature 26..50: note = LE
attgttgacagctattggctggtatcgtattatatgaataagccagtcat

SEQ ID NO: 33413 - DNA, 50 bp, unidentified; identical to SEQ ID NO: 30710
  source 1..50: mol_type = unassigned DNA; note = donor_4b2837a
  misc_feature 1..24: note = RE
  misc_feature 25: note = Core
  misc_feature 26..50: note = LE

SEQ ID NO: 33414 - DNA, 50 bp, unidentified
  source 1..50: mol_type = unassigned DNA; note = donor_4b2e6fd
  misc_feature 1..23: note = RE
  misc_feature 24..25: note = Core
  misc_feature 26..50: note = LE
ttgcgtaaatcccaagacagttgcttgtatctctcggcttgtggcacgat

SEQ ID NO: 33415 - DNA, 50 bp, unidentified
  source 1..50: mol_type = unassigned DNA; note = donor_4b2f5ae
  misc_feature 1..21: note = RE
  misc_feature 22..25: note = Core
  misc_feature 26..50: note = LE
cttgacatcttcattgagagtccttaagttcgtagttgcagttgcgtcgt

SEQ ID NO: 33416 - DNA, 50 bp, unidentified
  source 1..50: mol_type = unassigned DNA; note = donor_4b2fe12
  misc_feature 1..23: note = RE
  misc_feature 24..25: note = Core
  misc_feature 26..50: note = LE
gaccctgaatggccgattagagaagatggggtaatcggccgcccagcgga

SEQ ID NO: 33417 - DNA, 50 bp, unidentified
  source 1..50: mol_type = unassigned DNA; note = donor_4b3f42e
  misc_feature 1..23: note = RE
  misc_feature 24..25: note = Core
  misc_feature 26..50: note = LE
tatcttgacatatcaccgctggactcgtatagtatctttagataccatta

SEQ ID NO: 33418 - DNA, 50 bp, unidentified
  source 1..50: mol_type = unassigned DNA; note = donor_4b4081b
  misc_feature 1..24: note = RE
  misc_feature 25: note = Core
  misc_feature 26..50: note = LE
acacttgacttttacttagcaggctcctacaataaagttgtaggtaacag

SEQ ID NO: 33419 - DNA, 50 bp, unidentified
  source 1..50: mol_type = unassigned DNA; note = donor_4b432da
  misc_feature 1..24: note = RE
  misc_feature 25: note = Core
  misc_feature 26..50: note = LE
gccgcttgacgaaaacgatagaggcgttaccttcttcctatctcgtccgt

SEQ ID NO: 33420 - DNA, 50 bp, unidentified
  source 1..50: mol_type = unassigned DNA; note = donor_4b467b2
  misc_feature 1..24: note = RE
  misc_feature 25: note = Core
  misc_feature 26..50: note = LE
aaaattaggaattaccataggatacctttagatttgttctatagatgaaa

SEQ ID NO: 33421 - DNA, 50 bp, unidentified
  source 1..50: mol_type = unassigned DNA; note = donor_4b482bb
  misc_feature 1..21: note = RE
  misc_feature 22..25: note = Core
  misc_feature 26..50: note = LE
tcttgacttcatatagctggtctcctatcttgatgttgttgcatctgaga

SEQ ID NO: 33422 - DNA, 50 bp, unidentified
  source 1..50: mol_type = unassigned DNA; note = donor_4b4cfc8
  misc_feature 1..23: note = RE
  misc_feature 24..25: note = Core
  misc_feature 26..50: note = LE
gcgaggcgggggccgtccacatatgttggggtggacggcccccgacggca

SEQ ID NO: 33423 - DNA, 50 bp, unidentified
  source 1..50: mol_type = unassigned DNA; note = donor_4b4db89
  misc_feature 1..23: note = RE
  misc_feature 24..25: note = Core
  misc_feature 26..50: note = LE
agggtttacctgcaacatagaatcttgtatgtttagacttgaaggggtgg

SEQ ID NO: 33424 - DNA, 50 bp, unidentified
  source 1..50: mol_type = unassigned DNA; note = donor_4b54aa2
  misc_feature 1..23: note = RE
  misc_feature 24..25: note = Core
  misc_feature 26..50: note = LE
cccttgacaactccttatgggacctgatatacgtccctgtcagaggatcc

SEQ ID NO: 33425 - DNA, 50 bp, unidentified
  source 1..50: mol_type = unassigned DNA; note = donor_4b63c4a
  misc_feature 1..23: note = RE
  misc_feature 24..25: note = Core
  misc_feature 26..50: note = LE
ggacttgacttttatttgcaggtctgttacaataatattagtcggtaaat

SEQ ID NO: 33426 - DNA, 50 bp, unidentified
  source 1..50: mol_type = unassigned DNA; note = donor_4b654ba
  misc_feature 1..23: note = RE
  misc_feature 24..25: note = Core
  misc_feature 26..50: note = LE
gccaaaggggagccgtccacacatgatgctgtggacggctctccaaccca

SEQ ID NO: 33427 - DNA, 50 bp, unidentified
  source 1..50: mol_type = unassigned DNA; note = donor_4b6f5fd
  misc_feature 1..23: note = RE
  misc_feature 24..25: note = Core
  misc_feature 26..50: note = LE
gcctctaagaaacgacacagttgcctgtctgttgcgaatggagtagaatg

SEQ ID NO: 33428 - DNA, 50 bp, unidentified
  source 1..50: mol_type = unassigned DNA; note = donor_4b71eb0
  misc_feature 1..23: note = RE
  misc_feature 24..25: note = Core
  misc_feature 26..50: note = LE
tatttacccttgacatagaaggtcttatacattaaactaagatcgtcccc

SEQ ID NO: 33429 - DNA, 50 bp, unidentified
  source 1..50: mol_type = unassigned DNA; note = donor_4b7f49b
  misc_feature 1..20: note = RE
  misc_feature 21..25: note = Core
  misc_feature 26..50: note = LE
cttgacaaacacatagccggctgctataatatcgaccgtagatatttcct

SEQ ID NO: 33430 - DNA, 50 bp, unidentified
  source 1..50: mol_type = unassigned DNA; note = donor_4b8b1db
  misc_feature 1..23: note = RE
  misc_feature 24..25: note = Core
  misc_feature 26..50: note = LE
acgcttgactgggaagacggttacttgtatcttcaggccagaccagcacg

SEQ ID NO: 33431 - DNA, 50 bp, unidentified
  source 1..50: mol_type = unassigned DNA; note = donor_4b8f726
  misc_feature 1..22: note = RE
  misc_feature 23..25: note = Core
  misc_feature 26..50: note = LE
aatgttgacaaactattggctggttcgtattataaggtcatccagaaaat

SEQ ID NO: 33432 - DNA, 50 bp, unidentified
  source 1..50: mol_type = unassigned DNA; note = donor_4b9ca9e
  misc_feature 1..23: note = RE
  misc_feature 24..25: note = Core
  misc_feature 26..50: note = LE
ggggttgactttttatttgcaggctattacaatagatttatagatcaggg

SEQ ID NO: 33433 - DNA, 50 bp, unidentified
  source 1..50: mol_type = unassigned DNA; note = donor_4b9ddbd
  misc_feature 1..22: note = RE
  misc_feature 23..25: note = Core
  misc_feature 26..50: note = LE
gcactaacggcggcatccatacatgatggtgtggatgccgccaccttcag

SEQ ID NO: 33434 - DNA, 50 bp, unidentified
  source 1..50: mol_type = unassigned DNA; note = donor_4b9e710
  misc_feature 1..23: note = RE
  misc_feature 24..25: note = Core
  misc_feature 26..50: note = LE
agacttgacttttaatagttagtctcgtattataaagtagtagtatttat

SEQ ID NO: 33435 - DNA, 50 bp, unidentified
  source 1..50: mol_type = unassigned DNA; note = donor_4b9ef5e
  misc_feature 1..24: note = RE
  misc_feature 25: note = Core
  misc_feature 26..50: note = LE
tgacgcgatgcgccggaccatacataatgggatggtccgccgcgatttga

SEQ ID NO: 33436 - DNA, 50 bp, unidentified; identical to SEQ ID NO: 31823
  source 1..50: mol_type = unassigned DNA; note = donor_4ba20f1
  misc_feature 1..23: note = RE
  misc_feature 24..25: note = Core
  misc_feature 26..50: note = LE

SEQ ID NO: 33437 - DNA, 50 bp, unidentified
  source 1..50: mol_type = unassigned DNA; note = donor_4ba34b7
  misc_feature 1..23: note = RE
  misc_feature 24..25: note = Core
  misc_feature 26..50: note = LE
tcttgacaatccaagcgggatgttctaccattggatttcgctgggatgct

SEQ ID NO: 33438 - DNA, 50 bp, unidentified
  source 1..50: mol_type = unassigned DNA; note = donor_4ba444e
  misc_feature 1..23: note = RE
  misc_feature 24..25: note = Core
  misc_feature 26..50: note = LE
aagatttggttttatcatagaaatcctttagatttgttttttggaaattt

SEQ ID NO: 33439 - DNA, 50 bp, unidentified
  source 1..50: mol_type = unassigned DNA; note = donor_4bb7cce
  misc_feature 1..24: note = RE
  misc_feature 25: note = Core
  misc_feature 26..50: note = LE
gccccttgaccgaagtcatagaggccccccccattaccgttctcgtagtc

SEQ ID NO: 33440 - DNA, 50 bp, unidentified
  source 1..50: mol_type = unassigned DNA; note = donor_4bbde19
  misc_feature 1..23: note = RE
  misc_feature 24..25: note = Core
  misc_feature 26..50: note = LE
taatttgcaaattaacatagaacatggtaagtttgcaataagaaaaataa

SEQ ID NO: 33441 - DNA, 50 bp, unidentified
  source 1..50: mol_type = unassigned DNA; note = donor_4bca9e6
  misc_feature 1..23: note = RE
  misc_feature 24..25: note = Core
  misc_feature 26..50: note = LE
atcccttggaattgtcatagaaatcctttagacttgcattattatattta

SEQ ID NO: 33442 - DNA, 50 bp, unidentified
  source 1..50: mol_type = unassigned DNA; note = donor_4bd12bd
  misc_feature 1..23: note = RE
  misc_feature 24..25: note = Core
  misc_feature 26..50: note = LE
tatattgacttcatatagttagtcttgtataatgaacatatagtaaaaat

SEQ ID NO: 33443 - DNA, 50 bp, unidentified; identical to SEQ ID NO: 30750
  source 1..50: mol_type = unassigned DNA; note = donor_4be331a
  misc_feature 1..22: note = RE
  misc_feature 23..25: note = Core
  misc_feature 26..50: note = LE

SEQ ID NO: 33444 - DNA, 50 bp, unidentified
  source 1..50: mol_type = unassigned DNA; note = donor_4c0f6b5
  misc_feature 1..24: note = RE
  misc_feature 25: note = Core
  misc_feature 26..50: note = LE
ttgcaaaccgggggcgtccatgtataatggaatggacgccccctttcacg

SEQ ID NO: 33445 - DNA, 50 bp, unidentified; identical to SEQ ID NO: 30451
  source 1..50: mol_type = unassigned DNA; note = donor_4c1af9a
  misc_feature 1..23: note = RE
  misc_feature 24..25: note = Core
  misc_feature 26..50: note = LE

SEQ ID NO: 33446 - DNA, 50 bp, unidentified
  source 1..50: mol_type = unassigned DNA; note = donor_4c25a00
  misc_feature 1..22: note = RE
  misc_feature 23..25: note = Core
  misc_feature 26..50: note = LE
gactcttggaacgctattagacaacatggggtaatcgcggcgcgatcgtc

SEQ ID NO: 33447 - DNA, 50 bp, unidentified
  source 1..50: mol_type = unassigned DNA; note = donor_4c2a5bc
  misc_feature 1..24: note = RE
  misc_feature 25: note = Core
  misc_feature 26..50: note = LE
gaggttgacaagactataggaacacattacgttgttagcagttccgtttg

SEQ ID NO: 33448 - DNA, 50 bp, unidentified
  source 1..50: mol_type = unassigned DNA; note = donor_4c3a937
  misc_feature 1..24: note = RE
  misc_feature 25: note = Core
  misc_feature 26..50: note = LE
tgcacggacggggcggaccatacataatgggatggtccgccccgtcctcc

SEQ ID NO: 33449 - DNA, 50 bp, unidentified
  source 1..50: mol_type = unassigned DNA; note = donor_4c41907
  misc_feature 1..24: note = RE
  misc_feature 25: note = Core
  misc_feature 26..50: note = LE
caccccttgacaacagaagggagcctactagacgattctcctaggaccgg

SEQ ID NO: 33450 - DNA, 50 bp, unidentified
  source 1..50: mol_type = unassigned DNA; note = donor_4c473ef
  misc_feature 1..23: note = RE
  misc_feature 24..25: note = Core
  misc_feature 26..50: note = LE
gcaacgcaggggccgtccacacatgatggggtggacggcccctgctcagc

SEQ ID NO: 33451 - DNA, 50 bp, unidentified
  source 1..50: mol_type = unassigned DNA; note = donor_4c47d85
  misc_feature 1..23: note = RE
  misc_feature 24..25: note = Core
  misc_feature 26..50: note = LE
caaaaaggagggtgaccatagatttaatgagatggtcaccctccacccca

SEQ ID NO: 33452 - DNA, 50 bp, unidentified
  source 1..50: mol_type = unassigned DNA; note = donor_4c4d20d
  misc_feature 1..23: note = RE
  misc_feature 24..25: note = Core
  misc_feature 26..50: note = LE
atgcttaaatctcaagacagttgcttgtatctctcggcatacggcatact

SEQ ID NO: 33453 - DNA, 50 bp, unidentified
  source 1..50: mol_type = unassigned DNA; note = donor_4c5cf39
  misc_feature 1..22: note = RE
  misc_feature 23..25: note = Core
  misc_feature 26..50: note = LE
caaaccgggaggcgttcatataagatgttatgaacgcctccctcccccct

SEQ ID NO: 33454 - DNA, 50 bp, unidentified
  source 1..50: mol_type = unassigned DNA; note = donor_4c60817
  misc_feature 1..21: note = RE
  misc_feature 22..25: note = Core
  misc_feature 26..50: note = LE
tctcttgattttgccatagaaatccattaggtttgttttatatttaaaga

SEQ ID NO: 33455 - DNA, 50 bp, unidentified
  source 1..50: mol_type = unassigned DNA; note = donor_4c64904
  misc_feature 1..23: note = RE
  misc_feature 24..25: note = Core
  misc_feature 26..50: note = LE
gactaatcgaggcccgttacagaagatggggtaacgggccccggtccgcc

SEQ ID NO: 33456 - DNA, 50 bp, unidentified; identical to SEQ ID NO: 33190
  source 1..50: mol_type = unassigned DNA; note = donor_4c6a85c
  misc_feature 1..24: note = RE
  misc_feature 25: note = Core
  misc_feature 26..50: note = LE

SEQ ID NO: 33457 - DNA, 50 bp, unidentified
  source 1..50: mol_type = unassigned DNA; note = donor_4c6b100
  misc_feature 1..23: note = RE
  misc_feature 24..25: note = Core
  misc_feature 26..50: note = LE
tcccttgacttttcatagttggtctcgtatgattaagttaggtttttagg

SEQ ID NO: 33458 - DNA, 50 bp, unidentified
  source 1..50: mol_type = unassigned DNA; note = donor_4c6f89f
  misc_feature 1..24: note = RE
  misc_feature 25: note = Core
  misc_feature 26..50: note = LE
attatcttgacttttcatagttggtgtatgataaatatataaaaatattt

SEQ ID NO: 33459 - DNA, 50 bp, unidentified
  source 1..50: mol_type = unassigned DNA; note = donor_4c72261
  misc_feature 1..23: note = RE
  misc_feature 24..25: note = Core
  misc_feature 26..50: note = LE
gttcttgactcctattagctggtttcgtattatagagttaaccagttttt

SEQ ID NO: 33460 - DNA, 50 bp, unidentified
  source 1..50: mol_type = unassigned DNA; note = donor_4c7cc5c
  misc_feature 1..23: note = RE
  misc_feature 24..25: note = Core
  misc_feature 26..50: note = LE
gcattcgacggggcgtccacacacgatggggtggacgccccaccaacggc

SEQ ID NO: 33461 - DNA, 50 bp, unidentified
  source 1..50: mol_type = unassigned DNA; note = donor_4c800a3
  misc_feature 1..22: note = RE
  misc_feature 23..25: note = Core
  misc_feature 26..50: note = LE
cttgacagaagacataggggcacccgttatctttttgatagtccctaaaa

SEQ ID NO: 33462 - DNA, 50 bp, unidentified
  source 1..50: mol_type = unassigned DNA; note = donor_4c841c4
  misc_feature 1..23: note = RE
  misc_feature 24..25: note = Core
  misc_feature 26..50: note = LE
ctagttgaaaaggaacacagttgcttgtatgtttacttcagtctttcaaa

SEQ ID NO: 33463 - DNA, 50 bp, unidentified
  source 1..50: mol_type = unassigned DNA; note = donor_4c884a9
  misc_feature 1..21: note = RE
  misc_feature 22..25: note = Core
  misc_feature 26..50: note = LE
aggcggcttgacatagggctactcactggtccaccatccccgtgtcggtg

SEQ ID NO: 33464 - DNA, 50 bp, unidentified
  source 1..50: mol_type = unassigned DNA; note = donor_4c8879b
  misc_feature 1..23: note = RE
  misc_feature 24..25: note = Core
  misc_feature 26..50: note = LE
tgtcttgacttttaatagtcagtctcgtattataatgtgtagccaatctt

SEQ ID NO: 33465 - DNA, 50 bp, unidentified
  source 1..50: mol_type = unassigned DNA; note = donor_4c8f1cd
  misc_feature 1..24: note = RE
  misc_feature 25: note = Core
  misc_feature 26..50: note = LE
cacggtattgacatagaggggcgcctacttgttgtattgacgtacggccg

SEQ ID NO: 33466 - DNA, 50 bp, unidentified
  source 1..50: mol_type = unassigned DNA; note = donor_4cb376a
  misc_feature 1..23: note = RE
  misc_feature 24..25: note = Core
  misc_feature 26..50: note = LE
tgacttggtgggaagtccctgtaaagaatacgaagggacttcccgcttcc

SEQ ID NO: 33467 - DNA, 50 bp, unidentified
  source 1..50: mol_type = unassigned DNA; note = donor_4cb6bdd
  misc_feature 1..23: note = RE
  misc_feature 24..25: note = Core
  misc_feature 26..50: note = LE
tcattaggattttaagatagtacctcatatctttgctttgaatacagata

SEQ ID NO: 33468 - DNA, 50 bp, unidentified
  source 1..50: mol_type = unassigned DNA; note = donor_4cbfd44
  misc_feature 1..24: note = RE
  misc_feature 25: note = Core
  misc_feature 26..50: note = LE
tgcacggacggggcggaccatacataatgggatggcccgccccgtcctcc

SEQ ID NO: 33469 - DNA, 50 bp, unidentified; identical to SEQ ID NO: 31151
  source 1..50: mol_type = unassigned DNA; note = donor_4cc2679
  misc_feature 1..22: note = RE
  misc_feature 23..25: note = Core
  misc_feature 26..50: note = LE

SEQ ID NO: 33470 - DNA, 50 bp, unidentified
  source 1..50: mol_type = unassigned DNA; note = donor_4cca21c
  misc_feature 1..24: note = RE
  misc_feature 25: note = Core
  misc_feature 26..50: note = LE
tgcaaaacgggaggcgtccatataatggtatggacgcctcccacccgtga

SEQ ID NO: 33471 - DNA, 50 bp, unidentified
  source 1..50: mol_type = unassigned DNA; note = donor_4ccce44
  misc_feature 1..24: note = RE
  misc_feature 25: note = Core
  misc_feature 26..50: note = LE
attggaggtttttgacatagaaagctctaagtttgcagcaagaaacttaa

SEQ ID NO: 33472 - DNA, 50 bp, unidentified
  source 1..50: mol_type = unassigned DNA; note = donor_4ccef76
  misc_feature 1..23: note = RE
  misc_feature 24..25: note = Core
  misc_feature 26..50: note = LE
ccgcttgacggtcaagacggttgcttgtatctttaggcctcggaccaact

SEQ ID NO: 33473 - DNA, 50 bp, unidentified
  source 1..50: mol_type = unassigned DNA; note = donor_4cd00be
  misc_feature 1..24: note = RE
  misc_feature 25: note = Core
  misc_feature 26..50: note = LE
cttgcagacggggcgggccatacgtatggaatggcccgcccctcaccatc

SEQ ID NO: 33474 - DNA, 50 bp, unidentified
  source 1..50: mol_type = unassigned DNA; note = donor_4cd0b5e
  misc_feature 1..23: note = RE
  misc_feature 24..25: note = Core
  misc_feature 26..50: note = LE
aaaagttaaattaatatagtatacttgtataatgattttacccataactc

SEQ ID NO: 33475 - DNA, 50 bp, unidentified
  source 1..50: mol_type = unassigned DNA; note = donor_4cd4cd3
  misc_feature 1..20: note = RE
  misc_feature 21..25: note = Core
  misc_feature 26..50: note = LE
ctcttgactatttatagtttgtcacgtataatccaattatcctcttttga

SEQ ID NO: 33476 - DNA, 50 bp, unidentified
  source 1..50: mol_type = unassigned DNA; note = donor_4cd84b7
  misc_feature 1..23: note = RE
  misc_feature 24..25: note = Core
  misc_feature 26..50: note = LE
gtaacacccggggcgtccatatatgatgtgatggacgccccttcctaagt

SEQ ID NO: 33477 - DNA, 50 bp, unidentified
  source 1..50: mol_type = unassigned DNA; note = donor_4ce0868
  misc_feature 1..23: note = RE
  misc_feature 24..25: note = Core
  misc_feature 26..50: note = LE
cttgcaacggggcgggccatacgttatggaatggcccgcccctttcccca

SEQ ID NO: 33478 - DNA, 50 bp, unidentified
  source 1..50: mol_type = unassigned DNA; note = donor_4ced496
  misc_feature 1..23: note = RE
  misc_feature 24..25: note = Core
  misc_feature 26..50: note = LE
gacgagatagggccgtgggatgtctaatgggaaccgccagcagccatgag

SEQ ID NO: 33479 - DNA, 50 bp, unidentified
  source 1..50: mol_type = unassigned DNA; note = donor_4cf20ec
  misc_feature 1..23: note = RE
  misc_feature 24..25: note = Core
  misc_feature 26..50: note = LE
gaaagtgggggcgagtccatacataattggatggactcgcccaagccgag

SEQ ID NO: 33480 - DNA, 50 bp, unidentified
  source 1..50: mol_type = unassigned DNA; note = donor_4cf4f86
  misc_feature 1..22: note = RE
  misc_feature 23..25: note = Core
  misc_feature 26..50: note = LE
acaccttccgaacctggggtgtctaatgggttccgatcggcgttgcttcc

SEQ ID NO: 33481 - DNA, 50 bp, unidentified
  source 1..50: mol_type = unassigned DNA; note = donor_4d0e404
  misc_feature 1..24: note = RE
  misc_feature 25: note = Core
  misc_feature 26..50: note = LE
tctgatccgggaagctttcacactaattaccatgccgaccgttgcatggt

SEQ ID NO: 33482 - DNA, 50 bp, unidentified
  source 1..50: mol_type = unassigned DNA; note = donor_4d13e30
  misc_feature 1..22: note = RE
  misc_feature 23..25: note = Core
  misc_feature 26..50: note = LE
actgttgacaacccttagcgagtttagtacggtataagcgtagtcggcaa

SEQ ID NO: 33483 - DNA, 50 bp, unidentified
  source 1..50: mol_type = unassigned DNA; note = donor_4d200fa
  misc_feature 1..24: note = RE
  misc_feature 25: note = Core
  misc_feature 26..50: note = LE
acggcttgacgaaagccatagaggcgttaccttcttcatggcctcgcgat

SEQ ID NO: 33484 - DNA, 50 bp, unidentified
  source 1..50: mol_type = unassigned DNA; note = donor_4d2af3e
  misc_feature 1..23: note = RE
  misc_feature 24..25: note = Core
  misc_feature 26..50: note = LE
gggcttgacttttaatagttagtcttgtattatagagtcgtagtttttat

SEQ ID NO: 33485 - DNA, 50 bp, unidentified
  source 1..50: mol_type = unassigned DNA; note = donor_4d3145d
  misc_feature 1..23: note = RE
  misc_feature 24..25: note = Core
  misc_feature 26..50: note = LE
ttgcaaactgggtgggtccatatataatgtaatggacccacccttttata

SEQ ID NO: 33486 - DNA, 50 bp, unidentified
  source 1..50: mol_type = unassigned DNA; note = donor_4d34292
  misc_feature 1..22: note = RE
  misc_feature 23..25: note = Core
  misc_feature 26..50: note = LE
caacgcaggggccgtccatacatgatgggatggacggcccctgcaccccg

SEQ ID NO: 33487 - DNA, 50 bp, unidentified
  source 1..50: mol_type = unassigned DNA; note = donor_4d37777
  misc_feature 1..24: note = RE
  misc_feature 25: note = Core
  misc_feature 26..50: note = LE
tggcaaaacaggggtgaccatctataatgggatggtcacccctgcccgaa

SEQ ID NO: 33488 - DNA, 50 bp, unidentified
  source 1..50: mol_type = unassigned DNA; note = donor_4d3a0be
  misc_feature 1..20: note = RE
  misc_feature 21..25: note = Core
  misc_feature 26..50: note = LE
gcgcgtcttgatactctactttagacaaaatggcgccccttctgggcttg

SEQ ID NO: 33489 - DNA, 50 bp, unidentified
  source 1..50: mol_type = unassigned DNA; note = donor_4d4894a
  misc_feature 1..23: note = RE
  misc_feature 24..25: note = Core
  misc_feature 26..50: note = LE
tttttcttgacttaacacggtagcttgtatgtaataacaatgtggtggtt

SEQ ID NO: 33490 - DNA, 50 bp, unidentified
  source 1..50: mol_type = unassigned DNA; note = donor_4d4f18a
  misc_feature 1..23: note = RE
  misc_feature 24..25: note = Core
  misc_feature 26..50: note = LE
agcccgaggttgacagagggtgtctgatggctctaccttcccttcgcacg

SEQ ID NO: 33491 - DNA, 50 bp, unidentified
  source 1..50: mol_type = unassigned DNA; note = donor_4d50786
  misc_feature 1..23: note = RE
  misc_feature 24..25: note = Core
  misc_feature 26..50: note = LE
gcagggcggggggcgtccatagatgatgagatggacgtcccccgttttcg

SEQ ID NO: 33492 - DNA, 50 bp, unidentified; identical to SEQ ID NO: 30507
  source 1..50: mol_type = unassigned DNA; note = donor_4d5b1e3
  misc_feature 1..23: note = RE
  misc_feature 24..25: note = Core
  misc_feature 26..50: note = LE

SEQ ID NO: 33493 - DNA, 50 bp, unidentified
  source 1..50: mol_type = unassigned DNA; note = donor_4d5c6af
  misc_feature 1..23: note = RE
  misc_feature 24..25: note = Core
  misc_feature 26..50: note = LE
ttacttgacttcatatagttagtcttgtataatgaaatagagctatataa

SEQ ID NO: 33494 - DNA, 50 bp, unidentified
  source 1..50: mol_type = unassigned DNA; note = donor_4d5ee28
  misc_feature 1..23: note = RE
  misc_feature 24..25: note = Core
  misc_feature 26..50: note = LE
ctgcttgacaacagcattaggaagctctaccgtcttgatcgggttgatcg

SEQ ID NO: 33495 - DNA, 50 bp, unidentified
  source 1..50: mol_type = unassigned DNA; note = donor_4d62f2f
  misc_feature 1..24: note = RE
  misc_feature 25: note = Core
  misc_feature 26..50: note = LE
tgcacatcgggaggcgtccatataatggtatggacgcctcccacttcgag

SEQ ID NO: 33496 - DNA, 50 bp, unidentified
  source 1..50: mol_type = unassigned DNA; note = donor_4d64827
  misc_feature 1..23: note = RE
  misc_feature 24..25: note = Core
  misc_feature 26..50: note = LE
tttcttgacatttgatagctggtctcgtatattggagatgtagtaaaaac

SEQ ID NO: 33497 - DNA, 50 bp, unidentified
  source 1..50: mol_type = unassigned DNA; note = donor_4d6509b
  misc_feature 1..24: note = RE
  misc_feature 25: note = Core
  misc_feature 26..50: note = LE
tcttgcagacgggcgggccatacgtatgggatggcccgccctttcaccca

SEQ ID NO: 33498 - DNA, 50 bp, unidentified
  source 1..50: mol_type = unassigned DNA; note = donor_4d67a07
  misc_feature 1..23: note = RE
  misc_feature 24..25: note = Core
  misc_feature 26..50: note = LE
gcccgcagggggcgtccacataggatggggtggacgccccctgctcgccg

SEQ ID NO: 33499 - DNA, 50 bp, unidentified
  source 1..50: mol_type = unassigned DNA; note = donor_4d6af83
  misc_feature 1..24: note = RE
  misc_feature 25: note = Core
  misc_feature 26..50: note = LE
tcttgacaacggtcatttcataacataatatgaaatgacctcctagttgt

SEQ ID NO: 33500 - DNA, 50 bp, unidentified
  source 1..50: mol_type = unassigned DNA; note = donor_4d78b3c
  misc_feature 1..23: note = RE
  misc_feature 24..25: note = Core
  misc_feature 26..50: note = LE
tgacatccaagctcatgggatgtctaatgagagctaccgagttggtcatc

SEQ ID NO: 33501 - DNA, 50 bp, unidentified; identical to SEQ ID NO: 30354
  source 1..50: mol_type = unassigned DNA; note = donor_4d7e79c
  misc_feature 1..23: note = RE
  misc_feature 24..25: note = Core
  misc_feature 26..50: note = LE

SEQ ID NO: 33502 - DNA, 50 bp, unidentified
  source 1..50: mol_type = unassigned DNA; note = donor_4d80ff6
  misc_feature 1..23: note = RE
  misc_feature 24..25: note = Core
  misc_feature 26..50: note = LE
tgacattccagctccaggggtgtctaatgggagctgaccgggttcgtctg

SEQ ID NO: 33503 - DNA, 50 bp, unidentified
  source 1..50: mol_type = unassigned DNA; note = donor_4d8991a
  misc_feature 1..23: note = RE
  misc_feature 24..25: note = Core
  misc_feature 26..50: note = LE
aattttattgttcaagacagttgcttgtatcttgttgttcagctaaaata

SEQ ID NO: 33504 - DNA, 50 bp, unidentified
  source 1..50: mol_type = unassigned DNA; note = donor_4d89ed3
  misc_feature 1..23: note = RE
  misc_feature 24..25: note = Core
  misc_feature 26..50: note = LE
gggcttgacttttaatagttagtcttgtattatagagtagtagttattat

SEQ ID NO: 33505 - DNA, 50 bp, unidentified
  source 1..50: mol_type = unassigned DNA; note = donor_4d8f74d
  misc_feature 1..23: note = RE
  misc_feature 24..25: note = Core
  misc_feature 26..50: note = LE
gcatcaaaggcggcaaccatagaagatggaatggttgccgccctccccaa

SEQ ID NO: 33506 - DNA, 50 bp, unidentified; identical to SEQ ID NO: 31454
  source 1..50: mol_type = unassigned DNA; note = donor_4d900c8
  misc_feature 1..23: note = RE
  misc_feature 24..25: note = Core
  misc_feature 26..50: note = LE

SEQ ID NO: 33507 - DNA, 50 bp, unidentified
  source 1..50: mol_type = unassigned DNA; note = donor_4d9dc48
  misc_feature 1..23: note = RE
  misc_feature 24..25: note = Core
  misc_feature 26..50: note = LE
gcacttgactcggaagacggttacttgtatctttaaaccggcccagcgcg

SEQ ID NO: 33508 - DNA, 50 bp, unidentified
  source 1..50: mol_type = unassigned DNA; note = donor_4d9f5d6
  misc_feature 1..23: note = RE
  misc_feature 24..25: note = Core
  misc_feature 26..50: note = LE
aattttaacgctcaagacagttgcttgtatcttgaaaacgatttagaata

SEQ ID NO: 33509 - DNA, 50 bp, unidentified
  source 1..50: mol_type = unassigned DNA; note = donor_4da1e50
  misc_feature 1..23: note = RE
  misc_feature 24..25: note = Core
  misc_feature 26..50: note = LE
gcaaaacggctggcatccacacaagatggggtggatgccagccttctccg

SEQ ID NO: 33510 - DNA, 50 bp, unidentified
  source 1..50: mol_type = unassigned DNA; note = donor_4da92c6
  misc_feature 1..24: note = RE
  misc_feature 25: note = Core
  misc_feature 26..50: note = LE
acatttggatattaacatagaaagctctaagtttgcagaagaaagcaatt

SEQ ID NO: 33511 - DNA, 50 bp, unidentified
  source 1..50: mol_type = unassigned DNA; note = donor_4db2ece
  misc_feature 1..22: note = RE
  misc_feature 23..25: note = Core
  misc_feature 26..50: note = LE
caaaaaaggagccatccacacaggatggtgtggatggctcctgcaccacc

SEQ ID NO: 33512 - DNA, 50 bp, unidentified
  source 1..50: mol_type = unassigned DNA; note = donor_4dba40d
  misc_feature 1..23: note = RE
  misc_feature 24..25: note = Core
  misc_feature 26..50: note = LE
tgactccccacatcctgggatgtctaatgacaaataacgagttgcctgtg

SEQ ID NO: 33513 - DNA, 50 bp, unidentified
  source 1..50: mol_type = unassigned DNA; note = donor_4dba94b
  misc_feature 1..24: note = RE
  misc_feature 25: note = Core
  misc_feature 26..50: note = LE
gcctattgactttttatttgcaggcctgttactatatatttggttgggga

SEQ ID NO: 33514 - DNA, 50 bp, unidentified
  source 1..50: mol_type = unassigned DNA; note = donor_4dbcec0
  misc_feature 1..23: note = RE
  misc_feature 24..25: note = Core
  misc_feature 26..50: note = LE
ttgcggacgggcgagccatacgtttatggaatggctcgcccactcaggct

SEQ ID NO: 33515 - DNA, 50 bp, unidentified
  source 1..50: mol_type = unassigned DNA; note = donor_4dc8e7d
  misc_feature 1..23: note = RE
  misc_feature 24..25: note = Core
  misc_feature 26..50: note = LE
tgacatctaagcccctgggatgtctaatgagagctagcgagtcggccgtc

SEQ ID NO: 33516 - DNA, 50 bp, unidentified; identical to SEQ ID NO: 31948
  source 1..50: mol_type = unassigned DNA; note = donor_4dc98bf
  misc_feature 1..23: note = RE
  misc_feature 24..25: note = Core
  misc_feature 26..50: note = LE

SEQ ID NO: 33517 - DNA, 50 bp, unidentified
  source 1..50: mol_type = unassigned DNA; note = donor_4dcdf20
  misc_feature 1..23: note = RE
  misc_feature 24..25: note = Core
  misc_feature 26..50: note = LE
atacggcggggtagacatagaatcttgtatggcgttagggtaggaacctg

SEQ ID NO: 33518 - DNA, 50 bp, unidentified
  source 1..50: mol_type = unassigned DNA; note = donor_4dd2b63
  misc_feature 1..24: note = RE
  misc_feature 25: note = Core
  misc_feature 26..50: note = LE
gtcttgacttttaatagttagacttcgtattataaagtagtagtgtttat

SEQ ID NO: 33519 - DNA, 50 bp, unidentified
  source 1..50: mol_type = unassigned DNA; note = donor_4dd9c9c
  misc_feature 1..23: note = RE
  misc_feature 24..25: note = Core
  misc_feature 26..50: note = LE
cgcctgaacgaacaacacagttgcttgtatgtcgagaaaggagcattgtg

SEQ ID NO: 33520 - DNA, 50 bp, unidentified
  source 1..50: mol_type = unassigned DNA; note = donor_4ddcc93
  misc_feature 1..23: note = RE
  misc_feature 24..25: note = Core
  misc_feature 26..50: note = LE
cccttgacgggtcaatccataccagacatgatggattgacctgccccgcc

SEQ ID NO: 33521 - DNA, 50 bp, unidentified
  source 1..50: mol_type = unassigned DNA; note = donor_4dde628
  misc_feature 1..24: note = RE
  misc_feature 25: note = Core
  misc_feature 26..50: note = LE
caaacttgacgaaagacatagaggcgttatgtttttcgtggtcctgcaag

SEQ ID NO: 33522 - DNA, 50 bp, unidentified
  source 1..50: mol_type = unassigned DNA; note = donor_4de60b5
  misc_feature 1..23: note = RE
  misc_feature 24..25: note = Core
  misc_feature 26..50: note = LE
gcattcgagggggcgtccacacacgatggggtggacgcccccgacggcat

SEQ ID NO: 33523 - DNA, 50 bp, unidentified
  source 1..50: mol_type = unassigned DNA; note = donor_4dec58f
  misc_feature 1..22: note = RE
  misc_feature 23..25: note = Core
  misc_feature 26..50: note = LE
aagcttgacaagcgttagctggtttcgtattatcaggtcagccagaattt

SEQ ID NO: 33524 - DNA, 50 bp, unidentified
  source 1..50: mol_type = unassigned DNA; note = donor_4df1d33
  misc_feature 1..23: note = RE
  misc_feature 24..25: note = Core
  misc_feature 26..50: note = LE
aacacccttgaccaagacggatacttgtctcagactttccgtggctcttc

SEQ ID NO: 33525 - DNA, 50 bp, unidentified; identical to SEQ ID NO: 30383
  source 1..50: mol_type = unassigned DNA; note = donor_4df2856
  misc_feature 1..23: note = RE
  misc_feature 24..25: note = Core
  misc_feature 26..50: note = LE

SEQ ID NO: 33526 - DNA, 50 bp, unidentified
  source 1..50: mol_type = unassigned DNA; note = donor_4df9ac7
  misc_feature 1..23: note = RE
  misc_feature 24..25: note = Core
  misc_feature 26..50: note = LE
gcaatacaggggaagaccatatacgatgagatggtcttccccctcctttc

SEQ ID NO: 33527 - DNA, 50 bp, unidentified
  source 1..50: mol_type = unassigned DNA; note = donor_4dfe501
  misc_feature 1..23: note = RE
  misc_feature 24..25: note = Core
  misc_feature 26..50: note = LE
gcgttcgaaggggcgtccacagatgatggggtggacgccccccggcggca

SEQ ID NO: 33528 - DNA, 50 bp, unidentified
  source 1..50: mol_type = unassigned DNA; note = donor_4e00acc
  misc_feature 1..23: note = RE
  misc_feature 24..25: note = Core
  misc_feature 26..50: note = LE
gcaatcatgaggggaaccatacattaatgaaatggttccccctcgctttt

SEQ ID NO: 33529 - DNA, 50 bp, unidentified
  source 1..50: mol_type = unassigned DNA; note = donor_4e0b18c
  misc_feature 1..24: note = RE
  misc_feature 25: note = Core
  misc_feature 26..50: note = LE
ggggcttgactttttgtttgtaggcctgttgctttaatatttgccccttg

SEQ ID NO: 33530 - DNA, 50 bp, unidentified
  source 1..50: mol_type = unassigned DNA; note = donor_4e22371
  misc_feature 1..23: note = RE
  misc_feature 24..25: note = Core
  misc_feature 26..50: note = LE
tcttgacaggtttaatacatatcagacataatgaattaaacctgtccgac

SEQ ID NO: 33531 - DNA, 50 bp, unidentified
  source 1..50: mol_type = unassigned DNA; note = donor_4e259a8
  misc_feature 1..24: note = RE
  misc_feature 25: note = Core
  misc_feature 26..50: note = LE
tgcaaacgaggaggagtccatacacaatgggatggactcctcctcaccct

SEQ ID NO: 33532 - DNA, 50 bp, unidentified
  source 1..50: mol_type = unassigned DNA; note = donor_4e26f20
  misc_feature 1..23: note = RE
  misc_feature 24..25: note = Core
  misc_feature 26..50: note = LE
gaccccaaccggccgattagagaagatggggtaatcggccggcccaactt

SEQ ID NO: 33533 - DNA, 50 bp, unidentified
  source 1..50: mol_type = unassigned DNA; note = donor_4e2aa95
  misc_feature 1..23: note = RE
  misc_feature 24..25: note = Core
  misc_feature 26..50: note = LE
tgacatctcagctcctggggtgtctaatgggagctgtcgggtcagccgct

SEQ ID NO: 33534 - DNA, 50 bp, unidentified
  source 1..50: mol_type = unassigned DNA; note = donor_4e2ee4b
  misc_feature 1..23: note = RE
  misc_feature 24..25: note = Core
  misc_feature 26..50: note = LE
ttgcaaccggggcgggccatacgttatggatggcccgcccctcctgccga

SEQ ID NO: 33535 - DNA, 50 bp, unidentified
  source 1..50: mol_type = unassigned DNA; note = donor_4e34f9c
  misc_feature 1..23: note = RE
  misc_feature 24..25: note = Core
  misc_feature 26..50: note = LE
atacttgactttttattagtaggctcctaatatataagttgtagggatta

SEQ ID NO: 33536 - DNA, 50 bp, unidentified
  source 1..50: mol_type = unassigned DNA; note = donor_4e37fc0
  misc_feature 1..22: note = RE
  misc_feature 23..25: note = Core
  misc_feature 26..50: note = LE
aatatcaataaaagaaagtagagagcattcctgtaattcataaatagcac

SEQ ID NO: 33537 - DNA, 50 bp, unidentified
  source 1..50: mol_type = unassigned DNA; note = donor_4e441ec
  misc_feature 1..23: note = RE
  misc_feature 24..25: note = Core
  misc_feature 26..50: note = LE
agctcttgacttttgttagcaggttagtaccataaaagtgtagttgttag

SEQ ID NO: 33538 - DNA, 50 bp, unidentified
  source 1..50: mol_type = unassigned DNA; note = donor_4e4b74d
  misc_feature 1..23: note = RE
  misc_feature 24..25: note = Core
  misc_feature 26..50: note = LE
gccaacagggggccgtccacacatgatgcagtggacggctcccatccgag

SEQ ID NO: 33539 - DNA, 50 bp, unidentified
  source 1..50: mol_type = unassigned DNA; note = donor_4e52b01
  misc_feature 1..23: note = RE
  misc_feature 24..25: note = Core
  misc_feature 26..50: note = LE
acagcttgacaatgtcataatattccattagacttaataagtaaaaagat

SEQ ID NO: 33540 - DNA, 50 bp, unidentified
  source 1..50: mol_type = unassigned DNA; note = donor_4e55af3
  misc_feature 1..23: note = RE
  misc_feature 24..25: note = Core
  misc_feature 26..50: note = LE
gcttgaaatttccagcgggatgatctaccatcggaatttagcaggtagca

SEQ ID NO: 33541 - DNA, 50 bp, unidentified
  source 1..50: mol_type = unassigned DNA; note = donor_4e57ff5
  misc_feature 1..23: note = RE
  misc_feature 24..25: note = Core
  misc_feature 26..50: note = LE
aggagccgtcattgacatagaatcttgtatggcgttagggtaggaacctg

SEQ ID NO: 33542 - DNA, 50 bp, unidentified
  source 1..50: mol_type = unassigned DNA; note = donor_4e590f9
  misc_feature 1..23: note = RE
  misc_feature 24..25: note = Core
  misc_feature 26..50: note = LE
gacaagtaccgcccgtgggatgtctaatgggggtccaccgctgatcggag

SEQ ID NO: 33543 - DNA, 50 bp, unidentified
  source 1..50: mol_type = unassigned DNA; note = donor_4e68b74
  misc_feature 1..24: note = RE
  misc_feature 25: note = Core
  misc_feature 26..50: note = LE
cttgcagacggggcgggccatacgtatggaatggcccgcccctctcctcc

SEQ ID NO: 33544 - DNA, 50 bp, unidentified
  source 1..50: mol_type = unassigned DNA; note = donor_4e819fc
  misc_feature 1..23: note = RE
  misc_feature 24..25: note = Core
  misc_feature 26..50: note = LE
gcaccggcgggggcgtccatacatgatggggtggacgccccctcgacggc

SEQ ID NO: 33545 - DNA, 50 bp, unidentified
  source 1..50: mol_type = unassigned DNA; note = donor_4e8c39a
  misc_feature 1..23: note = RE
  misc_feature 24..25: note = Core
  misc_feature 26..50: note = LE
ttgcttgacttttattagcaggtctgatacaatataattgaccgaagaaa

SEQ ID NO: 33546 - DNA, 50 bp, unidentified
  source 1..50: mol_type = unassigned DNA; note = donor_4e9459c
  misc_feature 1..23: note = RE
  misc_feature 24..25: note = Core
  misc_feature 26..50: note = LE
tgccagcgcctgaatcatggttgcttgtatgaggaaatcctgctatggat

SEQ ID NO: 33547 - DNA, 50 bp, unidentified
  source 1..50: mol_type = unassigned DNA; note = donor_4e979a5
  misc_feature 1..23: note = RE
  misc_feature 24..25: note = Core
  misc_feature 26..50: note = LE
agtgcttgacaaagtcatagtgttccattagactattaactatgaataat

SEQ ID NO: 33548 - DNA, 50 bp, unidentified
  source 1..50: mol_type = unassigned DNA; note = donor_4eaa831
  misc_feature 1..22: note = RE
  misc_feature 23..25: note = Core
  misc_feature 26..50: note = LE
ctcttgacttaatatagtttgtcttgtatatttaatttagtcagttaaaa

SEQ ID NO: 33549 - DNA, 50 bp, unidentified
  source 1..50: mol_type = unassigned DNA; note = donor_4ec11f5
  misc_feature 1..24: note = RE
  misc_feature 25: note = Core
  misc_feature 26..50: note = LE
tgcaaaatgggaggagtccatatataatggtatggactcctcctctctac

SEQ ID NO: 33550 - DNA, 50 bp, unidentified
  source 1..50: mol_type = unassigned DNA; note = donor_4ec4e4c
  misc_feature 1..23: note = RE
  misc_feature 24..25: note = Core
  misc_feature 26..50: note = LE
cggcttgacaacgtcattgggaatccatacctttcttcgtgggttgatcc

SEQ ID NO: 33551 - DNA, 50 bp, unidentified
  source 1..50: mol_type = unassigned DNA; note = donor_4ec64b7
  misc_feature 1..24: note = RE
  misc_feature 25: note = Core
  misc_feature 26..50: note = LE
aacgcttgtttttaacatagaatagctctagtcttgcaccatcgattagg

SEQ ID NO: 33552 - DNA, 50 bp, unidentified
  source 1..50: mol_type = unassigned DNA; note = donor_4ecbfcd
  misc_feature 1..23: note = RE
  misc_feature 24..25: note = Core
  misc_feature 26..50: note = LE
gcaatcacaggggcgtccatatatgatgtgatggacgcccccattaacgg

SEQ ID NO: 33553 - DNA, 50 bp, unidentified
  source 1..50: mol_type = unassigned DNA; note = donor_4ee0909
  misc_feature 1..23: note = RE
  misc_feature 24..25: note = Core
  misc_feature 26..50: note = LE
attgactttttattagcaggctttcctactatataagtacagggtgtaat

SEQ ID NO: 33554 - DNA, 50 bp, unidentified
  source 1..50: mol_type = unassigned DNA; note = donor_4ee6b8d
  misc_feature 1..22: note = RE
  misc_feature 23..25: note = Core
  misc_feature 26..50: note = LE
actgttgacaacccttagcgagtttagtacggtataaatgtagtcggcag

SEQ ID NO: 33555 - DNA, 50 bp, unidentified
  source 1..50: mol_type = unassigned DNA; note = donor_4eeee3d
  misc_feature 1..21: note = RE
  misc_feature 22..25: note = Core
  misc_feature 26..50: note = LE
atttttacgttcaagacagttgcttgtatcttggaaattggttaagataa

SEQ ID NO: 33556 - DNA, 50 bp, unidentified
  source 1..50: mol_type = unassigned DNA; note = donor_4ef02f7
  misc_feature 1..23: note = RE
  misc_feature 24..25: note = Core
  misc_feature 26..50: note = LE
cggcttgacaaacccattgagaatccttacggtttttgcagggtgttcgt

SEQ ID NO: 33557 - DNA, 50 bp, unidentified
  source 1..50: mol_type = unassigned DNA; note = donor_4f0b0a6
  misc_feature 1..24: note = RE
  misc_feature 25: note = Core
  misc_feature 26..50: note = LE
cggcctcttgacacagaggggagcctactaagagacttcacgcatgatcg

SEQ ID NO: 33558 - DNA, 50 bp, unidentified
  source 1..50: mol_type = unassigned DNA; note = donor_4f0e638
  misc_feature 1..21: note = RE
  misc_feature 22..25: note = Core
  misc_feature 26..50: note = LE
aggcgggttgacacagggcttctcactggtgcaccatcctttggtcagta

SEQ ID NO: 33559 - DNA, 50 bp, unidentified
  source 1..50: mol_type = unassigned DNA; note = donor_4f15322
  misc_feature 1..24: note = RE
  misc_feature 25: note = Core
  misc_feature 26..50: note = LE
catgatcccttgacataggagcttcacttcctcagaatggtggtgggttg

SEQ ID NO: 33560 - DNA, 50 bp, unidentified; identical to SEQ ID NO: 30934
  source 1..50: mol_type = unassigned DNA; note = donor_4f195a6
  misc_feature 1..23: note = RE
  misc_feature 24..25: note = Core
  misc_feature 26..50: note = LE

SEQ ID NO: 33561 - DNA, 50 bp, unidentified; identical to SEQ ID NO: 31849
  source 1..50: mol_type = unassigned DNA; note = donor_4f1f7b9
  misc_feature 1..24: note = RE
  misc_feature 25: note = Core
  misc_feature 26..50: note = LE

SEQ ID NO: 33562 - DNA, 50 bp, unidentified
  source 1..50: mol_type = unassigned DNA; note = donor_4f24618
  misc_feature 1..23: note = RE
  misc_feature 24..25: note = Core
  misc_feature 26..50: note = LE
tcaacccttgactaagacggatacttgtcttatgatttcacacggcttcc

SEQ ID NO: 33563 - DNA, 50 bp, unidentified
  source 1..50: mol_type = unassigned DNA; note = donor_4f24ae3
  misc_feature 1..23: note = RE
  misc_feature 24..25: note = Core
  misc_feature 26..50: note = LE
gacttcaacacgccgaatagagaagatggggtattcggcttcgccccacg

SEQ ID NO: 33564 - DNA, 50 bp, unidentified
  source 1..50: mol_type = unassigned DNA; note = donor_4f28bc2
  misc_feature 1..22: note = RE
  misc_feature 23..25: note = Core
  misc_feature 26..50: note = LE
caaaactggggccgtccacacatgatgttgtggacggctccacccgacgg

SEQ ID NO: 33565 - DNA, 50 bp, unidentified
  source 1..50: mol_type = unassigned DNA; note = donor_4f35dba
  misc_feature 1..24: note = RE
  misc_feature 25: note = Core
  misc_feature 26..50: note = LE
cggcaaactgggggcgtccatgtataatggaatggacgccccctgtccta

SEQ ID NO: 33566 - DNA, 50 bp, unidentified
  source 1..50: mol_type = unassigned DNA; note = donor_4f38058
  misc_feature 1..22: note = RE
  misc_feature 23..25: note = Core
  misc_feature 26..50: note = LE
catcgaaaggggcatccaaacatgatgggttggatgcccctcccaccggc

SEQ ID NO: 33567 - DNA, 50 bp, unidentified
  source 1..50: mol_type = unassigned DNA; note = donor_4f4a5c7
  misc_feature 1..23: note = RE
  misc_feature 24..25: note = Core
  misc_feature 26..50: note = LE
acctttgactttgaacagagtatcttgtatgatcaaaattaatattttac

SEQ ID NO: 33568 - DNA, 50 bp, unidentified
  source 1..50: mol_type = unassigned DNA; note = donor_4f4c3ef
  misc_feature 1..22: note = RE
  misc_feature 23..25: note = Core
  misc_feature 26..50: note = LE
ggggttgacaaacattagcaagattcgtaatatataagtagaggttttat

SEQ ID NO: 33569 - DNA, 50 bp, unidentified; identical to SEQ ID NO: 31238
  source 1..50: mol_type = unassigned DNA; note = donor_4f51f44
  misc_feature 1..24: note = RE
  misc_feature 25: note = Core
  misc_feature 26..50: note = LE

SEQ ID NO: 33570 - DNA, 50 bp, unidentified
  source 1..50: mol_type = unassigned DNA; note = donor_4f5a43d
  misc_feature 1..24: note = RE
  misc_feature 25: note = Core
  misc_feature 26..50: note = LE
ttattgacatttattagctggacttagtataataatggtgtagtcaatca

SEQ ID NO: 33571 - DNA, 50 bp, unidentified
  source 1..50: mol_type = unassigned DNA; note = donor_4f604b0
  misc_feature 1..23: note = RE
  misc_feature 24..25: note = Core
  misc_feature 26..50: note = LE
gcaccaagggcggcaaccatagaagatgggatggttgccgccctccccag

SEQ ID NO: 33572 - DNA, 50 bp, unidentified
  source 1..50: mol_type = unassigned DNA; note = donor_4f61775
  misc_feature 1..24: note = RE
  misc_feature 25: note = Core
  misc_feature 26..50: note = LE
ttgcaatacggggcggaccatatataatggaatggtccgcctcacttccc

SEQ ID NO: 33573 - DNA, 50 bp, unidentified
  source 1..50: mol_type = unassigned DNA; note = donor_4f6a81e
  misc_feature 1..24: note = RE
  misc_feature 25: note = Core
  misc_feature 26..50: note = LE
tggcaactggggggcgtccatgtataatggaatggacgcccccactttta

SEQ ID NO: 33574 - DNA, 50 bp, unidentified; identical to SEQ ID NO: 32122
  source 1..50: mol_type = unassigned DNA; note = donor_4f6ab98
  misc_feature 1..24: note = RE
  misc_feature 25: note = Core
  misc_feature 26..50: note = LE

SEQ ID NO: 33575 - DNA, 50 bp, unidentified
  source 1..50: mol_type = unassigned DNA; note = donor_4f753c9
  misc_feature 1..23: note = RE
  misc_feature 24..25: note = Core
  misc_feature 26..50: note = LE
tgccaatcggggccgtccacatatgatggtgtggacggccccacctcgac

SEQ ID NO: 33576 - DNA, 50 bp, unidentified
  source 1..50: mol_type = unassigned DNA; note = donor_4f7f223
  misc_feature 1..24: note = RE
  misc_feature 25: note = Core
  misc_feature 26..50: note = LE
ccgcttgacaaccccatagagacaccgttaccttcttgatcaagcccggt

SEQ ID NO: 33577 - DNA, 50 bp, unidentified; identical to SEQ ID NO: 31337
  source 1..50: mol_type = unassigned DNA; note = donor_4f88d95
  misc_feature 1..21: note = RE
  misc_feature 22..25: note = Core
  misc_feature 26..50: note = LE

SEQ ID NO: 33578 - DNA, 50 bp, unidentified
  source 1..50: mol_type = unassigned DNA; note = donor_4f9b312
  misc_feature 1..23: note = RE
  misc_feature 24..25: note = Core
  misc_feature 26..50: note = LE
acactaacccgccccaatagagaagatggggtattggggctggcctatgc

SEQ ID NO: 33579 - DNA, 50 bp, unidentified
  source 1..50: mol_type = unassigned DNA; note = donor_4f9ce99
  misc_feature 1..24: note = RE
  misc_feature 25: note = Core
  misc_feature 26..50: note = LE
tgcagaaatggggaagtccttatagaatgaaagggacttccccgtgccgg

SEQ ID NO: 33580 - DNA, 50 bp, unidentified; identical to SEQ ID NO: 31549
  source 1..50: mol_type = unassigned DNA; note = donor_4f9e4a2
  misc_feature 1..22: note = RE
  misc_feature 23..25: note = Core
  misc_feature 26..50: note = LE

SEQ ID NO: 33581 - DNA, 50 bp, unidentified
  source 1..50: mol_type = unassigned DNA; note = donor_4f9fae4
  misc_feature 1..24: note = RE
  misc_feature 25: note = Core
  misc_feature 26..50: note = LE
gtacttgacatctattagctggtttcgtattattaggtcagccagagatt

SEQ ID NO: 33582 - DNA, 50 bp, unidentified
  source 1..50: mol_type = unassigned DNA; note = donor_4fa16f3
  misc_feature 1..23: note = RE
  misc_feature 24..25: note = Core
  misc_feature 26..50: note = LE
acggttgaccttcaagacggtatcttgtatcttgtttcttgtggtaggta

SEQ ID NO: 33583 - DNA, 50 bp, unidentified; identical to SEQ ID NO: 31401
  source 1..50: mol_type = unassigned DNA; note = donor_4faade5
  misc_feature 1..23: note = RE
  misc_feature 24..25: note = Core
  misc_feature 26..50: note = LE

SEQ ID NO: 33584 - DNA, 50 bp, unidentified
  source 1..50: mol_type = unassigned DNA; note = donor_4fab5d1
  misc_feature 1..22: note = RE
  misc_feature 23..25: note = Core
  misc_feature 26..50: note = LE
ctattgacttttcatagcacgtcttgtactatagagttaaattaacaagc

SEQ ID NO: 33585 - DNA, 50 bp, unidentified
  source 1..50: mol_type = unassigned DNA; note = donor_4fab7b4
  misc_feature 1..24: note = RE
  misc_feature 25: note = Core
  misc_feature 26..50: note = LE
tgctattgactttttatttgcaggcctgttactatatatttggttgagga

SEQ ID NO: 33586 - DNA, 50 bp, unidentified
  source 1..50: mol_type = unassigned DNA; note = donor_4fb2ae5
  misc_feature 1..22: note = RE
  misc_feature 23..25: note = Core
  misc_feature 26..50: note = LE
ttccctctactttctttcacactaatctccattccgccgcctttcagttg

SEQ ID NO: 33587 - DNA, 50 bp, unidentified
  source 1..50: mol_type = unassigned DNA; note = donor_4fb78b6
  misc_feature 1..22: note = RE
  misc_feature 23..25: note = Core
  misc_feature 26..50: note = LE
cctattgatttttcttagcaggtttggtacaatattagcatagtcctaac

SEQ ID NO: 33588 - DNA, 50 bp, unidentified
  source 1..50: mol_type = unassigned DNA; note = donor_4fbc51a
  misc_feature 1..23: note = RE
  misc_feature 24..25: note = Core
  misc_feature 26..50: note = LE
aagcggcttgaccaagacggatacttgtcttatccagatcacggctgtgg

SEQ ID NO: 33589 - DNA, 50 bp, unidentified
  source 1..50: mol_type = unassigned DNA; note = donor_4fc88ab
  misc_feature 1..24: note = RE
  misc_feature 25: note = Core
  misc_feature 26..50: note = LE
tgcaatctgacggcggaccatacatattggaatggtccgccgcctgaacc

SEQ ID NO: 33590 - DNA, 50 bp, unidentified
  source 1..50: mol_type = unassigned DNA; note = donor_4fca984
  misc_feature 1..24: note = RE
  misc_feature 25: note = Core
  misc_feature 26..50: note = LE
tgcaagccgggaggagtccatatacaatgggatggactcctcccttctta

SEQ ID NO: 33591 - DNA, 50 bp, unidentified
  source 1..50: mol_type = unassigned DNA; note = donor_4fe2762
  misc_feature 1..24: note = RE
  misc_feature 25: note = Core
  misc_feature 26..50: note = LE
tgacaaaaagagggagtccatgtagaatgatatggactccctcttcccaa

SEQ ID NO: 33592 - DNA, 50 bp, unidentified
  source 1..50: mol_type = unassigned DNA; note = donor_4fe3b7b
  misc_feature 1..22: note = RE
  misc_feature 23..25: note = Core
  misc_feature 26..50: note = LE
cgcaacgggggccgtccacacatgatggggtggacggcccccgacccaac

SEQ ID NO: 33593 - DNA, 50 bp, unidentified
  source 1..50: mol_type = unassigned DNA; note = donor_4fe4fbb
  misc_feature 1..23: note = RE
  misc_feature 24..25: note = Core
  misc_feature 26..50: note = LE
gaacccaaggggccgtccacacatgttggggtggacggccccacggcatc

SEQ ID NO: 33594 - DNA, 50 bp, unidentified
  source 1..50: mol_type = unassigned DNA; note = donor_4fe7ea5
  misc_feature 1..21: note = RE
  misc_feature 22..25: note = Core
  misc_feature 26..50: note = LE
ggcttgactccggcattgagactccgtaagttgtttggtggcccgggagg

SEQ ID NO: 33595 - DNA, 50 bp, unidentified
  source 1..50: mol_type = unassigned DNA; note = donor_4fe83c3
  misc_feature 1..23: note = RE
  misc_feature 24..25: note = Core
  misc_feature 26..50: note = LE
gcatcacgggtggcaaccacagaagatggggtggttgccgccctcccaga

SEQ ID NO: 33596 - DNA, 50 bp, unidentified
  source 1..50: mol_type = unassigned DNA; note = donor_4fefdc0
  misc_feature 1..22: note = RE
  misc_feature 23..25: note = Core
  misc_feature 26..50: note = LE
actattgatttttattagcaagtttggtactataaaagtgtaataattaa

SEQ ID NO: 33597 - DNA, 50 bp, unidentified
  source 1..50: mol_type = unassigned DNA; note = donor_4ff4ab3
  misc_feature 1..23: note = RE
  misc_feature 24..25: note = Core
  misc_feature 26..50: note = LE
ggtctacgtcaaaaacacagttgcttgtgtccgcaaaatctgccagaatg

SEQ ID NO: 33598 - DNA, 50 bp, unidentified
  source 1..50: mol_type = unassigned DNA; note = donor_5006549
  misc_feature 1..22: note = RE
  misc_feature 23..25: note = Core
  misc_feature 26..50: note = LE
ttgacgaggaacatagggacaccccgttaccttgctggtgaccccgttgg

SEQ ID NO: 33599 - DNA, 50 bp, unidentified
  source 1..50: mol_type = unassigned DNA; note = donor_501a826
  misc_feature 1..23: note = RE
  misc_feature 24..25: note = Core
  misc_feature 26..50: note = LE
atttaccccttgacatagaaggtcttatacattaaactaagattgtcccc

SEQ ID NO: 33600 - DNA, 50 bp, unidentified
  source 1..50: mol_type = unassigned DNA; note = donor_501c9fe
  misc_feature 1..24: note = RE
  misc_feature 25: note = Core
  misc_feature 26..50: note = LE
tgcaaaaatgtggtggaccatagataatgggatggtccaccccgccccgc

SEQ ID NO: 33601 - DNA, 50 bp, unidentified
  source 1..50: mol_type = unassigned DNA; note = donor_501f83a
  misc_feature 1..23: note = RE
  misc_feature 24..25: note = Core
  misc_feature 26..50: note = LE
aagctgattgtgagagatggtatcttgtatctctcagtgattgatgttta

SEQ ID NO: 33602 - DNA, 50 bp, unidentified
  source 1..50: mol_type = unassigned DNA; note = donor_501ff46
  misc_feature 1..24: note = RE
  misc_feature 25: note = Core
  misc_feature 26..50: note = LE
tccccgcttgacacagaggggagcctacctgttgactgctcgtagctcgc

SEQ ID NO: 33603 - DNA, 50 bp, unidentified
  source 1..50: mol_type = unassigned DNA; note = donor_501ff69
  misc_feature 1..23: note = RE
  misc_feature 24..25: note = Core
  misc_feature 26..50: note = LE
gcttgacaagaaacatagggacaccgttaccttgttggtggcccctttgg

SEQ ID NO: 33604 - DNA, 50 bp, unidentified
  source 1..50: mol_type = unassigned DNA; note = donor_50246d0
  misc_feature 1..22: note = RE
  misc_feature 23..25: note = Core
  misc_feature 26..50: note = LE
cttgacacaaaaagccccatacaagatgctatggggcggcggcggggata

SEQ ID NO: 33605 - DNA, 50 bp, unidentified
  source 1..50: mol_type = unassigned DNA; note = donor_50264c4
  misc_feature 1..22: note = RE
  misc_feature 23..25: note = Core
  misc_feature 26..50: note = LE
ttatttgcttttaaacacagttcatcctatgtttgtaggactttgatgaa

SEQ ID NO: 33606 - DNA, 50 bp, unidentified
  source 1..50: mol_type = unassigned DNA; note = donor_502d553
  misc_feature 1..22: note = RE
  misc_feature 23..25: note = Core
  misc_feature 26..50: note = LE
cgcgaacgggggtatccatacatgatgggttggataccccctcccgacgg

SEQ ID NO: 33607 - DNA, 50 bp, unidentified
  source 1..50: mol_type = unassigned DNA; note = donor_502f696
  misc_feature 1..23: note = RE
  misc_feature 24..25: note = Core
  misc_feature 26..50: note = LE
tgcaaacggggaggcgttcatacagaatgagatgaacgccccccactcat

SEQ ID NO: 33608 - DNA, 50 bp, unidentified
  source 1..50: mol_type = unassigned DNA; note = donor_503a7a5
  misc_feature 1..24: note = RE
  misc_feature 25: note = Core
  misc_feature 26..50: note = LE
ttggcataacggagcgtccatgtataatggcatggacgctcctactttgc

SEQ ID NO: 33609 - DNA, 50 bp, unidentified
  source 1..50: mol_type = unassigned DNA; note = donor_503ea9b
  misc_feature 1..23: note = RE
  misc_feature 24..25: note = Core
  misc_feature 26..50: note = LE
cctattgactttttatttgcagactattacaatatattttggttggggca

SEQ ID NO: 33610 - DNA, 50 bp, unidentified
  source 1..50: mol_type = unassigned DNA; note = donor_503ed78
  misc_feature 1..24: note = RE
  misc_feature 25: note = Core
  misc_feature 26..50: note = LE
gtcgcttgacacaccacataggggcccgttaccttgttggtggttgccgg

SEQ ID NO: 33611 - DNA, 50 bp, unidentified
  source 1..50: mol_type = unassigned DNA; note = donor_5042629
  misc_feature 1..23: note = RE
  misc_feature 24..25: note = Core
  misc_feature 26..50: note = LE
atggttgacttttcatagctggtcttgtatgatacattcagaagccaata

SEQ ID NO: 33612 - DNA, 50 bp, unidentified; identical to SEQ ID NO: 30604
  source 1..50: mol_type = unassigned DNA; note = donor_5042eab
  misc_feature 1..23: note = RE
  misc_feature 24..25: note = Core
  misc_feature 26..50: note = LE

SEQ ID NO: 33613 - DNA, 50 bp, unidentified
  source 1..50: mol_type = unassigned DNA; note = donor_504a1ca
  misc_feature 1..23: note = RE
  misc_feature 24..25: note = Core
  misc_feature 26..50: note = LE
gacaagttatgggcgtgggatgtctaatgggggtcgaccacctcgctttg

SEQ ID NO: 33614 - DNA, 50 bp, unidentified
  source 1..50: mol_type = unassigned DNA; note = donor_505be13
  misc_feature 1..22: note = RE
  misc_feature 23..25: note = Core
  misc_feature 26..50: note = LE
tctgcttgcttttctacatagcagtaattatgtaagaaaagcatagcgca

SEQ ID NO: 33615 - DNA, 50 bp, unidentified
  source 1..50: mol_type = unassigned DNA; note = donor_506a062
  misc_feature 1..23: note = RE
  misc_feature 24..25: note = Core
  misc_feature 26..50: note = LE
gcgccacaggggccgtccacacatgatggggtggacggcccctgacccag

SEQ ID NO: 33616 - DNA, 50 bp, unidentified; identical to SEQ ID NO: 30884
  source 1..50: mol_type = unassigned DNA; note = donor_506a498
  misc_feature 1..23: note = RE
  misc_feature 24..25: note = Core
  misc_feature 26..50: note = LE

SEQ ID NO: 33617 - DNA, 50 bp, unidentified
  source 1..50: mol_type = unassigned DNA; note = donor_506ec25
  misc_feature 1..23: note = RE
  misc_feature 24..25: note = Core
  misc_feature 26..50: note = LE
tggcttgaagacaaccatagaatcttgtatggttagacttgaaggggtgg

SEQ ID NO: 33618 - DNA, 50 bp, unidentified
  source 1..50: mol_type = unassigned DNA; note = donor_5074c3e
  misc_feature 1..23: note = RE
  misc_feature 24..25: note = Core
  misc_feature 26..50: note = LE
gcaataattgaggagtccatatatgatgatatggactcctctccttactg

SEQ ID NO: 33619 - DNA, 50 bp, unidentified
  source 1..50: mol_type = unassigned DNA; note = donor_5075ccb
  misc_feature 1..24: note = RE
  misc_feature 25: note = Core
  misc_feature 26..50: note = LE
tgcagtcagacggcggaccatacataatgagatggtccgccgcttgatct

SEQ ID NO: 33620 - DNA, 50 bp, unidentified
  source 1..50: mol_type = unassigned DNA; note = donor_50816a5
  misc_feature 1..23: note = RE
  misc_feature 24..25: note = Core
  misc_feature 26..50: note = LE
actggcacgtgggagtccatataagatgtatggactcccacttttttgga

SEQ ID NO: 33621 - DNA, 50 bp, unidentified
  source 1..50: mol_type = unassigned DNA; note = donor_5084a4a
  misc_feature 1..23: note = RE
  misc_feature 24..25: note = Core
  misc_feature 26..50: note = LE
aagcttgatttttaacagagtatcttgtatgttcaataccgatgaacagt

SEQ ID NO: 33622 - DNA, 50 bp, unidentified
  source 1..50: mol_type = unassigned DNA; note = donor_508b6a3
  misc_feature 1..22: note = RE
  misc_feature 23..25: note = Core
  misc_feature 26..50: note = LE
catcaaggacggcaaccacagaagatggggtggttgccgtcctccccaga

SEQ ID NO: 33623 - DNA, 50 bp, unidentified
  source 1..50: mol_type = unassigned DNA; note = donor_50947e2
  misc_feature 1..24: note = RE
  misc_feature 25: note = Core
  misc_feature 26..50: note = LE
tggcaaactgggggcgtccatgtacaatgggatggacgcccccacccggt

SEQ ID NO: 33624 - DNA, 50 bp, unidentified
  source 1..50: mol_type = unassigned DNA; note = donor_50a0179
  misc_feature 1..23: note = RE
  misc_feature 24..25: note = Core
  misc_feature 26..50: note = LE
taggcttgacttttgttagcaggttagtaccataaatagtgtaagaaaga

SEQ ID NO: 33625 - DNA, 50 bp, unidentified
  source 1..50: mol_type = unassigned DNA; note = donor_50ae7d0
  misc_feature 1..23: note = RE
  misc_feature 24..25: note = Core
  misc_feature 26..50: note = LE
ccagataactggcaagacggtatcttatatctcgatcattctcctccggg

SEQ ID NO: 33626 - DNA, 50 bp, unidentified
  source 1..50: mol_type = unassigned DNA; note = donor_50bbb0b
  misc_feature 1..24: note = RE
  misc_feature 25: note = Core
  misc_feature 26..50: note = LE
tgcacaaaacggggcgtccatagataatgaaatggacgcccctcctatac

SEQ ID NO: 33627 - DNA, 50 bp, unidentified
  source 1..50: mol_type = unassigned DNA; note = donor_50c4116
  misc_feature 1..24: note = RE
  misc_feature 25: note = Core
  misc_feature 26..50: note = LE
tgtcctctttgctttatacatagcagtaattatgtaataaagcatagcgc

SEQ ID NO: 33628 - DNA, 50 bp, unidentified
  source 1..50: mol_type = unassigned DNA; note = donor_50d0e83
  misc_feature 1..23: note = RE
  misc_feature 24..25: note = Core
  misc_feature 26..50: note = LE
ttgccgacggggcgggccatacgttatggatggcccgcccctcccaaatc

SEQ ID NO: 33629 - DNA, 50 bp, unidentified
  source 1..50: mol_type = unassigned DNA; note = donor_50dd54d
  misc_feature 1..24: note = RE
  misc_feature 25: note = Core
  misc_feature 26..50: note = LE
gcttgccataaacggccgtccacatgatgatgtggacggcctcacctcag

SEQ ID NO: 33630 - DNA, 50 bp, unidentified
  source 1..50: mol_type = unassigned DNA; note = donor_50e1c5a
  misc_feature 1..22: note = RE
  misc_feature 23..25: note = Core
  misc_feature 26..50: note = LE
gactaatggattgcgattagacaacatggggtaatcgcggcgcggtcacc

SEQ ID NO: 33631 - DNA, 50 bp, unidentified
  source 1..50: mol_type = unassigned DNA; note = donor_50ea656
  misc_feature 1..22: note = RE
  misc_feature 23..25: note = Core
  misc_feature 26..50: note = LE
ctgcttgacaaacattagcaagattcttaatatatgagtagaggctttta

SEQ ID NO: 33632 - DNA, 50 bp, unidentified
  source 1..50: mol_type = unassigned DNA; note = donor_50ebc94
  misc_feature 1..23: note = RE
  misc_feature 24..25: note = Core
  misc_feature 26..50: note = LE
tgccaaacgggggcgtccacatatgatggtgtggacgccccctactcagc

SEQ ID NO: 33633 - DNA, 50 bp, unidentified
  source 1..50: mol_type = unassigned DNA; note = donor_50edb87
  misc_feature 1..24: note = RE
  misc_feature 25: note = Core
  misc_feature 26..50: note = LE
tgccacaagggaggcgtccatataatggtatggacgcctcccgcccacct

SEQ ID NO: 33634 - DNA, 50 bp, unidentified; identical to SEQ ID NO: 32023
  source 1..50: mol_type = unassigned DNA; note = donor_50f82dd
  misc_feature 1..23: note = RE
  misc_feature 24..25: note = Core
  misc_feature 26..50: note = LE

SEQ ID NO: 33635 - DNA, 50 bp, unidentified
  source 1..50: mol_type = unassigned DNA; note = donor_50f9cf8
  misc_feature 1..23: note = RE
  misc_feature 24..25: note = Core
  misc_feature 26..50: note = LE
cgaactgagattcaagacggtatcttgtatctcgacttgaggctcttcgg

SEQ ID NO: 33636 - DNA, 50 bp, unidentified
  source 1..50: mol_type = unassigned DNA; note = donor_50facab
  misc_feature 1..22: note = RE
  misc_feature 23..25: note = Core
  misc_feature 26..50: note = LE
gtcttgacaaggtattagctggtttcgtattattaggtcagccagatatt

SEQ ID NO: 33637 - DNA, 50 bp, unidentified
  source 1..50: mol_type = unassigned DNA; note = donor_50fb59a
  misc_feature 1..23: note = RE
  misc_feature 24..25: note = Core
  misc_feature 26..50: note = LE
tgatacctaaaccgatgggatgtctaatgggggttaccgggccgactgca

SEQ ID NO: 33638 - DNA, 50 bp, unidentified; identical to SEQ ID NO: 30383
  source 1..50: mol_type = unassigned DNA; note = donor_50fe769
  misc_feature 1..23: note = RE
  misc_feature 24..25: note = Core
  misc_feature 26..50: note = LE

SEQ ID NO: 33639 - DNA, 50 bp, unidentified
  source 1..50: mol_type = unassigned DNA; note = donor_5106c1a
  misc_feature 1..24: note = RE
  misc_feature 25: note = Core
  misc_feature 26..50: note = LE
ccaatctctgcataactgacttggttgtctctcaaatctatgctttactg

SEQ ID NO: 33640 - DNA, 50 bp, unidentified
  source 1..50: mol_type = unassigned DNA; note = donor_510fa1c
  misc_feature 1..23: note = RE
  misc_feature 24..25: note = Core
  misc_feature 26..50: note = LE
aggcttgactttatattagcaggctactacaatagagttcggttaggaga

SEQ ID NO: 33641 - DNA, 50 bp, unidentified
  source 1..50: mol_type = unassigned DNA; note = donor_51165c5
  misc_feature 1..21: note = RE
  misc_feature 22..25: note = Core
  misc_feature 26..50: note = LE
aggcggcttgacacagggcttctcactggtgcaccatccttaggtcactg

SEQ ID NO: 33642 - DNA, 50 bp, unidentified
  source 1..50: mol_type = unassigned DNA; note = donor_512156a
  misc_feature 1..24: note = RE
  misc_feature 25: note = Core
  misc_feature 26..50: note = LE
aactcttgtttttaacctataatacctttagttttgcagcgtcaaaatta

SEQ ID NO: 33643 - DNA, 50 bp, unidentified
  source 1..50: mol_type = unassigned DNA; note = donor_5121609
  misc_feature 1..23: note = RE
  misc_feature 24..25: note = Core
  misc_feature 26..50: note = LE
tggttgactagtaaccatagaatcttgtatggtagcccatgcggtacaga

SEQ ID NO: 33644 - DNA, 50 bp, unidentified
  source 1..50: mol_type = unassigned DNA; note = donor_512d937
  misc_feature 1..24: note = RE
  misc_feature 25: note = Core
  misc_feature 26..50: note = LE
ccgcttgacaaccccatagagacaccgttactttcttgatcaagcccggt

SEQ ID NO: 33645 - DNA, 50 bp, unidentified
  source 1..50: mol_type = unassigned DNA; note = donor_5131cd7
  misc_feature 1..23: note = RE
  misc_feature 24..25: note = Core
  misc_feature 26..50: note = LE
gcaacgcgggagccatccacagatgggatagggtggatggctcccgctca

SEQ ID NO: 33646 - DNA, 50 bp, unidentified
  source 1..50: mol_type = unassigned DNA; note = donor_513b782
  misc_feature 1..23: note = RE
  misc_feature 24..25: note = Core
  misc_feature 26..50: note = LE
ggtcttgacttttaatagttagtctcgtattatataatcatagccattct

SEQ ID NO: 33647 - DNA, 50 bp, unidentified; identical to SEQ ID NO: 30477
  source 1..50: mol_type = unassigned DNA; note = donor_513e9c6
  misc_feature 1..24: note = RE
  misc_feature 25: note = Core
  misc_feature 26..50: note = LE

SEQ ID NO: 33648 - DNA, 50 bp, unidentified
  source 1..50: mol_type = unassigned DNA; note = donor_51445fa
  misc_feature 1..23: note = RE
  misc_feature 24..25: note = Core
  misc_feature 26..50: note = LE
aggcttgcggccgaacataggatcttgtatgttcgtcaggcactctaaag

SEQ ID NO: 33649 - DNA, 50 bp, unidentified
  source 1..50: mol_type = unassigned DNA; note = donor_5147214
  misc_feature 1..21: note = RE
  misc_feature 22..25: note = Core
  misc_feature 26..50: note = LE
ttgacaggaaccatagggacaccccgttaccttctaggtagccccgatgg

SEQ ID NO: 33650 - DNA, 50 bp, unidentified
  source 1..50: mol_type = unassigned DNA; note = donor_51499f5
  misc_feature 1..23: note = RE
  misc_feature 24..25: note = Core
  misc_feature 26..50: note = LE
gcattcccggaggtgtccacacacgatggggtggacacctcctcacggca

SEQ ID NO: 33651 - DNA, 50 bp, unidentified
  source 1..50: mol_type = unassigned DNA; note = donor_5149f0d
  misc_feature 1..22: note = RE
  misc_feature 23..25: note = Core
  misc_feature 26..50: note = LE
tgcttgacttttcatagctggtcttgtataataaattaaagatttgaatt

SEQ ID NO: 33652 - DNA, 50 bp, unidentified
  source 1..50: mol_type = unassigned DNA; note = donor_515c997
  misc_feature 1..24: note = RE
  misc_feature 25: note = Core
  misc_feature 26..50: note = LE
tgcaccccacggccggaccatacataatgggatggtccggccgtgctccg

SEQ ID NO: 33653 - DNA, 50 bp, unidentified
  source 1..50: mol_type = unassigned DNA; note = donor_515d1ff
  misc_feature 1..22: note = RE
  misc_feature 23..25: note = Core
  misc_feature 26..50: note = LE
cctattgatttttcttagcaggtttggtatgatattagcatagtccaaac

SEQ ID NO: 33654 - DNA, 50 bp, unidentified
  source 1..50: mol_type = unassigned DNA; note = donor_515f66c
  misc_feature 1..24: note = RE
  misc_feature 25: note = Core
  misc_feature 26..50: note = LE
accctccttgacacagaggggtgcctactagttccattgactgcagatcg

SEQ ID NO: 33655 - DNA, 50 bp, unidentified
  source 1..50: mol_type = unassigned DNA; note = donor_516523e
  misc_feature 1..22: note = RE
  misc_feature 23..25: note = Core
  misc_feature 26..50: note = LE
caatacgggaggaaaccatatatgatgtgatggtctcctcccaatacggc

SEQ ID NO: 33656 - DNA, 50 bp, unidentified
  source 1..50: mol_type = unassigned DNA; note = donor_516dd64
  misc_feature 1..24: note = RE
  misc_feature 25: note = Core
  misc_feature 26..50: note = LE
tgcaaacgaggaggagtccatatacaatgggatggactcctcctcacccc

SEQ ID NO: 33657 - DNA, 50 bp, unidentified
  source 1..50: mol_type = unassigned DNA; note = donor_5177605
  misc_feature 1..23: note = RE
  misc_feature 24..25: note = Core
  misc_feature 26..50: note = LE
gcggcacgggggccgtccacatatgatggggtggacggccccctacggca

SEQ ID NO: 33658 - DNA, 50 bp, unidentified
  source 1..50: mol_type = unassigned DNA; note = donor_517bc9c
  misc_feature 1..23: note = RE
  misc_feature 24..25: note = Core
  misc_feature 26..50: note = LE
aatccgctgagagctaatggttgcttgtattagcgcgatgggttagattg

SEQ ID NO: 33659 - DNA, 50 bp, unidentified
  source 1..50: mol_type = unassigned DNA; note = donor_5186c8e
  misc_feature 1..23: note = RE
  misc_feature 24..25: note = Core
  misc_feature 26..50: note = LE
actcttgactttttatagctggtctcgtataatggatttacggtttggat

SEQ ID NO: 33660 - DNA, 50 bp, unidentified
  source 1..50: mol_type = unassigned DNA; note = donor_51874e0
  misc_feature 1..23: note = RE
  misc_feature 24..25: note = Core
  misc_feature 26..50: note = LE
cggcttgacatcatgattgggaatccatacctttctacgtgggttgatcg

SEQ ID NO: 33661 - DNA, 50 bp, unidentified
  source 1..50: mol_type = unassigned DNA; note = donor_518b308
  misc_feature 1..24: note = RE
  misc_feature 25: note = Core
  misc_feature 26..50: note = LE
tggcaaaccgggggtgttcatgtacaatgggatgaacacccccaccctta

SEQ ID NO: 33662 - DNA, 50 bp, unidentified
  source 1..50: mol_type = unassigned DNA; note = donor_518c8dd
  misc_feature 1..23: note = RE
  misc_feature 24..25: note = Core
  misc_feature 26..50: note = LE
gcacaagcggaggcatccacacatgatggagtggatgcctcctcccgacg

SEQ ID NO: 33663 - DNA, 50 bp, unidentified
  source 1..50: mol_type = unassigned DNA; note = donor_5193fa5
  misc_feature 1..23: note = RE
  misc_feature 24..25: note = Core
  misc_feature 26..50: note = LE
gaccaaacgaggcccgttacagaagatggggtaacgggcggcggctgcgc

SEQ ID NO: 33664 - DNA, 50 bp, unidentified
  source 1..50: mol_type = unassigned DNA; note = donor_5195966
  misc_feature 1..24: note = RE
  misc_feature 25: note = Core
  misc_feature 26..50: note = LE
tggcaaacccggggcgtccatgtacaatggaatggacgccccgacctgag

SEQ ID NO: 33665 - DNA, 50 bp, unidentified
  source 1..50: mol_type = unassigned DNA; note = donor_5198a80
  misc_feature 1..23: note = RE
  misc_feature 24..25: note = Core
  misc_feature 26..50: note = LE
acttaaaaaatcaaacacggtatcttatatgttgaaagtgttctccagaa

SEQ ID NO: 33666 - DNA, 50 bp, unidentified
  source 1..50: mol_type = unassigned DNA; note = donor_519c895
  misc_feature 1..21: note = RE
  misc_feature 22..25: note = Core
  misc_feature 26..50: note = LE
ggcttgacacgatcattgagattccctaagaatgttggcggtccgggagg

SEQ ID NO: 33667 - DNA, 50 bp, unidentified
  source 1..50: mol_type = unassigned DNA; note = donor_51a562f
  misc_feature 1..20: note = RE
  misc_feature 21..25: note = Core
  misc_feature 26..50: note = LE
ttgacaaccagatagggacacccccgttaccgttttcgtagttcctgatc

SEQ ID NO: 33668 - DNA, 50 bp, unidentified
  source 1..50: mol_type = unassigned DNA; note = donor_51a6399
  misc_feature 1..21: note = RE
  misc_feature 22..25: note = Core
  misc_feature 26..50: note = LE
ggcttgacatgaattaggaaatgttgtatattaggcgcgccgttatgagg

SEQ ID NO: 33669 - DNA, 50 bp, unidentified
  source 1..50: mol_type = unassigned DNA; note = donor_51a8460
  misc_feature 1..23: note = RE
  misc_feature 24..25: note = Core
  misc_feature 26..50: note = LE
atgagagcggcatccacaagagaagatggggtggatgccgctctctcccc

SEQ ID NO: 33670 - DNA, 50 bp, unidentified
  source 1..50: mol_type = unassigned DNA; note = donor_51c14bb
  misc_feature 1..23: note = RE
  misc_feature 24..25: note = Core
  misc_feature 26..50: note = LE
cgcaggcgggggccatccacatatgatggggtggatggcccccgctcccc

SEQ ID NO: 33671 - DNA, 50 bp, unidentified
  source 1..50: mol_type = unassigned DNA; note = donor_51c656f
  misc_feature 1..23: note = RE
  misc_feature 24..25: note = Core
  misc_feature 26..50: note = LE
ccgcttgacagagatcacggtatcttgtatgttgtccactcatcggatca

SEQ ID NO: 33672 - DNA, 50 bp, unidentified
  source 1..50: mol_type = unassigned DNA; note = donor_51c6b68
  misc_feature 1..23: note = RE
  misc_feature 24..25: note = Core
  misc_feature 26..50: note = LE
tgcacgcgggggccgtccacatatgatggggtggacggcccccgctcccg

SEQ ID NO: 33673 - DNA, 50 bp, unidentified; identical to SEQ ID NO: 30609
  source 1..50: mol_type = unassigned DNA; note = donor_51cdf18
  misc_feature 1..22: note = RE
  misc_feature 23..25: note = Core
  misc_feature 26..50: note = LE

SEQ ID NO: 33674 - DNA, 50 bp, unidentified
  source 1..50: mol_type = unassigned DNA; note = donor_51d3945
  misc_feature 1..23: note = RE
  misc_feature 24..25: note = Core
  misc_feature 26..50: note = LE
atcgtttggttttgtcatagaaatcctttagacttgcaaatgaataatta

SEQ ID NO: 33675 - DNA, 50 bp, unidentified
  source 1..50: mol_type = unassigned DNA; note = donor_51e01b2
  misc_feature 1..23: note = RE
  misc_feature 24..25: note = Core
  misc_feature 26..50: note = LE
gcgaggagggggccgtccacatatgttggtgtggacggcccccggcggca

SEQ ID NO: 33676 - DNA, 50 bp, unidentified; identical to SEQ ID NO: 32397
  source 1..50: mol_type = unassigned DNA; note = donor_51eb8a2
  misc_feature 1..24: note = RE
  misc_feature 25: note = Core
  misc_feature 26..50: note = LE

SEQ ID NO: 33677 - DNA, 50 bp, unidentified
  source 1..50: mol_type = unassigned DNA; note = donor_51edd55
  misc_feature 1..23: note = RE
  misc_feature 24..25: note = Core
  misc_feature 26..50: note = LE
tgccatcggggccgttccacatatgatgctgtggaacggcccctttgagc

SEQ ID NO: 33678 - DNA, 50 bp, unidentified
  source 1..50: mol_type = unassigned DNA; note = donor_51f1aaf
  misc_feature 1..23: note = RE
  misc_feature 24..25: note = Core
  misc_feature 26..50: note = LE
ttgcaaacggtgtgggttcatatataatggtatgaacccactccacttcc

SEQ ID NO: 33679 - DNA, 50 bp, unidentified
  source 1..50: mol_type = unassigned DNA; note = donor_51f1c33
  misc_feature 1..23: note = RE
  misc_feature 24..25: note = Core
  misc_feature 26..50: note = LE
cacaaccgagggacgtccatatatgatgtgatggacgtccccctcttcag

SEQ ID NO: 33680 - DNA, 50 bp, unidentified
  source 1..50: mol_type = unassigned DNA; note = donor_51f269d
  misc_feature 1..23: note = RE
  misc_feature 24..25: note = Core
  misc_feature 26..50: note = LE
aaaagggatggacaacatagaatcttgtatgtttgaatgcccctcctgca

SEQ ID NO: 33681 - DNA, 50 bp, unidentified
  source 1..50: mol_type = unassigned DNA; note = donor_51f43e8
  misc_feature 1..23: note = RE
  misc_feature 24..25: note = Core
  misc_feature 26..50: note = LE
gtgagaacggggccgtccacatatgttggagtggacggcccctgacggca

SEQ ID NO: 33682 - DNA, 50 bp, unidentified
  source 1..50: mol_type = unassigned DNA; note = donor_51feb80
  misc_feature 1..24: note = RE
  misc_feature 25: note = Core
  misc_feature 26..50: note = LE
cttgcaaacggggcgggccatacgtatgggatggcccgccccttttcccc

SEQ ID NO: 33683 - DNA, 50 bp, unidentified
  source 1..50: mol_type = unassigned DNA; note = donor_520d164
  misc_feature 1..24: note = RE
  misc_feature 25: note = Core
  misc_feature 26..50: note = LE
tggcaaaacgggggcgtccatgtataatgggatggacgccccttcctaac

SEQ ID NO: 33684 - DNA, 50 bp, unidentified
  source 1..50: mol_type = unassigned DNA; note = donor_521bfab
  misc_feature 1..23: note = RE
  misc_feature 24..25: note = Core
  misc_feature 26..50: note = LE
tcaaagcttgatcaagacggatacttgtcttatgattttctctgtctcca

SEQ ID NO: 33685 - DNA, 50 bp, unidentified
  source 1..50: mol_type = unassigned DNA; note = donor_522ad91
  misc_feature 1..23: note = RE
  misc_feature 24..25: note = Core
  misc_feature 26..50: note = LE
caatgcaggagccacccacacaggatgaggtgggtggctcctgctccacc

SEQ ID NO: 33686 - DNA, 50 bp, unidentified; identical to SEQ ID NO: 30865
  source 1..50: mol_type = unassigned DNA; note = donor_52372d2
  misc_feature 1..23: note = RE
  misc_feature 24..25: note = Core
  misc_feature 26..50: note = LE

SEQ ID NO: 33687 - DNA, 50 bp, unidentified
  source 1..50: mol_type = unassigned DNA; note = donor_5237e25
  misc_feature 1..24: note = RE
  misc_feature 25: note = Core
  misc_feature 26..50: note = LE
tggcataacgtgggcgtccatgtataatggaatggacgcccactacccaa

SEQ ID NO: 33688 - DNA, 50 bp, unidentified
  source 1..50: mol_type = unassigned DNA; note = donor_52391e8
  misc_feature 1..22: note = RE
  misc_feature 23..25: note = Core
  misc_feature 26..50: note = LE
agccttgacaaacattagctggtttcgtattattaggtcagccagtattc

SEQ ID NO: 33689 - DNA, 50 bp, unidentified
  source 1..50: mol_type = unassigned DNA; note = donor_523b022
  misc_feature 1..23: note = RE
  misc_feature 24..25: note = Core
  misc_feature 26..50: note = LE
catagtaccgttcaagacggtatcttatgtcttggcatcagtccccatgg

SEQ ID NO: 33690 - DNA, 50 bp, unidentified
  source 1..50: mol_type = unassigned DNA; note = donor_523f729
  misc_feature 1..21: note = RE
  misc_feature 22..25: note = Core
  misc_feature 26..50: note = LE
ccgagagggggccgtccatacatgatggggtggacggcccccgaacggca

SEQ ID NO: 33691 - DNA, 50 bp, unidentified
  source 1..50: mol_type = unassigned DNA; note = donor_524a0f3
  misc_feature 1..22: note = RE
  misc_feature 23..25: note = Core
  misc_feature 26..50: note = LE
tgccatagggggcgtccacatatgatgatgtggacgcccctgccagcaca

SEQ ID NO: 33692 - DNA, 50 bp, unidentified
  source 1..50: mol_type = unassigned DNA; note = donor_5258143
  misc_feature 1..23: note = RE
  misc_feature 24..25: note = Core
  misc_feature 26..50: note = LE
tagttgacaggtcaaaacatatcagacatgatgttttgacctgcccgtcc

SEQ ID NO: 33693 - DNA, 50 bp, unidentified; identical to SEQ ID NO: 31522
  source 1..50: mol_type = unassigned DNA; note = donor_5259a5a
  misc_feature 1..23: note = RE
  misc_feature 24..25: note = Core
  misc_feature 26..50: note = LE

SEQ ID NO: 33694 - DNA, 50 bp, unidentified; identical to SEQ ID NO: 30443
  source 1..50: mol_type = unassigned DNA; note = donor_525c5a4
  misc_feature 1..23: note = RE
  misc_feature 24..25: note = Core
  misc_feature 26..50: note = LE

SEQ ID NO: 33695 - DNA, 50 bp, unidentified
  source 1..50: mol_type = unassigned DNA; note = donor_5261417
  misc_feature 1..24: note = RE
  misc_feature 25: note = Core
  misc_feature 26..50: note = LE
ttgacaaatggggaagcccttgtagaatgaaagggacttccccgtcccga

SEQ ID NO: 33696 - DNA, 50 bp, unidentified
  source 1..50: mol_type = unassigned DNA; note = donor_5275aff
  misc_feature 1..23: note = RE
  misc_feature 24..25: note = Core
  misc_feature 26..50: note = LE
acttgaaaatccaagaggaatgttctaccattgtattttacaggtgacgg

SEQ ID NO: 33697 - DNA, 50 bp, unidentified
  source 1..50: mol_type = unassigned DNA; note = donor_52785e4
  misc_feature 1..23: note = RE
  misc_feature 24..25: note = Core
  misc_feature 26..50: note = LE
gggcttgacttttaatagttagtcttgtattatagagtagtagtttatga

SEQ ID NO: 33698 - DNA, 50 bp, unidentified
  source 1..50: mol_type = unassigned DNA; note = donor_527c93c
  misc_feature 1..24: note = RE
  misc_feature 25: note = Core
  misc_feature 26..50: note = LE
ggcaaggctgggggcgtccatgtacaatgggatggacgcccccatcctca

SEQ ID NO: 33699 - DNA, 50 bp, unidentified
  source 1..50: mol_type = unassigned DNA; note = donor_527e598
  misc_feature 1..23: note = RE
  misc_feature 24..25: note = Core
  misc_feature 26..50: note = LE
agattgggtttgagagatggtatcttgtatctctcacatattggtgatta

SEQ ID NO: 33700 - DNA, 50 bp, unidentified
  source 1..50: mol_type = unassigned DNA; note = donor_5295f66
  misc_feature 1..24: note = RE
  misc_feature 25: note = Core
  misc_feature 26..50: note = LE
cagtcccttgacataaaggggtgcctacttagagacttggcccaggatcg

SEQ ID NO: 33701 - DNA, 50 bp, unidentified
  source 1..50: mol_type = unassigned DNA; note = donor_52aa2dc
  misc_feature 1..23: note = RE
  misc_feature 24..25: note = Core
  misc_feature 26..50: note = LE
tcatagaccggggcatccacacgtgatggattggatgcccctcctgccgg

SEQ ID NO: 33702 - DNA, 50 bp, unidentified
  source 1..50: mol_type = unassigned DNA; note = donor_52aae89
  misc_feature 1..23: note = RE
  misc_feature 24..25: note = Core
  misc_feature 26..50: note = LE
tgacatttacgaacaaggggtgtctaatgggggtgtatcggcttgttgtg

SEQ ID NO: 33703 - DNA, 50 bp, unidentified
  source 1..50: mol_type = unassigned DNA; note = donor_52acc2c
  misc_feature 1..21: note = RE
  misc_feature 22..25: note = Core
  misc_feature 26..50: note = LE
ttcttgatttttcttagcaggttttagtaccataaaagtgtaagtgttaa

SEQ ID NO: 33704 - DNA, 50 bp, unidentified
  source 1..50: mol_type = unassigned DNA; note = donor_52bbb0e
  misc_feature 1..24: note = RE
  misc_feature 25: note = Core
  misc_feature 26..50: note = LE
gcgcaaacgggacgcgttcatacataattgaatgaacgcgtcccacccca

SEQ ID NO: 33705 - DNA, 50 bp, unidentified
  source 1..50: mol_type = unassigned DNA; note = donor_52c23ef
  misc_feature 1..24: note = RE
  misc_feature 25: note = Core
  misc_feature 26..50: note = LE
ttgcaaaacgggggcgtccatgtataatggaatggacgcccccgtccgaa

SEQ ID NO: 33706 - DNA, 50 bp, unidentified
  source 1..50: mol_type = unassigned DNA; note = donor_52c33b4
  misc_feature 1..23: note = RE
  misc_feature 24..25: note = Core
  misc_feature 26..50: note = LE
gggcttgacaattcatagttgatcttgtatgataaatatataaataatta

SEQ ID NO: 33707 - DNA, 50 bp, unidentified
  source 1..50: mol_type = unassigned DNA; note = donor_52ddd46
  misc_feature 1..24: note = RE
  misc_feature 25: note = Core
  misc_feature 26..50: note = LE
ccgttgatatatcaacatttatagaaggagcattcctgttagaagttttt

SEQ ID NO: 33708 - DNA, 50 bp, unidentified
  source 1..50: mol_type = unassigned DNA; note = donor_52de529
  misc_feature 1..23: note = RE
  misc_feature 24..25: note = Core
  misc_feature 26..50: note = LE
gacaatcgaaggcccgttacagaagatggggtaacgggccggtgtcgagc

SEQ ID NO: 33709 - DNA, 50 bp, unidentified
  source 1..50: mol_type = unassigned DNA; note = donor_52ea201
  misc_feature 1..24: note = RE
  misc_feature 25: note = Core
  misc_feature 26..50: note = LE
ttgcttgactttttattagcaggctcctacaatatatttatggtggttag

SEQ ID NO: 33710 - DNA, 50 bp, unidentified; identical to SEQ ID NO: 31810
  source 1..50: mol_type = unassigned DNA; note = donor_52ec162
  misc_feature 1..23: note = RE
  misc_feature 24..25: note = Core
  misc_feature 26..50: note = LE

SEQ ID NO: 33711 - DNA, 50 bp, unidentified
  source 1..50: mol_type = unassigned DNA; note = donor_52eee75
  misc_feature 1..24: note = RE
  misc_feature 25: note = Core
  misc_feature 26..50: note = LE
tgcagttcagaggcggaccatacataatgagatggtccgccgccgagtag

SEQ ID NO: 33712 - DNA, 50 bp, unidentified
  source 1..50: mol_type = unassigned DNA; note = donor_530054a
  misc_feature 1..23: note = RE
  misc_feature 24..25: note = Core
  misc_feature 26..50: note = LE
aaaccgtggttgacaaagggtgtctgatggctttaccctcctgagtcatg

SEQ ID NO: 33713 - DNA, 50 bp, unidentified
  source 1..50: mol_type = unassigned DNA; note = donor_530081e
  misc_feature 1..24: note = RE
  misc_feature 25: note = Core
  misc_feature 26..50: note = LE
attgcttgacacagaacataggggcgttatgttgttgacagcccctaaaa

SEQ ID NO: 33714 - DNA, 50 bp, unidentified
  source 1..50: mol_type = unassigned DNA; note = donor_5308d2f
  misc_feature 1..24: note = RE
  misc_feature 25: note = Core
  misc_feature 26..50: note = LE
ggcaaacggggaggactccatatacaatgggatggagtcctccccaccct

SEQ ID NO: 33715 - DNA, 50 bp, unidentified
  source 1..50: mol_type = unassigned DNA; note = donor_5313717
  misc_feature 1..22: note = RE
  misc_feature 23..25: note = Core
  misc_feature 26..50: note = LE
ggcttgacatcagcattgggaagccctactttcttgtcttgggttcgaac

SEQ ID NO: 33716 - DNA, 50 bp, unidentified
  source 1..50: mol_type = unassigned DNA; note = donor_5321b79
  misc_feature 1..23: note = RE
  misc_feature 24..25: note = Core
  misc_feature 26..50: note = LE
gccagccgggagccgtccacacatgatgctgtggacggctcctccaccgg

SEQ ID NO: 33717 - DNA, 50 bp, unidentified
  source 1..50: mol_type = unassigned DNA; note = donor_5324f4e
  misc_feature 1..24: note = RE
  misc_feature 25: note = Core
  misc_feature 26..50: note = LE
aactcttgatttttatatagttagcctggtatattataaatgactcattt

SEQ ID NO: 33718 - DNA, 50 bp, unidentified
  source 1..50: mol_type = unassigned DNA; note = donor_53296ac
  misc_feature 1..24: note = RE
  misc_feature 25: note = Core
  misc_feature 26..50: note = LE
ttggcaaaagggggcgtccatgtataatgggatggacgcccccttcctcg

SEQ ID NO: 33719 - DNA, 50 bp, unidentified
  source 1..50: mol_type = unassigned DNA; note = donor_532e82c
  misc_feature 1..23: note = RE
  misc_feature 24..25: note = Core
  misc_feature 26..50: note = LE
ggacttgacttttaatagttagtctcgtattataaagtagtagtgtttat

SEQ ID NO: 33720 - DNA, 50 bp, unidentified
  source 1..50: mol_type = unassigned DNA; note = donor_5342439
  misc_feature 1..24: note = RE
  misc_feature 25: note = Core
  misc_feature 26..50: note = LE
ttgcaaaaggggatggttcatatataatgtaatgaaccatccccacccag

SEQ ID NO: 33721 - DNA, 50 bp, unidentified
  source 1..50: mol_type = unassigned DNA; note = donor_5342cb3
  misc_feature 1..23: note = RE
  misc_feature 24..25: note = Core
  misc_feature 26..50: note = LE
ggcctgacgttgacagaggatgtctgatgggactaccttctctagccacg

SEQ ID NO: 33722 - DNA, 50 bp, unidentified
  source 1..50: mol_type = unassigned DNA; note = donor_535701d
  misc_feature 1..24: note = RE
  misc_feature 25: note = Core
  misc_feature 26..50: note = LE
tggcaatcgggaagcgtccatatagaatggaatggacgcttccccccggc

SEQ ID NO: 33723 - DNA, 50 bp, unidentified; identical to SEQ ID NO: 30838
  source 1..50: mol_type = unassigned DNA; note = donor_5357250
  misc_feature 1..23: note = RE
  misc_feature 24..25: note = Core
  misc_feature 26..50: note = LE

SEQ ID NO: 33724 - DNA, 50 bp, unidentified
  source 1..50: mol_type = unassigned DNA; note = donor_53654b4
  misc_feature 1..23: note = RE
  misc_feature 24..25: note = Core
  misc_feature 26..50: note = LE
tgacgaggagcgccgtccagacaagatggtgtggacggcgctccaagagg

SEQ ID NO: 33725 - DNA, 50 bp, unidentified; identical to SEQ ID NO: 31959
  source 1..50: mol_type = unassigned DNA; note = donor_5367882
  misc_feature 1..23: note = RE
  misc_feature 24..25: note = Core
  misc_feature 26..50: note = LE

SEQ ID NO: 33726 - DNA, 50 bp, unidentified
  source 1..50: mol_type = unassigned DNA; note = donor_5388e58
  misc_feature 1..24: note = RE
  misc_feature 25: note = Core
  misc_feature 26..50: note = LE
tgcagcacggcggcggaccatacataattggtatggtccgccgcctcagg

SEQ ID NO: 33727 - DNA, 50 bp, unidentified
  source 1..50: mol_type = unassigned DNA; note = donor_539f980
  misc_feature 1..23: note = RE
  misc_feature 24..25: note = Core
  misc_feature 26..50: note = LE
gcatcaacgggggcgtccacacacgatggggtggacgcccctcccgacgg

SEQ ID NO: 33728 - DNA, 50 bp, unidentified
  source 1..50: mol_type = unassigned DNA; note = donor_53a189d
  misc_feature 1..22: note = RE
  misc_feature 23..25: note = Core
  misc_feature 26..50: note = LE
acacgttatccccgtgggatgtctaatgggagtcgagtagctcggctgag

SEQ ID NO: 33729 - DNA, 50 bp, unidentified
  source 1..50: mol_type = unassigned DNA; note = donor_53b143c
  misc_feature 1..23: note = RE
  misc_feature 24..25: note = Core
  misc_feature 26..50: note = LE
gcctccttgacaaagcccatacaagatgctatggggcgggcgtcggcgag

SEQ ID NO: 33730 - DNA, 50 bp, unidentified
  source 1..50: mol_type = unassigned DNA; note = donor_53b2983
  misc_feature 1..23: note = RE
  misc_feature 24..25: note = Core
  misc_feature 26..50: note = LE
gacatcatcgggcccattacagaagatgccgtaatgggccctgctccgtg

SEQ ID NO: 33731 - DNA, 50 bp, unidentified
  source 1..50: mol_type = unassigned DNA; note = donor_53b837f
  misc_feature 1..23: note = RE
  misc_feature 24..25: note = Core
  misc_feature 26..50: note = LE
tctcttgacaccttataggatgtctggtataaagatcacagtgtgtgatc

SEQ ID NO: 33732 - DNA, 50 bp, unidentified
  source 1..50: mol_type = unassigned DNA; note = donor_53bf9e3
  misc_feature 1..23: note = RE
  misc_feature 24..25: note = Core
  misc_feature 26..50: note = LE
gggcttcaccccaaacatagaatcttgtatgtttagacttgaaggggtgg

SEQ ID NO: 33733 - DNA, 50 bp, unidentified
  source 1..50: mol_type = unassigned DNA; note = donor_53c2cc9
  misc_feature 1..23: note = RE
  misc_feature 24..25: note = Core
  misc_feature 26..50: note = LE
gccaacggagcgccgtccacacatgatgccgtggacggcgctccacccca

SEQ ID NO: 33734 - DNA, 50 bp, unidentified
  source 1..50: mol_type = unassigned DNA; note = donor_53c749d
  misc_feature 1..19: note = RE
  misc_feature 20..25: note = Core
  misc_feature 26..50: note = LE
cttggttatttaaacagtaccttttatttttgttgagaattagaaaaagg

SEQ ID NO: 33735 - DNA, 50 bp, unidentified
  source 1..50: mol_type = unassigned DNA; note = donor_53d3d74
  misc_feature 1..24: note = RE
  misc_feature 25: note = Core
  misc_feature 26..50: note = LE
aaacttggattttaactcagttcttcttaagtttgatttctcttaaaaca

SEQ ID NO: 33736 - DNA, 50 bp, unidentified
  source 1..50: mol_type = unassigned DNA; note = donor_53d69a0
  misc_feature 1..23: note = RE
  misc_feature 24..25: note = Core
  misc_feature 26..50: note = LE
tgggttgacccaaaccatagaatcttgtatggtgtaggtgcgccctctgc

SEQ ID NO: 33737 - DNA, 50 bp, unidentified
  source 1..50: mol_type = unassigned DNA; note = donor_53dd6db
  misc_feature 1..24: note = RE
  misc_feature 25: note = Core
  misc_feature 26..50: note = LE
cgaccttgacatccataggagcatcagtgaggatgtacttggcaccggac

SEQ ID NO: 33738 - DNA, 50 bp, unidentified
  source 1..50: mol_type = unassigned DNA; note = donor_53def63
  misc_feature 1..24: note = RE
  misc_feature 25: note = Core
  misc_feature 26..50: note = LE
caggttgacaaaaccatagagacacattacagtttgagtcgtccgtaagg

SEQ ID NO: 33739 - DNA, 50 bp, unidentified
  source 1..50: mol_type = unassigned DNA; note = donor_53e5e88
  misc_feature 1..23: note = RE
  misc_feature 24..25: note = Core
  misc_feature 26..50: note = LE
ggcttgacagacagcattaggaatccctacgttgttctgcgggatgtggt

SEQ ID NO: 33740 - DNA, 50 bp, unidentified
  source 1..50: mol_type = unassigned DNA; note = donor_53e7026
  misc_feature 1..23: note = RE
  misc_feature 24..25: note = Core
  misc_feature 26..50: note = LE
tgacttcaaagaacctgggatgtctaatggcattcatcgggcctctttgg

SEQ ID NO: 33741 - DNA, 50 bp, unidentified
  source 1..50: mol_type = unassigned DNA; note = donor_53ea5ec
  misc_feature 1..22: note = RE
  misc_feature 23..25: note = Core
  misc_feature 26..50: note = LE
gttgacgaaactataggaacaccccattacagtctgagatacgccatcga

SEQ ID NO: 33742 - DNA, 50 bp, unidentified
  source 1..50: mol_type = unassigned DNA; note = donor_53f61f4
  misc_feature 1..23: note = RE
  misc_feature 24..25: note = Core
  misc_feature 26..50: note = LE
gacccgcaggaggcatccacacatgatggggtggatgccccctgctccgc

SEQ ID NO: 33743 - DNA, 50 bp, unidentified
  source 1..50: mol_type = unassigned DNA; note = donor_53fa060
  misc_feature 1..23: note = RE
  misc_feature 24..25: note = Core
  misc_feature 26..50: note = LE
aacccgcttgatcaagacggatacttgtcttatgctgatccaggctcttg

SEQ ID NO: 33744 - DNA, 50 bp, unidentified
  source 1..50: mol_type = unassigned DNA; note = donor_53fd254
  misc_feature 1..22: note = RE
  misc_feature 23..25: note = Core
  misc_feature 26..50: note = LE
tcgctatgcttttctacatagcagtaactatgtaagaaaagcatagcgca

SEQ ID NO: 33745 - DNA, 50 bp, unidentified
  source 1..50: mol_type = unassigned DNA; note = donor_540b5e9
  misc_feature 1..20: note = RE
  misc_feature 21..25: note = Core
  misc_feature 26..50: note = LE
cttgacttttgtttgcaggactcctacaatagaattacggtttaaggcac

SEQ ID NO: 33746 - DNA, 50 bp, unidentified
  source 1..50: mol_type = unassigned DNA; note = donor_5420636
  misc_feature 1..23: note = RE
  misc_feature 24..25: note = Core
  misc_feature 26..50: note = LE
tcatgggcggcaaccacagaagaagatggggtggttgccgccctccctga

SEQ ID NO: 33747 - DNA, 50 bp, unidentified; identical to SEQ ID NO: 30919
  source 1..50: mol_type = unassigned DNA; note = donor_542156b
  misc_feature 1..23: note = RE
  misc_feature 24..25: note = Core
  misc_feature 26..50: note = LE

SEQ ID NO: 33748 - DNA, 50 bp, unidentified
  source 1..50: mol_type = unassigned DNA; note = donor_5428281
  misc_feature 1..22: note = RE
  misc_feature 23..25: note = Core
  misc_feature 26..50: note = LE
acctcaaccggccgaatagagaagatggggtattcggcctgccgccgctt

SEQ ID NO: 33749 - DNA, 50 bp, unidentified
  source 1..50: mol_type = unassigned DNA; note = donor_542ba5b
  misc_feature 1..24: note = RE
  misc_feature 25: note = Core
  misc_feature 26..50: note = LE
tgcaggaatggggaagtacttatagaatgaaagggacttcccctactcgg

SEQ ID NO: 33750 - DNA, 50 bp, unidentified
  source 1..50: mol_type = unassigned DNA; note = donor_542daeb
  misc_feature 1..23: note = RE
  misc_feature 24..25: note = Core
  misc_feature 26..50: note = LE
tatgcttgacttttcatagctggtcatataaaccttgtatgattaattag

SEQ ID NO: 33751 - DNA, 50 bp, unidentified
  source 1..50: mol_type = unassigned DNA; note = donor_5434655
  misc_feature 1..24: note = RE
  misc_feature 25: note = Core
  misc_feature 26..50: note = LE
tggaaatatggttaacctagaatacctttggttaaattttaatgataatc

SEQ ID NO: 33752 - DNA, 50 bp, unidentified
  source 1..50: mol_type = unassigned DNA; note = donor_5439ffe
  misc_feature 1..23: note = RE
  misc_feature 24..25: note = Core
  misc_feature 26..50: note = LE
cgcctgagccaacgtcacagttgcttgtatgtcgggaaaggagcatattg

SEQ ID NO: 33753 - DNA, 50 bp, unidentified
  source 1..50: mol_type = unassigned DNA; note = donor_5446ebd
  misc_feature 1..21: note = RE
  misc_feature 22..25: note = Core
  misc_feature 26..50: note = LE
aaggaggttgacacagggctactcactggtgcaccctccccgcggaagaa

SEQ ID NO: 33754 - DNA, 50 bp, unidentified; identical to SEQ ID NO: 30373
  source 1..50: mol_type = unassigned DNA; note = donor_544a9ea
  misc_feature 1..23: note = RE
  misc_feature 24..25: note = Core
  misc_feature 26..50: note = LE

SEQ ID NO: 33755 - DNA, 50 bp, unidentified
  source 1..50: mol_type = unassigned DNA; note = donor_5453d57
  misc_feature 1..23: note = RE
  misc_feature 24..25: note = Core
  misc_feature 26..50: note = LE
cgcctgaggttgacagaaggtgtctgatacgactaccttcgttcatggcc

SEQ ID NO: 33756 - DNA, 50 bp, unidentified
  source 1..50: mol_type = unassigned DNA; note = donor_54548ef
  misc_feature 1..24: note = RE
  misc_feature 25: note = Core
  misc_feature 26..50: note = LE
tgcgacgcggtcgcggaccatacataatgggatggtccgccgccttgacc

SEQ ID NO: 33757 - DNA, 50 bp, unidentified
  source 1..50: mol_type = unassigned DNA; note = donor_5460186
  misc_feature 1..23: note = RE
  misc_feature 24..25: note = Core
  misc_feature 26..50: note = LE
ttgacgaagggggtgtccacatatgatggtgtggacacccccacccattc

SEQ ID NO: 33758 - DNA, 50 bp, unidentified
  source 1..50: mol_type = unassigned DNA; note = donor_546af0b
  misc_feature 1..24: note = RE
  misc_feature 25: note = Core
  misc_feature 26..50: note = LE
gccagatcgggaggcgtccatataatggtatggacgcctccctctacgcc

SEQ ID NO: 33759 - DNA, 50 bp, unidentified
  source 1..50: mol_type = unassigned DNA; note = donor_5474ae4
  misc_feature 1..24: note = RE
  misc_feature 25: note = Core
  misc_feature 26..50: note = LE
cttgccgatggggcgggccatacgtatgggatggcccgcccctctcgggg

SEQ ID NO: 33760 - DNA, 50 bp, unidentified
  source 1..50: mol_type = unassigned DNA; note = donor_54780fe
  misc_feature 1..24: note = RE
  misc_feature 25: note = Core
  misc_feature 26..50: note = LE
atacattaagaggcggaccatacataattatatggtccgcctcactctca

SEQ ID NO: 33761 - DNA, 50 bp, unidentified
  source 1..50: mol_type = unassigned DNA; note = donor_5487394
  misc_feature 1..23: note = RE
  misc_feature 24..25: note = Core
  misc_feature 26..50: note = LE
ccagataaggggcaagacggtatcttgtatctggacaccaccgccgaaca

SEQ ID NO: 33762 - DNA, 50 bp, unidentified
  source 1..50: mol_type = unassigned DNA; note = donor_54b3c86
  misc_feature 1..23: note = RE
  misc_feature 24..25: note = Core
  misc_feature 26..50: note = LE
gcgtaaaacggggcatccacacatgatgggttggatgcccctcctgtcgg

SEQ ID NO: 33763 - DNA, 50 bp, unidentified
  source 1..50: mol_type = unassigned DNA; note = donor_54bbf49
  misc_feature 1..24: note = RE
  misc_feature 25: note = Core
  misc_feature 26..50: note = LE
gcttgacaaaggggagtccatgtagaatgatatggactcccctgcatagc

SEQ ID NO: 33764 - DNA, 50 bp, unidentified
  source 1..50: mol_type = unassigned DNA; note = donor_54bf0e9
  misc_feature 1..23: note = RE
  misc_feature 24..25: note = Core
  misc_feature 26..50: note = LE
gcttcaacgggggcgtccacacatgatggggtggacgcccccagcggcat

SEQ ID NO: 33765 - DNA, 50 bp, unidentified
  source 1..50: mol_type = unassigned DNA; note = donor_54c678e
  misc_feature 1..24: note = RE
  misc_feature 25: note = Core
  misc_feature 26..50: note = LE
tgcgacgcacggccggaccatacataatgggatggtccggccgtgcttct

SEQ ID NO: 33766 - DNA, 50 bp, unidentified; identical to SEQ ID NO: 30643
  source 1..50: mol_type = unassigned DNA; note = donor_54c73b0
  misc_feature 1..23: note = RE
  misc_feature 24..25: note = Core
  misc_feature 26..50: note = LE

SEQ ID NO: 33767 - DNA, 50 bp, unidentified; identical to SEQ ID NO: 33509
  source 1..50: mol_type = unassigned DNA; note = donor_54c814d
  misc_feature 1..23: note = RE
  misc_feature 24..25: note = Core
  misc_feature 26..50: note = LE

SEQ ID NO: 33768 - DNA, 50 bp, unidentified
  source 1..50: mol_type = unassigned DNA; note = donor_54d1cf5
  misc_feature 1..24: note = RE
  misc_feature 25: note = Core
  misc_feature 26..50: note = LE
tgcaaatgaggaggagtccatatacaatgggatggactcctcctccccta

SEQ ID NO: 33769 - DNA, 50 bp, unidentified
  source 1..50: mol_type = unassigned DNA; note = donor_54e2e22
  misc_feature 1..24: note = RE
  misc_feature 25: note = Core
  misc_feature 26..50: note = LE
tgcagctgaggaggagtccatatacaatgggatggactcctcctccccta

SEQ ID NO: 33770 - DNA, 50 bp, unidentified
  source 1..50: mol_type = unassigned DNA; note = donor_54eb39d
  misc_feature 1..22: note = RE
  misc_feature 23..25: note = Core
  misc_feature 26..50: note = LE
attacttcagggagtccatataagatgtatggactccctatcccgaaagg

SEQ ID NO: 33771 - DNA, 50 bp, unidentified
  source 1..50: mol_type = unassigned DNA; note = donor_54ff6e0
  misc_feature 1..21: note = RE
  misc_feature 22..25: note = Core
  misc_feature 26..50: note = LE
ggagaggttgacacagggcaactcactggactaccttcctcacgtcagcg

SEQ ID NO: 33772 - DNA, 50 bp, unidentified
  source 1..50: mol_type = unassigned DNA; note = donor_5500a10
  misc_feature 1..23: note = RE
  misc_feature 24..25: note = Core
  misc_feature 26..50: note = LE
gcttcttcaggggcgcccacagatgatggggtggacgccccccggcggca

SEQ ID NO: 33773 - DNA, 50 bp, unidentified
  source 1..50: mol_type = unassigned DNA; note = donor_55020e6
  misc_feature 1..24: note = RE
  misc_feature 25: note = Core
  misc_feature 26..50: note = LE
ttgacaacaacaacaaagaggactctaatagtgactgaggtcgacgttgc

SEQ ID NO: 33774 - DNA, 50 bp, unidentified
  source 1..50: mol_type = unassigned DNA; note = donor_5508301
  misc_feature 1..21: note = RE
  misc_feature 22..25: note = Core
  misc_feature 26..50: note = LE
tgacaaaacccatagggacacccccgttacctttttgatcgtcgccagcc

SEQ ID NO: 33775 - DNA, 50 bp, unidentified
  source 1..50: mol_type = unassigned DNA; note = donor_5511f13
  misc_feature 1..23: note = RE
  misc_feature 24..25: note = Core
  misc_feature 26..50: note = LE
gtggcacgggggccgtccacatatgatggtgtggacggccccctacggca

SEQ ID NO: 33776 - DNA, 50 bp, unidentified
  source 1..50: mol_type = unassigned DNA; note = donor_551ae26
  misc_feature 1..22: note = RE
  misc_feature 23..25: note = Core
  misc_feature 26..50: note = LE
attcagtttttctattatagttcattgtataataatttatcattataatt

SEQ ID NO: 33777 - DNA, 50 bp, unidentified
  source 1..50: mol_type = unassigned DNA; note = donor_5540bf2
  misc_feature 1..23: note = RE
  misc_feature 24..25: note = Core
  misc_feature 26..50: note = LE
ggcatgaggttgacagaaggtgtctgatagcagtaccttccttcatggtc

SEQ ID NO: 33778 - DNA, 50 bp, unidentified
  source 1..50: mol_type = unassigned DNA; note = donor_554caaf
  misc_feature 1..23: note = RE
  misc_feature 24..25: note = Core
  misc_feature 26..50: note = LE
aagctggttgtgagagatggtatcttgtatctctctgcattaagtggtta

SEQ ID NO: 33779 - DNA, 50 bp, unidentified
  source 1..50: mol_type = unassigned DNA; note = donor_5554440
  misc_feature 1..24: note = RE
  misc_feature 25: note = Core
  misc_feature 26..50: note = LE
tgcatccaggcggcggaccatacataatgggatggtccgccgccttcaca

SEQ ID NO: 33780 - DNA, 50 bp, unidentified
  source 1..50: mol_type = unassigned DNA; note = donor_5560990
  misc_feature 1..23: note = RE
  misc_feature 24..25: note = Core
  misc_feature 26..50: note = LE
gcatcacccggggcgtccatatatgatgttatggacgccccttactgagg

SEQ ID NO: 33781 - DNA, 50 bp, unidentified
  source 1..50: mol_type = unassigned DNA; note = donor_55640ad
  misc_feature 1..23: note = RE
  misc_feature 24..25: note = Core
  misc_feature 26..50: note = LE
gggcgggggttgacagagggtgtctgatggctctaccctcccctccgatg

SEQ ID NO: 33782 - DNA, 50 bp, unidentified
  source 1..50: mol_type = unassigned DNA; note = donor_557edc3
  misc_feature 1..24: note = RE
  misc_feature 25: note = Core
  misc_feature 26..50: note = LE
tgccaaacgggcgccatccagacatgatgtgatggatggcgacctgcttc

SEQ ID NO: 33783 - DNA, 50 bp, unidentified
  source 1..50: mol_type = unassigned DNA; note = donor_558b18f
  misc_feature 1..24: note = RE
  misc_feature 25: note = Core
  misc_feature 26..50: note = LE
ttgaaatcggagtgggcccatatataatggtatggaccctctcctcccat

SEQ ID NO: 33784 - DNA, 50 bp, unidentified
  source 1..50: mol_type = unassigned DNA; note = donor_558c466
  misc_feature 1..24: note = RE
  misc_feature 25: note = Core
  misc_feature 26..50: note = LE
ccgcttgacgatccataggagcgtctgtgaggatctcgacgcagcctcgt

SEQ ID NO: 33785 - DNA, 50 bp, unidentified
  source 1..50: mol_type = unassigned DNA; note = donor_559617b
  misc_feature 1..23: note = RE
  misc_feature 24..25: note = Core
  misc_feature 26..50: note = LE
cggccacttgacagacagaggcgctgacttgttggatcgggggcagacgc

SEQ ID NO: 33786 - DNA, 50 bp, unidentified
  source 1..50: mol_type = unassigned DNA; note = donor_5597913
  misc_feature 1..23: note = RE
  misc_feature 24..25: note = Core
  misc_feature 26..50: note = LE
gcaataaccgaggagtccatatatgatgatatggactcctctccccctaa

SEQ ID NO: 33787 - DNA, 50 bp, unidentified
  source 1..50: mol_type = unassigned DNA; note = donor_5598175
  misc_feature 1..23: note = RE
  misc_feature 24..25: note = Core
  misc_feature 26..50: note = LE
gccacgcaggagccatccatacatgatggagtggatggctcctgctcccg

SEQ ID NO: 33788 - DNA, 50 bp, unidentified
  source 1..50: mol_type = unassigned DNA; note = donor_55a4fa2
  misc_feature 1..23: note = RE
  misc_feature 24..25: note = Core
  misc_feature 26..50: note = LE
cctcttgacttaataccattggactcgtataataagtttgaaagttaata

SEQ ID NO: 33789 - DNA, 50 bp, unidentified
  source 1..50: mol_type = unassigned DNA; note = donor_55ab865
  misc_feature 1..23: note = RE
  misc_feature 24..25: note = Core
  misc_feature 26..50: note = LE
cgcaggcgagggccgtccacatatgatggggtggacggcccccgctcccg

SEQ ID NO: 33790 - DNA, 50 bp, unidentified
  source 1..50: mol_type = unassigned DNA; note = donor_55b5f4f
  misc_feature 1..24: note = RE
  misc_feature 25: note = Core
  misc_feature 26..50: note = LE
tgtacaggcggggcgaaccatacataatgggatggttcgccccgtcgcct

SEQ ID NO: 33791 - DNA, 50 bp, unidentified
  source 1..50: mol_type = unassigned DNA; note = donor_55b6116
  misc_feature 1..23: note = RE
  misc_feature 24..25: note = Core
  misc_feature 26..50: note = LE
tatattgacttcatatagttagtcttgtataatgaacatgtagtaaaaaa

SEQ ID NO: 33792 - DNA, 50 bp, unidentified
  source 1..50: mol_type = unassigned DNA; note = donor_55c343c
  misc_feature 1..21: note = RE
  misc_feature 22..25: note = Core
  misc_feature 26..50: note = LE
aacaaaattgacgttagtcagaattctccacataaagaaactctattaat

SEQ ID NO: 33793 - DNA, 50 bp, unidentified
  source 1..50: mol_type = unassigned DNA; note = donor_55c9131
  misc_feature 1..22: note = RE
  misc_feature 23..25: note = Core
  misc_feature 26..50: note = LE
aaaagacttgactatagagagtcttatacattaaactagtaacaagccct

SEQ ID NO: 33794 - DNA, 50 bp, unidentified
  source 1..50: mol_type = unassigned DNA; note = donor_55cc45c
  misc_feature 1..24: note = RE
  misc_feature 25: note = Core
  misc_feature 26..50: note = LE
actacttgatttttatatagttagcctggtatattctaattagctcatct

SEQ ID NO: 33795 - DNA, 50 bp, unidentified
  source 1..50: mol_type = unassigned DNA; note = donor_55ce4b8
  misc_feature 1..23: note = RE
  misc_feature 24..25: note = Core
  misc_feature 26..50: note = LE
gacttcaacacgccgaatagagaagatggggtattcggcttgagcctatc

SEQ ID NO: 33796 - DNA, 50 bp, unidentified
  source 1..50: mol_type = unassigned DNA; note = donor_55d0128
  misc_feature 1..22: note = RE
  misc_feature 23..25: note = Core
  misc_feature 26..50: note = LE
ccacttgacttttcttagcaggtttagtaccataaaagtgtagcagatag

SEQ ID NO: 33797 - DNA, 50 bp, unidentified
  source 1..50: mol_type = unassigned DNA; note = donor_55d22e2
  misc_feature 1..22: note = RE
  misc_feature 23..25: note = Core
  misc_feature 26..50: note = LE
ccaagagggggccgtccacacatgatggtgtggacggcccctgctcggcg

SEQ ID NO: 33798 - DNA, 50 bp, unidentified
  source 1..50: mol_type = unassigned DNA; note = donor_55d484a
  misc_feature 1..23: note = RE
  misc_feature 24..25: note = Core
  misc_feature 26..50: note = LE
ctgcttgactttcaagacagttgcttgtatctagctctcgagagaagttg

SEQ ID NO: 33799 - DNA, 50 bp, unidentified
  source 1..50: mol_type = unassigned DNA; note = donor_55d4c8f
  misc_feature 1..23: note = RE
  misc_feature 24..25: note = Core
  misc_feature 26..50: note = LE
tctcttgacataacaccgctggactcgtataatatcttttatatacataa

SEQ ID NO: 33800 - DNA, 50 bp, unidentified
  source 1..50: mol_type = unassigned DNA; note = donor_55d5d87
  misc_feature 1..24: note = RE
  misc_feature 25: note = Core
  misc_feature 26..50: note = LE
ttgcaaacgggatgcgttcatatagaatgtaatgaacgcatcccacccac

SEQ ID NO: 33801 - DNA, 50 bp, unidentified
  source 1..50: mol_type = unassigned DNA; note = donor_55de9f6
  misc_feature 1..24: note = RE
  misc_feature 25: note = Core
  misc_feature 26..50: note = LE
tataagtacttgactaatcgtaggaacatactaagattagctgtgaagaa

SEQ ID NO: 33802 - DNA, 50 bp, unidentified
  source 1..50: mol_type = unassigned DNA; note = donor_55e6024
  misc_feature 1..23: note = RE
  misc_feature 24..25: note = Core
  misc_feature 26..50: note = LE
gcatccgaaggggcgtccacagatgatggggtggacgccccccgacggca

SEQ ID NO: 33803 - DNA, 50 bp, unidentified
  source 1..50: mol_type = unassigned DNA; note = donor_55ebcbc
  misc_feature 1..22: note = RE
  misc_feature 23..25: note = Core
  misc_feature 26..50: note = LE
acttcaacacgccgaatagagaagatgggatattcggcttgagccccacc

SEQ ID NO: 33804 - DNA, 50 bp, unidentified
  source 1..50: mol_type = unassigned DNA; note = donor_55ed7be
  misc_feature 1..24: note = RE
  misc_feature 25: note = Core
  misc_feature 26..50: note = LE
cttgcggacggggcgggccatacgtatggaatggcccgcccctcacttcc

SEQ ID NO: 33805 - DNA, 50 bp, unidentified
  source 1..50: mol_type = unassigned DNA; note = donor_55f3843
  misc_feature 1..24: note = RE
  misc_feature 25: note = Core
  misc_feature 26..50: note = LE
ttgaattaacgagaagtccctgtagaatacgaagggacttcccgcaattc

SEQ ID NO: 33806 - DNA, 50 bp, unidentified
  source 1..50: mol_type = unassigned DNA; note = donor_55fbc2c
  misc_feature 1..23: note = RE
  misc_feature 24..25: note = Core
  misc_feature 26..50: note = LE
cggcttgatttttaagacggtatcttgtatctttatcccggtcgtgatta

SEQ ID NO: 33807 - DNA, 50 bp, unidentified
  source 1..50: mol_type = unassigned DNA; note = donor_55fd8c4
  misc_feature 1..23: note = RE
  misc_feature 24..25: note = Core
  misc_feature 26..50: note = LE
gcgctccggggggcgtccacagatgatggggtggacgccccccgacggca

SEQ ID NO: 33808 - DNA, 50 bp, unidentified
  source 1..50: mol_type = unassigned DNA; note = donor_5606247
  misc_feature 1..24: note = RE
  misc_feature 25: note = Core
  misc_feature 26..50: note = LE
aatcagttgacaaaactataggaaccattacggtccgagataagccatcg

SEQ ID NO: 33809 - DNA, 50 bp, unidentified
  source 1..50: mol_type = unassigned DNA; note = donor_5612835
  misc_feature 1..23: note = RE
  misc_feature 24..25: note = Core
  misc_feature 26..50: note = LE
gcgaagcgggggccgtccacacatgttggggtggacggcccccgacggca

SEQ ID NO: 33810 - DNA, 50 bp, unidentified
  source 1..50: mol_type = unassigned DNA; note = donor_561755e
  misc_feature 1..23: note = RE
  misc_feature 24..25: note = Core
  misc_feature 26..50: note = LE
gacaacctaaggccatggggtgtctaatggggcttaccgggttggcttgg

SEQ ID NO: 33811 - DNA, 50 bp, unidentified
  source 1..50: mol_type = unassigned DNA; note = donor_5617723
  misc_feature 1..23: note = RE
  misc_feature 24..25: note = Core
  misc_feature 26..50: note = LE
gcaagccgggggccgtccacatatgttggggtggacggcccctcgacggc

SEQ ID NO: 33812 - DNA, 50 bp, unidentified
  source 1..50: mol_type = unassigned DNA; note = donor_5618365
  misc_feature 1..23: note = RE
  misc_feature 24..25: note = Core
  misc_feature 26..50: note = LE
caccgcaagagccatccacacaggatggtgtggatggctcctgctccacc

SEQ ID NO: 33813 - DNA, 50 bp, unidentified
  source 1..50: mol_type = unassigned DNA; note = donor_561aa9d
  misc_feature 1..23: note = RE
  misc_feature 24..25: note = Core
  misc_feature 26..50: note = LE
gcgttcgtgcgggcgtccacagatgatggggtggacgccccccgacggca

SEQ ID NO: 33814 - DNA, 50 bp, unidentified
  source 1..50: mol_type = unassigned DNA; note = donor_561f942
  misc_feature 1..23: note = RE
  misc_feature 24..25: note = Core
  misc_feature 26..50: note = LE
ctgcttgacttttattagcagggttcgtacaatataagagtagagattaa

SEQ ID NO: 33815 - DNA, 50 bp, unidentified
  source 1..50: mol_type = unassigned DNA; note = donor_5625ffa
  misc_feature 1..24: note = RE
  misc_feature 25: note = Core
  misc_feature 26..50: note = LE
tgcagtccgacggcggaccatacatactgagatggtccgccgcttgaact

SEQ ID NO: 33816 - DNA, 50 bp, unidentified
  source 1..50: mol_type = unassigned DNA; note = donor_562d51c
  misc_feature 1..24: note = RE
  misc_feature 25: note = Core
  misc_feature 26..50: note = LE
gaccggttgacaacagaggggagcctactagagactcgctgcagggccgg

SEQ ID NO: 33817 - DNA, 50 bp, unidentified
  source 1..50: mol_type = unassigned DNA; note = donor_5631403
  misc_feature 1..24: note = RE
  misc_feature 25: note = Core
  misc_feature 26..50: note = LE
tgcggaatggcggcggaccatacataatgggatggtccgccgcctttacc

SEQ ID NO: 33818 - DNA, 50 bp, unidentified
  source 1..50: mol_type = unassigned DNA; note = donor_5637a67
  misc_feature 1..23: note = RE
  misc_feature 24..25: note = Core
  misc_feature 26..50: note = LE
ttgcaaacggagtgggtccatatataatggtatggacccactcctctttc

SEQ ID NO: 33819 - DNA, 50 bp, unidentified
  source 1..50: mol_type = unassigned DNA; note = donor_563d4d0
  misc_feature 1..23: note = RE
  misc_feature 24..25: note = Core
  misc_feature 26..50: note = LE
actcttgatttttatatagttagctggtatattgtaaaagactcatctaa

SEQ ID NO: 33820 - DNA, 50 bp, unidentified
  source 1..50: mol_type = unassigned DNA; note = donor_5642ec3
  misc_feature 1..22: note = RE
  misc_feature 23..25: note = Core
  misc_feature 26..50: note = LE
atgagcgggcgccgtccagacatgatgggatggacggcgcccgcaacggc

SEQ ID NO: 33821 - DNA, 50 bp, unidentified
  source 1..50: mol_type = unassigned DNA; note = donor_564820c
  misc_feature 1..21: note = RE
  misc_feature 22..25: note = Core
  misc_feature 26..50: note = LE
ggcttgacaacatcattgagattccgtaagactgaagccttggcccgaga

SEQ ID NO: 33822 - DNA, 50 bp, unidentified
  source 1..50: mol_type = unassigned DNA; note = donor_5661329
  misc_feature 1..24: note = RE
  misc_feature 25: note = Core
  misc_feature 26..50: note = LE
aatgttgacaactattagctggtttcgtaatataagtttaaccagttttt

SEQ ID NO: 33823 - DNA, 50 bp, unidentified
  source 1..50: mol_type = unassigned DNA; note = donor_566b971
  misc_feature 1..22: note = RE
  misc_feature 23..25: note = Core
  misc_feature 26..50: note = LE
ctcaacgggggccgtccacacatgatggggtggacggcccccgacccagc

SEQ ID NO: 33824 - DNA, 50 bp, unidentified
  source 1..50: mol_type = unassigned DNA; note = donor_566fe07
  misc_feature 1..23: note = RE
  misc_feature 24..25: note = Core
  misc_feature 26..50: note = LE
gcatcaatcggggcatccacacatgatggggtggatgcccccgcccgacg

SEQ ID NO: 33825 - DNA, 50 bp, unidentified
  source 1..50: mol_type = unassigned DNA; note = donor_56777ce
  misc_feature 1..23: note = RE
  misc_feature 24..25: note = Core
  misc_feature 26..50: note = LE
gacacctcccgcacgtgggatgtctaatgggtctcgcctggtcttcgtga

SEQ ID NO: 33826 - DNA, 50 bp, unidentified; identical to SEQ ID NO: 30609
  source 1..50: mol_type = unassigned DNA; note = donor_5680752
  misc_feature 1..22: note = RE
  misc_feature 23..25: note = Core
  misc_feature 26..50: note = LE

SEQ ID NO: 33827 - DNA, 50 bp, unidentified
  source 1..50: mol_type = unassigned DNA; note = donor_56844da
  misc_feature 1..24: note = RE
  misc_feature 25: note = Core
  misc_feature 26..50: note = LE
tgcacaaacgggggcatccatataatgtaatggatgcctcctcctatggt

SEQ ID NO: 33828 - DNA, 50 bp, unidentified
  source 1..50: mol_type = unassigned DNA; note = donor_5689413
  misc_feature 1..23: note = RE
  misc_feature 24..25: note = Core
  misc_feature 26..50: note = LE
cggcttgatcttgaacagagaatcttgtatgttggagagcagggacgtga

SEQ ID NO: 33829 - DNA, 50 bp, unidentified
  source 1..50: mol_type = unassigned DNA; note = donor_56c74a2
  misc_feature 1..24: note = RE
  misc_feature 25: note = Core
  misc_feature 26..50: note = LE
tgcaatagaggaggagtccatacacaatgggatggactcctcctcaccta

SEQ ID NO: 33830 - DNA, 50 bp, unidentified
  source 1..50: mol_type = unassigned DNA; note = donor_56cb02e
  misc_feature 1..24: note = RE
  misc_feature 25: note = Core
  misc_feature 26..50: note = LE
gcaaaacgaggaggagtccatatacaatgggatggactcctcctctcctt

SEQ ID NO: 33831 - DNA, 50 bp, unidentified
  source 1..50: mol_type = unassigned DNA; note = donor_56ce748
  misc_feature 1..23: note = RE
  misc_feature 24..25: note = Core
  misc_feature 26..50: note = LE
cctcttgactttttatagccggtctactataataaagtgtgtaactacgc

SEQ ID NO: 33832 - DNA, 50 bp, unidentified
  source 1..50: mol_type = unassigned DNA; note = donor_56d754c
  misc_feature 1..24: note = RE
  misc_feature 25: note = Core
  misc_feature 26..50: note = LE
gcctctcgaggagaagtccttatagaatgaaagggacttccccgtgttgg

SEQ ID NO: 33833 - DNA, 50 bp, unidentified
  source 1..50: mol_type = unassigned DNA; note = donor_56d75c1
  misc_feature 1..23: note = RE
  misc_feature 24..25: note = Core
  misc_feature 26..50: note = LE
acgtgtgaccgtcaaaacagttgcttgtatcttggaattgtggtacatga

SEQ ID NO: 33834 - DNA, 50 bp, unidentified; identical to SEQ ID NO: 32814
  source 1..50: mol_type = unassigned DNA; note = donor_56dd9cf
  misc_feature 1..23: note = RE
  misc_feature 24..25: note = Core
  misc_feature 26..50: note = LE

SEQ ID NO: 33835 - DNA, 50 bp, unidentified
  source 1..50: mol_type = unassigned DNA; note = donor_56ea31a
  misc_feature 1..23: note = RE
  misc_feature 24..25: note = Core
  misc_feature 26..50: note = LE
gccaaaccggagccgtccacacatgatgctgtggacggctcctccgccgg

SEQ ID NO: 33836 - DNA, 50 bp, unidentified
  source 1..50: mol_type = unassigned DNA; note = donor_57001da
  misc_feature 1..23: note = RE
  misc_feature 24..25: note = Core
  misc_feature 26..50: note = LE
agacttgacttttaatagttagtctcgtattatagtgtcatagccttttc

SEQ ID NO: 33837 - DNA, 50 bp, unidentified
  source 1..50: mol_type = unassigned DNA; note = donor_57013ea
  misc_feature 1..23: note = RE
  misc_feature 24..25: note = Core
  misc_feature 26..50: note = LE
aggcttgacttctaatagttagtcttgtattatagagtagtagttttttg

SEQ ID NO: 33838 - DNA, 50 bp, unidentified
  source 1..50: mol_type = unassigned DNA; note = donor_5703fee
  misc_feature 1..24: note = RE
  misc_feature 25: note = Core
  misc_feature 26..50: note = LE
tttatcttgacttttcatagttggtgtatgataaatatataaaaatattt

SEQ ID NO: 33839 - DNA, 50 bp, unidentified
  source 1..50: mol_type = unassigned DNA; note = donor_5716796
  misc_feature 1..23: note = RE
  misc_feature 24..25: note = Core
  misc_feature 26..50: note = LE
caacgcgggggccatccacagaggatgaggtggatggctcccgctcacgg

SEQ ID NO: 33840 - DNA, 50 bp, unidentified
  source 1..50: mol_type = unassigned DNA; note = donor_572406a
  misc_feature 1..23: note = RE
  misc_feature 24..25: note = Core
  misc_feature 26..50: note = LE
cctattgactttttatttgcaggctactacaatatatttatggtttataa

SEQ ID NO: 33841 - DNA, 50 bp, unidentified
  source 1..50: mol_type = unassigned DNA; note = donor_572be28
  misc_feature 1..23: note = RE
  misc_feature 24..25: note = Core
  misc_feature 26..50: note = LE
gcctggaggggggcgtccacagatgatggggtggacgccccccgacggca

SEQ ID NO: 33842 - DNA, 50 bp, unidentified
  source 1..50: mol_type = unassigned DNA; note = donor_5730e39
  misc_feature 1..24: note = RE
  misc_feature 25: note = Core
  misc_feature 26..50: note = LE
tgcaaaacggcggcggaccatacataatgggatggtccgccgcctgaacc

SEQ ID NO: 33843 - DNA, 50 bp, unidentified
  source 1..50: mol_type = unassigned DNA; note = donor_573a51f
  misc_feature 1..22: note = RE
  misc_feature 23..25: note = Core
  misc_feature 26..50: note = LE
ccggacttgacgaagacggatacttgtcttagagattcctggtcttctgg

SEQ ID NO: 33844 - DNA, 50 bp, unidentified; identical to SEQ ID NO: 30383
  source 1..50: mol_type = unassigned DNA; note = donor_57484a1
  misc_feature 1..23: note = RE
  misc_feature 24..25: note = Core
  misc_feature 26..50: note = LE

SEQ ID NO: 33845 - DNA, 50 bp, unidentified
  source 1..50: mol_type = unassigned DNA; note = donor_574f79a
  misc_feature 1..21: note = RE
  misc_feature 22..25: note = Core
  misc_feature 26..50: note = LE
caatcagggggccatccacacatgatggggtggatggccccctgccggca

SEQ ID NO: 33846 - DNA, 50 bp, unidentified
  source 1..50: mol_type = unassigned DNA; note = donor_575950e
  misc_feature 1..23: note = RE
  misc_feature 24..25: note = Core
  misc_feature 26..50: note = LE
acacttgactttttattagcaggctcctaatatataagtgtaaggttcaa

SEQ ID NO: 33847 - DNA, 50 bp, unidentified
  source 1..50: mol_type = unassigned DNA; note = donor_5771ff0
  misc_feature 1..23: note = RE
  misc_feature 24..25: note = Core
  misc_feature 26..50: note = LE
actgttgacttcgaacagagaatcttgtatgttgcgttcagaggcgtgag

SEQ ID NO: 33848 - DNA, 50 bp, unidentified
  source 1..50: mol_type = unassigned DNA; note = donor_57728b8
  misc_feature 1..24: note = RE
  misc_feature 25: note = Core
  misc_feature 26..50: note = LE
gcaaaaaggagggtgaccatagattaatgagatggtcaccatccacatcc

SEQ ID NO: 33849 - DNA, 50 bp, unidentified
  source 1..50: mol_type = unassigned DNA; note = donor_5775e8b
  misc_feature 1..23: note = RE
  misc_feature 24..25: note = Core
  misc_feature 26..50: note = LE
ttatacttgacttttcatagctggtatgatgtttatagaaacaaaaacat

SEQ ID NO: 33850 - DNA, 50 bp, unidentified
  source 1..50: mol_type = unassigned DNA; note = donor_5777705
  misc_feature 1..24: note = RE
  misc_feature 25: note = Core
  misc_feature 26..50: note = LE
tgcttgactttttatttgcagacttcctgctacaatgtatttatggttaa

SEQ ID NO: 33851 - DNA, 50 bp, unidentified
  source 1..50: mol_type = unassigned DNA; note = donor_578684c
  misc_feature 1..23: note = RE
  misc_feature 24..25: note = Core
  misc_feature 26..50: note = LE
gttgacaagagggagtccacataagataattggactccctcaccccatcc

SEQ ID NO: 33852 - DNA, 50 bp, unidentified; identical to SEQ ID NO: 32533
  source 1..50: mol_type = unassigned DNA; note = donor_578cab9
  misc_feature 1..23: note = RE
  misc_feature 24..25: note = Core
  misc_feature 26..50: note = LE

SEQ ID NO: 33853 - DNA, 50 bp, unidentified
  source 1..50: mol_type = unassigned DNA; note = donor_57917dd
  misc_feature 1..23: note = RE
  misc_feature 24..25: note = Core
  misc_feature 26..50: note = LE
gacgtcaccaccgcgattagacaacatggggtaatcgcgggagcgagtcg

SEQ ID NO: 33854 - DNA, 50 bp, unidentified
  source 1..50: mol_type = unassigned DNA; note = donor_579d650
  misc_feature 1..24: note = RE
  misc_feature 25: note = Core
  misc_feature 26..50: note = LE
tgcaacacggcggcggaccatacataatgggatggtccgccgcctttggc

SEQ ID NO: 33855 - DNA, 50 bp, unidentified
  source 1..50: mol_type = unassigned DNA; note = donor_57ae9df
  misc_feature 1..23: note = RE
  misc_feature 24..25: note = Core
  misc_feature 26..50: note = LE
gcgcaaacgggggcgttcatgtagaatgatatgaacgcccccacccagtc

SEQ ID NO: 33856 - DNA, 50 bp, unidentified
  source 1..50: mol_type = unassigned DNA; note = donor_57b3785
  misc_feature 1..23: note = RE
  misc_feature 24..25: note = Core
  misc_feature 26..50: note = LE
gacaccttgcacccctgggatgtctaatgggggtggatcggcgtcctgca

SEQ ID NO: 33857 - DNA, 50 bp, unidentified
  source 1..50: mol_type = unassigned DNA; note = donor_57b5ea8
  misc_feature 1..23: note = RE
  misc_feature 24..25: note = Core
  misc_feature 26..50: note = LE
tgacagatccagtgaaggggtgtctaatgggaccggaaagttgatcgtga

SEQ ID NO: 33858 - DNA, 50 bp, unidentified
  source 1..50: mol_type = unassigned DNA; note = donor_57c04c2
  misc_feature 1..22: note = RE
  misc_feature 23..25: note = Core
  misc_feature 26..50: note = LE
agcaaggagccaaagacagttggcttgtgtctttagggcagataaaatca

SEQ ID NO: 33859 - DNA, 50 bp, unidentified
  source 1..50: mol_type = unassigned DNA; note = donor_57c2b4f
  misc_feature 1..23: note = RE
  misc_feature 24..25: note = Core
  misc_feature 26..50: note = LE
ccaatacgggcggcgttcatataagatgagatgaacgccgcccgtccttt

SEQ ID NO: 33860 - DNA, 50 bp, unidentified
  source 1..50: mol_type = unassigned DNA; note = donor_57d136d
  misc_feature 1..24: note = RE
  misc_feature 25: note = Core
  misc_feature 26..50: note = LE
tgactgttcggggaagcccttatagaatagaagggacttcccctggatat

SEQ ID NO: 33861 - DNA, 50 bp, unidentified
  source 1..50: mol_type = unassigned DNA; note = donor_57d230e
  misc_feature 1..22: note = RE
  misc_feature 23..25: note = Core
  misc_feature 26..50: note = LE
tgacatctactttctttcacactaatctccattccgccgcctttggctgg

SEQ ID NO: 33862 - DNA, 50 bp, unidentified
  source 1..50: mol_type = unassigned DNA; note = donor_57d8f28
  misc_feature 1..23: note = RE
  misc_feature 24..25: note = Core
  misc_feature 26..50: note = LE
gcaaataaggggccgtccacacatgttggggtggacggcccccgatcggc

SEQ ID NO: 33863 - DNA, 50 bp, unidentified
  source 1..50: mol_type = unassigned DNA; note = donor_57d93df
  misc_feature 1..23: note = RE
  misc_feature 24..25: note = Core
  misc_feature 26..50: note = LE
caaaacggctggcatccacacaggatggggtggatgccagccttctccga

SEQ ID NO: 33864 - DNA, 50 bp, unidentified
  source 1..50: mol_type = unassigned DNA; note = donor_57e341a
  misc_feature 1..23: note = RE
  misc_feature 24..25: note = Core
  misc_feature 26..50: note = LE
tctattgactttttatttgcaggctactacaatagttttatggttatagt

SEQ ID NO: 33865 - DNA, 50 bp, unidentified; identical to SEQ ID NO: 32574
  source 1..50: mol_type = unassigned DNA; note = donor_57e4153
  misc_feature 1..24: note = RE
  misc_feature 25: note = Core
  misc_feature 26..50: note = LE

SEQ ID NO: 33866 - DNA, 50 bp, unidentified
  source 1..50: mol_type = unassigned DNA; note = donor_57e7a6e
  misc_feature 1..23: note = RE
  misc_feature 24..25: note = Core
  misc_feature 26..50: note = LE
gccgggctacttcaacacagttgcttgtgtccagaaaatctgacaagatg

SEQ ID NO: 33867 - DNA, 50 bp, unidentified
  source 1..50: mol_type = unassigned DNA; note = donor_57ea283
  misc_feature 1..21: note = RE
  misc_feature 22..25: note = Core
  misc_feature 26..50: note = LE
cgtgaggttgacacagggggtgtcactagggcaccatgtttctcgtgggc

SEQ ID NO: 33868 - DNA, 50 bp, unidentified
  source 1..50: mol_type = unassigned DNA; note = donor_57f0c59
  misc_feature 1..24: note = RE
  misc_feature 25: note = Core
  misc_feature 26..50: note = LE
tgcaacgcacggccggaccatacataatgggatggtccggccgtgctccc

SEQ ID NO: 33869 - DNA, 50 bp, unidentified
  source 1..50: mol_type = unassigned DNA; note = donor_57f7216
  misc_feature 1..23: note = RE
  misc_feature 24..25: note = Core
  misc_feature 26..50: note = LE
gggcttgactataactagctggtctggtatgatgtagtcatagaccaata

SEQ ID NO: 33870 - DNA, 50 bp, unidentified
  source 1..50: mol_type = unassigned DNA; note = donor_57fd237
  misc_feature 1..23: note = RE
  misc_feature 24..25: note = Core
  misc_feature 26..50: note = LE
tgacatttaagctcctgggatgtctaataagagttaacgggtccgccgta

SEQ ID NO: 33871 - DNA, 50 bp, unidentified; identical to SEQ ID NO: 32733
  source 1..50: mol_type = unassigned DNA; note = donor_57fd394
  misc_feature 1..23: note = RE
  misc_feature 24..25: note = Core
  misc_feature 26..50: note = LE

SEQ ID NO: 33872 - DNA, 50 bp, unidentified
  source 1..50: mol_type = unassigned DNA; note = donor_57fe71d
  misc_feature 1..23: note = RE
  misc_feature 24..25: note = Core
  misc_feature 26..50: note = LE
atgcttgacttccaacagagaatcttgtatgttgcgttcagaggcgtgag

SEQ ID NO: 33873 - DNA, 50 bp, unidentified
  source 1..50: mol_type = unassigned DNA; note = donor_580294d
  misc_feature 1..24: note = RE
  misc_feature 25: note = Core
  misc_feature 26..50: note = LE
cccccttgactcctaatagcaggtcctcatatattgttcttgccacttct

SEQ ID NO: 33874 - DNA, 50 bp, unidentified
  source 1..50: mol_type = unassigned DNA; note = donor_5807b0f
  misc_feature 1..24: note = RE
  misc_feature 25: note = Core
  misc_feature 26..50: note = LE
ctgcgtcttgacacagaggggtgcctgcttgtttcattgcgggtagggcc

SEQ ID NO: 33875 - DNA, 50 bp, unidentified
  source 1..50: mol_type = unassigned DNA; note = donor_581f3b7
  misc_feature 1..23: note = RE
  misc_feature 24..25: note = Core
  misc_feature 26..50: note = LE
gcgtcttgcggggcgtccacagatgatggggttgacgccccccgacggca

SEQ ID NO: 33876 - DNA, 50 bp, unidentified
  source 1..50: mol_type = unassigned DNA; note = donor_58202d3
  misc_feature 1..23: note = RE
  misc_feature 24..25: note = Core
  misc_feature 26..50: note = LE
gcatcacgggcggcaaccacagaagatggggtggttgccgccctccctga

SEQ ID NO: 33877 - DNA, 50 bp, unidentified
  source 1..50: mol_type = unassigned DNA; note = donor_5823292
  misc_feature 1..21: note = RE
  misc_feature 22..25: note = Core
  misc_feature 26..50: note = LE
aacttgacaacaccattgagattccgtaagactgtgcgcggcccaggagg

SEQ ID NO: 33878 - DNA, 50 bp, unidentified
  source 1..50: mol_type = unassigned DNA; note = donor_5827f70
  misc_feature 1..23: note = RE
  misc_feature 24..25: note = Core
  misc_feature 26..50: note = LE
ttgtttggagaggacttagaattcatttacatttgcagtattaaatatca

SEQ ID NO: 33879 - DNA, 50 bp, unidentified
  source 1..50: mol_type = unassigned DNA; note = donor_582d8b4
  misc_feature 1..23: note = RE
  misc_feature 24..25: note = Core
  misc_feature 26..50: note = LE
gacctcaaacggccgattagagaagatggggtaatcggcccggcccagct

SEQ ID NO: 33880 - DNA, 50 bp, unidentified
  source 1..50: mol_type = unassigned DNA; note = donor_582ee2d
  misc_feature 1..22: note = RE
  misc_feature 23..25: note = Core
  misc_feature 26..50: note = LE
cattacgggcagcaaccacagaagatggggtggttgctgccctccccaga

SEQ ID NO: 33881 - DNA, 50 bp, unidentified
  source 1..50: mol_type = unassigned DNA; note = donor_5830d23
  misc_feature 1..21: note = RE
  misc_feature 22..25: note = Core
  misc_feature 26..50: note = LE
cggcggcttgacacagggctactcactggaggaccctcgacgggccggtg

SEQ ID NO: 33882 - DNA, 50 bp, unidentified
  source 1..50: mol_type = unassigned DNA; note = donor_5848edc
  misc_feature 1..24: note = RE
  misc_feature 25: note = Core
  misc_feature 26..50: note = LE
tcgcttggtttttactataaattgctctaactttgcagtgtcaatgagat

SEQ ID NO: 33883 - DNA, 50 bp, unidentified; identical to SEQ ID NO: 30595
  source 1..50: mol_type = unassigned DNA; note = donor_58508ff
  misc_feature 1..23: note = RE
  misc_feature 24..25: note = Core
  misc_feature 26..50: note = LE

SEQ ID NO: 33884 - DNA, 50 bp, unidentified
  source 1..50: mol_type = unassigned DNA; note = donor_58544fc
  misc_feature 1..23: note = RE
  misc_feature 24..25: note = Core
  misc_feature 26..50: note = LE
gctctatgaccagcgattagacgacatggggtaatcgcgggcgcgatcta

SEQ ID NO: 33885 - DNA, 50 bp, unidentified
  source 1..50: mol_type = unassigned DNA; note = donor_5855b0d
  misc_feature 1..23: note = RE
  misc_feature 24..25: note = Core
  misc_feature 26..50: note = LE
caggatgcgcaacgacacagttgcctgtgtgtttgatctgtgtcatgatt

SEQ ID NO: 33886 - DNA, 50 bp, unidentified
  source 1..50: mol_type = unassigned DNA; note = donor_5867cb8
  misc_feature 1..23: note = RE
  misc_feature 24..25: note = Core
  misc_feature 26..50: note = LE
tgacacctaagcacatgggatgtctaatgggggttaccgggccgagagga

SEQ ID NO: 33887 - DNA, 50 bp, unidentified
  source 1..50: mol_type = unassigned DNA; note = donor_586d6e1
  misc_feature 1..23: note = RE
  misc_feature 24..25: note = Core
  misc_feature 26..50: note = LE
gacctcaacacgccgattagagaagatggggtaatcggcttagagcccca

SEQ ID NO: 33888 - DNA, 50 bp, unidentified; identical to SEQ ID NO: 30488
  source 1..50: mol_type = unassigned DNA; note = donor_5874f0c
  misc_feature 1..24: note = RE
  misc_feature 25: note = Core
  misc_feature 26..50: note = LE

SEQ ID NO: 33889 - DNA, 50 bp, unidentified
  source 1..50: mol_type = unassigned DNA; note = donor_5882110
  misc_feature 1..23: note = RE
  misc_feature 24..25: note = Core
  misc_feature 26..50: note = LE
cctcttgacatttaatagttagtctcgtattatagagtagtagtttataa

SEQ ID NO: 33890 - DNA, 50 bp, unidentified
  source 1..50: mol_type = unassigned DNA; note = donor_58838bf
  misc_feature 1..24: note = RE
  misc_feature 25: note = Core
  misc_feature 26..50: note = LE
tgcgacaaagcggcggaccatacataatgggatggtccgccgccttttcc

SEQ ID NO: 33891 - DNA, 50 bp, unidentified; identical to SEQ ID NO: 30970
  source 1..50: mol_type = unassigned DNA; note = donor_5885b45
  misc_feature 1..24: note = RE
  misc_feature 25: note = Core
  misc_feature 26..50: note = LE

SEQ ID NO: 33892 - DNA, 50 bp, unidentified
  source 1..50: mol_type = unassigned DNA; note = donor_58881d8
  misc_feature 1..21: note = RE
  misc_feature 22..25: note = Core
  misc_feature 26..50: note = LE
aaaagacttgattatttagggaggagcttcctgtataattaaaaatatag

SEQ ID NO: 33893 - DNA, 50 bp, unidentified; identical to SEQ ID NO: 33566
  source 1..50: mol_type = unassigned DNA; note = donor_5893f8e
  misc_feature 1..22: note = RE
  misc_feature 23..25: note = Core
  misc_feature 26..50: note = LE

SEQ ID NO: 33894 - DNA, 50 bp, unidentified
  source 1..50: mol_type = unassigned DNA; note = donor_5899135
  misc_feature 1..22: note = RE
  misc_feature 23..25: note = Core
  misc_feature 26..50: note = LE
atattgacatcctattagctggtttcgtattataaggttagccagatttt

SEQ ID NO: 33895 - DNA, 50 bp, unidentified
  source 1..50: mol_type = unassigned DNA; note = donor_589e8c8
  misc_feature 1..22: note = RE
  misc_feature 23..25: note = Core
  misc_feature 26..50: note = LE
cgcgaaggggggtatccatacatgatggggtggataccccctcccgacgg

SEQ ID NO: 33896 - DNA, 50 bp, unidentified
  source 1..50: mol_type = unassigned DNA; note = donor_58a2ba2
  misc_feature 1..23: note = RE
  misc_feature 24..25: note = Core
  misc_feature 26..50: note = LE
aaggatgaattgatgatagttgactcctaccatcaattcgtagtataagt

SEQ ID NO: 33897 - DNA, 50 bp, unidentified
  source 1..50: mol_type = unassigned DNA; note = donor_58ac9f6
  misc_feature 1..21: note = RE
  misc_feature 22..25: note = Core
  misc_feature 26..50: note = LE
ctcttgacttttaatagttagtcacgtataatccaattatctcgatttgg

SEQ ID NO: 33898 - DNA, 50 bp, unidentified
  source 1..50: mol_type = unassigned DNA; note = donor_58b00ff
  misc_feature 1..22: note = RE
  misc_feature 23..25: note = Core
  misc_feature 26..50: note = LE
gacggctggaatgcgattagacaacatggagtaatcgcggcgcgaccgtc

SEQ ID NO: 33899 - DNA, 50 bp, unidentified
  source 1..50: mol_type = unassigned DNA; note = donor_58b85cc
  misc_feature 1..23: note = RE
  misc_feature 24..25: note = Core
  misc_feature 26..50: note = LE
ttgacaaggggggagtccacataagataattggactcccctcacttccta

SEQ ID NO: 33900 - DNA, 50 bp, unidentified
  source 1..50: mol_type = unassigned DNA; note = donor_58bf367
  misc_feature 1..24: note = RE
  misc_feature 25: note = Core
  misc_feature 26..50: note = LE
ttgacagatggggaagcccttgtagaatgaaagggacttccccgtcccga

SEQ ID NO: 33901 - DNA, 50 bp, unidentified
  source 1..50: mol_type = unassigned DNA; note = donor_58c202f
  misc_feature 1..23: note = RE
  misc_feature 24..25: note = Core
  misc_feature 26..50: note = LE
gcataacgggaggtgtccatatacgatgtaatggacacctcccaccttac

SEQ ID NO: 33902 - DNA, 50 bp, unidentified; identical to SEQ ID NO: 32946
  source 1..50: mol_type = unassigned DNA; note = donor_58c5521
  misc_feature 1..23: note = RE
  misc_feature 24..25: note = Core
  misc_feature 26..50: note = LE

SEQ ID NO: 33903 - DNA, 50 bp, unidentified
  source 1..50: mol_type = unassigned DNA; note = donor_58c85a7
  misc_feature 1..22: note = RE
  misc_feature 23..25: note = Core
  misc_feature 26..50: note = LE
gacttttacaaccgtgggatgtctaatagggttggaacaaggtccgtcaa

SEQ ID NO: 33904 - DNA, 50 bp, unidentified
  source 1..50: mol_type = unassigned DNA; note = donor_58cb5ee
  misc_feature 1..24: note = RE
  misc_feature 25: note = Core
  misc_feature 26..50: note = LE
gcaaaaacggaggggaccatagattaatgagatggtcccctccaccttac

SEQ ID NO: 33905 - DNA, 50 bp, unidentified
  source 1..50: mol_type = unassigned DNA; note = donor_58cd4f7
  misc_feature 1..24: note = RE
  misc_feature 25: note = Core
  misc_feature 26..50: note = LE
gactcacaacatagggacaccccccgttaccttgtgagtgcccccgatgg

SEQ ID NO: 33906 - DNA, 50 bp, unidentified
  source 1..50: mol_type = unassigned DNA; note = donor_58cf69c
  misc_feature 1..22: note = RE
  misc_feature 23..25: note = Core
  misc_feature 26..50: note = LE
aatgttgacaaactattagctggttcgtattatgtggttagccagtaata

SEQ ID NO: 33907 - DNA, 50 bp, unidentified
  source 1..50: mol_type = unassigned DNA; note = donor_58d9ed7
  misc_feature 1..24: note = RE
  misc_feature 25: note = Core
  misc_feature 26..50: note = LE
atgaccctcttgacataggagcttctcactgtgatgctggtgtggtcgtc

SEQ ID NO: 33908 - DNA, 50 bp, unidentified
  source 1..50: mol_type = unassigned DNA; note = donor_58dac5b
  misc_feature 1..23: note = RE
  misc_feature 24..25: note = Core
  misc_feature 26..50: note = LE
gacggcttaacaccgtgggatgtctaatggggctgcatccggtcggtagt

SEQ ID NO: 33909 - DNA, 50 bp, unidentified
  source 1..50: mol_type = unassigned DNA; note = donor_58ef10b
  misc_feature 1..24: note = RE
  misc_feature 25: note = Core
  misc_feature 26..50: note = LE
tgcaaaccgggtggagtccatatataatggaatggactccaccctctcct

SEQ ID NO: 33910 - DNA, 50 bp, unidentified
  source 1..50: mol_type = unassigned DNA; note = donor_58f2f01
  misc_feature 1..23: note = RE
  misc_feature 24..25: note = Core
  misc_feature 26..50: note = LE
cctgttaggggggaagacggtatcttgtatctggacatagcgcccctagg

SEQ ID NO: 33911 - DNA, 50 bp, unidentified
  source 1..50: mol_type = unassigned DNA; note = donor_59014ff
  misc_feature 1..23: note = RE
  misc_feature 24..25: note = Core
  misc_feature 26..50: note = LE
cttgacaaaaggagccccatacaagattctatggggcaggcggcgagggt

SEQ ID NO: 33912 - DNA, 50 bp, unidentified
  source 1..50: mol_type = unassigned DNA; note = donor_5913cba
  misc_feature 1..24: note = RE
  misc_feature 25: note = Core
  misc_feature 26..50: note = LE
ttaattgtatatttatatagttcgtgtcgtacatttgcactcttgttata

SEQ ID NO: 33913 - DNA, 50 bp, unidentified; identical to SEQ ID NO: 31197
  source 1..50: mol_type = unassigned DNA; note = donor_591543f
  misc_feature 1..23: note = RE
  misc_feature 24..25: note = Core
  misc_feature 26..50: note = LE

SEQ ID NO: 33914 - DNA, 50 bp, unidentified
  source 1..50: mol_type = unassigned DNA; note = donor_59175f7
  misc_feature 1..23: note = RE
  misc_feature 24..25: note = Core
  misc_feature 26..50: note = LE
aggcttgaccgggaacggagtatcttgtatgttgtccgcgtctggtctga

SEQ ID NO: 33915 - DNA, 50 bp, unidentified
  source 1..50: mol_type = unassigned DNA; note = donor_5918153
  misc_feature 1..23: note = RE
  misc_feature 24..25: note = Core
  misc_feature 26..50: note = LE
agcttgactctcaggagagcatccaagtgagactgtttgtgccggtgttt

SEQ ID NO: 33916 - DNA, 50 bp, unidentified; identical to SEQ ID NO: 33802
  source 1..50: mol_type = unassigned DNA; note = donor_591c089
  misc_feature 1..23: note = RE
  misc_feature 24..25: note = Core
  misc_feature 26..50: note = LE

SEQ ID NO: 33917 - DNA, 50 bp, unidentified
  source 1..50: mol_type = unassigned DNA; note = donor_5921852
  misc_feature 1..23: note = RE
  misc_feature 24..25: note = Core
  misc_feature 26..50: note = LE
tgacatttaagctcctgggatgtctaatgagtgttagcgagtcggccatc

SEQ ID NO: 33918 - DNA, 50 bp, unidentified
  source 1..50: mol_type = unassigned DNA; note = donor_5923fc1
  misc_feature 1..23: note = RE
  misc_feature 24..25: note = Core
  misc_feature 26..50: note = LE
atacggaggggtagacatagaatcttgtatggcgtagggtaggaccctgt

SEQ ID NO: 33919 - DNA, 50 bp, unidentified; identical to SEQ ID NO: 31193
  source 1..50: mol_type = unassigned DNA; note = donor_592b03a
  misc_feature 1..22: note = RE
  misc_feature 23..25: note = Core
  misc_feature 26..50: note = LE

SEQ ID NO: 33920 - DNA, 50 bp, unidentified
  source 1..50: mol_type = unassigned DNA; note = donor_5930e2f
  misc_feature 1..23: note = RE
  misc_feature 24..25: note = Core
  misc_feature 26..50: note = LE
tcgcttgatctccaacatagaatcttgtatgttggcgtggcaagtcgata

SEQ ID NO: 33921 - DNA, 50 bp, unidentified
  source 1..50: mol_type = unassigned DNA; note = donor_593e611
  misc_feature 1..23: note = RE
  misc_feature 24..25: note = Core
  misc_feature 26..50: note = LE
cacattgaagcgcaagacggtatcttgtatctcgccagttgttcagtcag

SEQ ID NO: 33922 - DNA, 50 bp, unidentified
  source 1..50: mol_type = unassigned DNA; note = donor_594021b
  misc_feature 1..24: note = RE
  misc_feature 25: note = Core
  misc_feature 26..50: note = LE
gccgcttgacgaagaacataggggccgttacctttttcgtagccccttct

SEQ ID NO: 33923 - DNA, 50 bp, unidentified; identical to SEQ ID NO: 33876
  source 1..50: mol_type = unassigned DNA; note = donor_5942356
  misc_feature 1..23: note = RE
  misc_feature 24..25: note = Core
  misc_feature 26..50: note = LE

SEQ ID NO: 33924 - DNA, 50 bp, unidentified
  source 1..50: mol_type = unassigned DNA; note = donor_594f45c
  misc_feature 1..23: note = RE
  misc_feature 24..25: note = Core
  misc_feature 26..50: note = LE
tgacaacaaaaaacatgggatgtctaataggttttgtcagcctgcgggtg

SEQ ID NO: 33925 - DNA, 50 bp, unidentified
  source 1..50: mol_type = unassigned DNA; note = donor_5952163
  misc_feature 1..24: note = RE
  misc_feature 25: note = Core
  misc_feature 26..50: note = LE
tgcaactcggcggcggaccatacataatgggatggtccgccgcagagagt

SEQ ID NO: 33926 - DNA, 50 bp, unidentified
  source 1..50: mol_type = unassigned DNA; note = donor_59569c3
  misc_feature 1..22: note = RE
  misc_feature 23..25: note = Core
  misc_feature 26..50: note = LE
caacgcgggcgtcgtccacacatgatggagtggacgacgcccgctcccgg

SEQ ID NO: 33927 - DNA, 50 bp, unidentified
  source 1..50: mol_type = unassigned DNA; note = donor_5957028
  misc_feature 1..24: note = RE
  misc_feature 25: note = Core
  misc_feature 26..50: note = LE
ttggcaaatgggggcgtccatgtacaatggaatggacgcccccaactgta

SEQ ID NO: 33928 - DNA, 50 bp, unidentified
  source 1..50: mol_type = unassigned DNA; note = donor_595a5ac
  misc_feature 1..24: note = RE
  misc_feature 25: note = Core
  misc_feature 26..50: note = LE
gcagtcagaggaggagtccatatacaatgggatggactcctctccgtcta

SEQ ID NO: 33929 - DNA, 50 bp, unidentified; identical to SEQ ID NO: 31004
  source 1..50: mol_type = unassigned DNA; note = donor_595af69
  misc_feature 1..24: note = RE
  misc_feature 25: note = Core
  misc_feature 26..50: note = LE

SEQ ID NO: 33930 - DNA, 50 bp, unidentified
  source 1..50: mol_type = unassigned DNA; note = donor_59610c1
  misc_feature 1..23: note = RE
  misc_feature 24..25: note = Core
  misc_feature 26..50: note = LE
aaggaggaattaaatatagttgactcctaccattaattcctgtataactc

SEQ ID NO: 33931 - DNA, 50 bp, unidentified
  source 1..50: mol_type = unassigned DNA; note = donor_596165a
  misc_feature 1..23: note = RE
  misc_feature 24..25: note = Core
  misc_feature 26..50: note = LE
cctcttgactccttataggatgtctggtataaagatcatattgatctagg

SEQ ID NO: 33932 - DNA, 50 bp, unidentified
  source 1..50: mol_type = unassigned DNA; note = donor_5963ef5
  misc_feature 1..23: note = RE
  misc_feature 24..25: note = Core
  misc_feature 26..50: note = LE
ttaacttgacaaagtcatagtgttccattagactattttattgaaaatat

SEQ ID NO: 33933 - DNA, 50 bp, unidentified
  source 1..50: mol_type = unassigned DNA; note = donor_596d7fc
  misc_feature 1..23: note = RE
  misc_feature 24..25: note = Core
  misc_feature 26..50: note = LE
ttgcacccggggcgggccatacgttatggatggcccgcccctcccgccgg

SEQ ID NO: 33934 - DNA, 50 bp, unidentified
  source 1..50: mol_type = unassigned DNA; note = donor_59799e3
  misc_feature 1..24: note = RE
  misc_feature 25: note = Core
  misc_feature 26..50: note = LE
tggcaagccggggacgtccatatataatgaaatggacgcccccttccgga

SEQ ID NO: 33935 - DNA, 50 bp, unidentified
  source 1..50: mol_type = unassigned DNA; note = donor_597bede
  misc_feature 1..24: note = RE
  misc_feature 25: note = Core
  misc_feature 26..50: note = LE
ttgccaataggaagtgtccatatataatgatatggacacttccacccacc

SEQ ID NO: 33936 - DNA, 50 bp, unidentified
  source 1..50: mol_type = unassigned DNA; note = donor_597e712
  misc_feature 1..23: note = RE
  misc_feature 24..25: note = Core
  misc_feature 26..50: note = LE
tgacatcgaaaaacctgggatgtctaatgggttcttgccgggcctgggag

SEQ ID NO: 33937 - DNA, 50 bp, unidentified
  source 1..50: mol_type = unassigned DNA; note = donor_5993b5b
  misc_feature 1..23: note = RE
  misc_feature 24..25: note = Core
  misc_feature 26..50: note = LE
cgagatcctgatcaacacagttgcttatctgttcggaatgtggcagcgta

SEQ ID NO: 33938 - DNA, 50 bp, unidentified
  source 1..50: mol_type = unassigned DNA; note = donor_59b1605
  misc_feature 1..24: note = RE
  misc_feature 25: note = Core
  misc_feature 26..50: note = LE
tgcaacgaggcggcggaccatacataatgggatggtccgccgcctctgct

SEQ ID NO: 33939 - DNA, 50 bp, unidentified
  source 1..50: mol_type = unassigned DNA; note = donor_59c3ca5
  misc_feature 1..24: note = RE
  misc_feature 25: note = Core
  misc_feature 26..50: note = LE
tgcagttcggcggcggaccatacataatgagatggtccgccgcgagcaag

SEQ ID NO: 33940 - DNA, 50 bp, unidentified; identical to SEQ ID NO: 32111
  source 1..50: mol_type = unassigned DNA; note = donor_59d06ac
  misc_feature 1..23: note = RE
  misc_feature 24..25: note = Core
  misc_feature 26..50: note = LE

SEQ ID NO: 33941 - DNA, 50 bp, unidentified
  source 1..50: mol_type = unassigned DNA; note = donor_59d55fb
  misc_feature 1..24: note = RE
  misc_feature 25: note = Core
  misc_feature 26..50: note = LE
acagttgttttttaactcagttcttcttaagtttgattctctttaaattt

SEQ ID NO: 33942 - DNA, 50 bp, unidentified
  source 1..50: mol_type = unassigned DNA; note = donor_59d62fb
  misc_feature 1..22: note = RE
  misc_feature 23..25: note = Core
  misc_feature 26..50: note = LE
catcctaggcggcaaccacagaagatggggtggttgccgcccccctcaga

SEQ ID NO: 33943 - DNA, 50 bp, unidentified
  source 1..50: mol_type = unassigned DNA; note = donor_59e6d82
  misc_feature 1..23: note = RE
  misc_feature 24..25: note = Core
  misc_feature 26..50: note = LE
tgacatctaagctcctgggatgtctaataagtcgtgtcgggtccgccata

SEQ ID NO: 33944 - DNA, 50 bp, unidentified
  source 1..50: mol_type = unassigned DNA; note = donor_59f5263
  misc_feature 1..23: note = RE
  misc_feature 24..25: note = Core
  misc_feature 26..50: note = LE
cctcttgacttttaatagttagtctcgtattatatagtcatacccattct

SEQ ID NO: 33945 - DNA, 50 bp, unidentified
  source 1..50: mol_type = unassigned DNA; note = donor_59f653d
  misc_feature 1..23: note = RE
  misc_feature 24..25: note = Core
  misc_feature 26..50: note = LE
gtgcttaacttccaagacggttacttgtatctttaaacctgaccagcaag

SEQ ID NO: 33946 - DNA, 50 bp, unidentified
  source 1..50: mol_type = unassigned DNA; note = donor_59f6f8f
  misc_feature 1..21: note = RE
  misc_feature 22..25: note = Core
  misc_feature 26..50: note = LE
cttgacaaccacatagggacaccccgttacctttttcgtagctcctgatc

SEQ ID NO: 33947 - DNA, 50 bp, unidentified
  source 1..50: mol_type = unassigned DNA; note = donor_59f81f1
  misc_feature 1..23: note = RE
  misc_feature 24..25: note = Core
  misc_feature 26..50: note = LE
ttatttgataattaacacagaatctcctatgtttgtcattaaccaataaa

SEQ ID NO: 33948 - DNA, 50 bp, unidentified
  source 1..50: mol_type = unassigned DNA; note = donor_5a00f0d
  misc_feature 1..22: note = RE
  misc_feature 23..25: note = Core
  misc_feature 26..50: note = LE
tctcttgactgtttatagtttgtcacgtataatccaattatcttagatgg

SEQ ID NO: 33949 - DNA, 50 bp, unidentified
  source 1..50: mol_type = unassigned DNA; note = donor_5a0401b
  misc_feature 1..23: note = RE
  misc_feature 24..25: note = Core
  misc_feature 26..50: note = LE
ccacttgacttgtaacacggttgcttgtatgcttcgttttactggacatg

SEQ ID NO: 33950 - DNA, 50 bp, unidentified
  source 1..50: mol_type = unassigned DNA; note = donor_5a099ac
  misc_feature 1..24: note = RE
  misc_feature 25: note = Core
  misc_feature 26..50: note = LE
ctgttgacagcaaggggccatatcagacatcatggccccgccaatgcgag

SEQ ID NO: 33951 - DNA, 50 bp, unidentified
  source 1..50: mol_type = unassigned DNA; note = donor_5a26db1
  misc_feature 1..24: note = RE
  misc_feature 25: note = Core
  misc_feature 26..50: note = LE
gtgcttgactttttattagtaggctcctaatatataaagtgtagtggtca

SEQ ID NO: 33952 - DNA, 50 bp, unidentified
  source 1..50: mol_type = unassigned DNA; note = donor_5a27663
  misc_feature 1..23: note = RE
  misc_feature 24..25: note = Core
  misc_feature 26..50: note = LE
cacaacccgggggcgtccatatatgatgtgatggacgccccctccctgcg

SEQ ID NO: 33953 - DNA, 50 bp, unidentified
  source 1..50: mol_type = unassigned DNA; note = donor_5a2de9e
  misc_feature 1..23: note = RE
  misc_feature 24..25: note = Core
  misc_feature 26..50: note = LE
cggcttgacaactccattgggaagtcctacctttttcccgggtcgtgcag

SEQ ID NO: 33954 - DNA, 50 bp, unidentified
  source 1..50: mol_type = unassigned DNA; note = donor_5a35f14
  misc_feature 1..24: note = RE
  misc_feature 25: note = Core
  misc_feature 26..50: note = LE
cttgcgaacagggcgggccatacgtatgggatggcccgcccttccgagaa

SEQ ID NO: 33955 - DNA, 50 bp, unidentified
  source 1..50: mol_type = unassigned DNA; note = donor_5a3d13d
  misc_feature 1..23: note = RE
  misc_feature 24..25: note = Core
  misc_feature 26..50: note = LE
gggctagtcctacaccatagaatcttgtatggtaggacttgaagggagga

SEQ ID NO: 33956 - DNA, 50 bp, unidentified
  source 1..50: mol_type = unassigned DNA; note = donor_5a4625f
  misc_feature 1..23: note = RE
  misc_feature 24..25: note = Core
  misc_feature 26..50: note = LE
acgacttgcaaaaaacatagaaccttgtatggttgaggcgctggggtgga

SEQ ID NO: 33957 - DNA, 50 bp, unidentified
  source 1..50: mol_type = unassigned DNA; note = donor_5a4b032
  misc_feature 1..24: note = RE
  misc_feature 25: note = Core
  misc_feature 26..50: note = LE
ataatataagttatttttcactctttttaccattcctttcgcttcgctca

SEQ ID NO: 33958 - DNA, 50 bp, unidentified
  source 1..50: mol_type = unassigned DNA; note = donor_5a4de49
  misc_feature 1..23: note = RE
  misc_feature 24..25: note = Core
  misc_feature 26..50: note = LE
aaaccattgacaacaaagaggcgtctgattgagacttgagccaggcgctg

SEQ ID NO: 33959 - DNA, 50 bp, unidentified
  source 1..50: mol_type = unassigned DNA; note = donor_5a4e2ec
  misc_feature 1..24: note = RE
  misc_feature 25: note = Core
  misc_feature 26..50: note = LE
aggtgtcttgacacagaggggagcctacttgttccattgaccccaggacc

SEQ ID NO: 33960 - DNA, 50 bp, unidentified
  source 1..50: mol_type = unassigned DNA; note = donor_5a584e0
  misc_feature 1..23: note = RE
  misc_feature 24..25: note = Core
  misc_feature 26..50: note = LE
actattgacatctaatagctagtcacgtataatccaattatcctcttttt

SEQ ID NO: 33961 - DNA, 50 bp, unidentified
  source 1..50: mol_type = unassigned DNA; note = donor_5a5e403
  misc_feature 1..20: note = RE
  misc_feature 21..25: note = Core
  misc_feature 26..50: note = LE
cacggcttgacacagggctactcactggtgcacccttgtggtgtcagcgg

SEQ ID NO: 33962 - DNA, 50 bp, unidentified
  source 1..50: mol_type = unassigned DNA; note = donor_5a62041
  misc_feature 1..23: note = RE
  misc_feature 24..25: note = Core
  misc_feature 26..50: note = LE
caatgcgggagccatccacagaagatggggtggatggctcccgctcccgg

SEQ ID NO: 33963 - DNA, 50 bp, unidentified; identical to SEQ ID NO: 32656
  source 1..50: mol_type = unassigned DNA; note = donor_5a651cf
  misc_feature 1..23: note = RE
  misc_feature 24..25: note = Core
  misc_feature 26..50: note = LE

SEQ ID NO: 33964 - DNA, 50 bp, unidentified
  source 1..50: mol_type = unassigned DNA; note = donor_5a6f86b
  misc_feature 1..21: note = RE
  misc_feature 22..25: note = Core
  misc_feature 26..50: note = LE
agcttgacttcgtcattgagactccgtaagttgataggtggccctgtggt

SEQ ID NO: 33965 - DNA, 50 bp, unidentified
  source 1..50: mol_type = unassigned DNA; note = donor_5a75301
  misc_feature 1..23: note = RE
  misc_feature 24..25: note = Core
  misc_feature 26..50: note = LE
gacagtggaggtgagtccatacataattggatggactcacccgcgccgag

SEQ ID NO: 33966 - DNA, 50 bp, unidentified
  source 1..50: mol_type = unassigned DNA; note = donor_5a7c4a9
  misc_feature 1..21: note = RE
  misc_feature 22..25: note = Core
  misc_feature 26..50: note = LE
cggcggcttgacacagggctactcactggtgcaccatgcctgtgtcggtg

SEQ ID NO: 33967 - DNA, 50 bp, unidentified
  source 1..50: mol_type = unassigned DNA; note = donor_5a7c886
  misc_feature 1..23: note = RE
  misc_feature 24..25: note = Core
  misc_feature 26..50: note = LE
tgacttccaacttcctgggatgtctaatgagagttaacgacttgccgttc

SEQ ID NO: 33968 - DNA, 50 bp, unidentified
  source 1..50: mol_type = unassigned DNA; note = donor_5a9d652
  misc_feature 1..23: note = RE
  misc_feature 24..25: note = Core
  misc_feature 26..50: note = LE
gcatcacgggcggcaaccacacaagatggggtggttgccgccctcccgat

SEQ ID NO: 33969 - DNA, 50 bp, unidentified
  source 1..50: mol_type = unassigned DNA; note = donor_5aa5eb3
  misc_feature 1..23: note = RE
  misc_feature 24..25: note = Core
  misc_feature 26..50: note = LE
cccggtgacgggcaagacggtatcttgtatctctactaacgcctccgcag

SEQ ID NO: 33970 - DNA, 50 bp, unidentified
  source 1..50: mol_type = unassigned DNA; note = donor_5aa690f
  misc_feature 1..23: note = RE
  misc_feature 24..25: note = Core
  misc_feature 26..50: note = LE
ttacttagcttttattagcaggtctattacaataagttcggacaggaaca

SEQ ID NO: 33971 - DNA, 50 bp, unidentified
  source 1..50: mol_type = unassigned DNA; note = donor_5ab1693
  misc_feature 1..24: note = RE
  misc_feature 25: note = Core
  misc_feature 26..50: note = LE
acctcttgacaaaccagacagtcgccttgtatctggatagaggcggcgaa

SEQ ID NO: 33972 - DNA, 50 bp, unidentified
  source 1..50: mol_type = unassigned DNA; note = donor_5ab9fc6
  misc_feature 1..23: note = RE
  misc_feature 24..25: note = Core
  misc_feature 26..50: note = LE
cggcttgacatcgtcattgggaagtcctacctttcaagcgtgggtctgag

SEQ ID NO: 33973 - DNA, 50 bp, unidentified
  source 1..50: mol_type = unassigned DNA; note = donor_5abeb6a
  misc_feature 1..23: note = RE
  misc_feature 24..25: note = Core
  misc_feature 26..50: note = LE
ctgcttgactttttatttgcagactactacaatgtatttatggttaatac

SEQ ID NO: 33974 - DNA, 50 bp, unidentified
  source 1..50: mol_type = unassigned DNA; note = donor_5ac114d
  misc_feature 1..23: note = RE
  misc_feature 24..25: note = Core
  misc_feature 26..50: note = LE
gacaagtcgtggcccgttacagaagatggggtaacgggccggccgcggcg

SEQ ID NO: 33975 - DNA, 50 bp, unidentified
  source 1..50: mol_type = unassigned DNA; note = donor_5ac4804
  misc_feature 1..24: note = RE
  misc_feature 25: note = Core
  misc_feature 26..50: note = LE
cggcttgacgaaccataggagcgtctgtgaggcttgtgcctgcggctcgc

SEQ ID NO: 33976 - DNA, 50 bp, unidentified
  source 1..50: mol_type = unassigned DNA; note = donor_5ac7e76
  misc_feature 1..23: note = RE
  misc_feature 24..25: note = Core
  misc_feature 26..50: note = LE
tttattgacttttcatagttggtcttgtatgatgtatttacacggaaata

SEQ ID NO: 33977 - DNA, 50 bp, unidentified
  source 1..50: mol_type = unassigned DNA; note = donor_5aceb13
  misc_feature 1..23: note = RE
  misc_feature 24..25: note = Core
  misc_feature 26..50: note = LE
gccccgcgggagccgtccatacatgatggggtggacggctccctctcgcg

SEQ ID NO: 33978 - DNA, 50 bp, unidentified
  source 1..50: mol_type = unassigned DNA; note = donor_5ad39af
  misc_feature 1..21: note = RE
  misc_feature 22..25: note = Core
  misc_feature 26..50: note = LE
ttgaccaaaagcatagggacaccccgttacatttattgggtccccgagcg

SEQ ID NO: 33979 - DNA, 50 bp, unidentified
  source 1..50: mol_type = unassigned DNA; note = donor_5ade38f
  misc_feature 1..23: note = RE
  misc_feature 24..25: note = Core
  misc_feature 26..50: note = LE
tgacagttcgagtcaaggggtgtctaatgggattggaaagccgctggttt

SEQ ID NO: 33980 - DNA, 50 bp, unidentified
  source 1..50: mol_type = unassigned DNA; note = donor_5ae7246
  misc_feature 1..24: note = RE
  misc_feature 25: note = Core
  misc_feature 26..50: note = LE
tgcaacgcacggccggaccatacataatgggatggcccggccgtgctccc

SEQ ID NO: 33981 - DNA, 50 bp, unidentified
  source 1..50: mol_type = unassigned DNA; note = donor_5af01bd
  misc_feature 1..24: note = RE
  misc_feature 25: note = Core
  misc_feature 26..50: note = LE
tggcaaatgggaggcgaccatctataatggaatggtcgcctcccttccca

SEQ ID NO: 33982 - DNA, 50 bp, unidentified
  source 1..50: mol_type = unassigned DNA; note = donor_5af7dfe
  misc_feature 1..23: note = RE
  misc_feature 24..25: note = Core
  misc_feature 26..50: note = LE
actattgactttttatttgcaggctactacaatgtatttatggttaatac

SEQ ID NO: 33983 - DNA, 50 bp, unidentified
  source 1..50: mol_type = unassigned DNA; note = donor_5afc5f5
  misc_feature 1..22: note = RE
  misc_feature 23..25: note = Core
  misc_feature 26..50: note = LE
caactgtctgaaaaagacagttgcttgtgtcttagcaccggcgtaggctt

SEQ ID NO: 33984 - DNA, 50 bp, unidentified
  source 1..50: mol_type = unassigned DNA; note = donor_5b06b90
  misc_feature 1..23: note = RE
  misc_feature 24..25: note = Core
  misc_feature 26..50: note = LE
gacgacgaagggcccattacagaagatgccgtaatgggccggtaccgggg

SEQ ID NO: 33985 - DNA, 50 bp, unidentified
  source 1..50: mol_type = unassigned DNA; note = donor_5b07631
  misc_feature 1..23: note = RE
  misc_feature 24..25: note = Core
  misc_feature 26..50: note = LE
acgcttgtgttttaatagagtatcttgtatattaaacatatctcttaaac

SEQ ID NO: 33986 - DNA, 50 bp, unidentified
  source 1..50: mol_type = unassigned DNA; note = donor_5b08017
  misc_feature 1..23: note = RE
  misc_feature 24..25: note = Core
  misc_feature 26..50: note = LE
aacccacttgaccaacacggatacttgtcttataaattgagtagctcctg

SEQ ID NO: 33987 - DNA, 50 bp, unidentified
  source 1..50: mol_type = unassigned DNA; note = donor_5b08717
  misc_feature 1..23: note = RE
  misc_feature 24..25: note = Core
  misc_feature 26..50: note = LE
gcaccaacgggggcgtccacacatgatggggtggacgccccctgagggca

SEQ ID NO: 33988 - DNA, 50 bp, unidentified
  source 1..50: mol_type = unassigned DNA; note = donor_5b15f06
  misc_feature 1..24: note = RE
  misc_feature 25: note = Core
  misc_feature 26..50: note = LE
tgccaacggagagccgtccacacatgatgctgtggacggctctccacccg

SEQ ID NO: 33989 - DNA, 50 bp, unidentified
  source 1..50: mol_type = unassigned DNA; note = donor_5b20e9f
  misc_feature 1..23: note = RE
  misc_feature 24..25: note = Core
  misc_feature 26..50: note = LE
cgacttgtgatttaagagagtatcttgtatattaaacccatctctgaaac

SEQ ID NO: 33990 - DNA, 50 bp, unidentified
  source 1..50: mol_type = unassigned DNA; note = donor_5b21dba
  misc_feature 1..22: note = RE
  misc_feature 23..25: note = Core
  misc_feature 26..50: note = LE
atagctgggaggcatccatacaagatgtaatggatgtctccctgcctacg

SEQ ID NO: 33991 - DNA, 50 bp, unidentified; identical to SEQ ID NO: 30705
  source 1..50: mol_type = unassigned DNA; note = donor_5b23924
  misc_feature 1..23: note = RE
  misc_feature 24..25: note = Core
  misc_feature 26..50: note = LE

SEQ ID NO: 33992 - DNA, 50 bp, unidentified
  source 1..50: mol_type = unassigned DNA; note = donor_5b2b783
  misc_feature 1..24: note = RE
  misc_feature 25: note = Core
  misc_feature 26..50: note = LE
cgcttgacgaaaaccatagaagcaccgttacctttttcatgacgccggtg

SEQ ID NO: 33993 - DNA, 50 bp, unidentified
  source 1..50: mol_type = unassigned DNA; note = donor_5b31d6e
  misc_feature 1..23: note = RE
  misc_feature 24..25: note = Core
  misc_feature 26..50: note = LE
gccaacccggagccgtccacacatgatgctgtggacggctcctcccccgg

SEQ ID NO: 33994 - DNA, 50 bp, unidentified
  source 1..50: mol_type = unassigned DNA; note = donor_5b3d676
  misc_feature 1..24: note = RE
  misc_feature 25: note = Core
  misc_feature 26..50: note = LE
ccgcctcttgacacagaggggtgcctacttatgtactggtgctacgaccg

SEQ ID NO: 33995 - DNA, 50 bp, unidentified
  source 1..50: mol_type = unassigned DNA; note = donor_5b3fbf2
  misc_feature 1..23: note = RE
  misc_feature 24..25: note = Core
  misc_feature 26..50: note = LE
aatttttatacgtaagacagttgcttgtatcttgaaagcggtttacaatc

SEQ ID NO: 33996 - DNA, 50 bp, unidentified
  source 1..50: mol_type = unassigned DNA; note = donor_5b40560
  misc_feature 1..23: note = RE
  misc_feature 24..25: note = Core
  misc_feature 26..50: note = LE
gcaaaacgggtggagtccatagataatgtaatggactccacccaccccga

SEQ ID NO: 33997 - DNA, 50 bp, unidentified
  source 1..50: mol_type = unassigned DNA; note = donor_5b43397
  misc_feature 1..23: note = RE
  misc_feature 24..25: note = Core
  misc_feature 26..50: note = LE
gcgaggcgggggccgtccacatatgttggggtggacggccccctacggca

SEQ ID NO: 33998 - DNA, 50 bp, unidentified
  source 1..50: mol_type = unassigned DNA; note = donor_5b47b76
  misc_feature 1..24: note = RE
  misc_feature 25: note = Core
  misc_feature 26..50: note = LE
tgcaactcggcggcggaccatacataatgggatggtccgccaccgagact

SEQ ID NO: 33999 - DNA, 50 bp, unidentified
  source 1..50: mol_type = unassigned DNA; note = donor_5b4878b
  misc_feature 1..24: note = RE
  misc_feature 25: note = Core
  misc_feature 26..50: note = LE
tgcagcaacggggaagtccttatagaatgaaagagacttcccccgctgct

SEQ ID NO: 34000 - DNA, 50 bp, unidentified; identical to SEQ ID NO: 30609
  source 1..50: mol_type = unassigned DNA; note = donor_5b51ad4
  misc_feature 1..22: note = RE
  misc_feature 23..25: note = Core
  misc_feature 26..50: note = LE

SEQ ID NO: 34001 - DNA, 50 bp, unidentified; identical to SEQ ID NO: 33043
  source 1..50: mol_type = unassigned DNA; note = donor_5b589d4
  misc_feature 1..23: note = RE
  misc_feature 24..25: note = Core
  misc_feature 26..50: note = LE

SEQ ID NO: 34002 - DNA, 50 bp, unidentified; identical to SEQ ID NO: 30804
  source 1..50: mol_type = unassigned DNA; note = donor_5b6bb0b
  misc_feature 1..24: note = RE
  misc_feature 25: note = Core
  misc_feature 26..50: note = LE

SEQ ID NO: 34003 - DNA, 50 bp, unidentified
  source 1..50: mol_type = unassigned DNA; note = donor_5b6fc0b
  misc_feature 1..23: note = RE
  misc_feature 24..25: note = Core
  misc_feature 26..50: note = LE
agggttcccctcaaacatagaatcttgtatgtttagacttgaaggggtgg

SEQ ID NO: 34004 - DNA, 50 bp, unidentified
  source 1..50: mol_type = unassigned DNA; note = donor_5b77bd9
  misc_feature 1..24: note = RE
  misc_feature 25: note = Core
  misc_feature 26..50: note = LE
ttacttgttttttaactcagttcttcttaagtttgtaaatcactaaattt

SEQ ID NO: 34005 - DNA, 50 bp, unidentified
  source 1..50: mol_type = unassigned DNA; note = donor_5b7d69e
  misc_feature 1..23: note = RE
  misc_feature 24..25: note = Core
  misc_feature 26..50: note = LE
gacccgccctgatctaatggttgcttgtaatagcaaaatcgattatcgtt

SEQ ID NO: 34006 - DNA, 50 bp, unidentified
  source 1..50: mol_type = unassigned DNA; note = donor_5b8969b
  misc_feature 1..24: note = RE
  misc_feature 25: note = Core
  misc_feature 26..50: note = LE
gccgcttgacaaacaacataggggcgttaccttgttgatgggtcctttcg

SEQ ID NO: 34007 - DNA, 50 bp, unidentified
  source 1..50: mol_type = unassigned DNA; note = donor_5b9824e
  misc_feature 1..24: note = RE
  misc_feature 25: note = Core
  misc_feature 26..50: note = LE
gttaaaatcatattctttcaaacttgaccattcctttccgccttgctaca

SEQ ID NO: 34008 - DNA, 50 bp, unidentified; identical to SEQ ID NO: 31193
  source 1..50: mol_type = unassigned DNA; note = donor_5ba3e2e
  misc_feature 1..22: note = RE
  misc_feature 23..25: note = Core
  misc_feature 26..50: note = LE

SEQ ID NO: 34009 - DNA, 50 bp, unidentified
  source 1..50: mol_type = unassigned DNA; note = donor_5bad4bd
  misc_feature 1..24: note = RE
  misc_feature 25: note = Core
  misc_feature 26..50: note = LE
cacgggttgacaacaaaggggagcctactagacgattgcggtaggaccgg

SEQ ID NO: 34010 - DNA, 50 bp, unidentified
  source 1..50: mol_type = unassigned DNA; note = donor_5bb0863
  misc_feature 1..23: note = RE
  misc_feature 24..25: note = Core
  misc_feature 26..50: note = LE
cttgacaaagtcctgctcatattaagacgatatgagcaggacataaaatt

SEQ ID NO: 34011 - DNA, 50 bp, unidentified
  source 1..50: mol_type = unassigned DNA; note = donor_5bc85ac
  misc_feature 1..22: note = RE
  misc_feature 23..25: note = Core
  misc_feature 26..50: note = LE
tcttgacgtccatatagttagtcttgtataatgcagaagcattatatttc

SEQ ID NO: 34012 - DNA, 50 bp, unidentified
  source 1..50: mol_type = unassigned DNA; note = donor_5bd8a04
  misc_feature 1..22: note = RE
  misc_feature 23..25: note = Core
  misc_feature 26..50: note = LE
ggcttgacacggtcattcagattccctaagttcgtaggtgtccggggtag

SEQ ID NO: 34013 - DNA, 50 bp, unidentified
  source 1..50: mol_type = unassigned DNA; note = donor_5bdbb88
  misc_feature 1..21: note = RE
  misc_feature 22..25: note = Core
  misc_feature 26..50: note = LE
gggaaggttgacacagggcaactcactggtgcaccatcctcttgtcggta

SEQ ID NO: 34014 - DNA, 50 bp, unidentified
  source 1..50: mol_type = unassigned DNA; note = donor_5bdc853
  misc_feature 1..24: note = RE
  misc_feature 25: note = Core
  misc_feature 26..50: note = LE
cttgccgacggggcgagccatacgtatggatggctcgccccttatccgaa

SEQ ID NO: 34015 - DNA, 50 bp, unidentified
  source 1..50: mol_type = unassigned DNA; note = donor_5be6fca
  misc_feature 1..24: note = RE
  misc_feature 25: note = Core
  misc_feature 26..50: note = LE
tgcagcgacggggaagtccttatagaatgaaagggacttcccctggccgg

SEQ ID NO: 34016 - DNA, 50 bp, unidentified
  source 1..50: mol_type = unassigned DNA; note = donor_5bf0662
  misc_feature 1..23: note = RE
  misc_feature 24..25: note = Core
  misc_feature 26..50: note = LE
ccccgagttgacacacagaggcgctgacttgttgaattcggggtcaggac

SEQ ID NO: 34017 - DNA, 50 bp, unidentified
  source 1..50: mol_type = unassigned DNA; note = donor_5bf0d82
  misc_feature 1..23: note = RE
  misc_feature 24..25: note = Core
  misc_feature 26..50: note = LE
tcacaatcatcctttaatggttgcttgtattagcgcgatctgttatgctg

SEQ ID NO: 34018 - DNA, 50 bp, unidentified; identical to SEQ ID NO: 30838
  source 1..50: mol_type = unassigned DNA; note = donor_5c04ee3
  misc_feature 1..23: note = RE
  misc_feature 24..25: note = Core
  misc_feature 26..50: note = LE

SEQ ID NO: 34019 - DNA, 50 bp, unidentified
  source 1..50: mol_type = unassigned DNA; note = donor_5c05ec7
  misc_feature 1..24: note = RE
  misc_feature 25: note = Core
  misc_feature 26..50: note = LE
ggcttgacagcaaacatagggacacgttaccttcttcgtagtcccgcacc

SEQ ID NO: 34020 - DNA, 50 bp, unidentified
  source 1..50: mol_type = unassigned DNA; note = donor_5c0cf66
  misc_feature 1..23: note = RE
  misc_feature 24..25: note = Core
  misc_feature 26..50: note = LE
tgacagttagagccgtgggatgtctaatggggttgtaccgcggtggtgag

SEQ ID NO: 34021 - DNA, 50 bp, unidentified
  source 1..50: mol_type = unassigned DNA; note = donor_5c11efd
  misc_feature 1..24: note = RE
  misc_feature 25: note = Core
  misc_feature 26..50: note = LE
tcccagttgacaaaactataggaaccattacagtctgaaataggctatcg

SEQ ID NO: 34022 - DNA, 50 bp, unidentified
  source 1..50: mol_type = unassigned DNA; note = donor_5c13414
  misc_feature 1..24: note = RE
  misc_feature 25: note = Core
  misc_feature 26..50: note = LE
tgcaaaaaacggtgtgtccatagataatgaaatggacatccctcctatac

SEQ ID NO: 34023 - DNA, 50 bp, unidentified
  source 1..50: mol_type = unassigned DNA; note = donor_5c16860
  misc_feature 1..22: note = RE
  misc_feature 23..25: note = Core
  misc_feature 26..50: note = LE
ccaaatgggcgccatccagacatgatgtagtggatggcgccctccgacgg

SEQ ID NO: 34024 - DNA, 50 bp, unidentified
  source 1..50: mol_type = unassigned DNA; note = donor_5c24ac3
  misc_feature 1..23: note = RE
  misc_feature 24..25: note = Core
  misc_feature 26..50: note = LE
cttgcaaatcccgctattagacgacatggggtaatcgcgggagcaaccac

SEQ ID NO: 34025 - DNA, 50 bp, unidentified
  source 1..50: mol_type = unassigned DNA; note = donor_5c2b977
  misc_feature 1..21: note = RE
  misc_feature 22..25: note = Core
  misc_feature 26..50: note = LE
atgagggttgacacagggtgtctcactaggctaccctcccccgaagaggt

SEQ ID NO: 34026 - DNA, 50 bp, unidentified
  source 1..50: mol_type = unassigned DNA; note = donor_5c3a63d
  misc_feature 1..24: note = RE
  misc_feature 25: note = Core
  misc_feature 26..50: note = LE
ttggcaaacaggggcgaccatgtataatggaatggtcgcccctgtctgat

SEQ ID NO: 34027 - DNA, 50 bp, unidentified
  source 1..50: mol_type = unassigned DNA; note = donor_5c3ccf8
  misc_feature 1..23: note = RE
  misc_feature 24..25: note = Core
  misc_feature 26..50: note = LE
cttgccaaacgggcgtctacacatgatgatgtagacgcccgcgacggccc

SEQ ID NO: 34028 - DNA, 50 bp, unidentified
  source 1..50: mol_type = unassigned DNA; note = donor_5c52f76
  misc_feature 1..23: note = RE
  misc_feature 24..25: note = Core
  misc_feature 26..50: note = LE
gcgctcacggaggcgtccacagatgatggggtggacgcctcccgacggcc

SEQ ID NO: 34029 - DNA, 50 bp, unidentified
  source 1..50: mol_type = unassigned DNA; note = donor_5c540ff
  misc_feature 1..23: note = RE
  misc_feature 24..25: note = Core
  misc_feature 26..50: note = LE
aagccgcttgatcaagacggatacttgtcttatgacttccgtcggctcct

SEQ ID NO: 34030 - DNA, 50 bp, unidentified
  source 1..50: mol_type = unassigned DNA; note = donor_5c57a84
  misc_feature 1..24: note = RE
  misc_feature 25: note = Core
  misc_feature 26..50: note = LE
ttgtaatgtggggcggaccatatataatggaatggtccgcctcactccta

SEQ ID NO: 34031 - DNA, 50 bp, unidentified
  source 1..50: mol_type = unassigned DNA; note = donor_5c6fee7
  misc_feature 1..23: note = RE
  misc_feature 24..25: note = Core
  misc_feature 26..50: note = LE
ctttcgcatgaacatcacagttgcctgtctgatgtgatgctggtatgaag

SEQ ID NO: 34032 - DNA, 50 bp, unidentified
  source 1..50: mol_type = unassigned DNA; note = donor_5c7e8c8
  misc_feature 1..23: note = RE
  misc_feature 24..25: note = Core
  misc_feature 26..50: note = LE
gccaacccggagccgtccacacatgatgctgtggacggctcctccccggc

SEQ ID NO: 34033 - DNA, 50 bp, unidentified
  source 1..50: mol_type = unassigned DNA; note = donor_5c919f5
  misc_feature 1..24: note = RE
  misc_feature 25: note = Core
  misc_feature 26..50: note = LE
tgcggaacggaggcggaccatacataatgggatggtccgccgcctttcca

SEQ ID NO: 34034 - DNA, 50 bp, unidentified; identical to SEQ ID NO: 31983
  source 1..50: mol_type = unassigned DNA; note = donor_5c935d1
  misc_feature 1..23: note = RE
  misc_feature 24..25: note = Core
  misc_feature 26..50: note = LE

SEQ ID NO: 34035 - DNA, 50 bp, unidentified
  source 1..50: mol_type = unassigned DNA; note = donor_5c97e40
  misc_feature 1..24: note = RE
  misc_feature 25: note = Core
  misc_feature 26..50: note = LE
agatttgttttttaactcagttcttcttaagtttacaaatcattaaattt

SEQ ID NO: 34036 - DNA, 50 bp, unidentified
  source 1..50: mol_type = unassigned DNA; note = donor_5c9e560
  misc_feature 1..23: note = RE
  misc_feature 24..25: note = Core
  misc_feature 26..50: note = LE
tctattgacaattcatagttggtcttgtatgatgtatttagtaataaata

SEQ ID NO: 34037 - DNA, 50 bp, unidentified
  source 1..50: mol_type = unassigned DNA; note = donor_5cc0bb2
  misc_feature 1..24: note = RE
  misc_feature 25: note = Core
  misc_feature 26..50: note = LE
ttgcaaacgggagacgtccatatagaatgaaatggacgcctcctacctgg

SEQ ID NO: 34038 - DNA, 50 bp, unidentified
  source 1..50: mol_type = unassigned DNA; note = donor_5cc6661
  misc_feature 1..23: note = RE
  misc_feature 24..25: note = Core
  misc_feature 26..50: note = LE
ctacttgacttcataccattggactcgtataataagatttgcagacagtt

SEQ ID NO: 34039 - DNA, 50 bp, unidentified
  source 1..50: mol_type = unassigned DNA; note = donor_5ccae1a
  misc_feature 1..22: note = RE
  misc_feature 23..25: note = Core
  misc_feature 26..50: note = LE
ggcttgacacgctcattgagagtccttaagttcgaggggtcagtaggttg

SEQ ID NO: 34040 - DNA, 50 bp, unidentified
  source 1..50: mol_type = unassigned DNA; note = donor_5cd4aaa
  misc_feature 1..24: note = RE
  misc_feature 25: note = Core
  misc_feature 26..50: note = LE
acgggttgacgaaacccataggggcccattaccttcttggtggccccgca

SEQ ID NO: 34041 - DNA, 50 bp, unidentified; identical to SEQ ID NO: 32995
  source 1..50: mol_type = unassigned DNA; note = donor_5ce342b
  misc_feature 1..23: note = RE
  misc_feature 24..25: note = Core
  misc_feature 26..50: note = LE

SEQ ID NO: 34042 - DNA, 50 bp, unidentified
  source 1..50: mol_type = unassigned DNA; note = donor_5cef718
  misc_feature 1..24: note = RE
  misc_feature 25: note = Core
  misc_feature 26..50: note = LE
tgcaaaaacggagcggaccatacataatgggatggtccgctccgattcca

SEQ ID NO: 34043 - DNA, 50 bp, unidentified
  source 1..50: mol_type = unassigned DNA; note = donor_5cefee0
  misc_feature 1..23: note = RE
  misc_feature 24..25: note = Core
  misc_feature 26..50: note = LE
gcaagccgggggccgtccacatatgatggggtggacggccccgagcggca

SEQ ID NO: 34044 - DNA, 50 bp, unidentified
  source 1..50: mol_type = unassigned DNA; note = donor_5cf1a6a
  misc_feature 1..24: note = RE
  misc_feature 25: note = Core
  misc_feature 26..50: note = LE
gcacccgttgacacagaggggtgcctactaggagacttcccagcaggacc

SEQ ID NO: 34045 - DNA, 50 bp, unidentified
  source 1..50: mol_type = unassigned DNA; note = donor_5cf6bd9
  misc_feature 1..21: note = RE
  misc_feature 22..25: note = Core
  misc_feature 26..50: note = LE
catgaggttgacacagggagtgtcactagggcaccctctttctcgtaggc

SEQ ID NO: 34046 - DNA, 50 bp, unidentified
  source 1..50: mol_type = unassigned DNA; note = donor_5cf9c82
  misc_feature 1..20: note = RE
  misc_feature 21..25: note = Core
  misc_feature 26..50: note = LE
gattttcatagaaaaaaaagaaacatccatgaataaattttactccccac

SEQ ID NO: 34047 - DNA, 50 bp, unidentified
  source 1..50: mol_type = unassigned DNA; note = donor_5d1896d
  misc_feature 1..23: note = RE
  misc_feature 24..25: note = Core
  misc_feature 26..50: note = LE
tcgattgacgagcaagacggtatcttgtatctttccctccgtggtggtta

SEQ ID NO: 34048 - DNA, 50 bp, unidentified
  source 1..50: mol_type = unassigned DNA; note = donor_5d1bfad
  misc_feature 1..23: note = RE
  misc_feature 24..25: note = Core
  misc_feature 26..50: note = LE
ccgcttgacgtccaagacggtagcttgtatcttgaaccggtagctggtta

SEQ ID NO: 34049 - DNA, 50 bp, unidentified
  source 1..50: mol_type = unassigned DNA; note = donor_5d37fab
  misc_feature 1..23: note = RE
  misc_feature 24..25: note = Core
  misc_feature 26..50: note = LE
gcaaggcggcggccgtccacatatgttggtgtggacggcctccgtacggc

SEQ ID NO: 34050 - DNA, 50 bp, unidentified
  source 1..50: mol_type = unassigned DNA; note = donor_5d45535
  misc_feature 1..23: note = RE
  misc_feature 24..25: note = Core
  misc_feature 26..50: note = LE
gcgcccacggaggcgtccacagatgatggggtggacgcctccccgacggc

SEQ ID NO: 34051 - DNA, 50 bp, unidentified
  source 1..50: mol_type = unassigned DNA; note = donor_5d46c1b
  misc_feature 1..24: note = RE
  misc_feature 25: note = Core
  misc_feature 26..50: note = LE
acggcttgacgaaaaccataggggcgttaccttgttcgtggtcccgcaat

SEQ ID NO: 34052 - DNA, 50 bp, unidentified
  source 1..50: mol_type = unassigned DNA; note = donor_5d5189f
  misc_feature 1..23: note = RE
  misc_feature 24..25: note = Core
  misc_feature 26..50: note = LE
acgcttgaccgccaagacagtcgcttgtaactcatcatgtgccgaatccg

SEQ ID NO: 34053 - DNA, 50 bp, unidentified
  source 1..50: mol_type = unassigned DNA; note = donor_5d56d9e
  misc_feature 1..23: note = RE
  misc_feature 24..25: note = Core
  misc_feature 26..50: note = LE
tggcttgactttatatagttggtctcgtataataaagttgtaccagatat

SEQ ID NO: 34054 - DNA, 50 bp, unidentified
  source 1..50: mol_type = unassigned DNA; note = donor_5d6089f
  misc_feature 1..22: note = RE
  misc_feature 23..25: note = Core
  misc_feature 26..50: note = LE
cgcaacggacggcaaccacagaagatggggtggttgccgtcctcccctca

SEQ ID NO: 34055 - DNA, 50 bp, unidentified; identical to SEQ ID NO: 30373
  source 1..50: mol_type = unassigned DNA; note = donor_5d64874
  misc_feature 1..23: note = RE
  misc_feature 24..25: note = Core
  misc_feature 26..50: note = LE

SEQ ID NO: 34056 - DNA, 50 bp, unidentified; identical to SEQ ID NO: 31105
  source 1..50: mol_type = unassigned DNA; note = donor_5d66437
  misc_feature 1..23: note = RE
  misc_feature 24..25: note = Core
  misc_feature 26..50: note = LE

SEQ ID NO: 34057 - DNA, 50 bp, unidentified
  source 1..50: mol_type = unassigned DNA; note = donor_5d6656b
  misc_feature 1..23: note = RE
  misc_feature 24..25: note = Core
  misc_feature 26..50: note = LE
gcacccgcaggggcgtccacacatgatggggtggacgccccccgacggca

SEQ ID NO: 34058 - DNA, 50 bp, unidentified
  source 1..50: mol_type = unassigned DNA; note = donor_5d6a3cf
  misc_feature 1..22: note = RE
  misc_feature 23..25: note = Core
  misc_feature 26..50: note = LE
gtacttgatttttgttagcaggtttagtaccataaaagtgtaattgttag

SEQ ID NO: 34059 - DNA, 50 bp, unidentified
  source 1..50: mol_type = unassigned DNA; note = donor_5d6c6e9
  misc_feature 1..23: note = RE
  misc_feature 24..25: note = Core
  misc_feature 26..50: note = LE
acgcttgacgtccaagacggttacttgtatgttcagctcagaccagcgcg

SEQ ID NO: 34060 - DNA, 50 bp, unidentified
  source 1..50: mol_type = unassigned DNA; note = donor_5d70c81
  misc_feature 1..23: note = RE
  misc_feature 24..25: note = Core
  misc_feature 26..50: note = LE
acctctacttttcattttcaatctttatatccattcctttcgctttgctc

SEQ ID NO: 34061 - DNA, 50 bp, unidentified
  source 1..50: mol_type = unassigned DNA; note = donor_5d7882c
  misc_feature 1..24: note = RE
  misc_feature 25: note = Core
  misc_feature 26..50: note = LE
gcaacccgaggaggagtccatatacaatgggatggactcctcctctcctt

SEQ ID NO: 34062 - DNA, 50 bp, unidentified
  source 1..50: mol_type = unassigned DNA; note = donor_5d81d42
  misc_feature 1..24: note = RE
  misc_feature 25: note = Core
  misc_feature 26..50: note = LE
ttctttgcacaatatcataagaagctttaattttgcagattgagaagaga

SEQ ID NO: 34063 - DNA, 50 bp, unidentified
  source 1..50: mol_type = unassigned DNA; note = donor_5d85f0c
  misc_feature 1..23: note = RE
  misc_feature 24..25: note = Core
  misc_feature 26..50: note = LE
accgcgccttgacaagagaggtgccaacttgttggattggtggcggagat

SEQ ID NO: 34064 - DNA, 50 bp, unidentified
  source 1..50: mol_type = unassigned DNA; note = donor_5d8a99a
  misc_feature 1..23: note = RE
  misc_feature 24..25: note = Core
  misc_feature 26..50: note = LE
agcttgactgcaaaagagagaatcttgtatcttgtttgcaactgccccga

SEQ ID NO: 34065 - DNA, 50 bp, unidentified
  source 1..50: mol_type = unassigned DNA; note = donor_5d90e7a
  misc_feature 1..23: note = RE
  misc_feature 24..25: note = Core
  misc_feature 26..50: note = LE
caaaaatgggggtgaccatagatttaatgagatggtcacccccacaccct

SEQ ID NO: 34066 - DNA, 50 bp, unidentified
  source 1..50: mol_type = unassigned DNA; note = donor_5d929e2
  misc_feature 1..24: note = RE
  misc_feature 25: note = Core
  misc_feature 26..50: note = LE
ttgcaaaaacgggggtgaccatagaatgagatggtcacccccacaccctg

SEQ ID NO: 34067 - DNA, 50 bp, unidentified
  source 1..50: mol_type = unassigned DNA; note = donor_5d9ba60
  misc_feature 1..23: note = RE
  misc_feature 24..25: note = Core
  misc_feature 26..50: note = LE
gccaaacggaggccgtccacacatgatgaggtggacggcctcctaccgcg

SEQ ID NO: 34068 - DNA, 50 bp, unidentified
  source 1..50: mol_type = unassigned DNA; note = donor_5da4ea2
  misc_feature 1..24: note = RE
  misc_feature 25: note = Core
  misc_feature 26..50: note = LE
ttgacagcgctctcaaagaggtctctaattgagaccgaggcaagcgttgc

SEQ ID NO: 34069 - DNA, 50 bp, unidentified
  source 1..50: mol_type = unassigned DNA; note = donor_5dab766
  misc_feature 1..24: note = RE
  misc_feature 25: note = Core
  misc_feature 26..50: note = LE
tgcagtcacgcggcggaccatacataatgagatggtccgccgctgtaacc

SEQ ID NO: 34070 - DNA, 50 bp, unidentified
  source 1..50: mol_type = unassigned DNA; note = donor_5db2efb
  misc_feature 1..24: note = RE
  misc_feature 25: note = Core
  misc_feature 26..50: note = LE
acaaagttcttcatagaagggagcctacttatgtcttccaagaccgctcg

SEQ ID NO: 34071 - DNA, 50 bp, unidentified
  source 1..50: mol_type = unassigned DNA; note = donor_5dc05ec
  misc_feature 1..23: note = RE
  misc_feature 24..25: note = Core
  misc_feature 26..50: note = LE
accttgacaactacctatgggacctgatatagctccttgtcagagggttc

SEQ ID NO: 34072 - DNA, 50 bp, unidentified
  source 1..50: mol_type = unassigned DNA; note = donor_5dc6386
  misc_feature 1..23: note = RE
  misc_feature 24..25: note = Core
  misc_feature 26..50: note = LE
accttgaccacgccgattagagaagatagggtaatcggcttcgagcccgt

SEQ ID NO: 34073 - DNA, 50 bp, unidentified; identical to SEQ ID NO: 32110
  source 1..50: mol_type = unassigned DNA; note = donor_5dd2041
  misc_feature 1..23: note = RE
  misc_feature 24..25: note = Core
  misc_feature 26..50: note = LE

SEQ ID NO: 34074 - DNA, 50 bp, unidentified; identical to SEQ ID NO: 30713
  source 1..50: mol_type = unassigned DNA; note = donor_5dd235d
  misc_feature 1..22: note = RE
  misc_feature 23..25: note = Core
  misc_feature 26..50: note = LE

SEQ ID NO: 34075 - DNA, 50 bp, unidentified; identical to SEQ ID NO: 30869
  source 1..50: mol_type = unassigned DNA; note = donor_5dda111
  misc_feature 1..24: note = RE
  misc_feature 25: note = Core
  misc_feature 26..50: note = LE

SEQ ID NO: 34076 - DNA, 50 bp, unidentified
  source 1..50: mol_type = unassigned DNA; note = donor_5dde4a4
  misc_feature 1..23: note = RE
  misc_feature 24..25: note = Core
  misc_feature 26..50: note = LE
gccaacacggagccgtccacacatgatgctgtggacggctcctccgccgg

SEQ ID NO: 34077 - DNA, 50 bp, unidentified
  source 1..50: mol_type = unassigned DNA; note = donor_5de19ba
  misc_feature 1..23: note = RE
  misc_feature 24..25: note = Core
  misc_feature 26..50: note = LE
gacctacttgaccaagacggatacttgtcttatgacttccctcggcttcc

SEQ ID NO: 34078 - DNA, 50 bp, unidentified
  source 1..50: mol_type = unassigned DNA; note = donor_5de61bb
  misc_feature 1..22: note = RE
  misc_feature 23..25: note = Core
  misc_feature 26..50: note = LE
cgcttgacttacaacagagtatcttgtatgttgacgaggagacgcgggga

SEQ ID NO: 34079 - DNA, 50 bp, unidentified
  source 1..50: mol_type = unassigned DNA; note = donor_5de7027
  misc_feature 1..21: note = RE
  misc_feature 22..25: note = Core
  misc_feature 26..50: note = LE
cctgaggttgactcaggaagtgtcactagggcaccatccttattgcgggc

SEQ ID NO: 34080 - DNA, 50 bp, unidentified; identical to SEQ ID NO: 30783
  source 1..50: mol_type = unassigned DNA; note = donor_5df75b1
  misc_feature 1..22: note = RE
  misc_feature 23..25: note = Core
  misc_feature 26..50: note = LE

SEQ ID NO: 34081 - DNA, 50 bp, unidentified
  source 1..50: mol_type = unassigned DNA; note = donor_5df7d54
  misc_feature 1..21: note = RE
  misc_feature 22..25: note = Core
  misc_feature 26..50: note = LE
ctattgactttttatagttagcctcgtataatcaatcttaagggaaatac

SEQ ID NO: 34082 - DNA, 50 bp, unidentified
  source 1..50: mol_type = unassigned DNA; note = donor_5dfab43
  misc_feature 1..23: note = RE
  misc_feature 24..25: note = Core
  misc_feature 26..50: note = LE
gcaaaatgggaggagaccatatacgatgagatggtctcctcccgcttcca

SEQ ID NO: 34083 - DNA, 50 bp, unidentified
  source 1..50: mol_type = unassigned DNA; note = donor_5e04cef
  misc_feature 1..23: note = RE
  misc_feature 24..25: note = Core
  misc_feature 26..50: note = LE
tctgttgaccgccaagacggtatcttgtatcttatttttctatggtagtt

SEQ ID NO: 34084 - DNA, 50 bp, unidentified
  source 1..50: mol_type = unassigned DNA; note = donor_5e0832b
  misc_feature 1..24: note = RE
  misc_feature 25: note = Core
  misc_feature 26..50: note = LE
atatttggattttaacatagaaagctctaagtttgcagaaggaatgcgac

SEQ ID NO: 34085 - DNA, 50 bp, unidentified
  source 1..50: mol_type = unassigned DNA; note = donor_5e0c454
  misc_feature 1..24: note = RE
  misc_feature 25: note = Core
  misc_feature 26..50: note = LE
tgcgacgcgcggccggaccatacataatgggatggtccggccgtgctcct

SEQ ID NO: 34086 - DNA, 50 bp, unidentified
  source 1..50: mol_type = unassigned DNA; note = donor_5e0e2a7
  misc_feature 1..22: note = RE
  misc_feature 23..25: note = Core
  misc_feature 26..50: note = LE
cttgactcaaaaagccccatacaagatgctatggggcggcggcgtggata

SEQ ID NO: 34087 - DNA, 50 bp, unidentified
  source 1..50: mol_type = unassigned DNA; note = donor_5e1a9d4
  misc_feature 1..24: note = RE
  misc_feature 25: note = Core
  misc_feature 26..50: note = LE
gcaaaaagaggaggagtccatatacaatgggatggactcctcctcacctt

SEQ ID NO: 34088 - DNA, 50 bp, unidentified
  source 1..50: mol_type = unassigned DNA; note = donor_5e1bdd3
  misc_feature 1..23: note = RE
  misc_feature 24..25: note = Core
  misc_feature 26..50: note = LE
gacacccataggcccgttacagaagatggggtaacgggccggtcatctgg

SEQ ID NO: 34089 - DNA, 50 bp, unidentified; identical to SEQ ID NO: 33203
  source 1..50: mol_type = unassigned DNA; note = donor_5e1e621
  misc_feature 1..24: note = RE
  misc_feature 25: note = Core
  misc_feature 26..50: note = LE

SEQ ID NO: 34090 - DNA, 50 bp, unidentified
  source 1..50: mol_type = unassigned DNA; note = donor_5e236a8
  misc_feature 1..23: note = RE
  misc_feature 24..25: note = Core
  misc_feature 26..50: note = LE
gacaccttgcacccctgggatgtctaatgggggtggatcggtgatctttc

SEQ ID NO: 34091 - DNA, 50 bp, unidentified
  source 1..50: mol_type = unassigned DNA; note = donor_5e26f4f
  misc_feature 1..23: note = RE
  misc_feature 24..25: note = Core
  misc_feature 26..50: note = LE
tgccatggagggccgtccacatatgatggtgtggacggcctctcctcaac

SEQ ID NO: 34092 - DNA, 50 bp, unidentified
  source 1..50: mol_type = unassigned DNA; note = donor_5e292e4
  misc_feature 1..23: note = RE
  misc_feature 24..25: note = Core
  misc_feature 26..50: note = LE
ttatttggaatttaacacagaatctcctatgtttgtttttatataattta

SEQ ID NO: 34093 - DNA, 50 bp, unidentified
  source 1..50: mol_type = unassigned DNA; note = donor_5e2bcd2
  misc_feature 1..24: note = RE
  misc_feature 25: note = Core
  misc_feature 26..50: note = LE
tgcaaaacgggaggtgtccatatacaatggaatggacacctcccacctaa

SEQ ID NO: 34094 - DNA, 50 bp, unidentified
  source 1..50: mol_type = unassigned DNA; note = donor_5e2d583
  misc_feature 1..23: note = RE
  misc_feature 24..25: note = Core
  misc_feature 26..50: note = LE
ggtgatcggatgagaagacagttgccgcttgtgtctggaggttgctctac

SEQ ID NO: 34095 - DNA, 50 bp, unidentified
  source 1..50: mol_type = unassigned DNA; note = donor_5e3059f
  misc_feature 1..23: note = RE
  misc_feature 24..25: note = Core
  misc_feature 26..50: note = LE
atgccacttgaccgacacggatacttgtcttatgacttctgtcggctccc

SEQ ID NO: 34096 - DNA, 50 bp, unidentified
  source 1..50: mol_type = unassigned DNA; note = donor_5e3215c
  misc_feature 1..23: note = RE
  misc_feature 24..25: note = Core
  misc_feature 26..50: note = LE
gacacaacggggaagtctttagagaatgtaagggacttccccgtcccgag

SEQ ID NO: 34097 - DNA, 50 bp, unidentified
  source 1..50: mol_type = unassigned DNA; note = donor_5e354bc
  misc_feature 1..22: note = RE
  misc_feature 23..25: note = Core
  misc_feature 26..50: note = LE
caatccgggaggcgtccacataagatggtatggacgcctccccccggaaa

SEQ ID NO: 34098 - DNA, 50 bp, unidentified
  source 1..50: mol_type = unassigned DNA; note = donor_5e3687d
  misc_feature 1..23: note = RE
  misc_feature 24..25: note = Core
  misc_feature 26..50: note = LE
tgcaaaaggagggggaccatagattaatgagatggtccccctccaccctg

SEQ ID NO: 34099 - DNA, 50 bp, unidentified
  source 1..50: mol_type = unassigned DNA; note = donor_5e39219
  misc_feature 1..24: note = RE
  misc_feature 25: note = Core
  misc_feature 26..50: note = LE
gcaaaaaagggagtgaccatagattaatgagatggtcactccctccttcg

SEQ ID NO: 34100 - DNA, 50 bp, unidentified
  source 1..50: mol_type = unassigned DNA; note = donor_5e39252
  misc_feature 1..24: note = RE
  misc_feature 25: note = Core
  misc_feature 26..50: note = LE
cttgcagagggggcgggccatacgtatgggatggcccgccccttatctct

SEQ ID NO: 34101 - DNA, 50 bp, unidentified
  source 1..50: mol_type = unassigned DNA; note = donor_5e436b2
  misc_feature 1..23: note = RE
  misc_feature 24..25: note = Core
  misc_feature 26..50: note = LE
ctcggtgacggccaagacggtatcttgtatctcgactaacgcctcacaaa

SEQ ID NO: 34102 - DNA, 50 bp, unidentified
  source 1..50: mol_type = unassigned DNA; note = donor_5e4499f
  misc_feature 1..23: note = RE
  misc_feature 24..25: note = Core
  misc_feature 26..50: note = LE
gacacactaagcccctgggatgtctaataagggttgctgggttggccgtg

SEQ ID NO: 34103 - DNA, 50 bp, unidentified
  source 1..50: mol_type = unassigned DNA; note = donor_5e4ca28
  misc_feature 1..23: note = RE
  misc_feature 24..25: note = Core
  misc_feature 26..50: note = LE
actcttgacatttattagcagggttcgtattatataagagtagagattaa

SEQ ID NO: 34104 - DNA, 50 bp, unidentified
  source 1..50: mol_type = unassigned DNA; note = donor_5e4da7a
  misc_feature 1..22: note = RE
  misc_feature 23..25: note = Core
  misc_feature 26..50: note = LE
cagcccgggggccatccacacatgatggggtggatggccccctcacggca

SEQ ID NO: 34105 - DNA, 50 bp, unidentified
  source 1..50: mol_type = unassigned DNA; note = donor_5e4e603
  misc_feature 1..24: note = RE
  misc_feature 25: note = Core
  misc_feature 26..50: note = LE
tccaaaacgggaggagtccatatacaatgggatggactcctccctcctca

SEQ ID NO: 34106 - DNA, 50 bp, unidentified
  source 1..50: mol_type = unassigned DNA; note = donor_5e52a49
  misc_feature 1..23: note = RE
  misc_feature 24..25: note = Core
  misc_feature 26..50: note = LE
agattgcctgcttgacacggttgcttgtatgtcgcacaattcggtctgga

SEQ ID NO: 34107 - DNA, 50 bp, unidentified
  source 1..50: mol_type = unassigned DNA; note = donor_5e5525a
  misc_feature 1..23: note = RE
  misc_feature 24..25: note = Core
  misc_feature 26..50: note = LE
tctcttgacatcattaccggttgctcgtataatatgtgtataagatcgta

SEQ ID NO: 34108 - DNA, 50 bp, unidentified
  source 1..50: mol_type = unassigned DNA; note = donor_5e55e69
  misc_feature 1..21: note = RE
  misc_feature 22..25: note = Core
  misc_feature 26..50: note = LE
cgcttgacaacaacattgagattccgtaagactgaagcggcccgggggaa

SEQ ID NO: 34109 - DNA, 50 bp, unidentified
  source 1..50: mol_type = unassigned DNA; note = donor_5e58be3
  misc_feature 1..23: note = RE
  misc_feature 24..25: note = Core
  misc_feature 26..50: note = LE
catgatgggcggaaagacggtatcttatatctcgattctgtcttctacaa

SEQ ID NO: 34110 - DNA, 50 bp, unidentified
  source 1..50: mol_type = unassigned DNA; note = donor_5e5913e
  misc_feature 1..21: note = RE
  misc_feature 22..25: note = Core
  misc_feature 26..50: note = LE
ggcttgacttcgtcattgagactccgtaagttgttgggcggcccgggagg

SEQ ID NO: 34111 - DNA, 50 bp, unidentified
  source 1..50: mol_type = unassigned DNA; note = donor_5e5d2ed
  misc_feature 1..23: note = RE
  misc_feature 24..25: note = Core
  misc_feature 26..50: note = LE
gcttgacaatcacatagggacacccgttacctttttcgtggttcctgatc

SEQ ID NO: 34112 - DNA, 50 bp, unidentified
  source 1..50: mol_type = unassigned DNA; note = donor_5e5e6ac
  misc_feature 1..24: note = RE
  misc_feature 25: note = Core
  misc_feature 26..50: note = LE
gcaacgcacggccggtccatagattaatggcatggaccggccgtgctctc

SEQ ID NO: 34113 - DNA, 50 bp, unidentified
  source 1..50: mol_type = unassigned DNA; note = donor_5e7928a
  misc_feature 1..23: note = RE
  misc_feature 24..25: note = Core
  misc_feature 26..50: note = LE
tcgcttgactttcaagacagttgcttgtatctagcgatcagttgattctg

SEQ ID NO: 34114 - DNA, 50 bp, unidentified
  source 1..50: mol_type = unassigned DNA; note = donor_5e7a6c6
  misc_feature 1..24: note = RE
  misc_feature 25: note = Core
  misc_feature 26..50: note = LE
ctgcgtcttgacacagaggggtgcctgcttgttccattgacctaggactg

SEQ ID NO: 34115 - DNA, 50 bp, unidentified
  source 1..50: mol_type = unassigned DNA; note = donor_5e7b9d0
  misc_feature 1..23: note = RE
  misc_feature 24..25: note = Core
  misc_feature 26..50: note = LE
aagcgggttcggagagatggtatcttgtatctctcttgttagcgtgatga

SEQ ID NO: 34116 - DNA, 50 bp, unidentified
  source 1..50: mol_type = unassigned DNA; note = donor_5e7c22e
  misc_feature 1..22: note = RE
  misc_feature 23..25: note = Core
  misc_feature 26..50: note = LE
aaaaagacttgactatatagggaggagcttcttgtataattcaaatataa

SEQ ID NO: 34117 - DNA, 50 bp, unidentified
  source 1..50: mol_type = unassigned DNA; note = donor_5e7e24c
  misc_feature 1..23: note = RE
  misc_feature 24..25: note = Core
  misc_feature 26..50: note = LE
cttgacaaacttctctacatatcagacggtatgggtgactccccgatggt

SEQ ID NO: 34118 - DNA, 50 bp, unidentified
  source 1..50: mol_type = unassigned DNA; note = donor_5e8c61c
  misc_feature 1..23: note = RE
  misc_feature 24..25: note = Core
  misc_feature 26..50: note = LE
tggcttgacaggcaagacagtatcatgtatcttgccccctgagggaggcc

SEQ ID NO: 34119 - DNA, 50 bp, unidentified
  source 1..50: mol_type = unassigned DNA; note = donor_5e92b71
  misc_feature 1..23: note = RE
  misc_feature 24..25: note = Core
  misc_feature 26..50: note = LE
tgacaaaattcggcatgggatgtctaatgagatcagccgggccacctata

SEQ ID NO: 34120 - DNA, 50 bp, unidentified
  source 1..50: mol_type = unassigned DNA; note = donor_5e9bc82
  misc_feature 1..24: note = RE
  misc_feature 25: note = Core
  misc_feature 26..50: note = LE
cgatcaacgcataaactgacttggttgtctctcaaatctatgctttactg

SEQ ID NO: 34121 - DNA, 50 bp, unidentified
  source 1..50: mol_type = unassigned DNA; note = donor_5e9fcf3
  misc_feature 1..23: note = RE
  misc_feature 24..25: note = Core
  misc_feature 26..50: note = LE
gcaataacggggcggaccatacattaattatatggtccgccccattctaa

SEQ ID NO: 34122 - DNA, 50 bp, unidentified
  source 1..50: mol_type = unassigned DNA; note = donor_5eaafea
  misc_feature 1..23: note = RE
  misc_feature 24..25: note = Core
  misc_feature 26..50: note = LE
aggctgggtttgagagatggtatcttgtatctctcagtgataaatggcta

SEQ ID NO: 34123 - DNA, 50 bp, unidentified
  source 1..50: mol_type = unassigned DNA; note = donor_5eaf248
  misc_feature 1..23: note = RE
  misc_feature 24..25: note = Core
  misc_feature 26..50: note = LE
ttgcggacggggcgggccatacgttatggaatggcccgccccaaccctcc

SEQ ID NO: 34124 - DNA, 50 bp, unidentified
  source 1..50: mol_type = unassigned DNA; note = donor_5eb47dd
  misc_feature 1..24: note = RE
  misc_feature 25: note = Core
  misc_feature 26..50: note = LE
tggaaataagttaaacctagaatacctttggtctatcaaagactatttat

SEQ ID NO: 34125 - DNA, 50 bp, unidentified
  source 1..50: mol_type = unassigned DNA; note = donor_5eb67b3
  misc_feature 1..23: note = RE
  misc_feature 24..25: note = Core
  misc_feature 26..50: note = LE
gcacaacgggcggcaaccacagaagatgggatggttgccgccctccccag

SEQ ID NO: 34126 - DNA, 50 bp, unidentified; identical to SEQ ID NO: 31522
  source 1..50: mol_type = unassigned DNA; note = donor_5eb764f
  misc_feature 1..23: note = RE
  misc_feature 24..25: note = Core
  misc_feature 26..50: note = LE

SEQ ID NO: 34127 - DNA, 50 bp, unidentified
  source 1..50: mol_type = unassigned DNA; note = donor_5eca986
  misc_feature 1..23: note = RE
  misc_feature 24..25: note = Core
  misc_feature 26..50: note = LE
gcaaggcgggcgccgtccacatatgttgggtggacggcgcccgacggcat

SEQ ID NO: 34128 - DNA, 50 bp, unidentified
  source 1..50: mol_type = unassigned DNA; note = donor_5ed1668
  misc_feature 1..23: note = RE
  misc_feature 24..25: note = Core
  misc_feature 26..50: note = LE
gccttgacaaggccctatgggatctgatatacagcctagtggggtcagaa

SEQ ID NO: 34129 - DNA, 50 bp, unidentified
  source 1..50: mol_type = unassigned DNA; note = donor_5edb232
  misc_feature 1..23: note = RE
  misc_feature 24..25: note = Core
  misc_feature 26..50: note = LE
tgacatctaagctcctgggatgtctaatcagttctgggagtaagccatcc

SEQ ID NO: 34130 - DNA, 50 bp, unidentified
  source 1..50: mol_type = unassigned DNA; note = donor_5eddf1e
  misc_feature 1..23: note = RE
  misc_feature 24..25: note = Core
  misc_feature 26..50: note = LE
tgtccttgtgttctttcattggagaggtggcatgaaagaggccgctccca

SEQ ID NO: 34131 - DNA, 50 bp, unidentified
  source 1..50: mol_type = unassigned DNA; note = donor_5ee4888
  misc_feature 1..23: note = RE
  misc_feature 24..25: note = Core
  misc_feature 26..50: note = LE
gcacaacgggcggcaaccacagaagatggggtggttgccgccctcccaga

SEQ ID NO: 34132 - DNA, 50 bp, unidentified
  source 1..50: mol_type = unassigned DNA; note = donor_5ee56b5
  misc_feature 1..24: note = RE
  misc_feature 25: note = Core
  misc_feature 26..50: note = LE
ttgcaagccgggggcacccatgtataatgggatgggtgcccccacccgcc

SEQ ID NO: 34133 - DNA, 50 bp, unidentified
  source 1..50: mol_type = unassigned DNA; note = donor_5ef7c61
  misc_feature 1..24: note = RE
  misc_feature 25: note = Core
  misc_feature 26..50: note = LE
tttcctcttgacatatcaccagattcgtataataagtgtataaccaatag

SEQ ID NO: 34134 - DNA, 50 bp, unidentified
  source 1..50: mol_type = unassigned DNA; note = donor_5efcd0a
  misc_feature 1..24: note = RE
  misc_feature 25: note = Core
  misc_feature 26..50: note = LE
atgcttgttttttaactcagttcttcttaagtttacaatctctaatttta

SEQ ID NO: 34135 - DNA, 50 bp, unidentified
  source 1..50: mol_type = unassigned DNA; note = donor_5f035b3
  misc_feature 1..23: note = RE
  misc_feature 24..25: note = Core
  misc_feature 26..50: note = LE
gcaccagaagggccgtccacacatgatggggtggacggccccactgcgac

SEQ ID NO: 34136 - DNA, 50 bp, unidentified
  source 1..50: mol_type = unassigned DNA; note = donor_5f09577
  misc_feature 1..23: note = RE
  misc_feature 24..25: note = Core
  misc_feature 26..50: note = LE
cctcttgactttttatttgcagactactacaatgtatttggtcgatgttc

SEQ ID NO: 34137 - DNA, 50 bp, unidentified
  source 1..50: mol_type = unassigned DNA; note = donor_5f0a813
  misc_feature 1..23: note = RE
  misc_feature 24..25: note = Core
  misc_feature 26..50: note = LE
cggcttgacatcgtcattgggaagtcctaccttccaagcgtgggtctgag

SEQ ID NO: 34138 - DNA, 50 bp, unidentified
  source 1..50: mol_type = unassigned DNA; note = donor_5f0c15e
  misc_feature 1..23: note = RE
  misc_feature 24..25: note = Core
  misc_feature 26..50: note = LE
atccggccgcgacttaatggttgcttgtatgagcgcgaatcattacactg

SEQ ID NO: 34139 - DNA, 50 bp, unidentified
  source 1..50: mol_type = unassigned DNA; note = donor_5f0e99a
  misc_feature 1..22: note = RE
  misc_feature 23..25: note = Core
  misc_feature 26..50: note = LE
acctcaacgcgccgaatagagaagatgggatattcggcttgagcccattc

SEQ ID NO: 34140 - DNA, 50 bp, unidentified
  source 1..50: mol_type = unassigned DNA; note = donor_5f10b46
  misc_feature 1..24: note = RE
  misc_feature 25: note = Core
  misc_feature 26..50: note = LE
gcaaaaacgggagtgaccatagattaatgagatggtcactccctcctttc

SEQ ID NO: 34141 - DNA, 50 bp, unidentified
  source 1..50: mol_type = unassigned DNA; note = donor_5f15c2c
  misc_feature 1..23: note = RE
  misc_feature 24..25: note = Core
  misc_feature 26..50: note = LE
gccaacgcggtgccgtccacacatgatgctgtggacggctccaccacccg

SEQ ID NO: 34142 - DNA, 50 bp, unidentified
  source 1..50: mol_type = unassigned DNA; note = donor_5f1f957
  misc_feature 1..23: note = RE
  misc_feature 24..25: note = Core
  misc_feature 26..50: note = LE
gcatcttctggggcgtccacagatgatggggtggacgccccccgacggca

SEQ ID NO: 34143 - DNA, 50 bp, unidentified
  source 1..50: mol_type = unassigned DNA; note = donor_5f2197f
  misc_feature 1..23: note = RE
  misc_feature 24..25: note = Core
  misc_feature 26..50: note = LE
ttacttgacgtccaatacagtggcttgtatataaaatagaagatttaaaa

SEQ ID NO: 34144 - DNA, 50 bp, unidentified
  source 1..50: mol_type = unassigned DNA; note = donor_5f263cb
  misc_feature 1..24: note = RE
  misc_feature 25: note = Core
  misc_feature 26..50: note = LE
gacttttggggggaagcccttgtagaatgaaagggacttccccgtcccgg

SEQ ID NO: 34145 - DNA, 50 bp, unidentified
  source 1..50: mol_type = unassigned DNA; note = donor_5f27fe7
  misc_feature 1..23: note = RE
  misc_feature 24..25: note = Core
  misc_feature 26..50: note = LE
atcgcatcgcatgaacacagttgcctgtatgtccgggctgtgtcatgatg

SEQ ID NO: 34146 - DNA, 50 bp, unidentified
  source 1..50: mol_type = unassigned DNA; note = donor_5f35c81
  misc_feature 1..23: note = RE
  misc_feature 24..25: note = Core
  misc_feature 26..50: note = LE
caaaaagggagccatccacacaggatggtgtggatggctcctgcaccatc

SEQ ID NO: 34147 - DNA, 50 bp, unidentified
  source 1..50: mol_type = unassigned DNA; note = donor_5f4504e
  misc_feature 1..23: note = RE
  misc_feature 24..25: note = Core
  misc_feature 26..50: note = LE
gctatgcaggagccatccacacatgatggggtggatggctcctgcttcaa

SEQ ID NO: 34148 - DNA, 50 bp, unidentified
  source 1..50: mol_type = unassigned DNA; note = donor_5f45959
  misc_feature 1..24: note = RE
  misc_feature 25: note = Core
  misc_feature 26..50: note = LE
ccgcgtcttgacacagaggggagcctacttgttctatgagcccacgatcg

SEQ ID NO: 34149 - DNA, 50 bp, unidentified
  source 1..50: mol_type = unassigned DNA; note = donor_5f4e001
  misc_feature 1..23: note = RE
  misc_feature 24..25: note = Core
  misc_feature 26..50: note = LE
gcgtccggaggggcgtccacagatgatggggtggacgccccccgacagcc

SEQ ID NO: 34150 - DNA, 50 bp, unidentified
  source 1..50: mol_type = unassigned DNA; note = donor_5f4e365
  misc_feature 1..23: note = RE
  misc_feature 24..25: note = Core
  misc_feature 26..50: note = LE
cggcttgacatcagcattgggaagtcctacctttcaggcgtgggtctgct

SEQ ID NO: 34151 - DNA, 50 bp, unidentified
  source 1..50: mol_type = unassigned DNA; note = donor_5f57c5e
  misc_feature 1..22: note = RE
  misc_feature 23..25: note = Core
  misc_feature 26..50: note = LE
cagcttgacaaacattagctggtttcgtattattaggtcaaccggaattt

SEQ ID NO: 34152 - DNA, 50 bp, unidentified
  source 1..50: mol_type = unassigned DNA; note = donor_5f59367
  misc_feature 1..23: note = RE
  misc_feature 24..25: note = Core
  misc_feature 26..50: note = LE
gctcgcttgagcgaacacagttgcctgtctgttgaaaatgtgagaatgtg

SEQ ID NO: 34153 - DNA, 50 bp, unidentified
  source 1..50: mol_type = unassigned DNA; note = donor_5f6a74e
  misc_feature 1..22: note = RE
  misc_feature 23..25: note = Core
  misc_feature 26..50: note = LE
ccccgcgggggccgtccagacatgatggggtggacggcccccgctccgag

SEQ ID NO: 34154 - DNA, 50 bp, unidentified
  source 1..50: mol_type = unassigned DNA; note = donor_5f725cc
  misc_feature 1..24: note = RE
  misc_feature 25: note = Core
  misc_feature 26..50: note = LE
tgcgacgaggcggcggaccatacataatgggatggtccgccttccttgct

SEQ ID NO: 34155 - DNA, 50 bp, unidentified; identical to SEQ ID NO: 32328
  source 1..50: mol_type = unassigned DNA; note = donor_5f74d74
  misc_feature 1..24: note = RE
  misc_feature 25: note = Core
  misc_feature 26..50: note = LE

SEQ ID NO: 34156 - DNA, 50 bp, unidentified
  source 1..50: mol_type = unassigned DNA; note = donor_5f7b60c
  misc_feature 1..23: note = RE
  misc_feature 24..25: note = Core
  misc_feature 26..50: note = LE
aggaaaagtttttataccggaagcttatataaaacatattagtcagatct

SEQ ID NO: 34157 - DNA, 50 bp, unidentified
  source 1..50: mol_type = unassigned DNA; note = donor_5f8724d
  misc_feature 1..21: note = RE
  misc_feature 22..25: note = Core
  misc_feature 26..50: note = LE
tataaataatttggaataaccatagctatctcttaggtttgcagaatgaa

SEQ ID NO: 34158 - DNA, 50 bp, unidentified
  source 1..50: mol_type = unassigned DNA; note = donor_5f8830f
  misc_feature 1..24: note = RE
  misc_feature 25: note = Core
  misc_feature 26..50: note = LE
ttggcaaaagtgggcgtccatgtataatggaatggacgcccacttcctaa

SEQ ID NO: 34159 - DNA, 50 bp, unidentified
  source 1..50: mol_type = unassigned DNA; note = donor_5f9248e
  misc_feature 1..23: note = RE
  misc_feature 24..25: note = Core
  misc_feature 26..50: note = LE
tcacccaagcgacataacagttgccctgtgtgtggaagttctgtcatgat

SEQ ID NO: 34160 - DNA, 50 bp, unidentified
  source 1..50: mol_type = unassigned DNA; note = donor_5f9d38c
  misc_feature 1..23: note = RE
  misc_feature 24..25: note = Core
  misc_feature 26..50: note = LE
gacaccgaagcaccatgggatgtctaatgagagctgccggggcctgccgt

SEQ ID NO: 34161 - DNA, 50 bp, unidentified
  source 1..50: mol_type = unassigned DNA; note = donor_5fb0e5d
  misc_feature 1..23: note = RE
  misc_feature 24..25: note = Core
  misc_feature 26..50: note = LE
aggccgcttgacacacagaggcgctgacttgttgaatgacagccggatgc

SEQ ID NO: 34162 - DNA, 50 bp, unidentified
  source 1..50: mol_type = unassigned DNA; note = donor_5fb309a
  misc_feature 1..23: note = RE
  misc_feature 24..25: note = Core
  misc_feature 26..50: note = LE
ttatttgcttattaatatagttcgtcgtacatttgtacgttggttaataa

SEQ ID NO: 34163 - DNA, 50 bp, unidentified
  source 1..50: mol_type = unassigned DNA; note = donor_5fbacae
  misc_feature 1..23: note = RE
  misc_feature 24..25: note = Core
  misc_feature 26..50: note = LE
gagctccacccgccgaatagagaagatggggtattcggctcgagcctcat

SEQ ID NO: 34164 - DNA, 50 bp, unidentified
  source 1..50: mol_type = unassigned DNA; note = donor_5fbc5b9
  misc_feature 1..23: note = RE
  misc_feature 24..25: note = Core
  misc_feature 26..50: note = LE
cttccgagcgtgagacacagttgcctgtgtagttcaagtgtgcgaagatg

SEQ ID NO: 34165 - DNA, 50 bp, unidentified
  source 1..50: mol_type = unassigned DNA; note = donor_5fc25b0
  misc_feature 1..23: note = RE
  misc_feature 24..25: note = Core
  misc_feature 26..50: note = LE
gaccatttgtggcccgttacagaagatgtggtaacgggccggccgccttg

SEQ ID NO: 34166 - DNA, 50 bp, unidentified
  source 1..50: mol_type = unassigned DNA; note = donor_5fc713e
  misc_feature 1..24: note = RE
  misc_feature 25: note = Core
  misc_feature 26..50: note = LE
tgcaaacgaggaggagtccatacacaatgggatggactcctcctcatcca

SEQ ID NO: 34167 - DNA, 50 bp, unidentified
  source 1..50: mol_type = unassigned DNA; note = donor_5fce928
  misc_feature 1..24: note = RE
  misc_feature 25: note = Core
  misc_feature 26..50: note = LE
tgcaaaaggcgccgggtccatacatactgagatggacccgacgcctccct

SEQ ID NO: 34168 - DNA, 50 bp, unidentified
  source 1..50: mol_type = unassigned DNA; note = donor_5fe0f45
  misc_feature 1..21: note = RE
  misc_feature 22..25: note = Core
  misc_feature 26..50: note = LE
cggcagcttgacacagggcttctcactggtgcaccatccgtgtttcagtg

SEQ ID NO: 34169 - DNA, 50 bp, unidentified
  source 1..50: mol_type = unassigned DNA; note = donor_5fe44e7
  misc_feature 1..23: note = RE
  misc_feature 24..25: note = Core
  misc_feature 26..50: note = LE
tgcacaaccggggcgtccatatatgatgtgatggacgacccctttttcag

SEQ ID NO: 34170 - DNA, 50 bp, unidentified
  source 1..50: mol_type = unassigned DNA; note = donor_5fe7a54
  misc_feature 1..23: note = RE
  misc_feature 24..25: note = Core
  misc_feature 26..50: note = LE
gcaacgcgggcaccgtccatacatgatgtggtggacggtgcccgctcccg

SEQ ID NO: 34171 - DNA, 50 bp, unidentified
  source 1..50: mol_type = unassigned DNA; note = donor_5ff063d
  misc_feature 1..23: note = RE
  misc_feature 24..25: note = Core
  misc_feature 26..50: note = LE
cttgcaatcagggcgtctacacatgatgatgtagacgcctgccgctggct

SEQ ID NO: 34172 - DNA, 50 bp, unidentified
  source 1..50: mol_type = unassigned DNA; note = donor_5ffc09a
  misc_feature 1..23: note = RE
  misc_feature 24..25: note = Core
  misc_feature 26..50: note = LE
gacagcaaggggccgtccacacatgatgctgtggacggctcctccaccgg

SEQ ID NO: 34173 - DNA, 50 bp, unidentified
  source 1..50: mol_type = unassigned DNA; note = donor_5fffe37
  misc_feature 1..20: note = RE
  misc_feature 21..25: note = Core
  misc_feature 26..50: note = LE
cttggttttaataacagtaccttttatttttatagagaattagttaaagg

SEQ ID NO: 34174 - DNA, 50 bp, unidentified; identical to SEQ ID NO: 30783
  source 1..50: mol_type = unassigned DNA; note = donor_60068f7
  misc_feature 1..22: note = RE
  misc_feature 23..25: note = Core
  misc_feature 26..50: note = LE

SEQ ID NO: 34175 - DNA, 50 bp, unidentified
  source 1..50: mol_type = unassigned DNA; note = donor_600a6e5
  misc_feature 1..24: note = RE
  misc_feature 25: note = Core
  misc_feature 26..50: note = LE
tgcaaacggacggcggaccatacataatgagatggtccgccgtccagatc

SEQ ID NO: 34176 - DNA, 50 bp, unidentified
  source 1..50: mol_type = unassigned DNA; note = donor_601129a
  misc_feature 1..23: note = RE
  misc_feature 24..25: note = Core
  misc_feature 26..50: note = LE
tgacatttaagctcctgggatgtctaataagagttagcgggtccgccgta

SEQ ID NO: 34177 - DNA, 50 bp, unidentified
  source 1..50: mol_type = unassigned DNA; note = donor_603435d
  misc_feature 1..23: note = RE
  misc_feature 24..25: note = Core
  misc_feature 26..50: note = LE
gcacaaccggggacgtccatatatgatgtgatggacgtccccttttccag

SEQ ID NO: 34178 - DNA, 50 bp, unidentified
  source 1..50: mol_type = unassigned DNA; note = donor_60350e9
  misc_feature 1..24: note = RE
  misc_feature 25: note = Core
  misc_feature 26..50: note = LE
tgcaagacggcggcggaccatacataatgggatggtccgccgcctgaagc

SEQ ID NO: 34179 - DNA, 50 bp, unidentified; identical to SEQ ID NO: 30804
  source 1..50: mol_type = unassigned DNA; note = donor_6036628
  misc_feature 1..24: note = RE
  misc_feature 25: note = Core
  misc_feature 26..50: note = LE

SEQ ID NO: 34180 - DNA, 50 bp, unidentified
  source 1..50: mol_type = unassigned DNA; note = donor_6038e48
  misc_feature 1..23: note = RE
  misc_feature 24..25: note = Core
  misc_feature 26..50: note = LE
acactaggccaacataacagttgccctgtgtatcgaaatcctgtcatggt

SEQ ID NO: 34181 - DNA, 50 bp, unidentified
  source 1..50: mol_type = unassigned DNA; note = donor_6046924
  misc_feature 1..23: note = RE
  misc_feature 24..25: note = Core
  misc_feature 26..50: note = LE
aggcttgacttttaatagttagtcttgtattatagagtagtagttattag

SEQ ID NO: 34182 - DNA, 50 bp, unidentified
  source 1..50: mol_type = unassigned DNA; note = donor_60559cd
  misc_feature 1..23: note = RE
  misc_feature 24..25: note = Core
  misc_feature 26..50: note = LE
gacagggtgggcgagtccatacataattggatggacccgcccaagccgag

SEQ ID NO: 34183 - DNA, 50 bp, unidentified
  source 1..50: mol_type = unassigned DNA; note = donor_606fd66
  misc_feature 1..24: note = RE
  misc_feature 25: note = Core
  misc_feature 26..50: note = LE
tgcaaacgaggaggagtccatatacaatgggatggactcctcctcacctt

SEQ ID NO: 34184 - DNA, 50 bp, unidentified
  source 1..50: mol_type = unassigned DNA; note = donor_607c7e6
  misc_feature 1..23: note = RE
  misc_feature 24..25: note = Core
  misc_feature 26..50: note = LE
atgaccaccaaacaacacagttgcctgtgtgtttggtgtgtgtcatgatt

SEQ ID NO: 34185 - DNA, 50 bp, unidentified
  source 1..50: mol_type = unassigned DNA; note = donor_607e27e
  misc_feature 1..22: note = RE
  misc_feature 23..25: note = Core
  misc_feature 26..50: note = LE
tctcttgactttatttagcaggtttggtacaatattagcatagtcaactg

SEQ ID NO: 34186 - DNA, 50 bp, unidentified; identical to SEQ ID NO: 32016
  source 1..50: mol_type = unassigned DNA; note = donor_6088069
  misc_feature 1..23: note = RE
  misc_feature 24..25: note = Core
  misc_feature 26..50: note = LE

SEQ ID NO: 34187 - DNA, 50 bp, unidentified
  source 1..50: mol_type = unassigned DNA; note = donor_608b61f
  misc_feature 1..22: note = RE
  misc_feature 23..25: note = Core
  misc_feature 26..50: note = LE
agtggcttgatcaagacggatacttgtcttatgacttttcttgctgattg

SEQ ID NO: 34188 - DNA, 50 bp, unidentified
  source 1..50: mol_type = unassigned DNA; note = donor_60905ad
  misc_feature 1..23: note = RE
  misc_feature 24..25: note = Core
  misc_feature 26..50: note = LE
ctcgcccgggaggcgtccatagattatgggatggacgcctccctccgaac

SEQ ID NO: 34189 - DNA, 50 bp, unidentified
  source 1..50: mol_type = unassigned DNA; note = donor_609d3a4
  misc_feature 1..22: note = RE
  misc_feature 23..25: note = Core
  misc_feature 26..50: note = LE
cgcaatgggcggcaaccacagaagatggggtggttgccgccctccccata

SEQ ID NO: 34190 - DNA, 50 bp, unidentified
  source 1..50: mol_type = unassigned DNA; note = donor_609f099
  misc_feature 1..24: note = RE
  misc_feature 25: note = Core
  misc_feature 26..50: note = LE
cccacttgacagatatagaagggtctgtgagtcttgaactggctggtctg

SEQ ID NO: 34191 - DNA, 50 bp, unidentified
  source 1..50: mol_type = unassigned DNA; note = donor_60a1e20
  misc_feature 1..23: note = RE
  misc_feature 24..25: note = Core
  misc_feature 26..50: note = LE
tttttcttgacggaacacggtagcttgtatgtaatggcgatgtggtggtt

SEQ ID NO: 34192 - DNA, 50 bp, unidentified
  source 1..50: mol_type = unassigned DNA; note = donor_60a8f81
  misc_feature 1..24: note = RE
  misc_feature 25: note = Core
  misc_feature 26..50: note = LE
tggcataacgtgggcgtccatgtataatggaatggacgcccactacccta

SEQ ID NO: 34193 - DNA, 50 bp, unidentified
  source 1..50: mol_type = unassigned DNA; note = donor_60aa052
  misc_feature 1..22: note = RE
  misc_feature 23..25: note = Core
  misc_feature 26..50: note = LE
gacttgacataccattagctggtttcgtattaataggtcaaccagagttt

SEQ ID NO: 34194 - DNA, 50 bp, unidentified
  source 1..50: mol_type = unassigned DNA; note = donor_60aeccb
  misc_feature 1..22: note = RE
  misc_feature 23..25: note = Core
  misc_feature 26..50: note = LE
cttgacgaaaagcatagggacacccgttacatttattccgtccccgaagg

SEQ ID NO: 34195 - DNA, 50 bp, unidentified; identical to SEQ ID NO: 32497
  source 1..50: mol_type = unassigned DNA; note = donor_60b1ca8
  misc_feature 1..24: note = RE
  misc_feature 25: note = Core
  misc_feature 26..50: note = LE

SEQ ID NO: 34196 - DNA, 50 bp, unidentified; identical to SEQ ID NO: 30604
  source 1..50: mol_type = unassigned DNA; note = donor_60b3442
  misc_feature 1..23: note = RE
  misc_feature 24..25: note = Core
  misc_feature 26..50: note = LE

SEQ ID NO: 34197 - DNA, 50 bp, unidentified
  source 1..50: mol_type = unassigned DNA; note = donor_60b4b62
  misc_feature 1..23: note = RE
  misc_feature 24..25: note = Core
  misc_feature 26..50: note = LE
aaattaggttttaaagatagtacctcatatctttgttatagttacaaaat

SEQ ID NO: 34198 - DNA, 50 bp, unidentified
  source 1..50: mol_type = unassigned DNA; note = donor_60b5fc2
  misc_feature 1..23: note = RE
  misc_feature 24..25: note = Core
  misc_feature 26..50: note = LE
gccaaacaggagccgtccacacatgatgcggtggacggctccccctggcg

SEQ ID NO: 34199 - DNA, 50 bp, unidentified
  source 1..50: mol_type = unassigned DNA; note = donor_60c137e
  misc_feature 1..23: note = RE
  misc_feature 24..25: note = Core
  misc_feature 26..50: note = LE
gagcttcgggaggcgtccatataagatggtatggacgcctccccccggca

SEQ ID NO: 34200 - DNA, 50 bp, unidentified
  source 1..50: mol_type = unassigned DNA; note = donor_60c74d9
  misc_feature 1..23: note = RE
  misc_feature 24..25: note = Core
  misc_feature 26..50: note = LE
agggttgacgaaaaccatagaaccttgtatggttgagtctccatcaacca

SEQ ID NO: 34201 - DNA, 50 bp, unidentified
  source 1..50: mol_type = unassigned DNA; note = donor_60caec3
  misc_feature 1..22: note = RE
  misc_feature 23..25: note = Core
  misc_feature 26..50: note = LE
ccagcggggggccatccacacatgatggggtggatggcccctttgcggca

SEQ ID NO: 34202 - DNA, 50 bp, unidentified
  source 1..50: mol_type = unassigned DNA; note = donor_60ce20f
  misc_feature 1..23: note = RE
  misc_feature 24..25: note = Core
  misc_feature 26..50: note = LE
gcactccgcgcggcatccacacaagatggggtggatgccgcgctccccta

SEQ ID NO: 34203 - DNA, 50 bp, unidentified
  source 1..50: mol_type = unassigned DNA; note = donor_60d6ac1
  misc_feature 1..23: note = RE
  misc_feature 24..25: note = Core
  misc_feature 26..50: note = LE
cccttgacaaaaacatagggacaccgttaccttgagggtatccccgataa

SEQ ID NO: 34204 - DNA, 50 bp, unidentified
  source 1..50: mol_type = unassigned DNA; note = donor_60dd69e
  misc_feature 1..23: note = RE
  misc_feature 24..25: note = Core
  misc_feature 26..50: note = LE
gacttgggaaggcccgttacagaagatggtgtaacgggcgggaacccagc

SEQ ID NO: 34205 - DNA, 50 bp, unidentified
  source 1..50: mol_type = unassigned DNA; note = donor_60de799
  misc_feature 1..22: note = RE
  misc_feature 23..25: note = Core
  misc_feature 26..50: note = LE
gcaaacagggatgcgttcatacagaatgagatgaacgcatcccaactatg

SEQ ID NO: 34206 - DNA, 50 bp, unidentified
  source 1..50: mol_type = unassigned DNA; note = donor_60e239d
  misc_feature 1..23: note = RE
  misc_feature 24..25: note = Core
  misc_feature 26..50: note = LE
acttgacatttaatagttagtctttgtattatagagtagtagtttttagt

SEQ ID NO: 34207 - DNA, 50 bp, unidentified
  source 1..50: mol_type = unassigned DNA; note = donor_60e63d2
  misc_feature 1..23: note = RE
  misc_feature 24..25: note = Core
  misc_feature 26..50: note = LE
cagccccttcaacataacagttgccctgtgtctggagagtctgtcatgat

SEQ ID NO: 34208 - DNA, 50 bp, unidentified; identical to SEQ ID NO: 32623
  source 1..50: mol_type = unassigned DNA; note = donor_60ea839
  misc_feature 1..24: note = RE
  misc_feature 25: note = Core
  misc_feature 26..50: note = LE

SEQ ID NO: 34209 - DNA, 50 bp, unidentified; identical to SEQ ID NO: 31355
  source 1..50: mol_type = unassigned DNA; note = donor_60ed130
  misc_feature 1..24: note = RE
  misc_feature 25: note = Core
  misc_feature 26..50: note = LE

SEQ ID NO: 34210 - DNA, 50 bp, unidentified
  source 1..50: mol_type = unassigned DNA; note = donor_60f6cc3
  misc_feature 1..23: note = RE
  misc_feature 24..25: note = Core
  misc_feature 26..50: note = LE
atgcatgatcagcaagacagttgcttgtatctcgcgccttgtggcacgat

SEQ ID NO: 34211 - DNA, 50 bp, unidentified
  source 1..50: mol_type = unassigned DNA; note = donor_60ff686
  misc_feature 1..23: note = RE
  misc_feature 24..25: note = Core
  misc_feature 26..50: note = LE
gcatccacaggggcgtccacacacgatggggtggacgcccccgacggcat

SEQ ID NO: 34212 - DNA, 50 bp, unidentified; identical to SEQ ID NO: 33775
  source 1..50: mol_type = unassigned DNA; note = donor_6106874
  misc_feature 1..23: note = RE
  misc_feature 24..25: note = Core
  misc_feature 26..50: note = LE

SEQ ID NO: 34213 - DNA, 50 bp, unidentified
  source 1..50: mol_type = unassigned DNA; note = donor_610e3cf
  misc_feature 1..23: note = RE
  misc_feature 24..25: note = Core
  misc_feature 26..50: note = LE
ttgaccgaagggcccgttacagaagatggtgtaacgggccggcggagcag

SEQ ID NO: 34214 - DNA, 50 bp, unidentified
  source 1..50: mol_type = unassigned DNA; note = donor_610e6f0
  misc_feature 1..23: note = RE
  misc_feature 24..25: note = Core
  misc_feature 26..50: note = LE
ggcttgacgagaccctatgggatctgatataccgcctcgtgaggtcgatg

SEQ ID NO: 34215 - DNA, 50 bp, unidentified
  source 1..50: mol_type = unassigned DNA; note = donor_6111e8d
  misc_feature 1..23: note = RE
  misc_feature 24..25: note = Core
  misc_feature 26..50: note = LE
gcattcaacggggcgtccacagatgatggggtggacgcccctcgacggca

SEQ ID NO: 34216 - DNA, 50 bp, unidentified; identical to SEQ ID NO: 30604
  source 1..50: mol_type = unassigned DNA; note = donor_6112637
  misc_feature 1..23: note = RE
  misc_feature 24..25: note = Core
  misc_feature 26..50: note = LE

SEQ ID NO: 34217 - DNA, 50 bp, unidentified
  source 1..50: mol_type = unassigned DNA; note = donor_61148c0
  misc_feature 1..22: note = RE
  misc_feature 23..25: note = Core
  misc_feature 26..50: note = LE
taagccgtcattgacatagaatcttgtatggcggtagggtaggaacctgt

SEQ ID NO: 34218 - DNA, 50 bp, unidentified
  source 1..50: mol_type = unassigned DNA; note = donor_6115907
  misc_feature 1..23: note = RE
  misc_feature 24..25: note = Core
  misc_feature 26..50: note = LE
tacccgcttgaccaagacggatacttgtcttatgactttccccggcttcc

SEQ ID NO: 34219 - DNA, 50 bp, unidentified
  source 1..50: mol_type = unassigned DNA; note = donor_6115b9d
  misc_feature 1..23: note = RE
  misc_feature 24..25: note = Core
  misc_feature 26..50: note = LE
ttacttgactttaatatagttgtctggtatattaaagttactcatacaaa

SEQ ID NO: 34220 - DNA, 50 bp, unidentified
  source 1..50: mol_type = unassigned DNA; note = donor_611b1a0
  misc_feature 1..23: note = RE
  misc_feature 24..25: note = Core
  misc_feature 26..50: note = LE
aagcttgacttttcatagctggtcttgtatgataattaggaagccagtta

SEQ ID NO: 34221 - DNA, 50 bp, unidentified
  source 1..50: mol_type = unassigned DNA; note = donor_611d77d
  misc_feature 1..24: note = RE
  misc_feature 25: note = Core
  misc_feature 26..50: note = LE
acttgcaacggggcgggccatacgtatggaatggcccgccccctcccggc

SEQ ID NO: 34222 - DNA, 50 bp, unidentified
  source 1..50: mol_type = unassigned DNA; note = donor_612d5a6
  misc_feature 1..23: note = RE
  misc_feature 24..25: note = Core
  misc_feature 26..50: note = LE
gaccaactggcgcccgtgacagaagatggggtcacgggccggcaaccaac

SEQ ID NO: 34223 - DNA, 50 bp, unidentified
  source 1..50: mol_type = unassigned DNA; note = donor_6137b78
  misc_feature 1..24: note = RE
  misc_feature 25: note = Core
  misc_feature 26..50: note = LE
ggcaaacccgggggcgtccatgtacaatgggatggacgcccccaactcgc

SEQ ID NO: 34224 - DNA, 50 bp, unidentified
  source 1..50: mol_type = unassigned DNA; note = donor_613dd0b
  misc_feature 1..23: note = RE
  misc_feature 24..25: note = Core
  misc_feature 26..50: note = LE
aaccgcttagcttttaatggttgcttgtaatagcgcgatcgattattgtg

SEQ ID NO: 34225 - DNA, 50 bp, unidentified
  source 1..50: mol_type = unassigned DNA; note = donor_6143800
  misc_feature 1..24: note = RE
  misc_feature 25: note = Core
  misc_feature 26..50: note = LE
cagcgtcttgacacagaggggagcctgcttgtttcattgacgcaggatcg

SEQ ID NO: 34226 - DNA, 50 bp, unidentified
  source 1..50: mol_type = unassigned DNA; note = donor_6143a5a
  misc_feature 1..22: note = RE
  misc_feature 23..25: note = Core
  misc_feature 26..50: note = LE
ctacttgattttttatttgcagactactactatgtatttaatggttgata

SEQ ID NO: 34227 - DNA, 50 bp, unidentified
  source 1..50: mol_type = unassigned DNA; note = donor_614617f
  misc_feature 1..24: note = RE
  misc_feature 25: note = Core
  misc_feature 26..50: note = LE
ttgcaatacggggtagaccatatataatggaatggtctaccccactttct

SEQ ID NO: 34228 - DNA, 50 bp, unidentified
  source 1..50: mol_type = unassigned DNA; note = donor_6146fe6
  misc_feature 1..24: note = RE
  misc_feature 25: note = Core
  misc_feature 26..50: note = LE
ttgcaatcaggcggggtccatatacaatggtatggaccccgccgcccaac

SEQ ID NO: 34229 - DNA, 50 bp, unidentified
  source 1..50: mol_type = unassigned DNA; note = donor_614fa62
  misc_feature 1..23: note = RE
  misc_feature 24..25: note = Core
  misc_feature 26..50: note = LE
gccaacggggagccgtccacacatgatgctgtggacggctccccaccccg

SEQ ID NO: 34230 - DNA, 50 bp, unidentified
  source 1..50: mol_type = unassigned DNA; note = donor_61599a1
  misc_feature 1..24: note = RE
  misc_feature 25: note = Core
  misc_feature 26..50: note = LE
ttgacaaccgggggagtccatgtagaatgacatggacatcccctcatcaa

SEQ ID NO: 34231 - DNA, 50 bp, unidentified
  source 1..50: mol_type = unassigned DNA; note = donor_615ab86
  misc_feature 1..23: note = RE
  misc_feature 24..25: note = Core
  misc_feature 26..50: note = LE
acgcttgacacgaaagacggttacttgtatgttcaggccagaccggcgcg

SEQ ID NO: 34232 - DNA, 50 bp, unidentified
  source 1..50: mol_type = unassigned DNA; note = donor_616634a
  misc_feature 1..23: note = RE
  misc_feature 24..25: note = Core
  misc_feature 26..50: note = LE
agcccgcttgaccaacacggatacttgtctgatgatgtttctgtcctttc

SEQ ID NO: 34233 - DNA, 50 bp, unidentified
  source 1..50: mol_type = unassigned DNA; note = donor_6167794
  misc_feature 1..24: note = RE
  misc_feature 25: note = Core
  misc_feature 26..50: note = LE
tgccaagggagagccgtccacacatgatgctgtggacggctctcatccaa

SEQ ID NO: 34234 - DNA, 50 bp, unidentified
  source 1..50: mol_type = unassigned DNA; note = donor_616ecb2
  misc_feature 1..22: note = RE
  misc_feature 23..25: note = Core
  misc_feature 26..50: note = LE
cttcttgacaaacattagcaagattcgtaatatataagtgaaggttctca

SEQ ID NO: 34235 - DNA, 50 bp, unidentified
  source 1..50: mol_type = unassigned DNA; note = donor_617438b
  misc_feature 1..22: note = RE
  misc_feature 23..25: note = Core
  misc_feature 26..50: note = LE
aaaaaagcttgacatagagagtcttatacagtaaactaagaacaagccct

SEQ ID NO: 34236 - DNA, 50 bp, unidentified
  source 1..50: mol_type = unassigned DNA; note = donor_6183dcb
  misc_feature 1..23: note = RE
  misc_feature 24..25: note = Core
  misc_feature 26..50: note = LE
aatttttacgttcaagacagttgcttgtatcttgacaattggttaaaata

SEQ ID NO: 34237 - DNA, 50 bp, unidentified
  source 1..50: mol_type = unassigned DNA; note = donor_618be0b
  misc_feature 1..22: note = RE
  misc_feature 23..25: note = Core
  misc_feature 26..50: note = LE
gcaacgcaggggccgtccacacatgatggggtggacggcccctgctcacc

SEQ ID NO: 34238 - DNA, 50 bp, unidentified
  source 1..50: mol_type = unassigned DNA; note = donor_619872a
  misc_feature 1..19: note = RE
  misc_feature 20..25: note = Core
  misc_feature 26..50: note = LE
aagcttaaaatgagagatggtatctctcgttgataaatgattagctatta

SEQ ID NO: 34239 - DNA, 50 bp, unidentified
  source 1..50: mol_type = unassigned DNA; note = donor_61a06f0
  misc_feature 1..23: note = RE
  misc_feature 24..25: note = Core
  misc_feature 26..50: note = LE
gcgcttgactttgaacacagttgcttgtatctttactaccttgatgttca

SEQ ID NO: 34240 - DNA, 50 bp, unidentified
  source 1..50: mol_type = unassigned DNA; note = donor_61a0e33
  misc_feature 1..23: note = RE
  misc_feature 24..25: note = Core
  misc_feature 26..50: note = LE
tttattgacttatcaccacatgtctcgtattatataagttgttccttcgg

SEQ ID NO: 34241 - DNA, 50 bp, unidentified
  source 1..50: mol_type = unassigned DNA; note = donor_61a240d
  misc_feature 1..23: note = RE
  misc_feature 24..25: note = Core
  misc_feature 26..50: note = LE
tcacttgacttattatagtaagtcttgtatactcaaaactgtaatagtag

SEQ ID NO: 34242 - DNA, 50 bp, unidentified
  source 1..50: mol_type = unassigned DNA; note = donor_61a5cad
  misc_feature 1..23: note = RE
  misc_feature 24..25: note = Core
  misc_feature 26..50: note = LE
gcgcttgactcggaagacggttacttgtatgttcagaccagaccggaacg

SEQ ID NO: 34243 - DNA, 50 bp, unidentified
  source 1..50: mol_type = unassigned DNA; note = donor_61b1f75
  misc_feature 1..23: note = RE
  misc_feature 24..25: note = Core
  misc_feature 26..50: note = LE
atgatttggttttatcatagaaatcctttagatttgcataattaaattta

SEQ ID NO: 34244 - DNA, 50 bp, unidentified
  source 1..50: mol_type = unassigned DNA; note = donor_61c55af
  misc_feature 1..23: note = RE
  misc_feature 24..25: note = Core
  misc_feature 26..50: note = LE
tgactttcaaaaacgtgggatgtctaataggttcttgtcagcctgctggt

SEQ ID NO: 34245 - DNA, 50 bp, unidentified
  source 1..50: mol_type = unassigned DNA; note = donor_61cde0f
  misc_feature 1..24: note = RE
  misc_feature 25: note = Core
  misc_feature 26..50: note = LE
tgcaaacgaggaggagtccatatacaatgggatggactcctcctccccct

SEQ ID NO: 34246 - DNA, 50 bp, unidentified
  source 1..50: mol_type = unassigned DNA; note = donor_61cf9a2
  misc_feature 1..23: note = RE
  misc_feature 24..25: note = Core
  misc_feature 26..50: note = LE
cagcttgacgctcaagacggtagcttgtatcttgaaccatgtagtgggtg

SEQ ID NO: 34247 - DNA, 50 bp, unidentified
  source 1..50: mol_type = unassigned DNA; note = donor_61d8ff2
  misc_feature 1..24: note = RE
  misc_feature 25: note = Core
  misc_feature 26..50: note = LE
ttgcaaagaggaggagtccatatacaatgggatggactcctcctcacctc

SEQ ID NO: 34248 - DNA, 50 bp, unidentified
  source 1..50: mol_type = unassigned DNA; note = donor_61de506
  misc_feature 1..23: note = RE
  misc_feature 24..25: note = Core
  misc_feature 26..50: note = LE
gcacaatgggaggagaccatatacgatggaatggtctcctccccccaaac

SEQ ID NO: 34249 - DNA, 50 bp, unidentified
  source 1..50: mol_type = unassigned DNA; note = donor_61eec1b
  misc_feature 1..23: note = RE
  misc_feature 24..25: note = Core
  misc_feature 26..50: note = LE
gccccgaaggctgggtccatatataatgaaatggacccatccttcttccc

SEQ ID NO: 34250 - DNA, 50 bp, unidentified
  source 1..50: mol_type = unassigned DNA; note = donor_6203e03
  misc_feature 1..22: note = RE
  misc_feature 23..25: note = Core
  misc_feature 26..50: note = LE
taaaacccgtggattccatatacgatgtatggaatccactcatactctgc

SEQ ID NO: 34251 - DNA, 50 bp, unidentified
  source 1..50: mol_type = unassigned DNA; note = donor_621ab1c
  misc_feature 1..24: note = RE
  misc_feature 25: note = Core
  misc_feature 26..50: note = LE
tgcaacgcgcggccggaccatacataatggaatggtccggccgtgctccg

SEQ ID NO: 34252 - DNA, 50 bp, unidentified
  source 1..50: mol_type = unassigned DNA; note = donor_621b708
  misc_feature 1..23: note = RE
  misc_feature 24..25: note = Core
  misc_feature 26..50: note = LE
gacctcaacgcgccgaatagagaagatggggtattcggcttgagtcccac

SEQ ID NO: 34253 - DNA, 50 bp, unidentified; identical to SEQ ID NO: 31800
  source 1..50: mol_type = unassigned DNA; note = donor_6225e25
  misc_feature 1..23: note = RE
  misc_feature 24..25: note = Core
  misc_feature 26..50: note = LE

SEQ ID NO: 34254 - DNA, 50 bp, unidentified
  source 1..50: mol_type = unassigned DNA; note = donor_6228bbd
  misc_feature 1..24: note = RE
  misc_feature 25: note = Core
  misc_feature 26..50: note = LE
tggcaaaggggaggagtccatatacaatgagatggactcctccccgtctt

SEQ ID NO: 34255 - DNA, 50 bp, unidentified
  source 1..50: mol_type = unassigned DNA; note = donor_6228d12
  misc_feature 1..10: note = RE
  misc_feature 11..25: note = Core
  misc_feature 26..50: note = LE
aatagttagtctttaattatatagtcatagcttttctttaccttttctta

SEQ ID NO: 34256 - DNA, 50 bp, unidentified
  source 1..50: mol_type = unassigned DNA; note = donor_622e052
  misc_feature 1..23: note = RE
  misc_feature 24..25: note = Core
  misc_feature 26..50: note = LE
tgctaaccgggccgttccacatatgatggtgtggaacggccctccgaaac

SEQ ID NO: 34257 - DNA, 50 bp, unidentified
  source 1..50: mol_type = unassigned DNA; note = donor_6238fff
  misc_feature 1..23: note = RE
  misc_feature 24..25: note = Core
  misc_feature 26..50: note = LE
ggggttgactttttatagttagtctcgtataataaagtagtagttatttt

SEQ ID NO: 34258 - DNA, 50 bp, unidentified
  source 1..50: mol_type = unassigned DNA; note = donor_62391cf
  misc_feature 1..22: note = RE
  misc_feature 23..25: note = Core
  misc_feature 26..50: note = LE
ttatttggaaatcaacacagaatctcctatgtttgcgaagttatcgattt

SEQ ID NO: 34259 - DNA, 50 bp, unidentified
  source 1..50: mol_type = unassigned DNA; note = donor_62403f0
  misc_feature 1..24: note = RE
  misc_feature 25: note = Core
  misc_feature 26..50: note = LE
tccctgcgacaagatgacagttgcttgtatgacgggaaaagagcattgtg

SEQ ID NO: 34260 - DNA, 50 bp, unidentified
  source 1..50: mol_type = unassigned DNA; note = donor_6248544
  misc_feature 1..24: note = RE
  misc_feature 25: note = Core
  misc_feature 26..50: note = LE
attattgacagctattagctggtatcgtattatgtgaataagccagtcac

SEQ ID NO: 34261 - DNA, 50 bp, unidentified
  source 1..50: mol_type = unassigned DNA; note = donor_6254309
  misc_feature 1..23: note = RE
  misc_feature 24..25: note = Core
  misc_feature 26..50: note = LE
aaagagcttgatcaagacggatacttgtcttatgactttgggagcttttg

SEQ ID NO: 34262 - DNA, 50 bp, unidentified
  source 1..50: mol_type = unassigned DNA; note = donor_625904b
  misc_feature 1..22: note = RE
  misc_feature 23..25: note = Core
  misc_feature 26..50: note = LE
aatattgacaaactattagctggttcgtattataaggtcaccagatattt

SEQ ID NO: 34263 - DNA, 50 bp, unidentified
  source 1..50: mol_type = unassigned DNA; note = donor_6263687
  misc_feature 1..23: note = RE
  misc_feature 24..25: note = Core
  misc_feature 26..50: note = LE
ggggttgactatttatttgcaggctgttactatatgaatgccccgtgttc

SEQ ID NO: 34264 - DNA, 50 bp, unidentified
  source 1..50: mol_type = unassigned DNA; note = donor_6263abf
  misc_feature 1..23: note = RE
  misc_feature 24..25: note = Core
  misc_feature 26..50: note = LE
gcgagtcgggggccgtccacatatgttggagtggacggcccctgaacggc

SEQ ID NO: 34265 - DNA, 50 bp, unidentified
  source 1..50: mol_type = unassigned DNA; note = donor_6264d09
  misc_feature 1..23: note = RE
  misc_feature 24..25: note = Core
  misc_feature 26..50: note = LE
gaccttaacacgccgattagagaagatggggtaatcggcttcgtgcccca

SEQ ID NO: 34266 - DNA, 50 bp, unidentified
  source 1..50: mol_type = unassigned DNA; note = donor_626551a
  misc_feature 1..23: note = RE
  misc_feature 24..25: note = Core
  misc_feature 26..50: note = LE
gcacttgctttttggtagcaggactagtaccatataagtgtagtcaaata

SEQ ID NO: 34267 - DNA, 50 bp, unidentified
  source 1..50: mol_type = unassigned DNA; note = donor_6268ece
  misc_feature 1..23: note = RE
  misc_feature 24..25: note = Core
  misc_feature 26..50: note = LE
gcacttgacaatcaagacggttgcttgtatcttgaatctgagtcgctagt

SEQ ID NO: 34268 - DNA, 50 bp, unidentified
  source 1..50: mol_type = unassigned DNA; note = donor_6271c19
  misc_feature 1..23: note = RE
  misc_feature 24..25: note = Core
  misc_feature 26..50: note = LE
cttgacacacggcccattacagaagatacggtaatgggccgcgcctccgg

SEQ ID NO: 34269 - DNA, 50 bp, unidentified
  source 1..50: mol_type = unassigned DNA; note = donor_627e625
  misc_feature 1..24: note = RE
  misc_feature 25: note = Core
  misc_feature 26..50: note = LE
gcggcttgacaaacgacataggggcccctcgttactttcttcgtagccgt

SEQ ID NO: 34270 - DNA, 50 bp, unidentified
  source 1..50: mol_type = unassigned DNA; note = donor_628678a
  misc_feature 1..23: note = RE
  misc_feature 24..25: note = Core
  misc_feature 26..50: note = LE
gacgagtaagggcccattacagaagatgccgtaatgggccggcgctcctc

SEQ ID NO: 34271 - DNA, 50 bp, unidentified
  source 1..50: mol_type = unassigned DNA; note = donor_62893fd
  misc_feature 1..24: note = RE
  misc_feature 25: note = Core
  misc_feature 26..50: note = LE
ccgcctcttgacacagaggggagcctacttgtttcattgacggcatggcc

SEQ ID NO: 34272 - DNA, 50 bp, unidentified
  source 1..50: mol_type = unassigned DNA; note = donor_6298827
  misc_feature 1..22: note = RE
  misc_feature 23..25: note = Core
  misc_feature 26..50: note = LE
atgcttgacaagtattagctggtttcgtattatcaggttagccagtaatt

SEQ ID NO: 34273 - DNA, 50 bp, unidentified
  source 1..50: mol_type = unassigned DNA; note = donor_62a167f
  misc_feature 1..23: note = RE
  misc_feature 24..25: note = Core
  misc_feature 26..50: note = LE
tgacaatccacgtccagggatgtctaatgggagctaccgggtcgctgatc

SEQ ID NO: 34274 - DNA, 50 bp, unidentified
  source 1..50: mol_type = unassigned DNA; note = donor_62a19e3
  misc_feature 1..23: note = RE
  misc_feature 24..25: note = Core
  misc_feature 26..50: note = LE
gcatcctgaggtgcgtccatatatgatgtgatggacgcacctaccttcta

SEQ ID NO: 34275 - DNA, 50 bp, unidentified
  source 1..50: mol_type = unassigned DNA; note = donor_62b1ef8
  misc_feature 1..22: note = RE
  misc_feature 23..25: note = Core
  misc_feature 26..50: note = LE
atccgcgggggtcgtccacacatgatggggtggacggcccccgctcacgg

SEQ ID NO: 34276 - DNA, 50 bp, unidentified; identical to SEQ ID NO: 31563
  source 1..50: mol_type = unassigned DNA; note = donor_62b6480
  misc_feature 1..23: note = RE
  misc_feature 24..25: note = Core
  misc_feature 26..50: note = LE

SEQ ID NO: 34277 - DNA, 50 bp, unidentified
  source 1..50: mol_type = unassigned DNA; note = donor_62b7c8a
  misc_feature 1..24: note = RE
  misc_feature 25: note = Core
  misc_feature 26..50: note = LE
atgtttggtttttacctcagttcttcttaagtttgatttttaataaatca

SEQ ID NO: 34278 - DNA, 50 bp, unidentified
  source 1..50: mol_type = unassigned DNA; note = donor_62b7ffa
  misc_feature 1..24: note = RE
  misc_feature 25: note = Core
  misc_feature 26..50: note = LE
agattgacaaactacataggaacacattacgttgttagcagttccgctta

SEQ ID NO: 34279 - DNA, 50 bp, unidentified
  source 1..50: mol_type = unassigned DNA; note = donor_62b80c5
  misc_feature 1..21: note = RE
  misc_feature 22..25: note = Core
  misc_feature 26..50: note = LE
agggacgttgacacagggtgtctcattggtgcaccttagagtcggagcgg

SEQ ID NO: 34280 - DNA, 50 bp, unidentified
  source 1..50: mol_type = unassigned DNA; note = donor_62bf87e
  misc_feature 1..23: note = RE
  misc_feature 24..25: note = Core
  misc_feature 26..50: note = LE
gcattccaggcggcaaccacacaagatggggtggttgccgcctccccaaa

SEQ ID NO: 34281 - DNA, 50 bp, unidentified
  source 1..50: mol_type = unassigned DNA; note = donor_62c0cb1
  misc_feature 1..23: note = RE
  misc_feature 24..25: note = Core
  misc_feature 26..50: note = LE
ttccttgacagtcaagacggttgcttgtatcttgagtcagagggttcgga

SEQ ID NO: 34282 - DNA, 50 bp, unidentified
  source 1..50: mol_type = unassigned DNA; note = donor_62c633d
  misc_feature 1..22: note = RE
  misc_feature 23..25: note = Core
  misc_feature 26..50: note = LE
ttctacttatttgtttcaaacttataaaccacctttctgcgaaaggcacc

SEQ ID NO: 34283 - DNA, 50 bp, unidentified
  source 1..50: mol_type = unassigned DNA; note = donor_62d1c1e
  misc_feature 1..23: note = RE
  misc_feature 24..25: note = Core
  misc_feature 26..50: note = LE
gcgcaagcgggggtatccacacatgatgggttggacacccccgcccgacg

SEQ ID NO: 34284 - DNA, 50 bp, unidentified
  source 1..50: mol_type = unassigned DNA; note = donor_62d4ab0
  misc_feature 1..23: note = RE
  misc_feature 24..25: note = Core
  misc_feature 26..50: note = LE
gactgatcgaggcccgttacagaagatgggataacgggccggcccggtac

SEQ ID NO: 34285 - DNA, 50 bp, unidentified
  source 1..50: mol_type = unassigned DNA; note = donor_62d7a56
  misc_feature 1..21: note = RE
  misc_feature 22..25: note = Core
  misc_feature 26..50: note = LE
atattgacaaatatagcaggactgctatataataactccatatcataaat

SEQ ID NO: 34286 - DNA, 50 bp, unidentified
  source 1..50: mol_type = unassigned DNA; note = donor_62d9ca4
  misc_feature 1..24: note = RE
  misc_feature 25: note = Core
  misc_feature 26..50: note = LE
ttacttgttttttaccacagtacttcttaagttagcattctattaaaaac

SEQ ID NO: 34287 - DNA, 50 bp, unidentified
  source 1..50: mol_type = unassigned DNA; note = donor_62d9f8e
  misc_feature 1..23: note = RE
  misc_feature 24..25: note = Core
  misc_feature 26..50: note = LE
acgcttgcttccgaacagagtatcttgtatgatcgaatctaatgaaatgc

SEQ ID NO: 34288 - DNA, 50 bp, unidentified
  source 1..50: mol_type = unassigned DNA; note = donor_62e13b9
  misc_feature 1..23: note = RE
  misc_feature 24..25: note = Core
  misc_feature 26..50: note = LE
acactgaggggcgaagacggtatcttgtatctcgacgacagcctccttag

SEQ ID NO: 34289 - DNA, 50 bp, unidentified
  source 1..50: mol_type = unassigned DNA; note = donor_62f9b5c
  misc_feature 1..22: note = RE
  misc_feature 23..25: note = Core
  misc_feature 26..50: note = LE
aaatttgtttttatcttagaatgctattagtttagctttctatatttaca

SEQ ID NO: 34290 - DNA, 50 bp, unidentified
  source 1..50: mol_type = unassigned DNA; note = donor_62fb830
  misc_feature 1..23: note = RE
  misc_feature 24..25: note = Core
  misc_feature 26..50: note = LE
tgacatctcagctcctggggtgtctaatgggagctgtcgggtgagccgtt

SEQ ID NO: 34291 - DNA, 50 bp, unidentified
  source 1..50: mol_type = unassigned DNA; note = donor_6301214
  misc_feature 1..23: note = RE
  misc_feature 24..25: note = Core
  misc_feature 26..50: note = LE
ccaaataagttttaacacggtatcttatatcttgatcatctaccagcaat

SEQ ID NO: 34292 - DNA, 50 bp, unidentified
  source 1..50: mol_type = unassigned DNA; note = donor_630b70c
  misc_feature 1..23: note = RE
  misc_feature 24..25: note = Core
  misc_feature 26..50: note = LE
cttgcacaggcggcatccatacatgatggtgtggatgccgccacctgaag

SEQ ID NO: 34293 - DNA, 50 bp, unidentified
  source 1..50: mol_type = unassigned DNA; note = donor_631183c
  misc_feature 1..22: note = RE
  misc_feature 23..25: note = Core
  misc_feature 26..50: note = LE
ggcttgacatcttcattgagagtccttaagttcgtagttgcagttacttc

SEQ ID NO: 34294 - DNA, 50 bp, unidentified
  source 1..50: mol_type = unassigned DNA; note = donor_63145dc
  misc_feature 1..22: note = RE
  misc_feature 23..25: note = Core
  misc_feature 26..50: note = LE
ctttttgacttctaacggagtatctggtatgttgaaagtgtcgaatcgag

SEQ ID NO: 34295 - DNA, 50 bp, unidentified
  source 1..50: mol_type = unassigned DNA; note = donor_63161ae
  misc_feature 1..24: note = RE
  misc_feature 25: note = Core
  misc_feature 26..50: note = LE
ttgtacgcacggccgggccatacataatgggatggcccggccgtgctcct

SEQ ID NO: 34296 - DNA, 50 bp, unidentified; identical to SEQ ID NO: 30451
  source 1..50: mol_type = unassigned DNA; note = donor_6318faa
  misc_feature 1..23: note = RE
  misc_feature 24..25: note = Core
  misc_feature 26..50: note = LE

SEQ ID NO: 34297 - DNA, 50 bp, unidentified
  source 1..50: mol_type = unassigned DNA; note = donor_63195ee
  misc_feature 1..24: note = RE
  misc_feature 25: note = Core
  misc_feature 26..50: note = LE
tcccaacttgactcaaagaggattctgcttgagacttcaggtggacgcag

SEQ ID NO: 34298 - DNA, 50 bp, unidentified
  source 1..50: mol_type = unassigned DNA; note = donor_631a6bb
  misc_feature 1..21: note = RE
  misc_feature 22..25: note = Core
  misc_feature 26..50: note = LE
caagaaccatagggacacccccccccccccgttaccttgttcgtgggcct

SEQ ID NO: 34299 - DNA, 50 bp, unidentified
  source 1..50: mol_type = unassigned DNA; note = donor_631d60a
  misc_feature 1..24: note = RE
  misc_feature 25: note = Core
  misc_feature 26..50: note = LE
tgcagtcacgcggcggaccatacataatgagatggtccgccgctggtcat

SEQ ID NO: 34300 - DNA, 50 bp, unidentified
  source 1..50: mol_type = unassigned DNA; note = donor_6328fdc
  misc_feature 1..23: note = RE
  misc_feature 24..25: note = Core
  misc_feature 26..50: note = LE
gacgaacaaaggcccattacagaagatgccgtaatgggccggcgtttcaa

SEQ ID NO: 34301 - DNA, 50 bp, unidentified; identical to SEQ ID NO: 30492
  source 1..50: mol_type = unassigned DNA; note = donor_632e1bf
  misc_feature 1..24: note = RE
  misc_feature 25: note = Core
  misc_feature 26..50: note = LE

SEQ ID NO: 34302 - DNA, 50 bp, unidentified
  source 1..50: mol_type = unassigned DNA; note = donor_63357dc
  misc_feature 1..21: note = RE
  misc_feature 22..25: note = Core
  misc_feature 26..50: note = LE
cttggggttgacacaaagggtgtcactagtgcaccctcttccgtgcaggt

SEQ ID NO: 34303 - DNA, 50 bp, unidentified
  source 1..50: mol_type = unassigned DNA; note = donor_6342641
  misc_feature 1..23: note = RE
  misc_feature 24..25: note = Core
  misc_feature 26..50: note = LE
cttcctctactttctttcacactatctccattccgccgcctttggctggc

SEQ ID NO: 34304 - DNA, 50 bp, unidentified
  source 1..50: mol_type = unassigned DNA; note = donor_6344556
  misc_feature 1..24: note = RE
  misc_feature 25: note = Core
  misc_feature 26..50: note = LE
ttttttgattttttctttcaacctaactctcattcctttcgcttcgctta

SEQ ID NO: 34305 - DNA, 50 bp, unidentified
  source 1..50: mol_type = unassigned DNA; note = donor_636a922
  misc_feature 1..24: note = RE
  misc_feature 25: note = Core
  misc_feature 26..50: note = LE
aatgttgacaactattggctggtatcgtattatatggtcagctagtcatt

SEQ ID NO: 34306 - DNA, 50 bp, unidentified
  source 1..50: mol_type = unassigned DNA; note = donor_636f38a
  misc_feature 1..22: note = RE
  misc_feature 23..25: note = Core
  misc_feature 26..50: note = LE
cttgacgaaaaccatagggacacccgttaccttattcacggtccttcaca

SEQ ID NO: 34307 - DNA, 50 bp, unidentified
  source 1..50: mol_type = unassigned DNA; note = donor_636fb89
  misc_feature 1..24: note = RE
  misc_feature 25: note = Core
  misc_feature 26..50: note = LE
tgcgacgcacggccggaccatacataatggaatggtccggccgtgctcct

SEQ ID NO: 34308 - DNA, 50 bp, unidentified
  source 1..50: mol_type = unassigned DNA; note = donor_6382079
  misc_feature 1..23: note = RE
  misc_feature 24..25: note = Core
  misc_feature 26..50: note = LE
gtagggagggggccctccacatatgttggagtggacggcccctgaacggc

SEQ ID NO: 34309 - DNA, 50 bp, unidentified
  source 1..50: mol_type = unassigned DNA; note = donor_638354a
  misc_feature 1..24: note = RE
  misc_feature 25: note = Core
  misc_feature 26..50: note = LE
tgcacggacgagacggaccatacataatgggatggtccgcctcgtcctcc

SEQ ID NO: 34310 - DNA, 50 bp, unidentified
  source 1..50: mol_type = unassigned DNA; note = donor_638586d
  misc_feature 1..24: note = RE
  misc_feature 25: note = Core
  misc_feature 26..50: note = LE
aagttcttgacttttcatagttggtgtatgataaatacataaagtactta

SEQ ID NO: 34311 - DNA, 50 bp, unidentified
  source 1..50: mol_type = unassigned DNA; note = donor_6386c98
  misc_feature 1..23: note = RE
  misc_feature 24..25: note = Core
  misc_feature 26..50: note = LE
caacgcgggagccatccacacaggatggagtggatggctcccgctcccgg

SEQ ID NO: 34312 - DNA, 50 bp, unidentified
  source 1..50: mol_type = unassigned DNA; note = donor_6389e25
  misc_feature 1..22: note = RE
  misc_feature 23..25: note = Core
  misc_feature 26..50: note = LE
aatgttgacaaactattagctggttcgtaatataaggtagccagattttt

SEQ ID NO: 34313 - DNA, 50 bp, unidentified
  source 1..50: mol_type = unassigned DNA; note = donor_638a180
  misc_feature 1..23: note = RE
  misc_feature 24..25: note = Core
  misc_feature 26..50: note = LE
gcacccgcgggggcgtccacacatgatggggtggacgcccctcgacggca

SEQ ID NO: 34314 - DNA, 50 bp, unidentified
  source 1..50: mol_type = unassigned DNA; note = donor_638ba0b
  misc_feature 1..23: note = RE
  misc_feature 24..25: note = Core
  misc_feature 26..50: note = LE
tgcaccgcgggccgttccacatatgatgtggtggaacggcccgctccgac

SEQ ID NO: 34315 - DNA, 50 bp, unidentified
  source 1..50: mol_type = unassigned DNA; note = donor_638dcdf
  misc_feature 1..23: note = RE
  misc_feature 24..25: note = Core
  misc_feature 26..50: note = LE
tgacatgtcagctcctgggatgtctaatcagttctgggagtgagccgtcg

SEQ ID NO: 34316 - DNA, 50 bp, unidentified
  source 1..50: mol_type = unassigned DNA; note = donor_6393d25
  misc_feature 1..24: note = RE
  misc_feature 25: note = Core
  misc_feature 26..50: note = LE
accacttgacctccataggagcatcagtgaggatggtggggtgggtcgcc

SEQ ID NO: 34317 - DNA, 50 bp, unidentified; identical to SEQ ID NO: 32245
  source 1..50: mol_type = unassigned DNA; note = donor_6393fc0
  misc_feature 1..24: note = RE
  misc_feature 25: note = Core
  misc_feature 26..50: note = LE

SEQ ID NO: 34318 - DNA, 50 bp, unidentified
  source 1..50: mol_type = unassigned DNA; note = donor_639892f
  misc_feature 1..23: note = RE
  misc_feature 24..25: note = Core
  misc_feature 26..50: note = LE
ggctatgatggagaacacagttgcctgtctgttgaaaatgtgtcattgtg

SEQ ID NO: 34319 - DNA, 50 bp, unidentified
  source 1..50: mol_type = unassigned DNA; note = donor_639b6b7
  misc_feature 1..23: note = RE
  misc_feature 24..25: note = Core
  misc_feature 26..50: note = LE
gcataacgggcggcaaccacagaagatggggtggttgccgccctccccaa

SEQ ID NO: 34320 - DNA, 50 bp, unidentified
  source 1..50: mol_type = unassigned DNA; note = donor_639ed83
  misc_feature 1..24: note = RE
  misc_feature 25: note = Core
  misc_feature 26..50: note = LE
tccctgcgacaaggtgacagttgcttgtatgtcgggaaagcagcattctg

SEQ ID NO: 34321 - DNA, 50 bp, unidentified
  source 1..50: mol_type = unassigned DNA; note = donor_63a54bb
  misc_feature 1..24: note = RE
  misc_feature 25: note = Core
  misc_feature 26..50: note = LE
gacaaaggtggggaagcccttgtagaatgaaagggacttccccgtcccaa

SEQ ID NO: 34322 - DNA, 50 bp, unidentified
  source 1..50: mol_type = unassigned DNA; note = donor_63a7a2f
  misc_feature 1..22: note = RE
  misc_feature 23..25: note = Core
  misc_feature 26..50: note = LE
atccgcaggggccgtccacacatgatggggtggacggcccctgctcagcg

SEQ ID NO: 34323 - DNA, 50 bp, unidentified
  source 1..50: mol_type = unassigned DNA; note = donor_63a9469
  misc_feature 1..21: note = RE
  misc_feature 22..25: note = Core
  misc_feature 26..50: note = LE
gcaaaagggaggcgtccatatagaatgaaatggacgcctcccaccagtac

SEQ ID NO: 34324 - DNA, 50 bp, unidentified
  source 1..50: mol_type = unassigned DNA; note = donor_63aa017
  misc_feature 1..24: note = RE
  misc_feature 25: note = Core
  misc_feature 26..50: note = LE
tgcacaggcagggcgggtcatacataatgggatgacccgccctgccgctc

SEQ ID NO: 34325 - DNA, 50 bp, unidentified
  source 1..50: mol_type = unassigned DNA; note = donor_63aac9c
  misc_feature 1..23: note = RE
  misc_feature 24..25: note = Core
  misc_feature 26..50: note = LE
gacagctaccacccctgggatgtctaatgggagccggccgggtcctgtag

SEQ ID NO: 34326 - DNA, 50 bp, unidentified
  source 1..50: mol_type = unassigned DNA; note = donor_63b3ce4
  misc_feature 1..23: note = RE
  misc_feature 24..25: note = Core
  misc_feature 26..50: note = LE
gcaaaaatcaggctgaccatagattaatgggatggtcagcctgaccgaaa

SEQ ID NO: 34327 - DNA, 50 bp, unidentified
  source 1..50: mol_type = unassigned DNA; note = donor_63b4776
  misc_feature 1..24: note = RE
  misc_feature 25: note = Core
  misc_feature 26..50: note = LE
tgatgtcttgacacagaggggagcctacttgtttcattgacctgcgaccg

SEQ ID NO: 34328 - DNA, 50 bp, unidentified
  source 1..50: mol_type = unassigned DNA; note = donor_63b4cae
  misc_feature 1..23: note = RE
  misc_feature 24..25: note = Core
  misc_feature 26..50: note = LE
attatttgcataggtcttagaattcctttagatttgcactgtgaaaaata

SEQ ID NO: 34329 - DNA, 50 bp, unidentified
  source 1..50: mol_type = unassigned DNA; note = donor_63b9824
  misc_feature 1..24: note = RE
  misc_feature 25: note = Core
  misc_feature 26..50: note = LE
cttgcgaacagggcgggccatacgtatgggatggcccgcccttccgagga

SEQ ID NO: 34330 - DNA, 50 bp, unidentified
  source 1..50: mol_type = unassigned DNA; note = donor_63c2b16
  misc_feature 1..22: note = RE
  misc_feature 23..25: note = Core
  misc_feature 26..50: note = LE
ttttttcggtttttttcatgcgaaacccacatgagcacattgctcatgca

SEQ ID NO: 34331 - DNA, 50 bp, unidentified
  source 1..50: mol_type = unassigned DNA; note = donor_63d04bd
  misc_feature 1..24: note = RE
  misc_feature 25: note = Core
  misc_feature 26..50: note = LE
atgcttggataaaatcataggaagctttaactttgcagtctgtaataaga

SEQ ID NO: 34332 - DNA, 50 bp, unidentified
  source 1..50: mol_type = unassigned DNA; note = donor_63d91da
  misc_feature 1..24: note = RE
  misc_feature 25: note = Core
  misc_feature 26..50: note = LE
cttgcaatcggagagggtcatatataatggtatggaccctctcctcccat

SEQ ID NO: 34333 - DNA, 50 bp, unidentified
  source 1..50: mol_type = unassigned DNA; note = donor_63dc172
  misc_feature 1..23: note = RE
  misc_feature 24..25: note = Core
  misc_feature 26..50: note = LE
gccacgcgggggccgtccatacatgatgtggtggacggcctccgctcccg

SEQ ID NO: 34334 - DNA, 50 bp, unidentified
  source 1..50: mol_type = unassigned DNA; note = donor_63de5c3
  misc_feature 1..23: note = RE
  misc_feature 24..25: note = Core
  misc_feature 26..50: note = LE
gcgccaacgggggcgtccacacatgatggggtggacgccccctcacggca

SEQ ID NO: 34335 - DNA, 50 bp, unidentified
  source 1..50: mol_type = unassigned DNA; note = donor_63e2515
  misc_feature 1..23: note = RE
  misc_feature 24..25: note = Core
  misc_feature 26..50: note = LE
gaacccaacgggccgtccacacatgttggggtggacggcccaacggcatc

SEQ ID NO: 34336 - DNA, 50 bp, unidentified; identical to SEQ ID NO: 30833
  source 1..50: mol_type = unassigned DNA; note = donor_63e3694
  misc_feature 1..23: note = RE
  misc_feature 24..25: note = Core
  misc_feature 26..50: note = LE

SEQ ID NO: 34337 - DNA, 50 bp, unidentified
  source 1..50: mol_type = unassigned DNA; note = donor_63e478f
  misc_feature 1..24: note = RE
  misc_feature 25: note = Core
  misc_feature 26..50: note = LE
gccgcttgacatctataggagcatcagagatgatgtttgtgagcacctcc

SEQ ID NO: 34338 - DNA, 50 bp, unidentified
  source 1..50: mol_type = unassigned DNA; note = donor_63e5bf3
  misc_feature 1..23: note = RE
  misc_feature 24..25: note = Core
  misc_feature 26..50: note = LE
gcaagccgggggccgtccacatatgttggggtggacggcccccgacggca

SEQ ID NO: 34339 - DNA, 50 bp, unidentified; identical to SEQ ID NO: 30679
  source 1..50: mol_type = unassigned DNA; note = donor_63ee810
  misc_feature 1..23: note = RE
  misc_feature 24..25: note = Core
  misc_feature 26..50: note = LE

SEQ ID NO: 34340 - DNA, 50 bp, unidentified
  source 1..50: mol_type = unassigned DNA; note = donor_63f459f
  misc_feature 1..24: note = RE
  misc_feature 25: note = Core
  misc_feature 26..50: note = LE
ttgacaaaagagggagtccatgtagaatgatatggactccctctacctga

SEQ ID NO: 34341 - DNA, 50 bp, unidentified
  source 1..50: mol_type = unassigned DNA; note = donor_63f78de
  misc_feature 1..23: note = RE
  misc_feature 24..25: note = Core
  misc_feature 26..50: note = LE
atacttgactctttataggatgtctggtattatcctcacctgatacacct

SEQ ID NO: 34342 - DNA, 50 bp, unidentified
  source 1..50: mol_type = unassigned DNA; note = donor_6409a54
  misc_feature 1..24: note = RE
  misc_feature 25: note = Core
  misc_feature 26..50: note = LE
tgcgcaaagggacgcgttcatacataatgatatgaacgcgtcccaccctg

SEQ ID NO: 34343 - DNA, 50 bp, unidentified
  source 1..50: mol_type = unassigned DNA; note = donor_640a766
  misc_feature 1..23: note = RE
  misc_feature 24..25: note = Core
  misc_feature 26..50: note = LE
gtgcttgacttctaatagttagtcttgtatactcataactgtaataatag

SEQ ID NO: 34344 - DNA, 50 bp, unidentified
  source 1..50: mol_type = unassigned DNA; note = donor_640b3b8
  misc_feature 1..23: note = RE
  misc_feature 24..25: note = Core
  misc_feature 26..50: note = LE
gcataacgggaggtgtccatatacgatgtgatggacacctcccccttacg

SEQ ID NO: 34345 - DNA, 50 bp, unidentified
  source 1..50: mol_type = unassigned DNA; note = donor_6412b76
  misc_feature 1..23: note = RE
  misc_feature 24..25: note = Core
  misc_feature 26..50: note = LE
gacagtggaggcgagtccatacataattagatggactcgcccacgccgag

SEQ ID NO: 34346 - DNA, 50 bp, unidentified
  source 1..50: mol_type = unassigned DNA; note = donor_6414c48
  misc_feature 1..22: note = RE
  misc_feature 23..25: note = Core
  misc_feature 26..50: note = LE
aatgttgacaaactattagctggttcgtattataaggtcagccagaaaat

SEQ ID NO: 34347 - DNA, 50 bp, unidentified
  source 1..50: mol_type = unassigned DNA; note = donor_64292a8
  misc_feature 1..23: note = RE
  misc_feature 24..25: note = Core
  misc_feature 26..50: note = LE
tttgttgcttttgaacagagtatcttgtatgatgaattttaacaaccgat

SEQ ID NO: 34348 - DNA, 50 bp, unidentified
  source 1..50: mol_type = unassigned DNA; note = donor_642d9b2
  misc_feature 1..24: note = RE
  misc_feature 25: note = Core
  misc_feature 26..50: note = LE
tgcaactgagggggagtccatatacaatggtatggactcctcctccccta

SEQ ID NO: 34349 - DNA, 50 bp, unidentified
  source 1..50: mol_type = unassigned DNA; note = donor_64366da
  misc_feature 1..21: note = RE
  misc_feature 22..25: note = Core
  misc_feature 26..50: note = LE
cgcttgacaacaacattgagattccgtaagactggagcggcccgggggaa

SEQ ID NO: 34350 - DNA, 50 bp, unidentified
  source 1..50: mol_type = unassigned DNA; note = donor_644942d
  misc_feature 1..23: note = RE
  misc_feature 24..25: note = Core
  misc_feature 26..50: note = LE
tctattgactttccatagttggtcttgtatgatatacacatggcaaaagc

SEQ ID NO: 34351 - DNA, 50 bp, unidentified
  source 1..50: mol_type = unassigned DNA; note = donor_644ddfd
  misc_feature 1..23: note = RE
  misc_feature 24..25: note = Core
  misc_feature 26..50: note = LE
gtggcacgggggccgtccacatatgttggtgtggacggccccctacggca

SEQ ID NO: 34352 - DNA, 50 bp, unidentified
  source 1..50: mol_type = unassigned DNA; note = donor_6459037
  misc_feature 1..23: note = RE
  misc_feature 24..25: note = Core
  misc_feature 26..50: note = LE
acagcaacgggcgagtccatacataatcggatggactcgccctcgccgag

SEQ ID NO: 34353 - DNA, 50 bp, unidentified
  source 1..50: mol_type = unassigned DNA; note = donor_645d7a8
  misc_feature 1..23: note = RE
  misc_feature 24..25: note = Core
  misc_feature 26..50: note = LE
gaacccagcgggccgtccacacatgttggtgtggacggccccacggcatc

SEQ ID NO: 34354 - DNA, 50 bp, unidentified
  source 1..50: mol_type = unassigned DNA; note = donor_646fcbf
  misc_feature 1..24: note = RE
  misc_feature 25: note = Core
  misc_feature 26..50: note = LE
atgtttggttttttccataggaagctttaagtttgcagaggaaatgcgta

SEQ ID NO: 34355 - DNA, 50 bp, unidentified; identical to SEQ ID NO: 30702
  source 1..50: mol_type = unassigned DNA; note = donor_647184f
  misc_feature 1..22: note = RE
  misc_feature 23..25: note = Core
  misc_feature 26..50: note = LE

SEQ ID NO: 34356 - DNA, 50 bp, unidentified
  source 1..50: mol_type = unassigned DNA; note = donor_6476821
  misc_feature 1..22: note = RE
  misc_feature 23..25: note = Core
  misc_feature 26..50: note = LE
gaaaaaagccatcaagacagttgcttgtgtcttgagccaggtttaaactg

SEQ ID NO: 34357 - DNA, 50 bp, unidentified
  source 1..50: mol_type = unassigned DNA; note = donor_647b027
  misc_feature 1..22: note = RE
  misc_feature 23..25: note = Core
  misc_feature 26..50: note = LE
ctttgcaggtgccatccacacaggatggggtggacggctcctgcttcaac

SEQ ID NO: 34358 - DNA, 50 bp, unidentified
  source 1..50: mol_type = unassigned DNA; note = donor_648209d
  misc_feature 1..23: note = RE
  misc_feature 24..25: note = Core
  misc_feature 26..50: note = LE
tatcttgacatttcaccgctggactcgtataatatttttatcaagaaaaa

SEQ ID NO: 34359 - DNA, 50 bp, unidentified
  source 1..50: mol_type = unassigned DNA; note = donor_6483cb0
  misc_feature 1..23: note = RE
  misc_feature 24..25: note = Core
  misc_feature 26..50: note = LE
atatttgcaagagacttagaattcatttacttttgcagtattaaaacata

SEQ ID NO: 34360 - DNA, 50 bp, unidentified
  source 1..50: mol_type = unassigned DNA; note = donor_648aac8
  misc_feature 1..21: note = RE
  misc_feature 22..25: note = Core
  misc_feature 26..50: note = LE
gcttgacaatttaataggggcccccgttactttattcgtaccccttataa

SEQ ID NO: 34361 - DNA, 50 bp, unidentified; identical to SEQ ID NO: 32165
  source 1..50: mol_type = unassigned DNA; note = donor_64adfa1
  misc_feature 1..23: note = RE
  misc_feature 24..25: note = Core
  misc_feature 26..50: note = LE

SEQ ID NO: 34362 - DNA, 50 bp, unidentified
  source 1..50: mol_type = unassigned DNA; note = donor_64aede2
  misc_feature 1..24: note = RE
  misc_feature 25: note = Core
  misc_feature 26..50: note = LE
ttgcaaaccgggggcgtccatgtataatgaaatggacgccccctacctgc

SEQ ID NO: 34363 - DNA, 50 bp, unidentified
  source 1..50: mol_type = unassigned DNA; note = donor_64c4222
  misc_feature 1..23: note = RE
  misc_feature 24..25: note = Core
  misc_feature 26..50: note = LE
gcatcacgggcggcaaccaaagaagatgggatggttgccgccctctcctg

SEQ ID NO: 34364 - DNA, 50 bp, unidentified
  source 1..50: mol_type = unassigned DNA; note = donor_64cca89
  misc_feature 1..23: note = RE
  misc_feature 24..25: note = Core
  misc_feature 26..50: note = LE
acgcttgacggcgaagacggttacttgtatgttcaatcctggccggcgcg

SEQ ID NO: 34365 - DNA, 50 bp, unidentified
  source 1..50: mol_type = unassigned DNA; note = donor_64d1e32
  misc_feature 1..24: note = RE
  misc_feature 25: note = Core
  misc_feature 26..50: note = LE
ttgacaaagggggaagcccttgtagaatgaaagggacttccccgtcccga

SEQ ID NO: 34366 - DNA, 50 bp, unidentified
  source 1..50: mol_type = unassigned DNA; note = donor_64dcbef
  misc_feature 1..23: note = RE
  misc_feature 24..25: note = Core
  misc_feature 26..50: note = LE
gcatgaaccggggcatccacacatgatggagtggatgcccctcccgcccg

SEQ ID NO: 34367 - DNA, 50 bp, unidentified
  source 1..50: mol_type = unassigned DNA; note = donor_64eae20
  misc_feature 1..23: note = RE
  misc_feature 24..25: note = Core
  misc_feature 26..50: note = LE
ctacttgacttttatatagttagctggtataatgtaattgactcatctaa

SEQ ID NO: 34368 - DNA, 50 bp, unidentified
  source 1..50: mol_type = unassigned DNA; note = donor_64f7abc
  misc_feature 1..23: note = RE
  misc_feature 24..25: note = Core
  misc_feature 26..50: note = LE
gcaaagcgggaggagaccatatacgatgagatggtctcctcccattccac

SEQ ID NO: 34369 - DNA, 50 bp, unidentified
  source 1..50: mol_type = unassigned DNA; note = donor_64fb1f9
  misc_feature 1..24: note = RE
  misc_feature 25: note = Core
  misc_feature 26..50: note = LE
ttgacgaacgggggaatccatgtagaatgacatggattccccctcttgaa

SEQ ID NO: 34370 - DNA, 50 bp, unidentified
  source 1..50: mol_type = unassigned DNA; note = donor_64fea6f
  misc_feature 1..22: note = RE
  misc_feature 23..25: note = Core
  misc_feature 26..50: note = LE
tgactactttttaatatagttcgttgtatattatttgcatatttaaaata

SEQ ID NO: 34371 - DNA, 50 bp, unidentified
  source 1..50: mol_type = unassigned DNA; note = donor_6504c10
  misc_feature 1..23: note = RE
  misc_feature 24..25: note = Core
  misc_feature 26..50: note = LE
gacctcaacacgccgaatagagaagatggggtattcggcttgagcccatc

SEQ ID NO: 34372 - DNA, 50 bp, unidentified
  source 1..50: mol_type = unassigned DNA; note = donor_650b95c
  misc_feature 1..23: note = RE
  misc_feature 24..25: note = Core
  misc_feature 26..50: note = LE
gcaataaatggggagtccatatatgatgatatggactcctccctcttcaa

SEQ ID NO: 34373 - DNA, 50 bp, unidentified; identical to SEQ ID NO: 32642
  source 1..50: mol_type = unassigned DNA; note = donor_650fc1b
  misc_feature 1..23: note = RE
  misc_feature 24..25: note = Core
  misc_feature 26..50: note = LE

SEQ ID NO: 34374 - DNA, 50 bp, unidentified
  source 1..50: mol_type = unassigned DNA; note = donor_6510c0a
  misc_feature 1..22: note = RE
  misc_feature 23..25: note = Core
  misc_feature 26..50: note = LE
cggacggtgggttaagacagttgcttgtgtcttgatctgggaataaactc

SEQ ID NO: 34375 - DNA, 50 bp, unidentified
  source 1..50: mol_type = unassigned DNA; note = donor_651ed9b
  misc_feature 1..23: note = RE
  misc_feature 24..25: note = Core
  misc_feature 26..50: note = LE
aattaatatcaccaatacagttgcctgtgtattgcacttgtgttataagg

SEQ ID NO: 34376 - DNA, 50 bp, unidentified
  source 1..50: mol_type = unassigned DNA; note = donor_6528fd8
  misc_feature 1..23: note = RE
  misc_feature 24..25: note = Core
  misc_feature 26..50: note = LE
taatttgcatatgaacatagaacatggtaagtttgtattaagaaatatag

SEQ ID NO: 34377 - DNA, 50 bp, unidentified
  source 1..50: mol_type = unassigned DNA; note = donor_652a29e
  misc_feature 1..7: note = RE
  misc_feature 8..25: note = Core
  misc_feature 26..50: note = LE
caactacgctcaggcagcgtgtaatggaataattggtggctgagcacaga

SEQ ID NO: 34378 - DNA, 50 bp, unidentified
  source 1..50: mol_type = unassigned DNA; note = donor_6537bcd
  misc_feature 1..23: note = RE
  misc_feature 24..25: note = Core
  misc_feature 26..50: note = LE
gcgcttgaccgccaagacggttgcttgtatcttcaggcctcggaccagct

SEQ ID NO: 34379 - DNA, 50 bp, unidentified
  source 1..50: mol_type = unassigned DNA; note = donor_6544904
  misc_feature 1..23: note = RE
  misc_feature 24..25: note = Core
  misc_feature 26..50: note = LE
agtaaatagaatctaactgagggagcattcctgtagtgcgttaatttcga

SEQ ID NO: 34380 - DNA, 50 bp, unidentified
  source 1..50: mol_type = unassigned DNA; note = donor_655269d
  misc_feature 1..23: note = RE
  misc_feature 24..25: note = Core
  misc_feature 26..50: note = LE
aggccgcttgatcataacggatacttgtcttatgaaggtggcaatctttc

SEQ ID NO: 34381 - DNA, 50 bp, unidentified
  source 1..50: mol_type = unassigned DNA; note = donor_6559463
  misc_feature 1..24: note = RE
  misc_feature 25: note = Core
  misc_feature 26..50: note = LE
tgcaccgcgggcgccgtccttacatgatgtggtggacggcgcccgctccc

SEQ ID NO: 34382 - DNA, 50 bp, unidentified; identical to SEQ ID NO: 33040
  source 1..50: mol_type = unassigned DNA; note = donor_6560b99
  misc_feature 1..22: note = RE
  misc_feature 23..25: note = Core
  misc_feature 26..50: note = LE

SEQ ID NO: 34383 - DNA, 50 bp, unidentified
  source 1..50: mol_type = unassigned DNA; note = donor_656a0cf
  misc_feature 1..23: note = RE
  misc_feature 24..25: note = Core
  misc_feature 26..50: note = LE
gcatcccgggcggcaaccacagaagatggggtggttgccgccctccctga

SEQ ID NO: 34384 - DNA, 50 bp, unidentified
  source 1..50: mol_type = unassigned DNA; note = donor_6573aa6
  misc_feature 1..24: note = RE
  misc_feature 25: note = Core
  misc_feature 26..50: note = LE
tgcagtcagacggcggaccatacataatgagatggtccgccggcttgatc

SEQ ID NO: 34385 - DNA, 50 bp, unidentified
  source 1..50: mol_type = unassigned DNA; note = donor_657a7fb
  misc_feature 1..24: note = RE
  misc_feature 25: note = Core
  misc_feature 26..50: note = LE
ctgtcctctactttctttcacactaatctccattccgccgctttcggtcg

SEQ ID NO: 34386 - DNA, 50 bp, unidentified
  source 1..50: mol_type = unassigned DNA; note = donor_657ef43
  misc_feature 1..23: note = RE
  misc_feature 24..25: note = Core
  misc_feature 26..50: note = LE
aaaattttggggagatacagttgcttgtatatctcaaatgagttaaacta

SEQ ID NO: 34387 - DNA, 50 bp, unidentified
  source 1..50: mol_type = unassigned DNA; note = donor_6583155
  misc_feature 1..24: note = RE
  misc_feature 25: note = Core
  misc_feature 26..50: note = LE
tggcaaaatgggggcgaccatctataatggaatggtcgcccccttccgga

SEQ ID NO: 34388 - DNA, 50 bp, unidentified
  source 1..50: mol_type = unassigned DNA; note = donor_658856b
  misc_feature 1..23: note = RE
  misc_feature 24..25: note = Core
  misc_feature 26..50: note = LE
gcaaaaacgggagtgaccatagattaatgaaatggtcactccctcttcca

SEQ ID NO: 34389 - DNA, 50 bp, unidentified
  source 1..50: mol_type = unassigned DNA; note = donor_6588e40
  misc_feature 1..23: note = RE
  misc_feature 24..25: note = Core
  misc_feature 26..50: note = LE
gaccctgaatggccgattagagaagatggggtaatcggccggcagcttgt

SEQ ID NO: 34390 - DNA, 50 bp, unidentified
  source 1..50: mol_type = unassigned DNA; note = donor_658f0e4
  misc_feature 1..23: note = RE
  misc_feature 24..25: note = Core
  misc_feature 26..50: note = LE
ctgcttgacaacgagattaggaatccctaccttgttgatcgggatgagcg

SEQ ID NO: 34391 - DNA, 50 bp, unidentified
  source 1..50: mol_type = unassigned DNA; note = donor_6594982
  misc_feature 1..24: note = RE
  misc_feature 25: note = Core
  misc_feature 26..50: note = LE
tgcgacaaggcggcggaccatacataatgggatggtccgccgcctttacc

SEQ ID NO: 34392 - DNA, 50 bp, unidentified
  source 1..50: mol_type = unassigned DNA; note = donor_659771f
  misc_feature 1..24: note = RE
  misc_feature 25: note = Core
  misc_feature 26..50: note = LE
cagcgtcttaacacagaggggagcctacttgcttcattgacctacgaccg

SEQ ID NO: 34393 - DNA, 50 bp, unidentified
  source 1..50: mol_type = unassigned DNA; note = donor_659e577
  misc_feature 1..24: note = RE
  misc_feature 25: note = Core
  misc_feature 26..50: note = LE
tgcgactcggcggcggaccatacataatgggatggtccgccgcccttagc

SEQ ID NO: 34394 - DNA, 50 bp, unidentified
  source 1..50: mol_type = unassigned DNA; note = donor_65a4472
  misc_feature 1..19: note = RE
  misc_feature 20..25: note = Core
  misc_feature 26..50: note = LE
cagggttgacacaggatgtctcattggactaccctccctcgagcgacaaa

SEQ ID NO: 34395 - DNA, 50 bp, unidentified
  source 1..50: mol_type = unassigned DNA; note = donor_65ab90e
  misc_feature 1..23: note = RE
  misc_feature 24..25: note = Core
  misc_feature 26..50: note = LE
agccttgactttttatttgcaggctactacaatgatttatgggtaaggtg

SEQ ID NO: 34396 - DNA, 50 bp, unidentified
  source 1..50: mol_type = unassigned DNA; note = donor_65b1d60
  misc_feature 1..23: note = RE
  misc_feature 24..25: note = Core
  misc_feature 26..50: note = LE
gacagcttagacccgtgggatgtctaatgggagtgtaccggttggtcctt

SEQ ID NO: 34397 - DNA, 50 bp, unidentified
  source 1..50: mol_type = unassigned DNA; note = donor_65b5e5b
  misc_feature 1..23: note = RE
  misc_feature 24..25: note = Core
  misc_feature 26..50: note = LE
acacttgactgcgaagacggttacttgtatgttcaattccggccagcgcg

SEQ ID NO: 34398 - DNA, 50 bp, unidentified
  source 1..50: mol_type = unassigned DNA; note = donor_65b66ff
  misc_feature 1..24: note = RE
  misc_feature 25: note = Core
  misc_feature 26..50: note = LE
atcttgacaagctattagctggtatcgtattatgggatcaaccagttctt

SEQ ID NO: 34399 - DNA, 50 bp, unidentified
  source 1..50: mol_type = unassigned DNA; note = donor_65c0e02
  misc_feature 1..22: note = RE
  misc_feature 23..25: note = Core
  misc_feature 26..50: note = LE
attattgacaaactattagctggttcgtaatataaggttagccagatatt

SEQ ID NO: 34400 - DNA, 50 bp, unidentified
  source 1..50: mol_type = unassigned DNA; note = donor_65dc4d3
  misc_feature 1..24: note = RE
  misc_feature 25: note = Core
  misc_feature 26..50: note = LE
aggtgccgtgtgaagacagttgctcttgtgtctgcaaagctctataagct

SEQ ID NO: 34401 - DNA, 50 bp, unidentified
  source 1..50: mol_type = unassigned DNA; note = donor_65de713
  misc_feature 1..23: note = RE
  misc_feature 24..25: note = Core
  misc_feature 26..50: note = LE
tgacttgcgcgcaaacatagaaccttgtatggtgtcggtgctggggtgga

SEQ ID NO: 34402 - DNA, 50 bp, unidentified
  source 1..50: mol_type = unassigned DNA; note = donor_65e21a7
  misc_feature 1..23: note = RE
  misc_feature 24..25: note = Core
  misc_feature 26..50: note = LE
gcatgaaacggggcatccacacatgatggagtggatgcccctcccggctg

SEQ ID NO: 34403 - DNA, 50 bp, unidentified
  source 1..50: mol_type = unassigned DNA; note = donor_65e48d3
  misc_feature 1..24: note = RE
  misc_feature 25: note = Core
  misc_feature 26..50: note = LE
cgcctccgcttgacagaggggtgcctacttgttagaaccaccacttgcag

SEQ ID NO: 34404 - DNA, 50 bp, unidentified
  source 1..50: mol_type = unassigned DNA; note = donor_65ef7f7
  misc_feature 1..24: note = RE
  misc_feature 25: note = Core
  misc_feature 26..50: note = LE
tgcatgggcggagcggaccatacataatgggatggtccgctccgtcctcc

SEQ ID NO: 34405 - DNA, 50 bp, unidentified
  source 1..50: mol_type = unassigned DNA; note = donor_65fd608
  misc_feature 1..23: note = RE
  misc_feature 24..25: note = Core
  misc_feature 26..50: note = LE
actattgacatctatatagttggctagtataatgattatgacttatccaa

SEQ ID NO: 34406 - DNA, 50 bp, unidentified
  source 1..50: mol_type = unassigned DNA; note = donor_660895d
  misc_feature 1..21: note = RE
  misc_feature 22..25: note = Core
  misc_feature 26..50: note = LE
agccttgacagggaacatgagagacgtcatgttccgaggcctgagatcgg

SEQ ID NO: 34407 - DNA, 50 bp, unidentified; identical to SEQ ID NO: 32058
  source 1..50: mol_type = unassigned DNA; note = donor_66097bc
  misc_feature 1..24: note = RE
  misc_feature 25: note = Core
  misc_feature 26..50: note = LE

SEQ ID NO: 34408 - DNA, 50 bp, unidentified
  source 1..50: mol_type = unassigned DNA; note = donor_660aff8
  misc_feature 1..24: note = RE
  misc_feature 25: note = Core
  misc_feature 26..50: note = LE
taaatttgttttaatcataggatacctttagatttgttctataaatataa

SEQ ID NO: 34409 - DNA, 50 bp, unidentified
  source 1..50: mol_type = unassigned DNA; note = donor_6612327
  misc_feature 1..24: note = RE
  misc_feature 25: note = Core
  misc_feature 26..50: note = LE
tgcaacgcgcggccggaccatacataatgggatggtccggccgcgctccc

SEQ ID NO: 34410 - DNA, 50 bp, unidentified
  source 1..50: mol_type = unassigned DNA; note = donor_6622338
  misc_feature 1..23: note = RE
  misc_feature 24..25: note = Core
  misc_feature 26..50: note = LE
cttgcgcttggggcggttacacatgatgatgtaaccgccccccgacggca

SEQ ID NO: 34411 - DNA, 50 bp, unidentified; identical to SEQ ID NO: 32226
  source 1..50: mol_type = unassigned DNA; note = donor_6636392
  misc_feature 1..21: note = RE
  misc_feature 22..25: note = Core
  misc_feature 26..50: note = LE

SEQ ID NO: 34412 - DNA, 50 bp, unidentified
  source 1..50: mol_type = unassigned DNA; note = donor_6636f87
  misc_feature 1..23: note = RE
  misc_feature 24..25: note = Core
  misc_feature 26..50: note = LE
aaccggcttgatcaaaacggatacttgtcttatgattttccctgcggatc

SEQ ID NO: 34413 - DNA, 50 bp, unidentified
  source 1..50: mol_type = unassigned DNA; note = donor_6639202
  misc_feature 1..22: note = RE
  misc_feature 23..25: note = Core
  misc_feature 26..50: note = LE
caacgcaggggccgtccacacatgatggggtggacggcccctgctcaccg

SEQ ID NO: 34414 - DNA, 50 bp, unidentified
  source 1..50: mol_type = unassigned DNA; note = donor_663b69c
  misc_feature 1..23: note = RE
  misc_feature 24..25: note = Core
  misc_feature 26..50: note = LE
ggggggaaagtgaagatagttgactcctaccttcaattcctttataactt

SEQ ID NO: 34415 - DNA, 50 bp, unidentified
  source 1..50: mol_type = unassigned DNA; note = donor_663d0f8
  misc_feature 1..23: note = RE
  misc_feature 24..25: note = Core
  misc_feature 26..50: note = LE
caacgcgggagccatccacacaggatgggctggatggctcccgctcccgg

SEQ ID NO: 34416 - DNA, 50 bp, unidentified
  source 1..50: mol_type = unassigned DNA; note = donor_663d813
  misc_feature 1..21: note = RE
  misc_feature 22..25: note = Core
  misc_feature 26..50: note = LE
tcttgacttcatatagctggtctcctatctttaagtcgttgcatctgaga

SEQ ID NO: 34417 - DNA, 50 bp, unidentified
  source 1..50: mol_type = unassigned DNA; note = donor_664f354
  misc_feature 1..24: note = RE
  misc_feature 25: note = Core
  misc_feature 26..50: note = LE
tgcaacgcacggtcggtccatacataatgggatggaccgaccgtgctccc

SEQ ID NO: 34418 - DNA, 50 bp, unidentified
  source 1..50: mol_type = unassigned DNA; note = donor_6651016
  misc_feature 1..21: note = RE
  misc_feature 22..25: note = Core
  misc_feature 26..50: note = LE
tattgacttttgtttgcaggactcctacaatatagttacggttaaaggcg

SEQ ID NO: 34419 - DNA, 50 bp, unidentified
  source 1..50: mol_type = unassigned DNA; note = donor_66533e8
  misc_feature 1..23: note = RE
  misc_feature 24..25: note = Core
  misc_feature 26..50: note = LE
acgcttgactctcaacagagtatcttgtatgttaagactcaacgaaatga

SEQ ID NO: 34420 - DNA, 50 bp, unidentified
  source 1..50: mol_type = unassigned DNA; note = donor_66676b2
  misc_feature 1..21: note = RE
  misc_feature 22..25: note = Core
  misc_feature 26..50: note = LE
cctgaggttgacacagggagtgtcactagggcaccatccttgttgcgggt

SEQ ID NO: 34421 - DNA, 50 bp, unidentified; identical to SEQ ID NO: 32025
  source 1..50: mol_type = unassigned DNA; note = donor_667307b
  misc_feature 1..23: note = RE
  misc_feature 24..25: note = Core
  misc_feature 26..50: note = LE

SEQ ID NO: 34422 - DNA, 50 bp, unidentified
  source 1..50: mol_type = unassigned DNA; note = donor_6676e31
  misc_feature 1..23: note = RE
  misc_feature 24..25: note = Core
  misc_feature 26..50: note = LE
aggcttgacttttatcacagttgctagtatgatgaaaaggacacggcaga

SEQ ID NO: 34423 - DNA, 50 bp, unidentified
  source 1..50: mol_type = unassigned DNA; note = donor_6678c01
  misc_feature 1..23: note = RE
  misc_feature 24..25: note = Core
  misc_feature 26..50: note = LE
atatttggatagcatcacagaatctatgtttgttatctaaataagataag

SEQ ID NO: 34424 - DNA, 50 bp, unidentified
  source 1..50: mol_type = unassigned DNA; note = donor_667d285
  misc_feature 1..23: note = RE
  misc_feature 24..25: note = Core
  misc_feature 26..50: note = LE
cttgacggaggtcatagggacacccgttaccttgttcttgcctccaaggt

SEQ ID NO: 34425 - DNA, 50 bp, unidentified
  source 1..50: mol_type = unassigned DNA; note = donor_66803d8
  misc_feature 1..22: note = RE
  misc_feature 23..25: note = Core
  misc_feature 26..50: note = LE
atgcagtttttatattatagttcattgtataataatttatcgttataaat

SEQ ID NO: 34426 - DNA, 50 bp, unidentified
  source 1..50: mol_type = unassigned DNA; note = donor_6682d1a
  misc_feature 1..23: note = RE
  misc_feature 24..25: note = Core
  misc_feature 26..50: note = LE
ataatttgtttttgtcatagaaatcctttagattagcaataagaaaaaaa

SEQ ID NO: 34427 - DNA, 50 bp, unidentified
  source 1..50: mol_type = unassigned DNA; note = donor_668c931
  misc_feature 1..23: note = RE
  misc_feature 24..25: note = Core
  misc_feature 26..50: note = LE
atgcttgactttatatagttagtcttgtatattatagtcagtaccaaaac

SEQ ID NO: 34428 - DNA, 50 bp, unidentified
  source 1..50: mol_type = unassigned DNA; note = donor_668dedd
  misc_feature 1..23: note = RE
  misc_feature 24..25: note = Core
  misc_feature 26..50: note = LE
cttcttgacttttaagacggttgcttgtatctttagagtttgatttcgga

SEQ ID NO: 34429 - DNA, 50 bp, unidentified
  source 1..50: mol_type = unassigned DNA; note = donor_669969b
  misc_feature 1..23: note = RE
  misc_feature 24..25: note = Core
  misc_feature 26..50: note = LE
cctattgacatttattagctggactctagtataattaatggtgtagtcaa

SEQ ID NO: 34430 - DNA, 50 bp, unidentified
  source 1..50: mol_type = unassigned DNA; note = donor_66b7462
  misc_feature 1..23: note = RE
  misc_feature 24..25: note = Core
  misc_feature 26..50: note = LE
tgacacttaagctcctgggatgtctaatgagtgttagcgggtcggccata

SEQ ID NO: 34431 - DNA, 50 bp, unidentified
  source 1..50: mol_type = unassigned DNA; note = donor_66c50ae
  misc_feature 1..23: note = RE
  misc_feature 24..25: note = Core
  misc_feature 26..50: note = LE
aatttttatgttcaagacagttgcttgtatcttaaatgtaggttaaaata

SEQ ID NO: 34432 - DNA, 50 bp, unidentified
  source 1..50: mol_type = unassigned DNA; note = donor_66c9a92
  misc_feature 1..23: note = RE
  misc_feature 24..25: note = Core
  misc_feature 26..50: note = LE
gccagccgggggccgtccacatatgttggggtggacggcccccaacggca

SEQ ID NO: 34433 - DNA, 50 bp, unidentified
  source 1..50: mol_type = unassigned DNA; note = donor_66d0785
  misc_feature 1..23: note = RE
  misc_feature 24..25: note = Core
  misc_feature 26..50: note = LE
agacttgacatttaatagttagtcttgtattatagagtagtagttttagt

SEQ ID NO: 34434 - DNA, 50 bp, unidentified
  source 1..50: mol_type = unassigned DNA; note = donor_66d6152
  misc_feature 1..22: note = RE
  misc_feature 23..25: note = Core
  misc_feature 26..50: note = LE
taacttgtttttgatcttggaatgcctttagtttgcaaaatgaataaaaa

SEQ ID NO: 34435 - DNA, 50 bp, unidentified
  source 1..50: mol_type = unassigned DNA; note = donor_66ddad6
  misc_feature 1..23: note = RE
  misc_feature 24..25: note = Core
  misc_feature 26..50: note = LE
tgaccaccaacggcatgggatgtctaatgacggttaccggggccaggcga

SEQ ID NO: 34436 - DNA, 50 bp, unidentified
  source 1..50: mol_type = unassigned DNA; note = donor_66df92b
  misc_feature 1..23: note = RE
  misc_feature 24..25: note = Core
  misc_feature 26..50: note = LE
agcctcctccagcaacacagttgcttatctgatcggaatctggcagttta

SEQ ID NO: 34437 - DNA, 50 bp, unidentified
  source 1..50: mol_type = unassigned DNA; note = donor_66e9815
  misc_feature 1..23: note = RE
  misc_feature 24..25: note = Core
  misc_feature 26..50: note = LE
agaaaacagaatctatctgagggagcattcctgtagaacgttaattatca

SEQ ID NO: 34438 - DNA, 50 bp, unidentified
  source 1..50: mol_type = unassigned DNA; note = donor_66f90ef
  misc_feature 1..23: note = RE
  misc_feature 24..25: note = Core
  misc_feature 26..50: note = LE
gcgtcttacggggcgtccacagatgatggggtggacgcccccccggcggc

SEQ ID NO: 34439 - DNA, 50 bp, unidentified
  source 1..50: mol_type = unassigned DNA; note = donor_6700045
  misc_feature 1..24: note = RE
  misc_feature 25: note = Core
  misc_feature 26..50: note = LE
aatttattgacaacaacataggggccgttaccttgttcgtgaccccgggt

SEQ ID NO: 34440 - DNA, 50 bp, unidentified
  source 1..50: mol_type = unassigned DNA; note = donor_6703f26
  misc_feature 1..23: note = RE
  misc_feature 24..25: note = Core
  misc_feature 26..50: note = LE
tgcaagtgggagccgtccacatatgttggggtggacggctcccaacggca

SEQ ID NO: 34441 - DNA, 50 bp, unidentified; identical to SEQ ID NO: 30519
  source 1..50: mol_type = unassigned DNA; note = donor_670a96b
  misc_feature 1..23: note = RE
  misc_feature 24..25: note = Core
  misc_feature 26..50: note = LE

SEQ ID NO: 34442 - DNA, 50 bp, unidentified
  source 1..50: mol_type = unassigned DNA; note = donor_670c342
  misc_feature 1..23: note = RE
  misc_feature 24..25: note = Core
  misc_feature 26..50: note = LE
gagccactccaacaccacagttgcttatctgttcggtttctgtcagtgtg

SEQ ID NO: 34443 - DNA, 50 bp, unidentified
  source 1..50: mol_type = unassigned DNA; note = donor_670c800
  misc_feature 1..21: note = RE
  misc_feature 22..25: note = Core
  misc_feature 26..50: note = LE
cggggggttgacacaggatgtctcactgggctaccttccagtccatgaag

SEQ ID NO: 34444 - DNA, 50 bp, unidentified
  source 1..50: mol_type = unassigned DNA; note = donor_670fa1e
  misc_feature 1..24: note = RE
  misc_feature 25: note = Core
  misc_feature 26..50: note = LE
ttacaatcgggcggggtccatatacaatggtatggaccccgcccttgatg

SEQ ID NO: 34445 - DNA, 50 bp, unidentified
  source 1..50: mol_type = unassigned DNA; note = donor_67159d6
  misc_feature 1..24: note = RE
  misc_feature 25: note = Core
  misc_feature 26..50: note = LE
gcagcccgaggaggagtccatatacaatgggatggactcctcctctcctt

SEQ ID NO: 34446 - DNA, 50 bp, unidentified
  source 1..50: mol_type = unassigned DNA; note = donor_6717876
  misc_feature 1..23: note = RE
  misc_feature 24..25: note = Core
  misc_feature 26..50: note = LE
ctgcttgactttttctttgcagactattacaatatatttatggttaatac

SEQ ID NO: 34447 - DNA, 50 bp, unidentified
  source 1..50: mol_type = unassigned DNA; note = donor_672ea7b
  misc_feature 1..24: note = RE
  misc_feature 25: note = Core
  misc_feature 26..50: note = LE
aaccccttgacaacaaagaggtctctaattgagactgaaggtggacgttg

SEQ ID NO: 34448 - DNA, 50 bp, unidentified
  source 1..50: mol_type = unassigned DNA; note = donor_6741a40
  misc_feature 1..24: note = RE
  misc_feature 25: note = Core
  misc_feature 26..50: note = LE
tgcaacgcgcggccgggccatacataatgggatggcccggccgcgctcag

SEQ ID NO: 34449 - DNA, 50 bp, unidentified
  source 1..50: mol_type = unassigned DNA; note = donor_6746738
  misc_feature 1..22: note = RE
  misc_feature 23..25: note = Core
  misc_feature 26..50: note = LE
cttgacaaagaaagccccatacaagatgctatggggcggcggcgaggata

SEQ ID NO: 34450 - DNA, 50 bp, unidentified
  source 1..50: mol_type = unassigned DNA; note = donor_674ae72
  misc_feature 1..22: note = RE
  misc_feature 23..25: note = Core
  misc_feature 26..50: note = LE
catccaggcggtcgtccacacatgatggtgtggacgaccgctgcccaccg

SEQ ID NO: 34451 - DNA, 50 bp, unidentified
  source 1..50: mol_type = unassigned DNA; note = donor_67592a0
  misc_feature 1..24: note = RE
  misc_feature 25: note = Core
  misc_feature 26..50: note = LE
tggcaaaacgggggcgaccatctataatgggatggtcgcccccttctgaa

SEQ ID NO: 34452 - DNA, 50 bp, unidentified
  source 1..50: mol_type = unassigned DNA; note = donor_676bdec
  misc_feature 1..23: note = RE
  misc_feature 24..25: note = Core
  misc_feature 26..50: note = LE
actggtctacttcaacacagttgcttgtgtccgcaagatgtgccagaatg

SEQ ID NO: 34453 - DNA, 50 bp, unidentified
  source 1..50: mol_type = unassigned DNA; note = donor_6778e13
  misc_feature 1..23: note = RE
  misc_feature 24..25: note = Core
  misc_feature 26..50: note = LE
atgcttgactttttatttgcaggctcctacaatagaactatggattggaa

SEQ ID NO: 34454 - DNA, 50 bp, unidentified
  source 1..50: mol_type = unassigned DNA; note = donor_6779282
  misc_feature 1..23: note = RE
  misc_feature 24..25: note = Core
  misc_feature 26..50: note = LE
gcattacgggcggcaaccaaagaagatgggatggttgccgccctccccga

SEQ ID NO: 34455 - DNA, 50 bp, unidentified
  source 1..50: mol_type = unassigned DNA; note = donor_678181f
  misc_feature 1..24: note = RE
  misc_feature 25: note = Core
  misc_feature 26..50: note = LE
ttgtttgcagaaaatcataggaagctttaactttgcagccttaaataaga

SEQ ID NO: 34456 - DNA, 50 bp, unidentified
  source 1..50: mol_type = unassigned DNA; note = donor_678255f
  misc_feature 1..21: note = RE
  misc_feature 22..25: note = Core
  misc_feature 26..50: note = LE
tcgagggttgacacaggatgtctcactgggctaccctcccccagaaatgt

SEQ ID NO: 34457 - DNA, 50 bp, unidentified; identical to SEQ ID NO: 32349
  source 1..50: mol_type = unassigned DNA; note = donor_67a7a3a
  misc_feature 1..23: note = RE
  misc_feature 24..25: note = Core
  misc_feature 26..50: note = LE

SEQ ID NO: 34458 - DNA, 50 bp, unidentified
  source 1..50: mol_type = unassigned DNA; note = donor_67aa0b1
  misc_feature 1..23: note = RE
  misc_feature 24..25: note = Core
  misc_feature 26..50: note = LE
tgcaaacgggatgcgttcatataaaatgcaatgaacgcatcccacttctt

SEQ ID NO: 34459 - DNA, 50 bp, unidentified
  source 1..50: mol_type = unassigned DNA; note = donor_67ae441
  misc_feature 1..22: note = RE
  misc_feature 23..25: note = Core
  misc_feature 26..50: note = LE
ctgcttgacattttatttgcagactactactatacaagtgtggttgatat

SEQ ID NO: 34460 - DNA, 50 bp, unidentified
  source 1..50: mol_type = unassigned DNA; note = donor_67aefd4
  misc_feature 1..23: note = RE
  misc_feature 24..25: note = Core
  misc_feature 26..50: note = LE
ttagctcttgacttttagcaggtctattacaatataatttggttggaacc

SEQ ID NO: 34461 - DNA, 50 bp, unidentified
  source 1..50: mol_type = unassigned DNA; note = donor_67b82c7
  misc_feature 1..23: note = RE
  misc_feature 24..25: note = Core
  misc_feature 26..50: note = LE
aggcttgacttttaatagttagtcttgtattatagagtagtagtttttat

SEQ ID NO: 34462 - DNA, 50 bp, unidentified
  source 1..50: mol_type = unassigned DNA; note = donor_67c12ec
  misc_feature 1..24: note = RE
  misc_feature 25: note = Core
  misc_feature 26..50: note = LE
cttgcagatggggcgggccatacgtatgggatggcccgcccctctaccct

SEQ ID NO: 34463 - DNA, 50 bp, unidentified
  source 1..50: mol_type = unassigned DNA; note = donor_67c4d68
  misc_feature 1..23: note = RE
  misc_feature 24..25: note = Core
  misc_feature 26..50: note = LE
catcgtgattcttaagacagtatcttatatctcgattctgcgttccacaa

SEQ ID NO: 34464 - DNA, 50 bp, unidentified; identical to SEQ ID NO: 32122
  source 1..50: mol_type = unassigned DNA; note = donor_67d080b
  misc_feature 1..24: note = RE
  misc_feature 25: note = Core
  misc_feature 26..50: note = LE

SEQ ID NO: 34465 - DNA, 50 bp, unidentified
  source 1..50: mol_type = unassigned DNA; note = donor_67d58ac
  misc_feature 1..24: note = RE
  misc_feature 25: note = Core
  misc_feature 26..50: note = LE
cggcgccttgacataaaggggtgcctacttagagacttggttcaggatcg

SEQ ID NO: 34466 - DNA, 50 bp, unidentified
  source 1..50: mol_type = unassigned DNA; note = donor_67d6c4a
  misc_feature 1..24: note = RE
  misc_feature 25: note = Core
  misc_feature 26..50: note = LE
ttgcaattaggcggggtccatatacaatggtatggaccccgccgccccca

SEQ ID NO: 34467 - DNA, 50 bp, unidentified
  source 1..50: mol_type = unassigned DNA; note = donor_67d77ad
  misc_feature 1..23: note = RE
  misc_feature 24..25: note = Core
  misc_feature 26..50: note = LE
gacagcccggagccgtccacacatgatgctgtggacggctcctccacctg

SEQ ID NO: 34468 - DNA, 50 bp, unidentified
  source 1..50: mol_type = unassigned DNA; note = donor_67eb8be
  misc_feature 1..24: note = RE
  misc_feature 25: note = Core
  misc_feature 26..50: note = LE
acaggccgcttgacatagaagcatctattgctgcaggatgagccgggcct

SEQ ID NO: 34469 - DNA, 50 bp, unidentified
  source 1..50: mol_type = unassigned DNA; note = donor_67ed8c0
  misc_feature 1..20: note = RE
  misc_feature 21..25: note = Core
  misc_feature 26..50: note = LE
gcttgacaaccacatagggacacccgttaccttcttcgtagctcctgatc

SEQ ID NO: 34470 - DNA, 50 bp, unidentified
  source 1..50: mol_type = unassigned DNA; note = donor_67f742d
  misc_feature 1..22: note = RE
  misc_feature 23..25: note = Core
  misc_feature 26..50: note = LE
actattgacttttgttagcaagtttggtactataaaagtgtagtaattaa

SEQ ID NO: 34471 - DNA, 50 bp, unidentified
  source 1..50: mol_type = unassigned DNA; note = donor_67ffb1c
  misc_feature 1..23: note = RE
  misc_feature 24..25: note = Core
  misc_feature 26..50: note = LE
cggcggcttgactcagagaggtgccaacttgttgaatctgggcggggttc

SEQ ID NO: 34472 - DNA, 50 bp, unidentified
  source 1..50: mol_type = unassigned DNA; note = donor_6810c2b
  misc_feature 1..22: note = RE
  misc_feature 23..25: note = Core
  misc_feature 26..50: note = LE
acctcaacacgccgaatagagaagatggggtattcggcttgcgccccatc

SEQ ID NO: 34473 - DNA, 50 bp, unidentified
  source 1..50: mol_type = unassigned DNA; note = donor_6818883
  misc_feature 1..24: note = RE
  misc_feature 25: note = Core
  misc_feature 26..50: note = LE
tgcccgggcggggcaggtcatacataatgggatgacctgccccgccctcc

SEQ ID NO: 34474 - DNA, 50 bp, unidentified
  source 1..50: mol_type = unassigned DNA; note = donor_6819fbf
  misc_feature 1..23: note = RE
  misc_feature 24..25: note = Core
  misc_feature 26..50: note = LE
atacttgcatattaacacagaatctcctatgtttgtaaaagcataatatt

SEQ ID NO: 34475 - DNA, 50 bp, unidentified
  source 1..50: mol_type = unassigned DNA; note = donor_681d42f
  misc_feature 1..23: note = RE
  misc_feature 24..25: note = Core
  misc_feature 26..50: note = LE
agtctttacttttaatagttagtctcgtattataaagtagtagtgtttat

SEQ ID NO: 34476 - DNA, 50 bp, unidentified
  source 1..50: mol_type = unassigned DNA; note = donor_6824804
  misc_feature 1..24: note = RE
  misc_feature 25: note = Core
  misc_feature 26..50: note = LE
ttgcaaaaaggcggggtccatatacaatggtatggaccccgccgtcaaaa

SEQ ID NO: 34477 - DNA, 50 bp, unidentified
  source 1..50: mol_type = unassigned DNA; note = donor_6830109
  misc_feature 1..23: note = RE
  misc_feature 24..25: note = Core
  misc_feature 26..50: note = LE
ttacttgactgtttatagtttgtcacgtataatccaatcatcgatgatgg

SEQ ID NO: 34478 - DNA, 50 bp, unidentified
  source 1..50: mol_type = unassigned DNA; note = donor_6830bc6
  misc_feature 1..23: note = RE
  misc_feature 24..25: note = Core
  misc_feature 26..50: note = LE
gaccccttccagccgtggggtgtctaatggggtccgatcggttcggcctt

SEQ ID NO: 34479 - DNA, 50 bp, unidentified
  source 1..50: mol_type = unassigned DNA; note = donor_6838d3e
  misc_feature 1..23: note = RE
  misc_feature 24..25: note = Core
  misc_feature 26..50: note = LE
gcacccgaaggggcgtccacagatgatggggtggacgccccccgacggca

SEQ ID NO: 34480 - DNA, 50 bp, unidentified
  source 1..50: mol_type = unassigned DNA; note = donor_683ad47
  misc_feature 1..23: note = RE
  misc_feature 24..25: note = Core
  misc_feature 26..50: note = LE
cttgcacatggggcggttacacatgatgatgtaaccgccccccggcggca

SEQ ID NO: 34481 - DNA, 50 bp, unidentified
  source 1..50: mol_type = unassigned DNA; note = donor_6850723
  misc_feature 1..23: note = RE
  misc_feature 24..25: note = Core
  misc_feature 26..50: note = LE
accggccttgaccaacatggatacttgtcttatgacattcgctgccgaac

SEQ ID NO: 34482 - DNA, 50 bp, unidentified
  source 1..50: mol_type = unassigned DNA; note = donor_685929b
  misc_feature 1..23: note = RE
  misc_feature 24..25: note = Core
  misc_feature 26..50: note = LE
tgtattgacatttgatagctggtctcgtataatatacttgtagttaaaac

SEQ ID NO: 34483 - DNA, 50 bp, unidentified
  source 1..50: mol_type = unassigned DNA; note = donor_685fb2b
  misc_feature 1..23: note = RE
  misc_feature 24..25: note = Core
  misc_feature 26..50: note = LE
gaccccaaacggccgattagagaagatgggctaatcggcctagcgttctt

SEQ ID NO: 34484 - DNA, 50 bp, unidentified
  source 1..50: mol_type = unassigned DNA; note = donor_6861cb3
  misc_feature 1..21: note = RE
  misc_feature 22..25: note = Core
  misc_feature 26..50: note = LE
cttgacaaaaacatagggacaccccgttaccttgagagtatccccgataa

SEQ ID NO: 34485 - DNA, 50 bp, unidentified
  source 1..50: mol_type = unassigned DNA; note = donor_686b695
  misc_feature 1..22: note = RE
  misc_feature 23..25: note = Core
  misc_feature 26..50: note = LE
gacctaagcactcaattagagaagcatgcgtaattgggctgcctttcgct

SEQ ID NO: 34486 - DNA, 50 bp, unidentified; identical to SEQ ID NO: 33768
  source 1..50: mol_type = unassigned DNA; note = donor_6872eb7
  misc_feature 1..24: note = RE
  misc_feature 25: note = Core
  misc_feature 26..50: note = LE

SEQ ID NO: 34487 - DNA, 50 bp, unidentified
  source 1..50: mol_type = unassigned DNA; note = donor_6878015
  misc_feature 1..22: note = RE
  misc_feature 23..25: note = Core
  misc_feature 26..50: note = LE
aatattgacaaactattagctggttcgtattataaggttaaccagaatgc

SEQ ID NO: 34488 - DNA, 50 bp, unidentified
  source 1..50: mol_type = unassigned DNA; note = donor_687facf
  misc_feature 1..24: note = RE
  misc_feature 25: note = Core
  misc_feature 26..50: note = LE
gcttaaatcacaatgtttcaaccttgaccattcctttccgctgcgctcca

SEQ ID NO: 34489 - DNA, 50 bp, unidentified
  source 1..50: mol_type = unassigned DNA; note = donor_68877e4
  misc_feature 1..24: note = RE
  misc_feature 25: note = Core
  misc_feature 26..50: note = LE
gctacgcacggccggaccatacattaatgggatggtccggccgtgctcct

SEQ ID NO: 34490 - DNA, 50 bp, unidentified
  source 1..50: mol_type = unassigned DNA; note = donor_6889079
  misc_feature 1..23: note = RE
  misc_feature 24..25: note = Core
  misc_feature 26..50: note = LE
caaaaagggaggtgaccatagatttaatgagatggtcacctcgcaccctg

SEQ ID NO: 34491 - DNA, 50 bp, unidentified
  source 1..50: mol_type = unassigned DNA; note = donor_688d203
  misc_feature 1..22: note = RE
  misc_feature 23..25: note = Core
  misc_feature 26..50: note = LE
accattgacttttgttagcaagtttggtactataaaagtgtaataagtaa

SEQ ID NO: 34492 - DNA, 50 bp, unidentified
  source 1..50: mol_type = unassigned DNA; note = donor_68944b8
  misc_feature 1..24: note = RE
  misc_feature 25: note = Core
  misc_feature 26..50: note = LE
ttggcaaaggggggcgtccatgtataatggcatggacgcccctgctcagc

SEQ ID NO: 34493 - DNA, 50 bp, unidentified
  source 1..50: mol_type = unassigned DNA; note = donor_689eb57
  misc_feature 1..24: note = RE
  misc_feature 25: note = Core
  misc_feature 26..50: note = LE
tggcaatgtgggggcgtccatgtacaatgggatggacgcccccaccccgt

SEQ ID NO: 34494 - DNA, 50 bp, unidentified
  source 1..50: mol_type = unassigned DNA; note = donor_68ae771
  misc_feature 1..24: note = RE
  misc_feature 25: note = Core
  misc_feature 26..50: note = LE
tgaccccttgactcaaagaggattctgattgagactgttggcagacgctg

SEQ ID NO: 34495 - DNA, 50 bp, unidentified
  source 1..50: mol_type = unassigned DNA; note = donor_68b17e9
  misc_feature 1..23: note = RE
  misc_feature 24..25: note = Core
  misc_feature 26..50: note = LE
gcattacaggcggcaaccacagaagatggggtggttgccgccctccctga

SEQ ID NO: 34496 - DNA, 50 bp, unidentified
  source 1..50: mol_type = unassigned DNA; note = donor_68b1d9a
  misc_feature 1..21: note = RE
  misc_feature 22..25: note = Core
  misc_feature 26..50: note = LE
ctattgacttttaatagttagtcacgtataatcaatcttatagaaatatt

SEQ ID NO: 34497 - DNA, 50 bp, unidentified; identical to SEQ ID NO: 30676
  source 1..50: mol_type = unassigned DNA; note = donor_68b3673
  misc_feature 1..23: note = RE
  misc_feature 24..25: note = Core
  misc_feature 26..50: note = LE

SEQ ID NO: 34498 - DNA, 50 bp, unidentified
  source 1..50: mol_type = unassigned DNA; note = donor_68b3a4c
  misc_feature 1..22: note = RE
  misc_feature 23..25: note = Core
  misc_feature 26..50: note = LE
cggcttgactcggtcattgaaactccgtaagttgttaggcggcccgggag

SEQ ID NO: 34499 - DNA, 50 bp, unidentified
  source 1..50: mol_type = unassigned DNA; note = donor_68c02ff
  misc_feature 1..22: note = RE
  misc_feature 23..25: note = Core
  misc_feature 26..50: note = LE
acaattgatttatgttagcaagtttggtaccatataagtgtaattagtaa

SEQ ID NO: 34500 - DNA, 50 bp, unidentified
  source 1..50: mol_type = unassigned DNA; note = donor_68c6fa4
  misc_feature 1..23: note = RE
  misc_feature 24..25: note = Core
  misc_feature 26..50: note = LE
cataatgggcaacaagacggtatcttatatctcgattttacccaattagg

SEQ ID NO: 34501 - DNA, 50 bp, unidentified
  source 1..50: mol_type = unassigned DNA; note = donor_68c8378
  misc_feature 1..24: note = RE
  misc_feature 25: note = Core
  misc_feature 26..50: note = LE
ccgcttgacaacgccatagagacaccgttaccttgctcgcaggcccgaaa

SEQ ID NO: 34502 - DNA, 50 bp, unidentified
  source 1..50: mol_type = unassigned DNA; note = donor_68d1be1
  misc_feature 1..22: note = RE
  misc_feature 23..25: note = Core
  misc_feature 26..50: note = LE
caatcaagggggcgtccatagatgatgggatggacgcccccatcggcttc

SEQ ID NO: 34503 - DNA, 50 bp, unidentified
  source 1..50: mol_type = unassigned DNA; note = donor_68d311b
  misc_feature 1..23: note = RE
  misc_feature 24..25: note = Core
  misc_feature 26..50: note = LE
cttgacttcgaaagctccatacaagatgctatggggcggcggcgaggaga

SEQ ID NO: 34504 - DNA, 50 bp, unidentified
  source 1..50: mol_type = unassigned DNA; note = donor_68d7820
  misc_feature 1..24: note = RE
  misc_feature 25: note = Core
  misc_feature 26..50: note = LE
tgcaaaaggcgtcgggtccatacatactgagatggacccgacgcttccct

SEQ ID NO: 34505 - DNA, 50 bp, unidentified
  source 1..50: mol_type = unassigned DNA; note = donor_68d8596
  misc_feature 1..23: note = RE
  misc_feature 24..25: note = Core
  misc_feature 26..50: note = LE
gcatgccaggcggcaaccacagaagatggggtggttgccgcctgcccctc

SEQ ID NO: 34506 - DNA, 50 bp, unidentified
  source 1..50: mol_type = unassigned DNA; note = donor_68dd72b
  misc_feature 1..23: note = RE
  misc_feature 24..25: note = Core
  misc_feature 26..50: note = LE
tcgcttgacattcaagacagtcgcttgtatattaaaaagagtagtagacc

SEQ ID NO: 34507 - DNA, 50 bp, unidentified
  source 1..50: mol_type = unassigned DNA; note = donor_68e3f2a
  misc_feature 1..23: note = RE
  misc_feature 24..25: note = Core
  misc_feature 26..50: note = LE
gctaaccgggagccgtccacacatgatgctgtggacggctccctcatcgg

SEQ ID NO: 34508 - DNA, 50 bp, unidentified
  source 1..50: mol_type = unassigned DNA; note = donor_68e490e
  misc_feature 1..23: note = RE
  misc_feature 24..25: note = Core
  misc_feature 26..50: note = LE
aatattgacatcctattagctggttcgtattataaggttaaccagttttt

SEQ ID NO: 34509 - DNA, 50 bp, unidentified
  source 1..50: mol_type = unassigned DNA; note = donor_68f73e0
  misc_feature 1..24: note = RE
  misc_feature 25: note = Core
  misc_feature 26..50: note = LE
ccgccccttgacacaaagaggcttctgattgagactggtgggtgcggtgc

SEQ ID NO: 34510 - DNA, 50 bp, unidentified
  source 1..50: mol_type = unassigned DNA; note = donor_68fcd0a
  misc_feature 1..23: note = RE
  misc_feature 24..25: note = Core
  misc_feature 26..50: note = LE
cagcttgaccgtgaagacggtatcttgtatctttctttccgtggtggtta

SEQ ID NO: 34511 - DNA, 50 bp, unidentified
  source 1..50: mol_type = unassigned DNA; note = donor_68fde46
  misc_feature 1..23: note = RE
  misc_feature 24..25: note = Core
  misc_feature 26..50: note = LE
gcaaaaaagggggtgaccatagattaataagatggtcacccccaccctgt

SEQ ID NO: 34512 - DNA, 50 bp, unidentified
  source 1..50: mol_type = unassigned DNA; note = donor_68ff44d
  misc_feature 1..23: note = RE
  misc_feature 24..25: note = Core
  misc_feature 26..50: note = LE
tttattgacagttcatagttggtcttgtatgataatttcgtcctgagaag

SEQ ID NO: 34513 - DNA, 50 bp, unidentified
  source 1..50: mol_type = unassigned DNA; note = donor_68ff599
  misc_feature 1..24: note = RE
  misc_feature 25: note = Core
  misc_feature 26..50: note = LE
tggcataccgggggcgtccatgtacaatgggatggacgcccccactcgca

SEQ ID NO: 34514 - DNA, 50 bp, unidentified
  source 1..50: mol_type = unassigned DNA; note = donor_6908653
  misc_feature 1..23: note = RE
  misc_feature 24..25: note = Core
  misc_feature 26..50: note = LE
ctacttgacttttcttagcaggtctattacaataagttttggttggaagc

SEQ ID NO: 34515 - DNA, 50 bp, unidentified
  source 1..50: mol_type = unassigned DNA; note = donor_690e8e9
  misc_feature 1..22: note = RE
  misc_feature 23..25: note = Core
  misc_feature 26..50: note = LE
aaagataatcatatataacatgtctcgtatataggataagtgcacccact

SEQ ID NO: 34516 - DNA, 50 bp, unidentified
  source 1..50: mol_type = unassigned DNA; note = donor_69157d6
  misc_feature 1..23: note = RE
  misc_feature 24..25: note = Core
  misc_feature 26..50: note = LE
acggtgcttgaccaagacggatacttgtcttatgttttccgtatcgatct

SEQ ID NO: 34517 - DNA, 50 bp, unidentified
  source 1..50: mol_type = unassigned DNA; note = donor_691b19e
  misc_feature 1..23: note = RE
  misc_feature 24..25: note = Core
  misc_feature 26..50: note = LE
tttacttgacttttaatagttagtcgtattatatagtcatacccattctt

SEQ ID NO: 34518 - DNA, 50 bp, unidentified
  source 1..50: mol_type = unassigned DNA; note = donor_691da6d
  misc_feature 1..23: note = RE
  misc_feature 24..25: note = Core
  misc_feature 26..50: note = LE
ctgcttgacataaacattaggcagccctacctttcagggatgtccgcggt

SEQ ID NO: 34519 - DNA, 50 bp, unidentified
  source 1..50: mol_type = unassigned DNA; note = donor_691f9dc
  misc_feature 1..22: note = RE
  misc_feature 23..25: note = Core
  misc_feature 26..50: note = LE
caatgagggcgccgtccacacatgatgaggtggacggcgcccgctcgcgg

SEQ ID NO: 34520 - DNA, 50 bp, unidentified
  source 1..50: mol_type = unassigned DNA; note = donor_69273e4
  misc_feature 1..23: note = RE
  misc_feature 24..25: note = Core
  misc_feature 26..50: note = LE
gcgctccgggggacgtccacagatgatggggtggacgccccccgacggca

SEQ ID NO: 34521 - DNA, 50 bp, unidentified
  source 1..50: mol_type = unassigned DNA; note = donor_69346e0
  misc_feature 1..22: note = RE
  misc_feature 23..25: note = Core
  misc_feature 26..50: note = LE
tttgacaaagtcgtttaacaggcatataaaagaagtagtcccaaataaaa

SEQ ID NO: 34522 - DNA, 50 bp, unidentified
  source 1..50: mol_type = unassigned DNA; note = donor_6938b3f
  misc_feature 1..24: note = RE
  misc_feature 25: note = Core
  misc_feature 26..50: note = LE
tgcaaaatgcggggtgaccatagataatgagatggtcaccccgtcccgtg

SEQ ID NO: 34523 - DNA, 50 bp, unidentified
  source 1..50: mol_type = unassigned DNA; note = donor_69487f0
  misc_feature 1..24: note = RE
  misc_feature 25: note = Core
  misc_feature 26..50: note = LE
tgcacaaaacggggcgtccatagataatgaaatggacgcccctcttaagc

SEQ ID NO: 34524 - DNA, 50 bp, unidentified
  source 1..50: mol_type = unassigned DNA; note = donor_69511a8
  misc_feature 1..23: note = RE
  misc_feature 24..25: note = Core
  misc_feature 26..50: note = LE
ccgcttgacaaagagattaggaatccctaccttgttgatcgggatgagcg

SEQ ID NO: 34525 - DNA, 50 bp, unidentified
  source 1..50: mol_type = unassigned DNA; note = donor_6951a88
  misc_feature 1..21: note = RE
  misc_feature 22..25: note = Core
  misc_feature 26..50: note = LE
tattgactttggttagcaggactcctacaatataaattacgggacaggca

SEQ ID NO: 34526 - DNA, 50 bp, unidentified
  source 1..50: mol_type = unassigned DNA; note = donor_695a9dd
  misc_feature 1..23: note = RE
  misc_feature 24..25: note = Core
  misc_feature 26..50: note = LE
cctattgactttttatttgcaggctactataataaatttatgggttcggt

SEQ ID NO: 34527 - DNA, 50 bp, unidentified
  source 1..50: mol_type = unassigned DNA; note = donor_6962339
  misc_feature 1..20: note = RE
  misc_feature 21..25: note = Core
  misc_feature 26..50: note = LE
cttgacttttgttagcaggactcctacaatataaattacggtacaggcac

SEQ ID NO: 34528 - DNA, 50 bp, unidentified
  source 1..50: mol_type = unassigned DNA; note = donor_6962484
  misc_feature 1..21: note = RE
  misc_feature 22..25: note = Core
  misc_feature 26..50: note = LE
aggcggcttgacatagggcttctcactggtctaccttccttgtgtcagcg

SEQ ID NO: 34529 - DNA, 50 bp, unidentified
  source 1..50: mol_type = unassigned DNA; note = donor_6965045
  misc_feature 1..24: note = RE
  misc_feature 25: note = Core
  misc_feature 26..50: note = LE
ttgcaatgaggaggagtccatatacaatggaatggactcctcctcccctc

SEQ ID NO: 34530 - DNA, 50 bp, unidentified
  source 1..50: mol_type = unassigned DNA; note = donor_6972775
  misc_feature 1..22: note = RE
  misc_feature 23..25: note = Core
  misc_feature 26..50: note = LE
attcgattttcttattatagttcattgtatattatttaatcgttatatat

SEQ ID NO: 34531 - DNA, 50 bp, unidentified
  source 1..50: mol_type = unassigned DNA; note = donor_6978629
  misc_feature 1..24: note = RE
  misc_feature 25: note = Core
  misc_feature 26..50: note = LE
tgatctcccggaggcgtccatataatggtatgggcgcctccacccagcaa

SEQ ID NO: 34532 - DNA, 50 bp, unidentified
  source 1..50: mol_type = unassigned DNA; note = donor_6986fd3
  misc_feature 1..23: note = RE
  misc_feature 24..25: note = Core
  misc_feature 26..50: note = LE
gcaagccgggggccatccacacatgatggggtggatggccccctcacggc

SEQ ID NO: 34533 - DNA, 50 bp, unidentified
  source 1..50: mol_type = unassigned DNA; note = donor_69a18b6
  misc_feature 1..22: note = RE
  misc_feature 23..25: note = Core
  misc_feature 26..50: note = LE
ctattgacttttaatagttagtcttatataatgtatttaggttgttaaag

SEQ ID NO: 34534 - DNA, 50 bp, unidentified
  source 1..50: mol_type = unassigned DNA; note = donor_69a2d9e
  misc_feature 1..22: note = RE
  misc_feature 23..25: note = Core
  misc_feature 26..50: note = LE
cccttgactttaaagacagttgcttgtatcttgtctacggtcgtaaaatg

SEQ ID NO: 34535 - DNA, 50 bp, unidentified
  source 1..50: mol_type = unassigned DNA; note = donor_69a69d6
  misc_feature 1..24: note = RE
  misc_feature 25: note = Core
  misc_feature 26..50: note = LE
tgcaaggcacggccgggccatacataatgggatggcccggccgtgctcag

SEQ ID NO: 34536 - DNA, 50 bp, unidentified
  source 1..50: mol_type = unassigned DNA; note = donor_69b652e
  misc_feature 1..23: note = RE
  misc_feature 24..25: note = Core
  misc_feature 26..50: note = LE
gcagcgcagggcgcatccaaacatgatggggtggatgcccccgcccgacg

SEQ ID NO: 34537 - DNA, 50 bp, unidentified
  source 1..50: mol_type = unassigned DNA; note = donor_69b9b3e
  misc_feature 1..24: note = RE
  misc_feature 25: note = Core
  misc_feature 26..50: note = LE
cttgcggacggggcgggccatacgtatgggatggcccgcccctctcttcc

SEQ ID NO: 34538 - DNA, 50 bp, unidentified
  source 1..50: mol_type = unassigned DNA; note = donor_69bc491
  misc_feature 1..24: note = RE
  misc_feature 25: note = Core
  misc_feature 26..50: note = LE
tgcaaaacggcggcggaccatacataatgggatggtccgtcgcctttaac

SEQ ID NO: 34539 - DNA, 50 bp, unidentified
  source 1..50: mol_type = unassigned DNA; note = donor_69e09a9
  misc_feature 1..23: note = RE
  misc_feature 24..25: note = Core
  misc_feature 26..50: note = LE
caaagtgacggctgaccatacatttaatgagatggtcagcctgaccgaaa

SEQ ID NO: 34540 - DNA, 50 bp, unidentified
  source 1..50: mol_type = unassigned DNA; note = donor_69eb34d
  misc_feature 1..23: note = RE
  misc_feature 24..25: note = Core
  misc_feature 26..50: note = LE
cttgactcatggcccattacagaagatacggtaatgggccgcacctccgg

SEQ ID NO: 34541 - DNA, 50 bp, unidentified
  source 1..50: mol_type = unassigned DNA; note = donor_69eb91f
  misc_feature 1..23: note = RE
  misc_feature 24..25: note = Core
  misc_feature 26..50: note = LE
gcagtccggcggcggaccatacataatgagatggtccgccgccgagtagg

SEQ ID NO: 34542 - DNA, 50 bp, unidentified
  source 1..50: mol_type = unassigned DNA; note = donor_69edc10
  misc_feature 1..23: note = RE
  misc_feature 24..25: note = Core
  misc_feature 26..50: note = LE
aacctgttgactttttatagttggtataataaatttaggttagtaaaggc

SEQ ID NO: 34543 - DNA, 50 bp, unidentified
  source 1..50: mol_type = unassigned DNA; note = donor_69eec8e
  misc_feature 1..24: note = RE
  misc_feature 25: note = Core
  misc_feature 26..50: note = LE
tgcacacacggaggcatccatataatgtaatggatgcctccctctacagg

SEQ ID NO: 34544 - DNA, 50 bp, unidentified
  source 1..50: mol_type = unassigned DNA; note = donor_69fa375
  misc_feature 1..23: note = RE
  misc_feature 24..25: note = Core
  misc_feature 26..50: note = LE
ttacttgacatttgatagctggtctcgtataataatgttgtagttaatta

SEQ ID NO: 34545 - DNA, 50 bp, unidentified
  source 1..50: mol_type = unassigned DNA; note = donor_6a03713
  misc_feature 1..23: note = RE
  misc_feature 24..25: note = Core
  misc_feature 26..50: note = LE
cgtgaccgcttgacatagaggcgctgacttgcttcaatcgagccagcacc

SEQ ID NO: 34546 - DNA, 50 bp, unidentified
  source 1..50: mol_type = unassigned DNA; note = donor_6a03c46
  misc_feature 1..23: note = RE
  misc_feature 24..25: note = Core
  misc_feature 26..50: note = LE
cctattgactttttctttgcagactattacaatagatttacggttcaagg

SEQ ID NO: 34547 - DNA, 50 bp, unidentified
  source 1..50: mol_type = unassigned DNA; note = donor_6a05d42
  misc_feature 1..24: note = RE
  misc_feature 25: note = Core
  misc_feature 26..50: note = LE
ttgacaggtggggaagcccttgtagaatgaaagggacttccccgccccga

SEQ ID NO: 34548 - DNA, 50 bp, unidentified
  source 1..50: mol_type = unassigned DNA; note = donor_6a08057
  misc_feature 1..21: note = RE
  misc_feature 22..25: note = Core
  misc_feature 26..50: note = LE
taagttgctttttaacacagatcatcctatgtttgtaaaatattaatttt

SEQ ID NO: 34549 - DNA, 50 bp, unidentified
  source 1..50: mol_type = unassigned DNA; note = donor_6a1090d
  misc_feature 1..23: note = RE
  misc_feature 24..25: note = Core
  misc_feature 26..50: note = LE
gacagcttcgacccgtgggatgtctaatgggactcgaccggcagcgtcag

SEQ ID NO: 34550 - DNA, 50 bp, unidentified
  source 1..50: mol_type = unassigned DNA; note = donor_6a13c54
  misc_feature 1..23: note = RE
  misc_feature 24..25: note = Core
  misc_feature 26..50: note = LE
gacttcaacgcgccgaatagagaagatggggtattcggcttgagccccat

SEQ ID NO: 34551 - DNA, 50 bp, unidentified
  source 1..50: mol_type = unassigned DNA; note = donor_6a1716c
  misc_feature 1..24: note = RE
  misc_feature 25: note = Core
  misc_feature 26..50: note = LE
ttacttgattttcttatagttcaatggtatatacaaattagctcatctta

SEQ ID NO: 34552 - DNA, 50 bp, unidentified
  source 1..50: mol_type = unassigned DNA; note = donor_6a3d590
  misc_feature 1..23: note = RE
  misc_feature 24..25: note = Core
  misc_feature 26..50: note = LE
gcatccgaagaggcgtccacagatgatcgggtggacgccccccgacggca

SEQ ID NO: 34553 - DNA, 50 bp, unidentified
  source 1..50: mol_type = unassigned DNA; note = donor_6a43fab
  misc_feature 1..24: note = RE
  misc_feature 25: note = Core
  misc_feature 26..50: note = LE
tcgcttggtttttactataagttgctctaactttgcagagtcaaggagat

SEQ ID NO: 34554 - DNA, 50 bp, unidentified
  source 1..50: mol_type = unassigned DNA; note = donor_6a542d1
  misc_feature 1..22: note = RE
  misc_feature 23..25: note = Core
  misc_feature 26..50: note = LE
gaaggtaagggggttttacagtaaattcccatgcgcgcctcgcgtgctac

SEQ ID NO: 34555 - DNA, 50 bp, unidentified
  source 1..50: mol_type = unassigned DNA; note = donor_6a5c327
  misc_feature 1..24: note = RE
  misc_feature 25: note = Core
  misc_feature 26..50: note = LE
tgcagtcccgcggcggaccatacataatgagatggtccgccgcttgcttt

SEQ ID NO: 34556 - DNA, 50 bp, unidentified
  source 1..50: mol_type = unassigned DNA; note = donor_6a60d04
  misc_feature 1..23: note = RE
  misc_feature 24..25: note = Core
  misc_feature 26..50: note = LE
tcgcttgacaaacaacacggttacttgtatgttcagcccagaccggcgcg

SEQ ID NO: 34557 - DNA, 50 bp, unidentified
  source 1..50: mol_type = unassigned DNA; note = donor_6a733bb
  misc_feature 1..24: note = RE
  misc_feature 25: note = Core
  misc_feature 26..50: note = LE
ccgcgggttgacacagaggggagcctacttgttcactgggtcgtaggacg

SEQ ID NO: 34558 - DNA, 50 bp, unidentified
  source 1..50: mol_type = unassigned DNA; note = donor_6a774d5
  misc_feature 1..22: note = RE
  misc_feature 23..25: note = Core
  misc_feature 26..50: note = LE
ccaacacggagccgtccacacatgatgcggtggacggctcctccgccggc

SEQ ID NO: 34559 - DNA, 50 bp, unidentified
  source 1..50: mol_type = unassigned DNA; note = donor_6a882e5
  misc_feature 1..24: note = RE
  misc_feature 25: note = Core
  misc_feature 26..50: note = LE
tgcaaaagtgggggtgaccatagataatgagatggtcacccccacaccct

SEQ ID NO: 34560 - DNA, 50 bp, unidentified
  source 1..50: mol_type = unassigned DNA; note = donor_6a89668
  misc_feature 1..23: note = RE
  misc_feature 24..25: note = Core
  misc_feature 26..50: note = LE
aattcttgactcctattagctggttcgtattatagagttaaccagttttt

SEQ ID NO: 34561 - DNA, 50 bp, unidentified
  source 1..50: mol_type = unassigned DNA; note = donor_6a8bcd6
  misc_feature 1..23: note = RE
  misc_feature 24..25: note = Core
  misc_feature 26..50: note = LE
agacttgacatttaatagttagtctcgtattatatagtagtattgtttaa

SEQ ID NO: 34562 - DNA, 50 bp, unidentified
  source 1..50: mol_type = unassigned DNA; note = donor_6a9990b
  misc_feature 1..23: note = RE
  misc_feature 24..25: note = Core
  misc_feature 26..50: note = LE
attgacgcaaagcccgttacagaagatggtgtaacgggcggaacccggcc

SEQ ID NO: 34563 - DNA, 50 bp, unidentified
  source 1..50: mol_type = unassigned DNA; note = donor_6aa16f6
  misc_feature 1..22: note = RE
  misc_feature 23..25: note = Core
  misc_feature 26..50: note = LE
gacttttacagccgtgggatgtctaatagggttggaagaaggtccgtcga

SEQ ID NO: 34564 - DNA, 50 bp, unidentified
  source 1..50: mol_type = unassigned DNA; note = donor_6aa5cc0
  misc_feature 1..23: note = RE
  misc_feature 24..25: note = Core
  misc_feature 26..50: note = LE
tgcctgcggggccgttccacatatgatgctgtggaacggccccctacgac

SEQ ID NO: 34565 - DNA, 50 bp, unidentified
  source 1..50: mol_type = unassigned DNA; note = donor_6aa91b8
  misc_feature 1..21: note = RE
  misc_feature 22..25: note = Core
  misc_feature 26..50: note = LE
ctattgacttctaatagttagtcacgtataatcaatcttatagaaatatt

SEQ ID NO: 34566 - DNA, 50 bp, unidentified
  source 1..50: mol_type = unassigned DNA; note = donor_6acc002
  misc_feature 1..23: note = RE
  misc_feature 24..25: note = Core
  misc_feature 26..50: note = LE
gtgcttgactttgaagacggttacttgtatcttccatccagaccgtcgcg

SEQ ID NO: 34567 - DNA, 50 bp, unidentified
  source 1..50: mol_type = unassigned DNA; note = donor_6ad47e9
  misc_feature 1..24: note = RE
  misc_feature 25: note = Core
  misc_feature 26..50: note = LE
tgcagtccggcggcggaccatacataatgagatggtccgccgctgagtaa

SEQ ID NO: 34568 - DNA, 50 bp, unidentified
  source 1..50: mol_type = unassigned DNA; note = donor_6ad6ba0
  misc_feature 1..23: note = RE
  misc_feature 24..25: note = Core
  misc_feature 26..50: note = LE
catacttgacttttcttagcaggttagtaccatataagtgtagttgttag

SEQ ID NO: 34569 - DNA, 50 bp, unidentified
  source 1..50: mol_type = unassigned DNA; note = donor_6ada746
  misc_feature 1..23: note = RE
  misc_feature 24..25: note = Core
  misc_feature 26..50: note = LE
gccaacggggagccgtccacacatgatgctgtggacggctctccacccca

SEQ ID NO: 34570 - DNA, 50 bp, unidentified
  source 1..50: mol_type = unassigned DNA; note = donor_6adda01
  misc_feature 1..23: note = RE
  misc_feature 24..25: note = Core
  misc_feature 26..50: note = LE
cggcttgacatcacggttgggaagtcctacctttcaagggggtctgatct

SEQ ID NO: 34571 - DNA, 50 bp, unidentified
  source 1..50: mol_type = unassigned DNA; note = donor_6addbf0
  misc_feature 1..23: note = RE
  misc_feature 24..25: note = Core
  misc_feature 26..50: note = LE
cccttccttgaccaacacggatacttgtcttatgacttttctcgctgatt

SEQ ID NO: 34572 - DNA, 50 bp, unidentified
  source 1..50: mol_type = unassigned DNA; note = donor_6adee18
  misc_feature 1..24: note = RE
  misc_feature 25: note = Core
  misc_feature 26..50: note = LE
gcaacgcacggccggaccatacattaatggaatggtccggccgtgctcct

SEQ ID NO: 34573 - DNA, 50 bp, unidentified
  source 1..50: mol_type = unassigned DNA; note = donor_6ae047e
  misc_feature 1..23: note = RE
  misc_feature 24..25: note = Core
  misc_feature 26..50: note = LE
aaacttgctaattaacatagaatgtgataagtttgcatagtttaataaaa

SEQ ID NO: 34574 - DNA, 50 bp, unidentified
  source 1..50: mol_type = unassigned DNA; note = donor_6afb6ea
  misc_feature 1..23: note = RE
  misc_feature 24..25: note = Core
  misc_feature 26..50: note = LE
cactcgcttgaccatcacggatacttgtcttatgacattgttgtccgttt

SEQ ID NO: 34575 - DNA, 50 bp, unidentified
  source 1..50: mol_type = unassigned DNA; note = donor_6b03382
  misc_feature 1..24: note = RE
  misc_feature 25: note = Core
  misc_feature 26..50: note = LE
tgcaaatgaggaggagtccatatacaatggtatggactcctcctccccta

SEQ ID NO: 34576 - DNA, 50 bp, unidentified
  source 1..50: mol_type = unassigned DNA; note = donor_6b0a80e
  misc_feature 1..24: note = RE
  misc_feature 25: note = Core
  misc_feature 26..50: note = LE
cggctccttgacacagaggggagcctactaggagacttcccgcaggatcg

SEQ ID NO: 34577 - DNA, 50 bp, unidentified
  source 1..50: mol_type = unassigned DNA; note = donor_6b0b3da
  misc_feature 1..23: note = RE
  misc_feature 24..25: note = Core
  misc_feature 26..50: note = LE
cccttgacaaccccttatgggacctgatataggtccttgtcggagggttc

SEQ ID NO: 34578 - DNA, 50 bp, unidentified
  source 1..50: mol_type = unassigned DNA; note = donor_6b0dfd3
  misc_feature 1..23: note = RE
  misc_feature 24..25: note = Core
  misc_feature 26..50: note = LE
atcgtttggtcgtgtcatagaaatcctttagatttgtttggaagtaattt

SEQ ID NO: 34579 - DNA, 50 bp, unidentified
  source 1..50: mol_type = unassigned DNA; note = donor_6b17c83
  misc_feature 1..24: note = RE
  misc_feature 25: note = Core
  misc_feature 26..50: note = LE
tgcaaaacggaggtagtccatagataataggatggactacctcctccctc

SEQ ID NO: 34580 - DNA, 50 bp, unidentified
  source 1..50: mol_type = unassigned DNA; note = donor_6b27458
  misc_feature 1..23: note = RE
  misc_feature 24..25: note = Core
  misc_feature 26..50: note = LE
tggcttgatcacaaccatagaatcttgtatggttagacttgaaggggtgg

SEQ ID NO: 34581 - DNA, 50 bp, unidentified
  source 1..50: mol_type = unassigned DNA; note = donor_6b2827f
  misc_feature 1..23: note = RE
  misc_feature 24..25: note = Core
  misc_feature 26..50: note = LE
gacaacctcagaacatgggatgtctaatgggttctgtcagcctgctgcgg

SEQ ID NO: 34582 - DNA, 50 bp, unidentified
  source 1..50: mol_type = unassigned DNA; note = donor_6b2cd95
  misc_feature 1..23: note = RE
  misc_feature 24..25: note = Core
  misc_feature 26..50: note = LE
gcctccgactgacaagacagttgcttatctcttgccgatctggcacctta

SEQ ID NO: 34583 - DNA, 50 bp, unidentified
  source 1..50: mol_type = unassigned DNA; note = donor_6b2eef2
  misc_feature 1..24: note = RE
  misc_feature 25: note = Core
  misc_feature 26..50: note = LE
tgcaaaaacggaggggaccatagataatgtgatggtcccctccaccatga

SEQ ID NO: 34584 - DNA, 50 bp, unidentified
  source 1..50: mol_type = unassigned DNA; note = donor_6b39604
  misc_feature 1..21: note = RE
  misc_feature 22..25: note = Core
  misc_feature 26..50: note = LE
ctcttgactttccttagcaggttttgtaccataaaagtgtaagtaacaag

SEQ ID NO: 34585 - DNA, 50 bp, unidentified
  source 1..50: mol_type = unassigned DNA; note = donor_6b3d4ef
  misc_feature 1..23: note = RE
  misc_feature 24..25: note = Core
  misc_feature 26..50: note = LE
cgcaggtgggggtcgtccacatatgatggggtggacggccccgctcccgg

SEQ ID NO: 34586 - DNA, 50 bp, unidentified
  source 1..50: mol_type = unassigned DNA; note = donor_6b453a5
  misc_feature 1..24: note = RE
  misc_feature 25: note = Core
  misc_feature 26..50: note = LE
ttgcaagccgggggccgtccacatatgttggggtggacggccccctacgg

SEQ ID NO: 34587 - DNA, 50 bp, unidentified
  source 1..50: mol_type = unassigned DNA; note = donor_6b4651c
  misc_feature 1..23: note = RE
  misc_feature 24..25: note = Core
  misc_feature 26..50: note = LE
tggcttgatcaaaaccatagaatcttgtatggttagacttgaaggggtgg

SEQ ID NO: 34588 - DNA, 50 bp, unidentified
  source 1..50: mol_type = unassigned DNA; note = donor_6b517e1
  misc_feature 1..23: note = RE
  misc_feature 24..25: note = Core
  misc_feature 26..50: note = LE
gcaccgcaggggtcgtccacacatgatgggttggacggcccctgcaccag

SEQ ID NO: 34589 - DNA, 50 bp, unidentified
  source 1..50: mol_type = unassigned DNA; note = donor_6b592a7
  misc_feature 1..24: note = RE
  misc_feature 25: note = Core
  misc_feature 26..50: note = LE
tgcacaggcggggcgaaccatacataatgggatggttcgccccgccgccc

SEQ ID NO: 34590 - DNA, 50 bp, unidentified
  source 1..50: mol_type = unassigned DNA; note = donor_6b5d8cf
  misc_feature 1..24: note = RE
  misc_feature 25: note = Core
  misc_feature 26..50: note = LE
tgacaaactgggagcgtccatatacaatgggatggacgctccccccttta

SEQ ID NO: 34591 - DNA, 50 bp, unidentified
  source 1..50: mol_type = unassigned DNA; note = donor_6b5de75
  misc_feature 1..23: note = RE
  misc_feature 24..25: note = Core
  misc_feature 26..50: note = LE
gcaaaacgggtggagtccatagataatgtaatggactccaccctcctggc

SEQ ID NO: 34592 - DNA, 50 bp, unidentified
  source 1..50: mol_type = unassigned DNA; note = donor_6b60848
  misc_feature 1..24: note = RE
  misc_feature 25: note = Core
  misc_feature 26..50: note = LE
tgtcaacgaggaggagtccatatacaatgggatggactcctcctcacctt

SEQ ID NO: 34593 - DNA, 50 bp, unidentified
  source 1..50: mol_type = unassigned DNA; note = donor_6b61184
  misc_feature 1..24: note = RE
  misc_feature 25: note = Core
  misc_feature 26..50: note = LE
tggtaatatcaatatcctagaatacctttggaccttaattaaaagattta

SEQ ID NO: 34594 - DNA, 50 bp, unidentified
  source 1..50: mol_type = unassigned DNA; note = donor_6b62b00
  misc_feature 1..23: note = RE
  misc_feature 24..25: note = Core
  misc_feature 26..50: note = LE
agggtcttgacacagagaggcgtcaacttgttgaatcaggagcagaagag

SEQ ID NO: 34595 - DNA, 50 bp, unidentified
  source 1..50: mol_type = unassigned DNA; note = donor_6b690d9
  misc_feature 1..21: note = RE
  misc_feature 22..25: note = Core
  misc_feature 26..50: note = LE
ccggaagggggccgtccatacatgatggggtggacggcccccgacggcat

SEQ ID NO: 34596 - DNA, 50 bp, unidentified
  source 1..50: mol_type = unassigned DNA; note = donor_6b74b90
  misc_feature 1..24: note = RE
  misc_feature 25: note = Core
  misc_feature 26..50: note = LE
actacttgatttttatatagttagcctggtatattgtaattgactcatct

SEQ ID NO: 34597 - DNA, 50 bp, unidentified; identical to SEQ ID NO: 32049
  source 1..50: mol_type = unassigned DNA; note = donor_6b7a2f7
  misc_feature 1..23: note = RE
  misc_feature 24..25: note = Core
  misc_feature 26..50: note = LE

SEQ ID NO: 34598 - DNA, 50 bp, unidentified
  source 1..50: mol_type = unassigned DNA; note = donor_6b7b678
  misc_feature 1..21: note = RE
  misc_feature 22..25: note = Core
  misc_feature 26..50: note = LE
ggcttgacaccgtcattgagactccgtaagttgttaggtggcccgggagg

SEQ ID NO: 34599 - DNA, 50 bp, unidentified
  source 1..50: mol_type = unassigned DNA; note = donor_6b7dfc1
  misc_feature 1..23: note = RE
  misc_feature 24..25: note = Core
  misc_feature 26..50: note = LE
gggcttgaattttaatagttaatcttgtattatagagtagtagttattaa

SEQ ID NO: 34600 - DNA, 50 bp, unidentified
  source 1..50: mol_type = unassigned DNA; note = donor_6b86663
  misc_feature 1..24: note = RE
  misc_feature 25: note = Core
  misc_feature 26..50: note = LE
tgctacgcacggccggaccatacataatgggatggtccggccgtgctcct

SEQ ID NO: 34601 - DNA, 50 bp, unidentified
  source 1..50: mol_type = unassigned DNA; note = donor_6b890c0
  misc_feature 1..24: note = RE
  misc_feature 25: note = Core
  misc_feature 26..50: note = LE
cgcttgacgaaaaccataggggcacgttaccgttttcacggccctgcaat

SEQ ID NO: 34602 - DNA, 50 bp, unidentified
  source 1..50: mol_type = unassigned DNA; note = donor_6b93302
  misc_feature 1..22: note = RE
  misc_feature 23..25: note = Core
  misc_feature 26..50: note = LE
cgcttgacgaccaagacggtatcttgtatcttgacccctgggatggttag

SEQ ID NO: 34603 - DNA, 50 bp, unidentified
  source 1..50: mol_type = unassigned DNA; note = donor_6b94d47
  misc_feature 1..23: note = RE
  misc_feature 24..25: note = Core
  misc_feature 26..50: note = LE
gcatcttgcggggcgtccacacacgatggggtagacgcccccgacggcat

SEQ ID NO: 34604 - DNA, 50 bp, unidentified
  source 1..50: mol_type = unassigned DNA; note = donor_6ba3525
  misc_feature 1..20: note = RE
  misc_feature 21..25: note = Core
  misc_feature 26..50: note = LE
gtggggttgacacaggaagtctcattgggcaacctcccaccttggagcta

SEQ ID NO: 34605 - DNA, 50 bp, unidentified
  source 1..50: mol_type = unassigned DNA; note = donor_6ba65b8
  misc_feature 1..23: note = RE
  misc_feature 24..25: note = Core
  misc_feature 26..50: note = LE
cggcttgacttcagcattgggaagctctaccttcctcctgggtctgcccc

SEQ ID NO: 34606 - DNA, 50 bp, unidentified
  source 1..50: mol_type = unassigned DNA; note = donor_6bb096f
  misc_feature 1..24: note = RE
  misc_feature 25: note = Core
  misc_feature 26..50: note = LE
atagtttgttttaaccataggatactttagatttgtcgtatagatataat

SEQ ID NO: 34607 - DNA, 50 bp, unidentified
  source 1..50: mol_type = unassigned DNA; note = donor_6bb4e2f
  misc_feature 1..24: note = RE
  misc_feature 25: note = Core
  misc_feature 26..50: note = LE
ttgcaaacgggacgcgttcatatagaattgaaatgaacgcgtcccaccct

SEQ ID NO: 34608 - DNA, 50 bp, unidentified
  source 1..50: mol_type = unassigned DNA; note = donor_6bb92b0
  misc_feature 1..23: note = RE
  misc_feature 24..25: note = Core
  misc_feature 26..50: note = LE
actattgactttttatttgcaggctactacaatataaattggttaatata

SEQ ID NO: 34609 - DNA, 50 bp, unidentified
  source 1..50: mol_type = unassigned DNA; note = donor_6bbd5d4
  misc_feature 1..24: note = RE
  misc_feature 25: note = Core
  misc_feature 26..50: note = LE
aatatttgtttaagtcataggatactttagatttgttatatagatgaatt

SEQ ID NO: 34610 - DNA, 50 bp, unidentified
  source 1..50: mol_type = unassigned DNA; note = donor_6bc5423
  misc_feature 1..24: note = RE
  misc_feature 25: note = Core
  misc_feature 26..50: note = LE
tggaattattataaacctataatacctttggtctaccaatagaaaataat

SEQ ID NO: 34611 - DNA, 50 bp, unidentified
  source 1..50: mol_type = unassigned DNA; note = donor_6bcc68d
  misc_feature 1..23: note = RE
  misc_feature 24..25: note = Core
  misc_feature 26..50: note = LE
gacaccaaccatccgtgggatgtctaatggggatcgactgttctgttcgc

SEQ ID NO: 34612 - DNA, 50 bp, unidentified
  source 1..50: mol_type = unassigned DNA; note = donor_6bd06b2
  misc_feature 1..23: note = RE
  misc_feature 24..25: note = Core
  misc_feature 26..50: note = LE
gacaactacggcccgtgggatgtctaatggggtccaccgcctaccggacg

SEQ ID NO: 34613 - DNA, 50 bp, unidentified
  source 1..50: mol_type = unassigned DNA; note = donor_6bd3a65
  misc_feature 1..23: note = RE
  misc_feature 24..25: note = Core
  misc_feature 26..50: note = LE
cccttgacaacttcttatgggacctgatataggtccctgttagagggtcc

SEQ ID NO: 34614 - DNA, 50 bp, unidentified
  source 1..50: mol_type = unassigned DNA; note = donor_6bdc36d
  misc_feature 1..24: note = RE
  misc_feature 25: note = Core
  misc_feature 26..50: note = LE
aatctcttgactatttatagtttgtcacgtataatccaatcatgttagga

SEQ ID NO: 34615 - DNA, 50 bp, unidentified
  source 1..50: mol_type = unassigned DNA; note = donor_6bddbb4
  misc_feature 1..23: note = RE
  misc_feature 24..25: note = Core
  misc_feature 26..50: note = LE
gaccgcaacacgccgattagagaagatggggtaatcggcttcgtgcccat

SEQ ID NO: 34616 - DNA, 50 bp, unidentified
  source 1..50: mol_type = unassigned DNA; note = donor_6be3042
  misc_feature 1..23: note = RE
  misc_feature 24..25: note = Core
  misc_feature 26..50: note = LE
tcttgccaaacggcgtctatacatgatgatgtagacgcccgcgacgaccc

SEQ ID NO: 34617 - DNA, 50 bp, unidentified
  source 1..50: mol_type = unassigned DNA; note = donor_6bf0894
  misc_feature 1..22: note = RE
  misc_feature 23..25: note = Core
  misc_feature 26..50: note = LE
aagtttgtttttaagcacagttcatcctatgtttgtatatatgatgaata

SEQ ID NO: 34618 - DNA, 50 bp, unidentified
  source 1..50: mol_type = unassigned DNA; note = donor_6bf5c9e
  misc_feature 1..23: note = RE
  misc_feature 24..25: note = Core
  misc_feature 26..50: note = LE
gacctcaaatggccgaatagagaagatggggtattcggccggccggtgcc

SEQ ID NO: 34619 - DNA, 50 bp, unidentified
  source 1..50: mol_type = unassigned DNA; note = donor_6bffffe
  misc_feature 1..24: note = RE
  misc_feature 25: note = Core
  misc_feature 26..50: note = LE
ttgacaaccgggggagtccatgtagaatgagatggactccccctcccaca

SEQ ID NO: 34620 - DNA, 50 bp, unidentified
  source 1..50: mol_type = unassigned DNA; note = donor_6c09553
  misc_feature 1..24: note = RE
  misc_feature 25: note = Core
  misc_feature 26..50: note = LE
tgcaaaaagcggggtgtccatagataatgaaatggacaccccttctatac

SEQ ID NO: 34621 - DNA, 50 bp, unidentified
  source 1..50: mol_type = unassigned DNA; note = donor_6c0fd75
  misc_feature 1..24: note = RE
  misc_feature 25: note = Core
  misc_feature 26..50: note = LE
gaacttgttttttaactcagttcttcttaagtttgattttcttaattttt

SEQ ID NO: 34622 - DNA, 50 bp, unidentified
  source 1..50: mol_type = unassigned DNA; note = donor_6c157e1
  misc_feature 1..23: note = RE
  misc_feature 24..25: note = Core
  misc_feature 26..50: note = LE
tctcttgacatttgatagctggtctcgtataatatagttgtagtaataaa

SEQ ID NO: 34623 - DNA, 50 bp, unidentified
  source 1..50: mol_type = unassigned DNA; note = donor_6c17cf0
  misc_feature 1..23: note = RE
  misc_feature 24..25: note = Core
  misc_feature 26..50: note = LE
acaccgaggttgacagagggtgtctgatggctctacgctccgcttccatg

SEQ ID NO: 34624 - DNA, 50 bp, unidentified
  source 1..50: mol_type = unassigned DNA; note = donor_6c1d429
  misc_feature 1..24: note = RE
  misc_feature 25: note = Core
  misc_feature 26..50: note = LE
tgcagaaggaaggctgaccattcataatgagatggtcagcctgaccaccc

SEQ ID NO: 34625 - DNA, 50 bp, unidentified
  source 1..50: mol_type = unassigned DNA; note = donor_6c1ef74
  misc_feature 1..23: note = RE
  misc_feature 24..25: note = Core
  misc_feature 26..50: note = LE
aagatttggttttatcatagaaatcctttagatttgttttttaaaattta

SEQ ID NO: 34626 - DNA, 50 bp, unidentified
  source 1..50: mol_type = unassigned DNA; note = donor_6c2d736
  misc_feature 1..24: note = RE
  misc_feature 25: note = Core
  misc_feature 26..50: note = LE
ttgcaaacggggaggagaccatatatgatgagacggtctcctcccctctt

SEQ ID NO: 34627 - DNA, 50 bp, unidentified
  source 1..50: mol_type = unassigned DNA; note = donor_6c34e14
  misc_feature 1..23: note = RE
  misc_feature 24..25: note = Core
  misc_feature 26..50: note = LE
tttcttgactattcatagctggtcttgtatgattaattcagaagcaaatt

SEQ ID NO: 34628 - DNA, 50 bp, unidentified
  source 1..50: mol_type = unassigned DNA; note = donor_6c3c9eb
  misc_feature 1..23: note = RE
  misc_feature 24..25: note = Core
  misc_feature 26..50: note = LE
ctcaaacgggacgcgttcatatagaatgaaatgaacgcgtcccacccgtg

SEQ ID NO: 34629 - DNA, 50 bp, unidentified
  source 1..50: mol_type = unassigned DNA; note = donor_6c3fa0c
  misc_feature 1..22: note = RE
  misc_feature 23..25: note = Core
  misc_feature 26..50: note = LE
atatttggaagttatcttggaatgcctttagtttgtatttataaaattat

SEQ ID NO: 34630 - DNA, 50 bp, unidentified
  source 1..50: mol_type = unassigned DNA; note = donor_6c45e88
  misc_feature 1..23: note = RE
  misc_feature 24..25: note = Core
  misc_feature 26..50: note = LE
tgacatcaacgctcctgggatgtctaatcggttcggggagtgagccatcc

SEQ ID NO: 34631 - DNA, 50 bp, unidentified
  source 1..50: mol_type = unassigned DNA; note = donor_6c5abd2
  misc_feature 1..24: note = RE
  misc_feature 25: note = Core
  misc_feature 26..50: note = LE
tgcaagcgaggaggagtccatatacaatgggatggactcctcctcaccct

SEQ ID NO: 34632 - DNA, 50 bp, unidentified
  source 1..50: mol_type = unassigned DNA; note = donor_6c5d4ea
  misc_feature 1..23: note = RE
  misc_feature 24..25: note = Core
  misc_feature 26..50: note = LE
gaccccacacggccgattagagaagatggggtaatcggccggcgttcttg

SEQ ID NO: 34633 - DNA, 50 bp, unidentified
  source 1..50: mol_type = unassigned DNA; note = donor_6c6e031
  misc_feature 1..23: note = RE
  misc_feature 24..25: note = Core
  misc_feature 26..50: note = LE
acacttgacttttatatagttagctggtatattatagatgactcatttaa

SEQ ID NO: 34634 - DNA, 50 bp, unidentified
  source 1..50: mol_type = unassigned DNA; note = donor_6c71ae9
  misc_feature 1..23: note = RE
  misc_feature 24..25: note = Core
  misc_feature 26..50: note = LE
agacttgacatttaatagttagtcttgtattatagagtcgtagttattaa

SEQ ID NO: 34635 - DNA, 50 bp, unidentified
  source 1..50: mol_type = unassigned DNA; note = donor_6c735e9
  misc_feature 1..22: note = RE
  misc_feature 23..25: note = Core
  misc_feature 26..50: note = LE
ttgccagggcgccgtccacacgtgatgctgtggacggcgcccgctcttgc

SEQ ID NO: 34636 - DNA, 50 bp, unidentified
  source 1..50: mol_type = unassigned DNA; note = donor_6c77f62
  misc_feature 1..23: note = RE
  misc_feature 24..25: note = Core
  misc_feature 26..50: note = LE
tgacattcaagctcctgggatgtctaataagggccaatgggtccgccgtc

SEQ ID NO: 34637 - DNA, 50 bp, unidentified
  source 1..50: mol_type = unassigned DNA; note = donor_6c85f80
  misc_feature 1..21: note = RE
  misc_feature 22..25: note = Core
  misc_feature 26..50: note = LE
tcagcttgacccggacggatacttgtcttatgactttcccggttccatgc

SEQ ID NO: 34638 - DNA, 50 bp, unidentified; identical to SEQ ID NO: 30702
  source 1..50: mol_type = unassigned DNA; note = donor_6c8c57e
  misc_feature 1..22: note = RE
  misc_feature 23..25: note = Core
  misc_feature 26..50: note = LE

SEQ ID NO: 34639 - DNA, 50 bp, unidentified
  source 1..50: mol_type = unassigned DNA; note = donor_6c8d01e
  misc_feature 1..22: note = RE
  misc_feature 23..25: note = Core
  misc_feature 26..50: note = LE
cttgacaccgaacatagggacacccgttaccttcgtgatgggtcctcgac

SEQ ID NO: 34640 - DNA, 50 bp, unidentified
  source 1..50: mol_type = unassigned DNA; note = donor_6c91983
  misc_feature 1..24: note = RE
  misc_feature 25: note = Core
  misc_feature 26..50: note = LE
tgcaaacgaggaggagtccatatacaatgggatggactcctcctcactct

SEQ ID NO: 34641 - DNA, 50 bp, unidentified
  source 1..50: mol_type = unassigned DNA; note = donor_6c92f55
  misc_feature 1..23: note = RE
  misc_feature 24..25: note = Core
  misc_feature 26..50: note = LE
gcaagccgggggccatccacacatgttggggtggatggccccctaccggc

SEQ ID NO: 34642 - DNA, 50 bp, unidentified
  source 1..50: mol_type = unassigned DNA; note = donor_6c99564
  misc_feature 1..23: note = RE
  misc_feature 24..25: note = Core
  misc_feature 26..50: note = LE
gcacttgactttttatagttagactcgtattattaagtaagtcaagcaaa

SEQ ID NO: 34643 - DNA, 50 bp, unidentified
  source 1..50: mol_type = unassigned DNA; note = donor_6c9ea6b
  misc_feature 1..24: note = RE
  misc_feature 25: note = Core
  misc_feature 26..50: note = LE
gctcgcttgacaacagaggggagcctacttgttgaatgacaggagctcga

SEQ ID NO: 34644 - DNA, 50 bp, unidentified; identical to SEQ ID NO: 32245
  source 1..50: mol_type = unassigned DNA; note = donor_6ca440e
  misc_feature 1..24: note = RE
  misc_feature 25: note = Core
  misc_feature 26..50: note = LE

SEQ ID NO: 34645 - DNA, 50 bp, unidentified
  source 1..50: mol_type = unassigned DNA; note = donor_6ca7abd
  misc_feature 1..24: note = RE
  misc_feature 25: note = Core
  misc_feature 26..50: note = LE
tggcaaaccgggagcgtccatgtacaatgggatggacgctcccacctaaa

SEQ ID NO: 34646 - DNA, 50 bp, unidentified
  source 1..50: mol_type = unassigned DNA; note = donor_6cb1f21
  misc_feature 1..22: note = RE
  misc_feature 23..25: note = Core
  misc_feature 26..50: note = LE
ctttgcaggagccatccacacaggatggggtggatggctcctgcttcatc

SEQ ID NO: 34647 - DNA, 50 bp, unidentified
  source 1..50: mol_type = unassigned DNA; note = donor_6cc9708
  misc_feature 1..24: note = RE
  misc_feature 25: note = Core
  misc_feature 26..50: note = LE
accatttgacatccataggagcatcagtgatgatgggtgcgggcccccgc

SEQ ID NO: 34648 - DNA, 50 bp, unidentified
  source 1..50: mol_type = unassigned DNA; note = donor_6ccc6d1
  misc_feature 1..22: note = RE
  misc_feature 23..25: note = Core
  misc_feature 26..50: note = LE
caaaccgggaggcgtccatataagatggtatggacgcctccctcacgcgt

SEQ ID NO: 34649 - DNA, 50 bp, unidentified
  source 1..50: mol_type = unassigned DNA; note = donor_6cceed6
  misc_feature 1..24: note = RE
  misc_feature 25: note = Core
  misc_feature 26..50: note = LE
tgccaaacgggaggcgtccatataatgtaatggacgcctccctcccgccg

SEQ ID NO: 34650 - DNA, 50 bp, unidentified
  source 1..50: mol_type = unassigned DNA; note = donor_6cd7457
  misc_feature 1..24: note = RE
  misc_feature 25: note = Core
  misc_feature 26..50: note = LE
tgatcagcgggtgtcgtccagacatgatggcgtggacgacacccgcgcgg

SEQ ID NO: 34651 - DNA, 50 bp, unidentified
  source 1..50: mol_type = unassigned DNA; note = donor_6cd8bd4
  misc_feature 1..23: note = RE
  misc_feature 24..25: note = Core
  misc_feature 26..50: note = LE
tgcaagtgggagccgtccacatatgttgaggtggacggctcccggcggca

SEQ ID NO: 34652 - DNA, 50 bp, unidentified
  source 1..50: mol_type = unassigned DNA; note = donor_6cddd73
  misc_feature 1..23: note = RE
  misc_feature 24..25: note = Core
  misc_feature 26..50: note = LE
tgacatctaagcccatgggatgtctaatggggttcaccgggccgacaaca

SEQ ID NO: 34653 - DNA, 50 bp, unidentified
  source 1..50: mol_type = unassigned DNA; note = donor_6cdf503
  misc_feature 1..23: note = RE
  misc_feature 24..25: note = Core
  misc_feature 26..50: note = LE
gctatgcagggaccatccacacatgatggggtggatgacccctgctccaa

SEQ ID NO: 34654 - DNA, 50 bp, unidentified
  source 1..50: mol_type = unassigned DNA; note = donor_6ce019d
  misc_feature 1..23: note = RE
  misc_feature 24..25: note = Core
  misc_feature 26..50: note = LE
actattgactttttattagcaggctcctaatatataagtgtagggtttag

SEQ ID NO: 34655 - DNA, 50 bp, unidentified
  source 1..50: mol_type = unassigned DNA; note = donor_6ce09a8
  misc_feature 1..24: note = RE
  misc_feature 25: note = Core
  misc_feature 26..50: note = LE
ttgcaatacgaggtggaccatatataatggaatggtccacctcacttttt

SEQ ID NO: 34656 - DNA, 50 bp, unidentified; identical to SEQ ID NO: 32527
  source 1..50: mol_type = unassigned DNA; note = donor_6ce296b
  misc_feature 1..24: note = RE
  misc_feature 25: note = Core
  misc_feature 26..50: note = LE

SEQ ID NO: 34657 - DNA, 50 bp, unidentified
  source 1..50: mol_type = unassigned DNA; note = donor_6ce2abb
  misc_feature 1..23: note = RE
  misc_feature 24..25: note = Core
  misc_feature 26..50: note = LE
cactgggcggcaaccacagaagaagatggggtggttgccgccctccccag

SEQ ID NO: 34658 - DNA, 50 bp, unidentified
  source 1..50: mol_type = unassigned DNA; note = donor_6ce98c6
  misc_feature 1..23: note = RE
  misc_feature 24..25: note = Core
  misc_feature 26..50: note = LE
gcaataacgaggcggaccatacattaattagatggtccgcctcttttctc

SEQ ID NO: 34659 - DNA, 50 bp, unidentified
  source 1..50: mol_type = unassigned DNA; note = donor_6cef44c
  misc_feature 1..23: note = RE
  misc_feature 24..25: note = Core
  misc_feature 26..50: note = LE
gcatcactgggggcgtccacacatgatggggtggacgcccctcacagctt

SEQ ID NO: 34660 - DNA, 50 bp, unidentified
  source 1..50: mol_type = unassigned DNA; note = donor_6cf4f81
  misc_feature 1..23: note = RE
  misc_feature 24..25: note = Core
  misc_feature 26..50: note = LE
taacttgaaattgaacagagtatcttgtatgattaaatttaaaataaata

SEQ ID NO: 34661 - DNA, 50 bp, unidentified
  source 1..50: mol_type = unassigned DNA; note = donor_6d046c7
  misc_feature 1..24: note = RE
  misc_feature 25: note = Core
  misc_feature 26..50: note = LE
ttgcaaacagggggcgtccatgtacaatgggatggacgcccccacccgaa

SEQ ID NO: 34662 - DNA, 50 bp, unidentified
  source 1..50: mol_type = unassigned DNA; note = donor_6d0922a
  misc_feature 1..23: note = RE
  misc_feature 24..25: note = Core
  misc_feature 26..50: note = LE
ggggttgacttctaatagttaatcttgtattatagagtagtagtgattag

SEQ ID NO: 34663 - DNA, 50 bp, unidentified; identical to SEQ ID NO: 30913
  source 1..50: mol_type = unassigned DNA; note = donor_6d147c7
  misc_feature 1..24: note = RE
  misc_feature 25: note = Core
  misc_feature 26..50: note = LE

SEQ ID NO: 34664 - DNA, 50 bp, unidentified
  source 1..50: mol_type = unassigned DNA; note = donor_6d15ab0
  misc_feature 1..23: note = RE
  misc_feature 24..25: note = Core
  misc_feature 26..50: note = LE
gctgcttgacaaacagagaggcaccgacttgtatgagtgtcacggcaggt

SEQ ID NO: 34665 - DNA, 50 bp, unidentified
  source 1..50: mol_type = unassigned DNA; note = donor_6d22c30
  misc_feature 1..23: note = RE
  misc_feature 24..25: note = Core
  misc_feature 26..50: note = LE
gcctccgcctgacaacacagttgcttatctcttcgagatctggcacttta

SEQ ID NO: 34666 - DNA, 50 bp, unidentified
  source 1..50: mol_type = unassigned DNA; note = donor_6d234ff
  misc_feature 1..23: note = RE
  misc_feature 24..25: note = Core
  misc_feature 26..50: note = LE
gacattaacggggagtccatataagatgtatggactcccacctccctcgg

SEQ ID NO: 34667 - DNA, 50 bp, unidentified
  source 1..50: mol_type = unassigned DNA; note = donor_6d38699
  misc_feature 1..23: note = RE
  misc_feature 24..25: note = Core
  misc_feature 26..50: note = LE
tgcataatcgtggcgtccatatatgatgtgatggacgtcccctttttcag

SEQ ID NO: 34668 - DNA, 50 bp, unidentified
  source 1..50: mol_type = unassigned DNA; note = donor_6d3f3ec
  misc_feature 1..23: note = RE
  misc_feature 24..25: note = Core
  misc_feature 26..50: note = LE
gaccccaaacggccgattagagaagatggggtaatcggccggcgagtttg

SEQ ID NO: 34669 - DNA, 50 bp, unidentified
  source 1..50: mol_type = unassigned DNA; note = donor_6d45404
  misc_feature 1..23: note = RE
  misc_feature 24..25: note = Core
  misc_feature 26..50: note = LE
ctgcttgactttttctttgcaggctactacaatatatttatggttaatac

SEQ ID NO: 34670 - DNA, 50 bp, unidentified; identical to SEQ ID NO: 33775
  source 1..50: mol_type = unassigned DNA; note = donor_6d46530
  misc_feature 1..23: note = RE
  misc_feature 24..25: note = Core
  misc_feature 26..50: note = LE

SEQ ID NO: 34671 - DNA, 50 bp, unidentified
  source 1..50: mol_type = unassigned DNA; note = donor_6d4dcf3
  misc_feature 1..24: note = RE
  misc_feature 25: note = Core
  misc_feature 26..50: note = LE
tgccaccggagagccgtccacacatgatgtcgtggacggctctccaccct

SEQ ID NO: 34672 - DNA, 50 bp, unidentified
  source 1..50: mol_type = unassigned DNA; note = donor_6d50e74
  misc_feature 1..24: note = RE
  misc_feature 25: note = Core
  misc_feature 26..50: note = LE
tgcaatactaggggagtccatatacaatggtatggactccccacctcaac

SEQ ID NO: 34673 - DNA, 50 bp, unidentified
  source 1..50: mol_type = unassigned DNA; note = donor_6d5a0bb
  misc_feature 1..24: note = RE
  misc_feature 25: note = Core
  misc_feature 26..50: note = LE
ccacctcttgacacagaggggtgcctacttatctactggtgggacgaccg

SEQ ID NO: 34674 - DNA, 50 bp, unidentified
  source 1..50: mol_type = unassigned DNA; note = donor_6d5ef14
  misc_feature 1..23: note = RE
  misc_feature 24..25: note = Core
  misc_feature 26..50: note = LE
tggcctcagcagcataacagttgccctgtgtctggaaagtctgtcatggt

SEQ ID NO: 34675 - DNA, 50 bp, unidentified
  source 1..50: mol_type = unassigned DNA; note = donor_6d6da48
  misc_feature 1..23: note = RE
  misc_feature 24..25: note = Core
  misc_feature 26..50: note = LE
gacaccccacgtgcgattagacaacatggggtaatcgcgggagcgacgcc

SEQ ID NO: 34676 - DNA, 50 bp, unidentified
  source 1..50: mol_type = unassigned DNA; note = donor_6d8229d
  misc_feature 1..23: note = RE
  misc_feature 24..25: note = Core
  misc_feature 26..50: note = LE
tgtaagagggggtcgtccacatatgttggggtggacgacccccgaacggc

SEQ ID NO: 34677 - DNA, 50 bp, unidentified
  source 1..50: mol_type = unassigned DNA; note = donor_6d840b1
  misc_feature 1..22: note = RE
  misc_feature 23..25: note = Core
  misc_feature 26..50: note = LE
ttagaaattgagcaagacagttgcttgtgtcttgatgagggattaaaatc

SEQ ID NO: 34678 - DNA, 50 bp, unidentified
  source 1..50: mol_type = unassigned DNA; note = donor_6d881f3
  misc_feature 1..23: note = RE
  misc_feature 24..25: note = Core
  misc_feature 26..50: note = LE
tgactcctacagccctggggtgtctaatgggagtccaacagcgtttgtcg

SEQ ID NO: 34679 - DNA, 50 bp, unidentified
  source 1..50: mol_type = unassigned DNA; note = donor_6d91bdd
  misc_feature 1..23: note = RE
  misc_feature 24..25: note = Core
  misc_feature 26..50: note = LE
ttttccttgactattcatagctggtatgattaattcagaagctaattaac

SEQ ID NO: 34680 - DNA, 50 bp, unidentified
  source 1..50: mol_type = unassigned DNA; note = donor_6d95eb6
  misc_feature 1..22: note = RE
  misc_feature 23..25: note = Core
  misc_feature 26..50: note = LE
atctgagccgtgcgattagacaacatggggtaatcgcgggagcgagtcgc

SEQ ID NO: 34681 - DNA, 50 bp, unidentified
  source 1..50: mol_type = unassigned DNA; note = donor_6d9f5dd
  misc_feature 1..23: note = RE
  misc_feature 24..25: note = Core
  misc_feature 26..50: note = LE
acgcttgacgggcaagacggtatcttgtatcttcgttcctgtggtgatta

SEQ ID NO: 34682 - DNA, 50 bp, unidentified
  source 1..50: mol_type = unassigned DNA; note = donor_6daaa8e
  misc_feature 1..20: note = RE
  misc_feature 21..25: note = Core
  misc_feature 26..50: note = LE
cttgacaaatccatagccggctgctataattcgtccataggaaaaactcg

SEQ ID NO: 34683 - DNA, 50 bp, unidentified
  source 1..50: mol_type = unassigned DNA; note = donor_6dadef7
  misc_feature 1..24: note = RE
  misc_feature 25: note = Core
  misc_feature 26..50: note = LE
caggcccttgacacaaacaggcttctgatagaagatctcgtgcaggcgtt

SEQ ID NO: 34684 - DNA, 50 bp, unidentified; identical to SEQ ID NO: 30679
  source 1..50: mol_type = unassigned DNA; note = donor_6dafa02
  misc_feature 1..23: note = RE
  misc_feature 24..25: note = Core
  misc_feature 26..50: note = LE

SEQ ID NO: 34685 - DNA, 50 bp, unidentified
  source 1..50: mol_type = unassigned DNA; note = donor_6dbd815
  misc_feature 1..23: note = RE
  misc_feature 24..25: note = Core
  misc_feature 26..50: note = LE
gtaacacccggggcgtccatatatgatgttatggacgcccctccctgaag

SEQ ID NO: 34686 - DNA, 50 bp, unidentified
  source 1..50: mol_type = unassigned DNA; note = donor_6dc0ed2
  misc_feature 1..22: note = RE
  misc_feature 23..25: note = Core
  misc_feature 26..50: note = LE
agctataattattaacatagttgattgtaagttaaatcttctttataatt

SEQ ID NO: 34687 - DNA, 50 bp, unidentified
  source 1..50: mol_type = unassigned DNA; note = donor_6dc953f
  misc_feature 1..23: note = RE
  misc_feature 24..25: note = Core
  misc_feature 26..50: note = LE
ttgccgacggggcgggccatacgttatgggatggcccgcccctctagcgg

SEQ ID NO: 34688 - DNA, 50 bp, unidentified
  source 1..50: mol_type = unassigned DNA; note = donor_6dc9fd9
  misc_feature 1..23: note = RE
  misc_feature 24..25: note = Core
  misc_feature 26..50: note = LE
tacgcttgacttttcttagcaggttagtaccataaaagtgtagttgttag

SEQ ID NO: 34689 - DNA, 50 bp, unidentified
  source 1..50: mol_type = unassigned DNA; note = donor_6dca0e0
  misc_feature 1..23: note = RE
  misc_feature 24..25: note = Core
  misc_feature 26..50: note = LE
gcaataaccggggcgtccatatatgatgtgatggacgcccctccctagtg

SEQ ID NO: 34690 - DNA, 50 bp, unidentified
  source 1..50: mol_type = unassigned DNA; note = donor_6dccb95
  misc_feature 1..24: note = RE
  misc_feature 25: note = Core
  misc_feature 26..50: note = LE
aaatctcttgacttttcttagcaagtctcgtacaatataagtgtagagaa

SEQ ID NO: 34691 - DNA, 50 bp, unidentified
  source 1..50: mol_type = unassigned DNA; note = donor_6dd0c78
  misc_feature 1..24: note = RE
  misc_feature 25: note = Core
  misc_feature 26..50: note = LE
cgcaaacgggacgcgttcatatagattgaaatgaacacgtcccacccgtc

SEQ ID NO: 34692 - DNA, 50 bp, unidentified
  source 1..50: mol_type = unassigned DNA; note = donor_6dd3790
  misc_feature 1..23: note = RE
  misc_feature 24..25: note = Core
  misc_feature 26..50: note = LE
ctgcttgacaaaagcattagacagccctacctttcttttgcgccctcggt

SEQ ID NO: 34693 - DNA, 50 bp, unidentified; identical to SEQ ID NO: 34369
  source 1..50: mol_type = unassigned DNA; note = donor_6dd407a
  misc_feature 1..24: note = RE
  misc_feature 25: note = Core
  misc_feature 26..50: note = LE

SEQ ID NO: 34694 - DNA, 50 bp, unidentified
  source 1..50: mol_type = unassigned DNA; note = donor_6dd6f88
  misc_feature 1..23: note = RE
  misc_feature 24..25: note = Core
  misc_feature 26..50: note = LE
gacagtttgtggccgtgggatgtctaatgggagtcgaccacttcgcttca

SEQ ID NO: 34695 - DNA, 50 bp, unidentified
  source 1..50: mol_type = unassigned DNA; note = donor_6dd72fa
  misc_feature 1..23: note = RE
  misc_feature 24..25: note = Core
  misc_feature 26..50: note = LE
ttgggggttgtggtttatggtatcttgtattataatacctaaaacaaaac

SEQ ID NO: 34696 - DNA, 50 bp, unidentified; identical to SEQ ID NO: 30428
  source 1..50: mol_type = unassigned DNA; note = donor_6debf91
  misc_feature 1..22: note = RE
  misc_feature 23..25: note = Core
  misc_feature 26..50: note = LE

SEQ ID NO: 34697 - DNA, 50 bp, unidentified
  source 1..50: mol_type = unassigned DNA; note = donor_6df9252
  misc_feature 1..23: note = RE
  misc_feature 24..25: note = Core
  misc_feature 26..50: note = LE
caccccgtagggcaagacggtatcttgtgtcttgcggttcacggatcgct

SEQ ID NO: 34698 - DNA, 50 bp, unidentified; identical to SEQ ID NO: 34387
  source 1..50: mol_type = unassigned DNA; note = donor_6dfb807
  misc_feature 1..24: note = RE
  misc_feature 25: note = Core
  misc_feature 26..50: note = LE

SEQ ID NO: 34699 - DNA, 50 bp, unidentified
  source 1..50: mol_type = unassigned DNA; note = donor_6dfc214
  misc_feature 1..21: note = RE
  misc_feature 22..25: note = Core
  misc_feature 26..50: note = LE
aagtttaagtggggccatatataatggtgtggacccactaagctgaagat

SEQ ID NO: 34700 - DNA, 50 bp, unidentified
  source 1..50: mol_type = unassigned DNA; note = donor_6e011d9
  misc_feature 1..21: note = RE
  misc_feature 22..25: note = Core
  misc_feature 26..50: note = LE
cctattgacttttcttagcaggtttggtacaatataagcgtagccctatg

SEQ ID NO: 34701 - DNA, 50 bp, unidentified
  source 1..50: mol_type = unassigned DNA; note = donor_6e0de64
  misc_feature 1..20: note = RE
  misc_feature 21..25: note = Core
  misc_feature 26..50: note = LE
tttggaatttaaaacagtaccttttatatttactgagaattttaaaaagg

SEQ ID NO: 34702 - DNA, 50 bp, unidentified
  source 1..50: mol_type = unassigned DNA; note = donor_6e112c7
  misc_feature 1..23: note = RE
  misc_feature 24..25: note = Core
  misc_feature 26..50: note = LE
agacttgacatttaatagttagtctcgtattatatagtagtagtttttaa

SEQ ID NO: 34703 - DNA, 50 bp, unidentified
  source 1..50: mol_type = unassigned DNA; note = donor_6e114cd
  misc_feature 1..24: note = RE
  misc_feature 25: note = Core
  misc_feature 26..50: note = LE
tggcaaacaggaggcgaccatctataatggaatggtcgccccctacattc

SEQ ID NO: 34704 - DNA, 50 bp, unidentified
  source 1..50: mol_type = unassigned DNA; note = donor_6e11f3c
  misc_feature 1..21: note = RE
  misc_feature 22..25: note = Core
  misc_feature 26..50: note = LE
ttgacgaagaccatagggacaccccgttaccgtcttggtgagccttgaag

SEQ ID NO: 34705 - DNA, 50 bp, unidentified
  source 1..50: mol_type = unassigned DNA; note = donor_6e17e95
  misc_feature 1..22: note = RE
  misc_feature 23..25: note = Core
  misc_feature 26..50: note = LE
cttgacgaagaccatagggacacccgttaccttcttcgtgtccccgatga

SEQ ID NO: 34706 - DNA, 50 bp, unidentified
  source 1..50: mol_type = unassigned DNA; note = donor_6e1b3fc
  misc_feature 1..24: note = RE
  misc_feature 25: note = Core
  misc_feature 26..50: note = LE
tgcaaaagtcaggctgaccatagataatgagatggtcagcctgaccgaag

SEQ ID NO: 34707 - DNA, 50 bp, unidentified
  source 1..50: mol_type = unassigned DNA; note = donor_6e29179
  misc_feature 1..24: note = RE
  misc_feature 25: note = Core
  misc_feature 26..50: note = LE
tgcaagcgcggggcggaccatacataatgggatggtccgccccgcatcca

SEQ ID NO: 34708 - DNA, 50 bp, unidentified
  source 1..50: mol_type = unassigned DNA; note = donor_6e30601
  misc_feature 1..23: note = RE
  misc_feature 24..25: note = Core
  misc_feature 26..50: note = LE
tgacatctaagctcctgggatgtctaataggagttaccgggtcgccggtg

SEQ ID NO: 34709 - DNA, 50 bp, unidentified
  source 1..50: mol_type = unassigned DNA; note = donor_6e30610
  misc_feature 1..23: note = RE
  misc_feature 24..25: note = Core
  misc_feature 26..50: note = LE
tgcccgcggggccgttccacatatgatggtgtggaacggccccgctcccg

SEQ ID NO: 34710 - DNA, 50 bp, unidentified
  source 1..50: mol_type = unassigned DNA; note = donor_6e30a92
  misc_feature 1..23: note = RE
  misc_feature 24..25: note = Core
  misc_feature 26..50: note = LE
gttgacaagggggagtccacataagataattggactcccccacatccgaa

SEQ ID NO: 34711 - DNA, 50 bp, unidentified
  source 1..50: mol_type = unassigned DNA; note = donor_6e3201d
  misc_feature 1..23: note = RE
  misc_feature 24..25: note = Core
  misc_feature 26..50: note = LE
gccacgcgggagccgtccatacatgatggagtggatggctcccgctcccg

SEQ ID NO: 34712 - DNA, 50 bp, unidentified
  source 1..50: mol_type = unassigned DNA; note = donor_6e3384b
  misc_feature 1..23: note = RE
  misc_feature 24..25: note = Core
  misc_feature 26..50: note = LE
gggttgcccctcaaccatagaatcttgtatgctaggacttgaagggagga

SEQ ID NO: 34713 - DNA, 50 bp, unidentified
  source 1..50: mol_type = unassigned DNA; note = donor_6e3ae4a
  misc_feature 1..24: note = RE
  misc_feature 25: note = Core
  misc_feature 26..50: note = LE
tccccttgacatattaccgccggacctcgtataataagttttgttagtat

SEQ ID NO: 34714 - DNA, 50 bp, unidentified
  source 1..50: mol_type = unassigned DNA; note = donor_6e431b0
  misc_feature 1..22: note = RE
  misc_feature 23..25: note = Core
  misc_feature 26..50: note = LE
acttcttacaggcgtgggatgtctaatagggttggaacaagatccgccaa

SEQ ID NO: 34715 - DNA, 50 bp, unidentified
  source 1..50: mol_type = unassigned DNA; note = donor_6e4aa44
  misc_feature 1..24: note = RE
  misc_feature 25: note = Core
  misc_feature 26..50: note = LE
ttgcaaaacggaggagtccatatataatggtatggactcctcctcttccc

SEQ ID NO: 34716 - DNA, 50 bp, unidentified
  source 1..50: mol_type = unassigned DNA; note = donor_6e4dfbc
  misc_feature 1..24: note = RE
  misc_feature 25: note = Core
  misc_feature 26..50: note = LE
ttgacatacggggaagcccttgtagaatgaaagggacttccccgtcccga

SEQ ID NO: 34717 - DNA, 50 bp, unidentified
  source 1..50: mol_type = unassigned DNA; note = donor_6e59b9e
  misc_feature 1..22: note = RE
  misc_feature 23..25: note = Core
  misc_feature 26..50: note = LE
ggtcttgacttttaatagttagactcgtattatatagtagtagtgtttat

SEQ ID NO: 34718 - DNA, 50 bp, unidentified
  source 1..50: mol_type = unassigned DNA; note = donor_6e6f882
  misc_feature 1..23: note = RE
  misc_feature 24..25: note = Core
  misc_feature 26..50: note = LE
cgcaaggtggagggagatggtatcttgtatctctctcgatattctgatta

SEQ ID NO: 34719 - DNA, 50 bp, unidentified; identical to SEQ ID NO: 33838
  source 1..50: mol_type = unassigned DNA; note = donor_6e790f1
  misc_feature 1..24: note = RE
  misc_feature 25: note = Core
  misc_feature 26..50: note = LE

SEQ ID NO: 34720 - DNA, 50 bp, unidentified
  source 1..50: mol_type = unassigned DNA; note = donor_6e7ec61
  misc_feature 1..23: note = RE
  misc_feature 24..25: note = Core
  misc_feature 26..50: note = LE
gacccgcagggggcatccacacatgatggagtggatgccccctgctctgc

SEQ ID NO: 34721 - DNA, 50 bp, unidentified
  source 1..50: mol_type = unassigned DNA; note = donor_6e87fc5
  misc_feature 1..24: note = RE
  misc_feature 25: note = Core
  misc_feature 26..50: note = LE
gcaaattccggggccgtccatgtacaatgggatggacgcccccacccgta

SEQ ID NO: 34722 - DNA, 50 bp, unidentified
  source 1..50: mol_type = unassigned DNA; note = donor_6e89c66
  misc_feature 1..22: note = RE
  misc_feature 23..25: note = Core
  misc_feature 26..50: note = LE
aatcttgacaagatattagctggttcgttttatgaggtcagccagttttt

SEQ ID NO: 34723 - DNA, 50 bp, unidentified
  source 1..50: mol_type = unassigned DNA; note = donor_6e8d180
  misc_feature 1..23: note = RE
  misc_feature 24..25: note = Core
  misc_feature 26..50: note = LE
atccagaatgaacaatacagttgcttctgtatctgcgctttgctaatctc

SEQ ID NO: 34724 - DNA, 50 bp, unidentified
  source 1..50: mol_type = unassigned DNA; note = donor_6e9acd6
  misc_feature 1..23: note = RE
  misc_feature 24..25: note = Core
  misc_feature 26..50: note = LE
ttacttgttttttctatagctagcttgtataattaatttgtattaaatta

SEQ ID NO: 34725 - DNA, 50 bp, unidentified
  source 1..50: mol_type = unassigned DNA; note = donor_6eaee76
  misc_feature 1..24: note = RE
  misc_feature 25: note = Core
  misc_feature 26..50: note = LE
tgcaacatagcggcggaccatacataatggaatggtccgccgcctttacc

SEQ ID NO: 34726 - DNA, 50 bp, unidentified
  source 1..50: mol_type = unassigned DNA; note = donor_6eb8afe
  misc_feature 1..22: note = RE
  misc_feature 23..25: note = Core
  misc_feature 26..50: note = LE
caaagtgggagccatccacacaggatggtgtggatggctcctgtccccgg

SEQ ID NO: 34727 - DNA, 50 bp, unidentified
  source 1..50: mol_type = unassigned DNA; note = donor_6eba732
  misc_feature 1..23: note = RE
  misc_feature 24..25: note = Core
  misc_feature 26..50: note = LE
tgacccctaacgtcctgggatgtctaatgggtctgtgccgggcttgtcgg

SEQ ID NO: 34728 - DNA, 50 bp, unidentified
  source 1..50: mol_type = unassigned DNA; note = donor_6ebbfbe
  misc_feature 1..22: note = RE
  misc_feature 23..25: note = Core
  misc_feature 26..50: note = LE
agggttgacaaacattagctggtttcgtattatcaggtcagccagaattt

SEQ ID NO: 34729 - DNA, 50 bp, unidentified
  source 1..50: mol_type = unassigned DNA; note = donor_6ec8205
  misc_feature 1..23: note = RE
  misc_feature 24..25: note = Core
  misc_feature 26..50: note = LE
acaggtacgccctttttcatagaagatgtaatgaaaacaagaaaaggcgt

SEQ ID NO: 34730 - DNA, 50 bp, unidentified
  source 1..50: mol_type = unassigned DNA; note = donor_6ecb6c4
  misc_feature 1..23: note = RE
  misc_feature 24..25: note = Core
  misc_feature 26..50: note = LE
gacaccctaagaacctgggatgtctaatggcagctgctgggtctgtttgg

SEQ ID NO: 34731 - DNA, 50 bp, unidentified; identical to SEQ ID NO: 33475
  source 1..50: mol_type = unassigned DNA; note = donor_6ecc40d
  misc_feature 1..22: note = RE
  misc_feature 23..25: note = Core
  misc_feature 26..50: note = LE

SEQ ID NO: 34732 - DNA, 50 bp, unidentified
  source 1..50: mol_type = unassigned DNA; note = donor_6ed1f38
  misc_feature 1..21: note = RE
  misc_feature 22..25: note = Core
  misc_feature 26..50: note = LE
ggcttgacatcatcattgagattccgtaagactgttggtggtccgggagg

SEQ ID NO: 34733 - DNA, 50 bp, unidentified
  source 1..50: mol_type = unassigned DNA; note = donor_6ed271d
  misc_feature 1..23: note = RE
  misc_feature 24..25: note = Core
  misc_feature 26..50: note = LE
agcctgtcgcaatctaatggttgcttgtattagcgcgaatcattacagtg

SEQ ID NO: 34734 - DNA, 50 bp, unidentified; identical to SEQ ID NO: 33578
  source 1..50: mol_type = unassigned DNA; note = donor_6ed46db
  misc_feature 1..23: note = RE
  misc_feature 24..25: note = Core
  misc_feature 26..50: note = LE

SEQ ID NO: 34735 - DNA, 50 bp, unidentified
  source 1..50: mol_type = unassigned DNA; note = donor_6edde7e
  misc_feature 1..24: note = RE
  misc_feature 25: note = Core
  misc_feature 26..50: note = LE
tgacaccgtacgccgcttcacagaagttggtatgaagcggctggacctcc

SEQ ID NO: 34736 - DNA, 50 bp, unidentified
  source 1..50: mol_type = unassigned DNA; note = donor_6ee7911
  misc_feature 1..21: note = RE
  misc_feature 22..25: note = Core
  misc_feature 26..50: note = LE
ggcttgactcagtcattgagactccgtaagttgttgggcggcccgggagg

SEQ ID NO: 34737 - DNA, 50 bp, unidentified
  source 1..50: mol_type = unassigned DNA; note = donor_6efb8e4
  misc_feature 1..22: note = RE
  misc_feature 23..25: note = Core
  misc_feature 26..50: note = LE
agatttgttttttaccttggaatgcctttagtttgtatttatataaaaat

SEQ ID NO: 34738 - DNA, 50 bp, unidentified
  source 1..50: mol_type = unassigned DNA; note = donor_6f0520f
  misc_feature 1..24: note = RE
  misc_feature 25: note = Core
  misc_feature 26..50: note = LE
tgcagagtcggggaagtccttatagaatgaaagggacttcccctggccgg

SEQ ID NO: 34739 - DNA, 50 bp, unidentified
  source 1..50: mol_type = unassigned DNA; note = donor_6f0a019
  misc_feature 1..23: note = RE
  misc_feature 24..25: note = Core
  misc_feature 26..50: note = LE
aagcctgttgaccaaaacggatacttgtcttatgacatgtcccggttccc

SEQ ID NO: 34740 - DNA, 50 bp, unidentified; identical to SEQ ID NO: 31204
  source 1..50: mol_type = unassigned DNA; note = donor_6f0f0c9
  misc_feature 1..22: note = RE
  misc_feature 23..25: note = Core
  misc_feature 26..50: note = LE

SEQ ID NO: 34741 - DNA, 50 bp, unidentified
  source 1..50: mol_type = unassigned DNA; note = donor_6f15fca
  misc_feature 1..24: note = RE
  misc_feature 25: note = Core
  misc_feature 26..50: note = LE
tgcaaaaaagggggtgaccatagataatgagatggtcacccccacacctt

SEQ ID NO: 34742 - DNA, 50 bp, unidentified
  source 1..50: mol_type = unassigned DNA; note = donor_6f208fd
  misc_feature 1..22: note = RE
  misc_feature 23..25: note = Core
  misc_feature 26..50: note = LE
gacaacaacgcccgattaaagaagcatcggtaatcgggctgaccactgcg

SEQ ID NO: 34743 - DNA, 50 bp, unidentified
  source 1..50: mol_type = unassigned DNA; note = donor_6f25595
  misc_feature 1..23: note = RE
  misc_feature 24..25: note = Core
  misc_feature 26..50: note = LE
aaccagcttgatcaaaacggatacttgtcttatgacttttgctgccgaac

SEQ ID NO: 34744 - DNA, 50 bp, unidentified; identical to SEQ ID NO: 30609
  source 1..50: mol_type = unassigned DNA; note = donor_6f2e2da
  misc_feature 1..22: note = RE
  misc_feature 23..25: note = Core
  misc_feature 26..50: note = LE

SEQ ID NO: 34745 - DNA, 50 bp, unidentified
  source 1..50: mol_type = unassigned DNA; note = donor_6f2e833
  misc_feature 1..24: note = RE
  misc_feature 25: note = Core
  misc_feature 26..50: note = LE
cggacttgactttttatttgcaggcctgttactatatatttgccccttgg

SEQ ID NO: 34746 - DNA, 50 bp, unidentified
  source 1..50: mol_type = unassigned DNA; note = donor_6f32523
  misc_feature 1..23: note = RE
  misc_feature 24..25: note = Core
  misc_feature 26..50: note = LE
gcaatacgggcggcgttcatataagatgacatgaacgccgcccgttccta

SEQ ID NO: 34747 - DNA, 50 bp, unidentified; identical to SEQ ID NO: 30847
  source 1..50: mol_type = unassigned DNA; note = donor_6f375b1
  misc_feature 1..24: note = RE
  misc_feature 25: note = Core
  misc_feature 26..50: note = LE

SEQ ID NO: 34748 - DNA, 50 bp, unidentified
  source 1..50: mol_type = unassigned DNA; note = donor_6f5304c
  misc_feature 1..23: note = RE
  misc_feature 24..25: note = Core
  misc_feature 26..50: note = LE
tgccatcagaggccgtccacatatgatggtgtggacggcctcacctcaac

SEQ ID NO: 34749 - DNA, 50 bp, unidentified
  source 1..50: mol_type = unassigned DNA; note = donor_6f59151
  misc_feature 1..24: note = RE
  misc_feature 25: note = Core
  misc_feature 26..50: note = LE
acaaactgggagcgtccatgtatgatgggatggacgctcccccctttaaa

SEQ ID NO: 34750 - DNA, 50 bp, unidentified
  source 1..50: mol_type = unassigned DNA; note = donor_6f5ad9a
  misc_feature 1..22: note = RE
  misc_feature 23..25: note = Core
  misc_feature 26..50: note = LE
cgcttgactcacaacagagtatcttgtatgttgtggaggagacgcgggga

SEQ ID NO: 34751 - DNA, 50 bp, unidentified
  source 1..50: mol_type = unassigned DNA; note = donor_6f6072c
  misc_feature 1..21: note = RE
  misc_feature 22..25: note = Core
  misc_feature 26..50: note = LE
gggcggcttgacatagggcttctcactggtctaccttcctgaggtcatcg

SEQ ID NO: 34752 - DNA, 50 bp, unidentified
  source 1..50: mol_type = unassigned DNA; note = donor_6f656a5
  misc_feature 1..23: note = RE
  misc_feature 24..25: note = Core
  misc_feature 26..50: note = LE
atgcttgacttgcaacagagaatcttgtatgttgcgaaatgaggcgtgaa

SEQ ID NO: 34753 - DNA, 50 bp, unidentified
  source 1..50: mol_type = unassigned DNA; note = donor_6f6589c
  misc_feature 1..22: note = RE
  misc_feature 23..25: note = Core
  misc_feature 26..50: note = LE
tacttgacagattcatagctggtcttgtatgatacaaatgtaccttgtcg

SEQ ID NO: 34754 - DNA, 50 bp, unidentified
  source 1..50: mol_type = unassigned DNA; note = donor_6f688e6
  misc_feature 1..22: note = RE
  misc_feature 23..25: note = Core
  misc_feature 26..50: note = LE
attgttgacaatttatttgcagactactactataaaagaagggttatatt

SEQ ID NO: 34755 - DNA, 50 bp, unidentified; identical to SEQ ID NO: 31549
  source 1..50: mol_type = unassigned DNA; note = donor_6f6c762
  misc_feature 1..22: note = RE
  misc_feature 23..25: note = Core
  misc_feature 26..50: note = LE

SEQ ID NO: 34756 - DNA, 50 bp, unidentified
  source 1..50: mol_type = unassigned DNA; note = donor_6f7863a
  misc_feature 1..24: note = RE
  misc_feature 25: note = Core
  misc_feature 26..50: note = LE
gcttgcaacggggcgggccatacgtatggaatggcccgcccctctcccca

SEQ ID NO: 34757 - DNA, 50 bp, unidentified
  source 1..50: mol_type = unassigned DNA; note = donor_6f7d07a
  misc_feature 1..23: note = RE
  misc_feature 24..25: note = Core
  misc_feature 26..50: note = LE
cccctacttgaccaacacggatacttgtcttatgacttttgctgccgaac

SEQ ID NO: 34758 - DNA, 50 bp, unidentified
  source 1..50: mol_type = unassigned DNA; note = donor_6f965de
  misc_feature 1..23: note = RE
  misc_feature 24..25: note = Core
  misc_feature 26..50: note = LE
aaagttgacttttaagacggtatcttgtatcttacttgtcgccatggtta

SEQ ID NO: 34759 - DNA, 50 bp, unidentified
  source 1..50: mol_type = unassigned DNA; note = donor_6f96615
  misc_feature 1..23: note = RE
  misc_feature 24..25: note = Core
  misc_feature 26..50: note = LE
cgcaaatgggggacgttcatatagaatgatatgaacgtcccccgcccatg

SEQ ID NO: 34760 - DNA, 50 bp, unidentified
  source 1..50: mol_type = unassigned DNA; note = donor_6f9cf35
  misc_feature 1..24: note = RE
  misc_feature 25: note = Core
  misc_feature 26..50: note = LE
ttgcaaaccaggggcgaccatatataatggaatggtcgccccgccttttc

SEQ ID NO: 34761 - DNA, 50 bp, unidentified
  source 1..50: mol_type = unassigned DNA; note = donor_6fa7fc1
  misc_feature 1..23: note = RE
  misc_feature 24..25: note = Core
  misc_feature 26..50: note = LE
aaattaggaattaaagatagtacctcatatctttgacatagattaaaaat

SEQ ID NO: 34762 - DNA, 50 bp, unidentified
  source 1..50: mol_type = unassigned DNA; note = donor_6fac22c
  misc_feature 1..24: note = RE
  misc_feature 25: note = Core
  misc_feature 26..50: note = LE
ttgcaacgcgggacggaccatatataatgggatggtccgtcccgctccca

SEQ ID NO: 34763 - DNA, 50 bp, unidentified
  source 1..50: mol_type = unassigned DNA; note = donor_6fad233
  misc_feature 1..23: note = RE
  misc_feature 24..25: note = Core
  misc_feature 26..50: note = LE
gatttacttagggagtccatataagatgtatggactccctctccctgagg

SEQ ID NO: 34764 - DNA, 50 bp, unidentified
  source 1..50: mol_type = unassigned DNA; note = donor_6fb237c
  misc_feature 1..23: note = RE
  misc_feature 24..25: note = Core
  misc_feature 26..50: note = LE
ctcttgactatttatagtttgtcacgtataatccaattatctcagatggt

SEQ ID NO: 34765 - DNA, 50 bp, unidentified
  source 1..50: mol_type = unassigned DNA; note = donor_6fb2a32
  misc_feature 1..23: note = RE
  misc_feature 24..25: note = Core
  misc_feature 26..50: note = LE
tgcaataggggaccgtccacatatgttggtgtggacggtccccgccctgg

SEQ ID NO: 34766 - DNA, 50 bp, unidentified
  source 1..50: mol_type = unassigned DNA; note = donor_6fc1859
  misc_feature 1..23: note = RE
  misc_feature 24..25: note = Core
  misc_feature 26..50: note = LE
gcacgaaacggggcatccacacatgatggggtggatgcccctccccgcag

SEQ ID NO: 34767 - DNA, 50 bp, unidentified
  source 1..50: mol_type = unassigned DNA; note = donor_6fc2501
  misc_feature 1..23: note = RE
  misc_feature 24..25: note = Core
  misc_feature 26..50: note = LE
gcgttcagggaggcgtccacagatgatggggtggacgcctccccgacggc

SEQ ID NO: 34768 - DNA, 50 bp, unidentified
  source 1..50: mol_type = unassigned DNA; note = donor_6fc4b8f
  misc_feature 1..22: note = RE
  misc_feature 23..25: note = Core
  misc_feature 26..50: note = LE
ctacttgacatacattagcaagattcgtaatatataagtgaaggtttaaa

SEQ ID NO: 34769 - DNA, 50 bp, unidentified
  source 1..50: mol_type = unassigned DNA; note = donor_6fc639e
  misc_feature 1..23: note = RE
  misc_feature 24..25: note = Core
  misc_feature 26..50: note = LE
gcttgacgaaacctataggggcaccattaccttcttgatcagccccgcaa

SEQ ID NO: 34770 - DNA, 50 bp, unidentified
  source 1..50: mol_type = unassigned DNA; note = donor_6fdab1e
  misc_feature 1..24: note = RE
  misc_feature 25: note = Core
  misc_feature 26..50: note = LE
caaaacgggaggtgtccatatacgatggaatggacacctcctacctaaac

SEQ ID NO: 34771 - DNA, 50 bp, unidentified
  source 1..50: mol_type = unassigned DNA; note = donor_6fdbb6d
  misc_feature 1..23: note = RE
  misc_feature 24..25: note = Core
  misc_feature 26..50: note = LE
cgacttgacgcaaaacatagaaccttgtatgttgtggtcgtcggggtgga

SEQ ID NO: 34772 - DNA, 50 bp, unidentified
  source 1..50: mol_type = unassigned DNA; note = donor_6fde59e
  misc_feature 1..20: note = RE
  misc_feature 21..25: note = Core
  misc_feature 26..50: note = LE
agataattgaactttattgaaggagcattcctgtaatgaaggaaatttga

SEQ ID NO: 34773 - DNA, 50 bp, unidentified
  source 1..50: mol_type = unassigned DNA; note = donor_6fe18c5
  misc_feature 1..23: note = RE
  misc_feature 24..25: note = Core
  misc_feature 26..50: note = LE
gggattgacttttaatagttagtctcgtattataaaagagtagtatttat

SEQ ID NO: 34774 - DNA, 50 bp, unidentified
  source 1..50: mol_type = unassigned DNA; note = donor_6feebac
  misc_feature 1..24: note = RE
  misc_feature 25: note = Core
  misc_feature 26..50: note = LE
tgcaaaacggcggcggaccatacatactgggatggtccgccgcctaggcc

SEQ ID NO: 34775 - DNA, 50 bp, unidentified
  source 1..50: mol_type = unassigned DNA; note = donor_6ff5fc4
  misc_feature 1..23: note = RE
  misc_feature 24..25: note = Core
  misc_feature 26..50: note = LE
gtacaatacgaggagtccatataagatgtatggactcctccccctcgcgg

SEQ ID NO: 34776 - DNA, 50 bp, unidentified
  source 1..50: mol_type = unassigned DNA; note = donor_7007676
  misc_feature 1..23: note = RE
  misc_feature 24..25: note = Core
  misc_feature 26..50: note = LE
gacctcttagcaccatggggtgtctaatgggactcgaccggaaccctgga

SEQ ID NO: 34777 - DNA, 50 bp, unidentified; identical to SEQ ID NO: 30604
  source 1..50: mol_type = unassigned DNA; note = donor_7012020
  misc_feature 1..23: note = RE
  misc_feature 24..25: note = Core
  misc_feature 26..50: note = LE

SEQ ID NO: 34778 - DNA, 50 bp, unidentified
  source 1..50: mol_type = unassigned DNA; note = donor_7013da5
  misc_feature 1..23: note = RE
  misc_feature 24..25: note = Core
  misc_feature 26..50: note = LE
ggtcttgacatctcttggcaggtttgctacaatgtcaacaggccggataa

SEQ ID NO: 34779 - DNA, 50 bp, unidentified
  source 1..50: mol_type = unassigned DNA; note = donor_701b617
  misc_feature 1..24: note = RE
  misc_feature 25: note = Core
  misc_feature 26..50: note = LE
ctattgacatttattagctggacttagtataataatggtgtagtcaataa

SEQ ID NO: 34780 - DNA, 50 bp, unidentified
  source 1..50: mol_type = unassigned DNA; note = donor_702afc3
  misc_feature 1..22: note = RE
  misc_feature 23..25: note = Core
  misc_feature 26..50: note = LE
cttgacttttaacatagtttgtcttatattattattcgtaggtagctcct

SEQ ID NO: 34781 - DNA, 50 bp, unidentified
  source 1..50: mol_type = unassigned DNA; note = donor_70385d0
  misc_feature 1..21: note = RE
  misc_feature 22..25: note = Core
  misc_feature 26..50: note = LE
ggcttgattcggtcattgagactccgtaagatgtttcctggcccgggagg

SEQ ID NO: 34782 - DNA, 50 bp, unidentified
  source 1..50: mol_type = unassigned DNA; note = donor_7039632
  misc_feature 1..20: note = RE
  misc_feature 21..25: note = Core
  misc_feature 26..50: note = LE
cttgacgaaacccatagggacacccgttacctttttgatcgtccccagcc

SEQ ID NO: 34783 - DNA, 50 bp, unidentified
  source 1..50: mol_type = unassigned DNA; note = donor_7043e11
  misc_feature 1..23: note = RE
  misc_feature 24..25: note = Core
  misc_feature 26..50: note = LE
gtacaattggagcagtccatataagatgtatggactcctcccccttaacg

SEQ ID NO: 34784 - DNA, 50 bp, unidentified
  source 1..50: mol_type = unassigned DNA; note = donor_7043e9e
  misc_feature 1..23: note = RE
  misc_feature 24..25: note = Core
  misc_feature 26..50: note = LE
tctcttgacgggtaagacggtatcttgtatctttgtctctgtggtgatca

SEQ ID NO: 34785 - DNA, 50 bp, unidentified
  source 1..50: mol_type = unassigned DNA; note = donor_7046113
  misc_feature 1..23: note = RE
  misc_feature 24..25: note = Core
  misc_feature 26..50: note = LE
gacaagtttcgcccgtgggatgtctaatggggatcgaccgcctcgctgtg

SEQ ID NO: 34786 - DNA, 50 bp, unidentified
  source 1..50: mol_type = unassigned DNA; note = donor_704875d
  misc_feature 1..24: note = RE
  misc_feature 25: note = Core
  misc_feature 26..50: note = LE
ttgactacgtgggaagtccctgtagaataagaagggacttcccacttccg

SEQ ID NO: 34787 - DNA, 50 bp, unidentified
  source 1..50: mol_type = unassigned DNA; note = donor_70527cc
  misc_feature 1..23: note = RE
  misc_feature 24..25: note = Core
  misc_feature 26..50: note = LE
aaccggatggatcaagacggtatcttgtgtcttgcggctgatgactagct

SEQ ID NO: 34788 - DNA, 50 bp, unidentified
  source 1..50: mol_type = unassigned DNA; note = donor_7057e54
  misc_feature 1..23: note = RE
  misc_feature 24..25: note = Core
  misc_feature 26..50: note = LE
caatcacgagatgttttcatagtaactatcacgctttgcggcgccactgt

SEQ ID NO: 34789 - DNA, 50 bp, unidentified
  source 1..50: mol_type = unassigned DNA; note = donor_705b3b9
  misc_feature 1..23: note = RE
  misc_feature 24..25: note = Core
  misc_feature 26..50: note = LE
agacttgacatctaatagttagtcttgtattatagagtagtagtttttag

SEQ ID NO: 34790 - DNA, 50 bp, unidentified
  source 1..50: mol_type = unassigned DNA; note = donor_705d5df
  misc_feature 1..23: note = RE
  misc_feature 24..25: note = Core
  misc_feature 26..50: note = LE
aaaccgcttgatcacaacggatacttgtcttatgacttttgccgtcgccc

SEQ ID NO: 34791 - DNA, 50 bp, unidentified
  source 1..50: mol_type = unassigned DNA; note = donor_706216d
  misc_feature 1..23: note = RE
  misc_feature 24..25: note = Core
  misc_feature 26..50: note = LE
tacttgacggaggagtccagatacgatggaatggactcctcctgccgtgc

SEQ ID NO: 34792 - DNA, 50 bp, unidentified
  source 1..50: mol_type = unassigned DNA; note = donor_7070905
  misc_feature 1..23: note = RE
  misc_feature 24..25: note = Core
  misc_feature 26..50: note = LE
caaaaaatggggtgaccatagatttaatgagatggtcacccccacaccct

SEQ ID NO: 34793 - DNA, 50 bp, unidentified
  source 1..50: mol_type = unassigned DNA; note = donor_7073cb4
  misc_feature 1..23: note = RE
  misc_feature 24..25: note = Core
  misc_feature 26..50: note = LE
gccacgcggaggtcgtccatacatgatgaggtggacgacctccgctcccg

SEQ ID NO: 34794 - DNA, 50 bp, unidentified
  source 1..50: mol_type = unassigned DNA; note = donor_707c465
  misc_feature 1..24: note = RE
  misc_feature 25: note = Core
  misc_feature 26..50: note = LE
aaaatataagttatttttcactctttttaccattcctttcgcttcgctca

SEQ ID NO: 34795 - DNA, 50 bp, unidentified
  source 1..50: mol_type = unassigned DNA; note = donor_707fc7e
  misc_feature 1..23: note = RE
  misc_feature 24..25: note = Core
  misc_feature 26..50: note = LE
tgacgcgtaagcgcatgggatgtctaatgagaactaccgggtcggcttcg

SEQ ID NO: 34796 - DNA, 50 bp, unidentified
  source 1..50: mol_type = unassigned DNA; note = donor_7080f4a
  misc_feature 1..21: note = RE
  misc_feature 22..25: note = Core
  misc_feature 26..50: note = LE
tacttgacttttgttagcaggttttagtaccataaaagtgtagttgttag

SEQ ID NO: 34797 - DNA, 50 bp, unidentified; identical to SEQ ID NO: 30514
  source 1..50: mol_type = unassigned DNA; note = donor_7082a06
  misc_feature 1..23: note = RE
  misc_feature 24..25: note = Core
  misc_feature 26..50: note = LE

SEQ ID NO: 34798 - DNA, 50 bp, unidentified
  source 1..50: mol_type = unassigned DNA; note = donor_708d3f6
  misc_feature 1..23: note = RE
  misc_feature 24..25: note = Core
  misc_feature 26..50: note = LE
gcattcatgggggcgtccacacacgatggggtggacgcccccggcggcat

SEQ ID NO: 34799 - DNA, 50 bp, unidentified
  source 1..50: mol_type = unassigned DNA; note = donor_70956b0
  misc_feature 1..23: note = RE
  misc_feature 24..25: note = Core
  misc_feature 26..50: note = LE
cagcccccacaatctaatagttgcttgtattagcgcgagatgataagctg

SEQ ID NO: 34800 - DNA, 50 bp, unidentified
  source 1..50: mol_type = unassigned DNA; note = donor_7096a0e
  misc_feature 1..22: note = RE
  misc_feature 23..25: note = Core
  misc_feature 26..50: note = LE
ggttgacgaaactataggaacacccattacagtttgagtcgcagttaatc

SEQ ID NO: 34801 - DNA, 50 bp, unidentified
  source 1..50: mol_type = unassigned DNA; note = donor_70a0a48
  misc_feature 1..23: note = RE
  misc_feature 24..25: note = Core
  misc_feature 26..50: note = LE
caatcagggagccatccacacaggatggtgtggatggctcccgctcccgg

SEQ ID NO: 34802 - DNA, 50 bp, unidentified
  source 1..50: mol_type = unassigned DNA; note = donor_70a1396
  misc_feature 1..24: note = RE
  misc_feature 25: note = Core
  misc_feature 26..50: note = LE
cttgcaaacagggcgggccatacgtatgggatggcccgcccttccgagaa

SEQ ID NO: 34803 - DNA, 50 bp, unidentified
  source 1..50: mol_type = unassigned DNA; note = donor_70a951d
  misc_feature 1..23: note = RE
  misc_feature 24..25: note = Core
  misc_feature 26..50: note = LE
aaacttgacggcaaacagagtatcttgtatgtttaacttcgatgaattgg

SEQ ID NO: 34804 - DNA, 50 bp, unidentified
  source 1..50: mol_type = unassigned DNA; note = donor_70b5582
  misc_feature 1..23: note = RE
  misc_feature 24..25: note = Core
  misc_feature 26..50: note = LE
ggtattgacttttaatagttggtctcgtattatatagtagtagtgtttta

SEQ ID NO: 34805 - DNA, 50 bp, unidentified
  source 1..50: mol_type = unassigned DNA; note = donor_70b6d8c
  misc_feature 1..22: note = RE
  misc_feature 23..25: note = Core
  misc_feature 26..50: note = LE
catcccgggcggcaaccacagaagatggggtggttgccgccctccccaga

SEQ ID NO: 34806 - DNA, 50 bp, unidentified; identical to SEQ ID NO: 30970
  source 1..50: mol_type = unassigned DNA; note = donor_70bbf27
  misc_feature 1..24: note = RE
  misc_feature 25: note = Core
  misc_feature 26..50: note = LE

SEQ ID NO: 34807 - DNA, 50 bp, unidentified
  source 1..50: mol_type = unassigned DNA; note = donor_70c0ddd
  misc_feature 1..22: note = RE
  misc_feature 23..25: note = Core
  misc_feature 26..50: note = LE
aaatttggaaagtaacacagaatctcctatgtttgatgtattatttaaat

SEQ ID NO: 34808 - DNA, 50 bp, unidentified
  source 1..50: mol_type = unassigned DNA; note = donor_70c1701
  misc_feature 1..23: note = RE
  misc_feature 24..25: note = Core
  misc_feature 26..50: note = LE
tgcaaaacggggcgtaccatacattaatcagatggtacgccccacaccta

SEQ ID NO: 34809 - DNA, 50 bp, unidentified
  source 1..50: mol_type = unassigned DNA; note = donor_70d066f
  misc_feature 1..23: note = RE
  misc_feature 24..25: note = Core
  misc_feature 26..50: note = LE
gcacaaccgggggcgtccatatatgatgtgatggacgccccctttttcag

SEQ ID NO: 34810 - DNA, 50 bp, unidentified
  source 1..50: mol_type = unassigned DNA; note = donor_70d67b2
  misc_feature 1..23: note = RE
  misc_feature 24..25: note = Core
  misc_feature 26..50: note = LE
agaaaatcgtattaaactgagggagcattcctgtagatcgctatttttca

SEQ ID NO: 34811 - DNA, 50 bp, unidentified
  source 1..50: mol_type = unassigned DNA; note = donor_70d9ed7
  misc_feature 1..24: note = RE
  misc_feature 25: note = Core
  misc_feature 26..50: note = LE
tgacaaactaggggcgtccatctataatgggatggacgcccccttcctgc

SEQ ID NO: 34812 - DNA, 50 bp, unidentified
  source 1..50: mol_type = unassigned DNA; note = donor_70e1d9f
  misc_feature 1..23: note = RE
  misc_feature 24..25: note = Core
  misc_feature 26..50: note = LE
tgacaccaaagaacatgggatgtctaatgggttttgtcagcctgctgcgg

SEQ ID NO: 34813 - DNA, 50 bp, unidentified
  source 1..50: mol_type = unassigned DNA; note = donor_70e8a99
  misc_feature 1..23: note = RE
  misc_feature 24..25: note = Core
  misc_feature 26..50: note = LE
tgcaaacggggatgcgttcatacagaatgagatgaacgcatcccccaaca

SEQ ID NO: 34814 - DNA, 50 bp, unidentified
  source 1..50: mol_type = unassigned DNA; note = donor_70f05e8
  misc_feature 1..23: note = RE
  misc_feature 24..25: note = Core
  misc_feature 26..50: note = LE
tgacatctaagctcctgggatgtctaatgagtgttagcgagtcggccatc

SEQ ID NO: 34815 - DNA, 50 bp, unidentified
  source 1..50: mol_type = unassigned DNA; note = donor_70f090c
  misc_feature 1..23: note = RE
  misc_feature 24..25: note = Core
  misc_feature 26..50: note = LE
cttgaccaaaaccatagaggcacccgttacctttttcgtagcccgtttct

SEQ ID NO: 34816 - DNA, 50 bp, unidentified
  source 1..50: mol_type = unassigned DNA; note = donor_70f53b7
  misc_feature 1..23: note = RE
  misc_feature 24..25: note = Core
  misc_feature 26..50: note = LE
gcttgacaaattcatagggacacccgttacctttttcgtggctcctgatc

SEQ ID NO: 34817 - DNA, 50 bp, unidentified
  source 1..50: mol_type = unassigned DNA; note = donor_70f94b9
  misc_feature 1..23: note = RE
  misc_feature 24..25: note = Core
  misc_feature 26..50: note = LE
cctattgacttttgttagcaggactcctacaatataaattacggtacagg

SEQ ID NO: 34818 - DNA, 50 bp, unidentified
  source 1..50: mol_type = unassigned DNA; note = donor_70fba03
  misc_feature 1..22: note = RE
  misc_feature 23..25: note = Core
  misc_feature 26..50: note = LE
gccaaacaggaggcgtccatataaatggtatggacgcctccgccgcagca

SEQ ID NO: 34819 - DNA, 50 bp, unidentified
  source 1..50: mol_type = unassigned DNA; note = donor_7103cb0
  misc_feature 1..15: note = RE
  misc_feature 16..25: note = Core
  misc_feature 26..50: note = LE
ggatatatacacagttcattgcgagtgattttagtcgtcatcgtaagttt

SEQ ID NO: 34820 - DNA, 50 bp, unidentified
  source 1..50: mol_type = unassigned DNA; note = donor_7106135
  misc_feature 1..23: note = RE
  misc_feature 24..25: note = Core
  misc_feature 26..50: note = LE
ggcggtctacttcagcacagttgcttgtgtccagagattctgccagaatg

SEQ ID NO: 34821 - DNA, 50 bp, unidentified
  source 1..50: mol_type = unassigned DNA; note = donor_710f947
  misc_feature 1..22: note = RE
  misc_feature 23..25: note = Core
  misc_feature 26..50: note = LE
tacttgacttcacaccattggactcgtataataagatttgcaggtaattt

SEQ ID NO: 34822 - DNA, 50 bp, unidentified
  source 1..50: mol_type = unassigned DNA; note = donor_7117dc2
  misc_feature 1..24: note = RE
  misc_feature 25: note = Core
  misc_feature 26..50: note = LE
ttgacggacggggaagcccttgtagaatgaaagggacttccccgtcccga

SEQ ID NO: 34823 - DNA, 50 bp, unidentified
  source 1..50: mol_type = unassigned DNA; note = donor_711b6f2
  misc_feature 1..23: note = RE
  misc_feature 24..25: note = Core
  misc_feature 26..50: note = LE
gacccaaaccggccgattagagaagatggggtaatcggccgggcgttgtt

SEQ ID NO: 34824 - DNA, 50 bp, unidentified
  source 1..50: mol_type = unassigned DNA; note = donor_711f43d
  misc_feature 1..22: note = RE
  misc_feature 23..25: note = Core
  misc_feature 26..50: note = LE
aatgttgacaaactattagctggttcgtaatataaggttaaccagatttt

SEQ ID NO: 34825 - DNA, 50 bp, unidentified
  source 1..50: mol_type = unassigned DNA; note = donor_7126ded
  misc_feature 1..23: note = RE
  misc_feature 24..25: note = Core
  misc_feature 26..50: note = LE
gcaaacccaggggcgaccatgtaagtaatgggatggtcgccccttcccga

SEQ ID NO: 34826 - DNA, 50 bp, unidentified
  source 1..50: mol_type = unassigned DNA; note = donor_71302bd
  misc_feature 1..23: note = RE
  misc_feature 24..25: note = Core
  misc_feature 26..50: note = LE
gacaagttaggcactaggggtgtctaatgggactggaaggtctgtctcga

SEQ ID NO: 34827 - DNA, 50 bp, unidentified
  source 1..50: mol_type = unassigned DNA; note = donor_7130489
  misc_feature 1..23: note = RE
  misc_feature 24..25: note = Core
  misc_feature 26..50: note = LE
agccagaggttgacaaagggtgtctgatggctctaccctcctgagtcatg

SEQ ID NO: 34828 - DNA, 50 bp, unidentified
  source 1..50: mol_type = unassigned DNA; note = donor_71342bb
  misc_feature 1..24: note = RE
  misc_feature 25: note = Core
  misc_feature 26..50: note = LE
ttgcattgaggaggagtccatatacaatggtatggactcctcctcccctc

SEQ ID NO: 34829 - DNA, 50 bp, unidentified
  source 1..50: mol_type = unassigned DNA; note = donor_7138fb5
  misc_feature 1..23: note = RE
  misc_feature 24..25: note = Core
  misc_feature 26..50: note = LE
accgcccttgcacataacggaaacttgtcttatgacttttgcgcttgctg

SEQ ID NO: 34830 - DNA, 50 bp, unidentified
  source 1..50: mol_type = unassigned DNA; note = donor_713ae99
  misc_feature 1..23: note = RE
  misc_feature 24..25: note = Core
  misc_feature 26..50: note = LE
atgcttgacgtgcaagagagaatcttgtatcttgcgaactgaggcgtaac

SEQ ID NO: 34831 - DNA, 50 bp, unidentified
  source 1..50: mol_type = unassigned DNA; note = donor_713bbac
  misc_feature 1..23: note = RE
  misc_feature 24..25: note = Core
  misc_feature 26..50: note = LE
gcgttaccaggggcgtctacacatgatggggtagacgccccccaacggcc

SEQ ID NO: 34832 - DNA, 50 bp, unidentified
  source 1..50: mol_type = unassigned DNA; note = donor_713c393
  misc_feature 1..21: note = RE
  misc_feature 22..25: note = Core
  misc_feature 26..50: note = LE
atattgacttctaatagttagtcacgtataatcaatcttatagaaatatt

SEQ ID NO: 34833 - DNA, 50 bp, unidentified
  source 1..50: mol_type = unassigned DNA; note = donor_7143580
  misc_feature 1..22: note = RE
  misc_feature 23..25: note = Core
  misc_feature 26..50: note = LE
gacttttacaaccgtgggatgtctaatagggttggaacaaggtccgttca

SEQ ID NO: 34834 - DNA, 50 bp, unidentified
  source 1..50: mol_type = unassigned DNA; note = donor_7148b97
  misc_feature 1..21: note = RE
  misc_feature 22..25: note = Core
  misc_feature 26..50: note = LE
ccgagagggggccgtccatacatgatggggtggacggcccccgacggcat

SEQ ID NO: 34835 - DNA, 50 bp, unidentified
  source 1..50: mol_type = unassigned DNA; note = donor_716b11c
  misc_feature 1..23: note = RE
  misc_feature 24..25: note = Core
  misc_feature 26..50: note = LE
gggccctcgccgtttaatggttgcttgtaatagcgcgatcagatattgtt

SEQ ID NO: 34836 - DNA, 50 bp, unidentified; identical to SEQ ID NO: 31272
  source 1..50: mol_type = unassigned DNA; note = donor_716bacf
  misc_feature 1..24: note = RE
  misc_feature 25: note = Core
  misc_feature 26..50: note = LE

SEQ ID NO: 34837 - DNA, 50 bp, unidentified
  source 1..50: mol_type = unassigned DNA; note = donor_716cd09
  misc_feature 1..22: note = RE
  misc_feature 23..25: note = Core
  misc_feature 26..50: note = LE
ccaacccggagccgtccacacatgatgctgtggacggctcctccaccggc

SEQ ID NO: 34838 - DNA, 50 bp, unidentified
  source 1..50: mol_type = unassigned DNA; note = donor_717a9cf
  misc_feature 1..24: note = RE
  misc_feature 25: note = Core
  misc_feature 26..50: note = LE
ttgacagtagggggagtccatgtagaatgagatggactcctcctaatcta

SEQ ID NO: 34839 - DNA, 50 bp, unidentified
  source 1..50: mol_type = unassigned DNA; note = donor_717b27e
  misc_feature 1..23: note = RE
  misc_feature 24..25: note = Core
  misc_feature 26..50: note = LE
tcacttgacatcacaccgctggactcgtataatatcttttagatacataa

SEQ ID NO: 34840 - DNA, 50 bp, unidentified
  source 1..50: mol_type = unassigned DNA; note = donor_717e67e
  misc_feature 1..23: note = RE
  misc_feature 24..25: note = Core
  misc_feature 26..50: note = LE
gaccgacaggggcccgtgacagaagatggggtcacgggccagcaaccgac

SEQ ID NO: 34841 - DNA, 50 bp, unidentified
  source 1..50: mol_type = unassigned DNA; note = donor_7184fb4
  misc_feature 1..23: note = RE
  misc_feature 24..25: note = Core
  misc_feature 26..50: note = LE
tgccttgacatctaatagctagtcacgtataatccaattacctcattttg

SEQ ID NO: 34842 - DNA, 50 bp, unidentified
  source 1..50: mol_type = unassigned DNA; note = donor_71865a0
  misc_feature 1..22: note = RE
  misc_feature 23..25: note = Core
  misc_feature 26..50: note = LE
tccttgacattcaagacggttgcttgtatcttggttttggtcgttcacaa

SEQ ID NO: 34843 - DNA, 50 bp, unidentified
  source 1..50: mol_type = unassigned DNA; note = donor_7189b12
  misc_feature 1..21: note = RE
  misc_feature 22..25: note = Core
  misc_feature 26..50: note = LE
ttatttggaaatgaacacagatcatcctatgtttgcagatatataattaa

SEQ ID NO: 34844 - DNA, 50 bp, unidentified
  source 1..50: mol_type = unassigned DNA; note = donor_718ccbe
  misc_feature 1..23: note = RE
  misc_feature 24..25: note = Core
  misc_feature 26..50: note = LE
ataatttggtaacgtcatagaaatcctttagattagcagaggataaaagt

SEQ ID NO: 34845 - DNA, 50 bp, unidentified
  source 1..50: mol_type = unassigned DNA; note = donor_71910ba
  misc_feature 1..23: note = RE
  misc_feature 24..25: note = Core
  misc_feature 26..50: note = LE
ttacttgttttttaatacagttcgtcgtacatttgccataagttaaacaa

SEQ ID NO: 34846 - DNA, 50 bp, unidentified
  source 1..50: mol_type = unassigned DNA; note = donor_7195ae1
  misc_feature 1..22: note = RE
  misc_feature 23..25: note = Core
  misc_feature 26..50: note = LE
tgccataggcggcgtccacatatgatgatgtggacgccgccgacctcgca

SEQ ID NO: 34847 - DNA, 50 bp, unidentified
  source 1..50: mol_type = unassigned DNA; note = donor_7198600
  misc_feature 1..22: note = RE
  misc_feature 23..25: note = Core
  misc_feature 26..50: note = LE
catcccatggggcgtccacagatgatggggtggacgccccccgacggcct

SEQ ID NO: 34848 - DNA, 50 bp, unidentified; identical to SEQ ID NO: 32771
  source 1..50: mol_type = unassigned DNA; note = donor_71a9e2b
  misc_feature 1..23: note = RE
  misc_feature 24..25: note = Core
  misc_feature 26..50: note = LE

SEQ ID NO: 34849 - DNA, 50 bp, unidentified
  source 1..50: mol_type = unassigned DNA; note = donor_71b036a
  misc_feature 1..24: note = RE
  misc_feature 25: note = Core
  misc_feature 26..50: note = LE
ttgcaaaacggggcgtaccatacataattagatggtacgcccctccattc

SEQ ID NO: 34850 - DNA, 50 bp, unidentified
  source 1..50: mol_type = unassigned DNA; note = donor_71b3644
  misc_feature 1..23: note = RE
  misc_feature 24..25: note = Core
  misc_feature 26..50: note = LE
acgggtgggggcgagtccatacataattggatggactcgcccctcgccga

SEQ ID NO: 34851 - DNA, 50 bp, unidentified
  source 1..50: mol_type = unassigned DNA; note = donor_71bece9
  misc_feature 1..23: note = RE
  misc_feature 24..25: note = Core
  misc_feature 26..50: note = LE
ctaggcgggagccagccacacaggatggggtggatggctcccgtccccgg

SEQ ID NO: 34852 - DNA, 50 bp, unidentified
  source 1..50: mol_type = unassigned DNA; note = donor_71bf443
  misc_feature 1..23: note = RE
  misc_feature 24..25: note = Core
  misc_feature 26..50: note = LE
gggcttccccaaaaccatagaatcttgtatggttagacttgtaggggtgg

SEQ ID NO: 34853 - DNA, 50 bp, unidentified
  source 1..50: mol_type = unassigned DNA; note = donor_71c5ca8
  misc_feature 1..24: note = RE
  misc_feature 25: note = Core
  misc_feature 26..50: note = LE
ttgcaatcgggcggggttcatatacaatggtatggaccccgccctcgcgg

SEQ ID NO: 34854 - DNA, 50 bp, unidentified
  source 1..50: mol_type = unassigned DNA; note = donor_71c8591
  misc_feature 1..23: note = RE
  misc_feature 24..25: note = Core
  misc_feature 26..50: note = LE
ctacttgacttcatatagttagtcttgtataatgaacacatagtaattag

SEQ ID NO: 34855 - DNA, 50 bp, unidentified
  source 1..50: mol_type = unassigned DNA; note = donor_71cb72b
  misc_feature 1..23: note = RE
  misc_feature 24..25: note = Core
  misc_feature 26..50: note = LE
tggcttgctgaaaaccatagaatcttgtatggtaggacttgaaggggtgg

SEQ ID NO: 34856 - DNA, 50 bp, unidentified
  source 1..50: mol_type = unassigned DNA; note = donor_71cfc57
  misc_feature 1..22: note = RE
  misc_feature 23..25: note = Core
  misc_feature 26..50: note = LE
aaacttgtatttatcttagaatgctattagtttagctttctatctttaaa

SEQ ID NO: 34857 - DNA, 50 bp, unidentified
  source 1..50: mol_type = unassigned DNA; note = donor_71d709a
  misc_feature 1..23: note = RE
  misc_feature 24..25: note = Core
  misc_feature 26..50: note = LE
ttggcaaaagtgggcgtccatgtataatggaatggacgcccactacccta

SEQ ID NO: 34858 - DNA, 50 bp, unidentified; identical to SEQ ID NO: 30950
  source 1..50: mol_type = unassigned DNA; note = donor_71f30f7
  misc_feature 1..24: note = RE
  misc_feature 25: note = Core
  misc_feature 26..50: note = LE

SEQ ID NO: 34859 - DNA, 50 bp, unidentified
  source 1..50: mol_type = unassigned DNA; note = donor_71f3d6b
  misc_feature 1..24: note = RE
  misc_feature 25: note = Core
  misc_feature 26..50: note = LE
tcacttgttttttaccacagttcttcttaagtttgtaatagttttaaatt

SEQ ID NO: 34860 - DNA, 50 bp, unidentified
  source 1..50: mol_type = unassigned DNA; note = donor_71f5f78
  misc_feature 1..23: note = RE
  misc_feature 24..25: note = Core
  misc_feature 26..50: note = LE
caatacgggagccatccacagaggatgaggtggatggctcccgctcccgg

SEQ ID NO: 34861 - DNA, 50 bp, unidentified
  source 1..50: mol_type = unassigned DNA; note = donor_7202f46
  misc_feature 1..24: note = RE
  misc_feature 25: note = Core
  misc_feature 26..50: note = LE
tggcaaacgggaggcgtccatataatggaatggacgcctccccccgtaag

SEQ ID NO: 34862 - DNA, 50 bp, unidentified
  source 1..50: mol_type = unassigned DNA; note = donor_7206de5
  misc_feature 1..23: note = RE
  misc_feature 24..25: note = Core
  misc_feature 26..50: note = LE
gcattttgatctgcgattagacgacatggggtaatcgcgggagcgattcg

SEQ ID NO: 34863 - DNA, 50 bp, unidentified
  source 1..50: mol_type = unassigned DNA; note = donor_7216473
  misc_feature 1..23: note = RE
  misc_feature 24..25: note = Core
  misc_feature 26..50: note = LE
ggggttgcctcgcaacatagaatcttgtatgttcgcccgcggcaggtcta

SEQ ID NO: 34864 - DNA, 50 bp, unidentified
  source 1..50: mol_type = unassigned DNA; note = donor_7217c38
  misc_feature 1..24: note = RE
  misc_feature 25: note = Core
  misc_feature 26..50: note = LE
ccgtgccttgacacagaggggtgcctactaagagacttccctcaggatcg

SEQ ID NO: 34865 - DNA, 50 bp, unidentified
  source 1..50: mol_type = unassigned DNA; note = donor_72209e1
  misc_feature 1..24: note = RE
  misc_feature 25: note = Core
  misc_feature 26..50: note = LE
acccctcttgacacagaggggagcctacttgttgacttgccttaggaccg

SEQ ID NO: 34866 - DNA, 50 bp, unidentified
  source 1..50: mol_type = unassigned DNA; note = donor_7224463
  misc_feature 1..23: note = RE
  misc_feature 24..25: note = Core
  misc_feature 26..50: note = LE
aagctggttgtgagagatggtatcttgtatctctcagtattaaatggtta

SEQ ID NO: 34867 - DNA, 50 bp, unidentified
  source 1..50: mol_type = unassigned DNA; note = donor_7229d32
  misc_feature 1..24: note = RE
  misc_feature 25: note = Core
  misc_feature 26..50: note = LE
tgcagtcctgcggcggaccatacataatgagatggtccgccgtttgattc

SEQ ID NO: 34868 - DNA, 50 bp, unidentified
  source 1..50: mol_type = unassigned DNA; note = donor_7233bbe
  misc_feature 1..21: note = RE
  misc_feature 22..25: note = Core
  misc_feature 26..50: note = LE
gcttgacaacttcattgagattccttacctttcttgaagggtggtcgttg

SEQ ID NO: 34869 - DNA, 50 bp, unidentified
  source 1..50: mol_type = unassigned DNA; note = donor_7238b3f
  misc_feature 1..23: note = RE
  misc_feature 24..25: note = Core
  misc_feature 26..50: note = LE
ggcgtgaggttgacagagggtgtctgatggcactaccttctttcttcatc

SEQ ID NO: 34870 - DNA, 50 bp, unidentified
  source 1..50: mol_type = unassigned DNA; note = donor_7241d12
  misc_feature 1..24: note = RE
  misc_feature 25: note = Core
  misc_feature 26..50: note = LE
ttggcaaaagtgggcgtccatgtataatggaatggacgcccactacccaa

SEQ ID NO: 34871 - DNA, 50 bp, unidentified; identical to SEQ ID NO: 30354
  source 1..50: mol_type = unassigned DNA; note = donor_724806a
  misc_feature 1..23: note = RE
  misc_feature 24..25: note = Core
  misc_feature 26..50: note = LE

SEQ ID NO: 34872 - DNA, 50 bp, unidentified
  source 1..50: mol_type = unassigned DNA; note = donor_724ea7d
  misc_feature 1..24: note = RE
  misc_feature 25: note = Core
  misc_feature 26..50: note = LE
aaacttggattataactcagttcttcttaagtttgatttctaataaaaca

SEQ ID NO: 34873 - DNA, 50 bp, unidentified
  source 1..50: mol_type = unassigned DNA; note = donor_7252828
  misc_feature 1..23: note = RE
  misc_feature 24..25: note = Core
  misc_feature 26..50: note = LE
gcgaggagggggccgtccacatatgttggtgtggacggcccctgacggca

SEQ ID NO: 34874 - DNA, 50 bp, unidentified
  source 1..50: mol_type = unassigned DNA; note = donor_72607c1
  misc_feature 1..23: note = RE
  misc_feature 24..25: note = Core
  misc_feature 26..50: note = LE
gtgcaataggaggagtccatataagatgtatggactcccccccattaacg

SEQ ID NO: 34875 - DNA, 50 bp, unidentified
  source 1..50: mol_type = unassigned DNA; note = donor_72652db
  misc_feature 1..21: note = RE
  misc_feature 22..25: note = Core
  misc_feature 26..50: note = LE
catccggcggggcgtccacagatgatggggtggacgccccgcccgacggc

SEQ ID NO: 34876 - DNA, 50 bp, unidentified
  source 1..50: mol_type = unassigned DNA; note = donor_72684df
  misc_feature 1..23: note = RE
  misc_feature 24..25: note = Core
  misc_feature 26..50: note = LE
gccaagcctgatcaacatggttgcttgtctgttggaaggctgttagcgtg

SEQ ID NO: 34877 - DNA, 50 bp, unidentified
  source 1..50: mol_type = unassigned DNA; note = donor_726a924
  misc_feature 1..23: note = RE
  misc_feature 24..25: note = Core
  misc_feature 26..50: note = LE
tgcatgagctaacaacacagttgcttgtatgtttcgaaagcagcatactg

SEQ ID NO: 34878 - DNA, 50 bp, unidentified
  source 1..50: mol_type = unassigned DNA; note = donor_726c463
  misc_feature 1..23: note = RE
  misc_feature 24..25: note = Core
  misc_feature 26..50: note = LE
cctcttgacttaataccattggactcgtataataagtttaaagttaataa

SEQ ID NO: 34879 - DNA, 50 bp, unidentified
  source 1..50: mol_type = unassigned DNA; note = donor_7293972
  misc_feature 1..24: note = RE
  misc_feature 25: note = Core
  misc_feature 26..50: note = LE
tctacttgtggggagcgtccatatatgctgtaatggacgctccccgcgcc

SEQ ID NO: 34880 - DNA, 50 bp, unidentified
  source 1..50: mol_type = unassigned DNA; note = donor_72972e0
  misc_feature 1..23: note = RE
  misc_feature 24..25: note = Core
  misc_feature 26..50: note = LE
aaaatttgttgtgtcttatggtactttgtattagaatatgggcaaaagaa

SEQ ID NO: 34881 - DNA, 50 bp, unidentified
  source 1..50: mol_type = unassigned DNA; note = donor_729bb49
  misc_feature 1..24: note = RE
  misc_feature 25: note = Core
  misc_feature 26..50: note = LE
tgcattcacgcggcggaccatacatactgagatggtccgccgctagaacc

SEQ ID NO: 34882 - DNA, 50 bp, unidentified
  source 1..50: mol_type = unassigned DNA; note = donor_729d451
  misc_feature 1..22: note = RE
  misc_feature 23..25: note = Core
  misc_feature 26..50: note = LE
catcgaggggaccgtccacacatgatggggtggacggcccctgagcggca

SEQ ID NO: 34883 - DNA, 50 bp, unidentified
  source 1..50: mol_type = unassigned DNA; note = donor_729fc02
  misc_feature 1..23: note = RE
  misc_feature 24..25: note = Core
  misc_feature 26..50: note = LE
tggttggtagtgagagatggtatcttgtatctctcatcgatagatggtta

SEQ ID NO: 34884 - DNA, 50 bp, unidentified
  source 1..50: mol_type = unassigned DNA; note = donor_72a56a5
  misc_feature 1..23: note = RE
  misc_feature 24..25: note = Core
  misc_feature 26..50: note = LE
ggccttgacttttaatagttagtctcgtattataaagtagtagtgtttat

SEQ ID NO: 34885 - DNA, 50 bp, unidentified
  source 1..50: mol_type = unassigned DNA; note = donor_72a7553
  misc_feature 1..23: note = RE
  misc_feature 24..25: note = Core
  misc_feature 26..50: note = LE
ggcttgacaaaccgcattaggaatccctacgttgttctgcgggacgcggt

SEQ ID NO: 34886 - DNA, 50 bp, unidentified
  source 1..50: mol_type = unassigned DNA; note = donor_72ae286
  misc_feature 1..24: note = RE
  misc_feature 25: note = Core
  misc_feature 26..50: note = LE
cttgactcagaacatagggacacccgttaccttgtgagggccccttgatc

SEQ ID NO: 34887 - DNA, 50 bp, unidentified
  source 1..50: mol_type = unassigned DNA; note = donor_72af692
  misc_feature 1..22: note = RE
  misc_feature 23..25: note = Core
  misc_feature 26..50: note = LE
gtgcttgactttttatttgcagactactacaatatatttgtggttaatac

SEQ ID NO: 34888 - DNA, 50 bp, unidentified
  source 1..50: mol_type = unassigned DNA; note = donor_72b8221
  misc_feature 1..23: note = RE
  misc_feature 24..25: note = Core
  misc_feature 26..50: note = LE
tgaggtggtgttcaagacagttgcttgtatcttaaagatcggttaaaata

SEQ ID NO: 34889 - DNA, 50 bp, unidentified
  source 1..50: mol_type = unassigned DNA; note = donor_72b8f29
  misc_feature 1..24: note = RE
  misc_feature 25: note = Core
  misc_feature 26..50: note = LE
tgcaaaaatagggctgaccatacataatgatatggtcagcccgccctccg

SEQ ID NO: 34890 - DNA, 50 bp, unidentified
  source 1..50: mol_type = unassigned DNA; note = donor_72ba9c9
  misc_feature 1..23: note = RE
  misc_feature 24..25: note = Core
  misc_feature 26..50: note = LE
cttgacaaatctcattccatatcagaccgtatggagtgcccggcgcctcg

SEQ ID NO: 34891 - DNA, 50 bp, unidentified; identical to SEQ ID NO: 31193
  source 1..50: mol_type = unassigned DNA; note = donor_72bec91
  misc_feature 1..22: note = RE
  misc_feature 23..25: note = Core
  misc_feature 26..50: note = LE

SEQ ID NO: 34892 - DNA, 50 bp, unidentified
  source 1..50: mol_type = unassigned DNA; note = donor_72cb42b
  misc_feature 1..24: note = RE
  misc_feature 25: note = Core
  misc_feature 26..50: note = LE
ccttgaccgcggggtcgttccacatgatggtgtggaacgaccccgctcct

SEQ ID NO: 34893 - DNA, 50 bp, unidentified
  source 1..50: mol_type = unassigned DNA; note = donor_72d086b
  misc_feature 1..24: note = RE
  misc_feature 25: note = Core
  misc_feature 26..50: note = LE
atgtacttgttttatctcggttcttcttaagttagcaattgtttaaattt

SEQ ID NO: 34894 - DNA, 50 bp, unidentified
  source 1..50: mol_type = unassigned DNA; note = donor_72da1de
  misc_feature 1..23: note = RE
  misc_feature 24..25: note = Core
  misc_feature 26..50: note = LE
tgacatccaacctccagggatgtctaatgggaagtgccggggttgccgtt

SEQ ID NO: 34895 - DNA, 50 bp, unidentified
  source 1..50: mol_type = unassigned DNA; note = donor_72f7853
  misc_feature 1..21: note = RE
  misc_feature 22..25: note = Core
  misc_feature 26..50: note = LE
gcttgactttttgtttgcagactcctacaataaagttaaggttctaggca

SEQ ID NO: 34896 - DNA, 50 bp, unidentified
  source 1..50: mol_type = unassigned DNA; note = donor_72f8640
  misc_feature 1..24: note = RE
  misc_feature 25: note = Core
  misc_feature 26..50: note = LE
accccttgacttccataggagcatcagtgaggatgtgtaggagcgggtca

SEQ ID NO: 34897 - DNA, 50 bp, unidentified
  source 1..50: mol_type = unassigned DNA; note = donor_72feabe
  misc_feature 1..23: note = RE
  misc_feature 24..25: note = Core
  misc_feature 26..50: note = LE
tcgcttgacgctaaagacggtatcttgtatctttatctccgtggtggtta

SEQ ID NO: 34898 - DNA, 50 bp, unidentified
  source 1..50: mol_type = unassigned DNA; note = donor_72ffc9b
  misc_feature 1..23: note = RE
  misc_feature 24..25: note = Core
  misc_feature 26..50: note = LE
gcagggaaattcatgatagttgactcctaccatgaattcgtatatagaaa

SEQ ID NO: 34899 - DNA, 50 bp, unidentified
  source 1..50: mol_type = unassigned DNA; note = donor_7304084
  misc_feature 1..23: note = RE
  misc_feature 24..25: note = Core
  misc_feature 26..50: note = LE
gacacaacggggaagtccttagagaatgtaagggacttccccgtcccgat

SEQ ID NO: 34900 - DNA, 50 bp, unidentified
  source 1..50: mol_type = unassigned DNA; note = donor_7304582
  misc_feature 1..24: note = RE
  misc_feature 25: note = Core
  misc_feature 26..50: note = LE
agcccttgacagccataggagcatcagggaggatgtggatagtgcttcct

SEQ ID NO: 34901 - DNA, 50 bp, unidentified
  source 1..50: mol_type = unassigned DNA; note = donor_7310e08
  misc_feature 1..23: note = RE
  misc_feature 24..25: note = Core
  misc_feature 26..50: note = LE
attgactttctttaatagttagtctactattagtattagtcatagtcttt

SEQ ID NO: 34902 - DNA, 50 bp, unidentified
  source 1..50: mol_type = unassigned DNA; note = donor_731277f
  misc_feature 1..24: note = RE
  misc_feature 25: note = Core
  misc_feature 26..50: note = LE
aatgttgacaactattagctggtttcgtaatataagttcaaccagttttt

SEQ ID NO: 34903 - DNA, 50 bp, unidentified; identical to SEQ ID NO: 32750
  source 1..50: mol_type = unassigned DNA; note = donor_73205a0
  misc_feature 1..23: note = RE
  misc_feature 24..25: note = Core
  misc_feature 26..50: note = LE

SEQ ID NO: 34904 - DNA, 50 bp, unidentified
  source 1..50: mol_type = unassigned DNA; note = donor_732e091
  misc_feature 1..24: note = RE
  misc_feature 25: note = Core
  misc_feature 26..50: note = LE
tacgcttgttttaatcatagaatacctttagatttgaaaaccaaatttaa

SEQ ID NO: 34905 - DNA, 50 bp, unidentified
  source 1..50: mol_type = unassigned DNA; note = donor_732f200
  misc_feature 1..23: note = RE
  misc_feature 24..25: note = Core
  misc_feature 26..50: note = LE
gcgcttgactttgaacacagttgcttgtatccttaaaacattgaagttca

SEQ ID NO: 34906 - DNA, 50 bp, unidentified
  source 1..50: mol_type = unassigned DNA; note = donor_7331a7b
  misc_feature 1..23: note = RE
  misc_feature 24..25: note = Core
  misc_feature 26..50: note = LE
aaaattgaaattcaagagagaatcttgtatcttgcttgcatctccccgat

SEQ ID NO: 34907 - DNA, 50 bp, unidentified; identical to SEQ ID NO: 34365
  source 1..50: mol_type = unassigned DNA; note = donor_7335199
  misc_feature 1..24: note = RE
  misc_feature 25: note = Core
  misc_feature 26..50: note = LE

SEQ ID NO: 34908 - DNA, 50 bp, unidentified
  source 1..50: mol_type = unassigned DNA; note = donor_7337fee
  misc_feature 1..22: note = RE
  misc_feature 23..25: note = Core
  misc_feature 26..50: note = LE
aaaaaattgtctaagacagttgcttgtatcttaaaagtaggttaaaataa

SEQ ID NO: 34909 - DNA, 50 bp, unidentified
  source 1..50: mol_type = unassigned DNA; note = donor_733f1e6
  misc_feature 1..23: note = RE
  misc_feature 24..25: note = Core
  misc_feature 26..50: note = LE
ttatacttgacttttcatagctggtatgatgtttatggaagcgaaaacac

SEQ ID NO: 34910 - DNA, 50 bp, unidentified
  source 1..50: mol_type = unassigned DNA; note = donor_7356aba
  misc_feature 1..23: note = RE
  misc_feature 24..25: note = Core
  misc_feature 26..50: note = LE
taagattgacttttcatagttggtcataatatccttgtatgatgttttca

SEQ ID NO: 34911 - DNA, 50 bp, unidentified
  source 1..50: mol_type = unassigned DNA; note = donor_7357500
  misc_feature 1..23: note = RE
  misc_feature 24..25: note = Core
  misc_feature 26..50: note = LE
cttcaaggttttcaagatggttgcttatatctttcgattggttcaaactt

SEQ ID NO: 34912 - DNA, 50 bp, unidentified
  source 1..50: mol_type = unassigned DNA; note = donor_7357d32
  misc_feature 1..22: note = RE
  misc_feature 23..25: note = Core
  misc_feature 26..50: note = LE
ccaaaagggagccgtccacacatgatgcggtggacggctcccgcccgacg

SEQ ID NO: 34913 - DNA, 50 bp, unidentified; identical to SEQ ID NO: 31445
  source 1..50: mol_type = unassigned DNA; note = donor_7359fc9
  misc_feature 1..23: note = RE
  misc_feature 24..25: note = Core
  misc_feature 26..50: note = LE

SEQ ID NO: 34914 - DNA, 50 bp, unidentified
  source 1..50: mol_type = unassigned DNA; note = donor_7360296
  misc_feature 1..23: note = RE
  misc_feature 24..25: note = Core
  misc_feature 26..50: note = LE
taccttgacttttcatagctggtcttgtatgattaattagaagctaaatc

SEQ ID NO: 34915 - DNA, 50 bp, unidentified
  source 1..50: mol_type = unassigned DNA; note = donor_7362463
  misc_feature 1..23: note = RE
  misc_feature 24..25: note = Core
  misc_feature 26..50: note = LE
gcacttgactttgaagacggttacttgtatcttcaattcagatcggagcg

SEQ ID NO: 34916 - DNA, 50 bp, unidentified
  source 1..50: mol_type = unassigned DNA; note = donor_7363ac2
  misc_feature 1..23: note = RE
  misc_feature 24..25: note = Core
  misc_feature 26..50: note = LE
ttacttgatttatatatagttagctggtatattataattgacttatcttt

SEQ ID NO: 34917 - DNA, 50 bp, unidentified
  source 1..50: mol_type = unassigned DNA; note = donor_7371882
  misc_feature 1..23: note = RE
  misc_feature 24..25: note = Core
  misc_feature 26..50: note = LE
gacttcttccagccgtgggatgtctaatagggccagacgctccccgatga

SEQ ID NO: 34918 - DNA, 50 bp, unidentified
  source 1..50: mol_type = unassigned DNA; note = donor_7374758
  misc_feature 1..23: note = RE
  misc_feature 24..25: note = Core
  misc_feature 26..50: note = LE
attgtttggcagtgtcatagaaatcctttagatttgtatttataaaaata

SEQ ID NO: 34919 - DNA, 50 bp, unidentified
  source 1..50: mol_type = unassigned DNA; note = donor_7375d05
  misc_feature 1..23: note = RE
  misc_feature 24..25: note = Core
  misc_feature 26..50: note = LE
gcattaaacggggcgtccacacacgatggggtggacgccccccggcggca

SEQ ID NO: 34920 - DNA, 50 bp, unidentified
  source 1..50: mol_type = unassigned DNA; note = donor_7377086
  misc_feature 1..24: note = RE
  misc_feature 25: note = Core
  misc_feature 26..50: note = LE
tgcaatagtggggcagaccatacataatgggatggcccgccccgcgcccc

SEQ ID NO: 34921 - DNA, 50 bp, unidentified
  source 1..50: mol_type = unassigned DNA; note = donor_737732d
  misc_feature 1..22: note = RE
  misc_feature 23..25: note = Core
  misc_feature 26..50: note = LE
attgacaactcttatagtttgtcttatattatatttagtgcagttagcta

SEQ ID NO: 34922 - DNA, 50 bp, unidentified
  source 1..50: mol_type = unassigned DNA; note = donor_737f839
  misc_feature 1..23: note = RE
  misc_feature 24..25: note = Core
  misc_feature 26..50: note = LE
cagcttgtgggacaacatagaatcttgtatgttgtaggggcaagtcggta

SEQ ID NO: 34923 - DNA, 50 bp, unidentified
  source 1..50: mol_type = unassigned DNA; note = donor_7384b98
  misc_feature 1..21: note = RE
  misc_feature 22..25: note = Core
  misc_feature 26..50: note = LE
cttgacaaccccatagggacaccccgttaccttcttcgtagctcctgatc

SEQ ID NO: 34924 - DNA, 50 bp, unidentified
  source 1..50: mol_type = unassigned DNA; note = donor_7386dbf
  misc_feature 1..24: note = RE
  misc_feature 25: note = Core
  misc_feature 26..50: note = LE
cggcgtcttgacatagaggggtgcctacgtgtctcattgacggcaggatc

SEQ ID NO: 34925 - DNA, 50 bp, unidentified
  source 1..50: mol_type = unassigned DNA; note = donor_7388778
  misc_feature 1..23: note = RE
  misc_feature 24..25: note = Core
  misc_feature 26..50: note = LE
cttgccaaaaggccgtccacatatgatgatgtggacggcctctcacccca

SEQ ID NO: 34926 - DNA, 50 bp, unidentified
  source 1..50: mol_type = unassigned DNA; note = donor_7388ef9
  misc_feature 1..23: note = RE
  misc_feature 24..25: note = Core
  misc_feature 26..50: note = LE
gcaatcaggggggcgtccatagatgatggtatggacgcccctcacggctt

SEQ ID NO: 34927 - DNA, 50 bp, unidentified; identical to SEQ ID NO: 31864
  source 1..50: mol_type = unassigned DNA; note = donor_7390de4
  misc_feature 1..24: note = RE
  misc_feature 25: note = Core
  misc_feature 26..50: note = LE

SEQ ID NO: 34928 - DNA, 50 bp, unidentified
  source 1..50: mol_type = unassigned DNA; note = donor_73934a5
  misc_feature 1..21: note = RE
  misc_feature 22..25: note = Core
  misc_feature 26..50: note = LE
tacttgactttttatagttggtcacgtataatctaattatgtgatttttg

SEQ ID NO: 34929 - DNA, 50 bp, unidentified; identical to SEQ ID NO: 30746
  source 1..50: mol_type = unassigned DNA; note = donor_7393610
  misc_feature 1..22: note = RE
  misc_feature 23..25: note = Core
  misc_feature 26..50: note = LE

SEQ ID NO: 34930 - DNA, 50 bp, unidentified
  source 1..50: mol_type = unassigned DNA; note = donor_73a85ea
  misc_feature 1..23: note = RE
  misc_feature 24..25: note = Core
  misc_feature 26..50: note = LE
agtcttgactttttatttgcaggctactacaataaagatatggttaatca

SEQ ID NO: 34931 - DNA, 50 bp, unidentified
  source 1..50: mol_type = unassigned DNA; note = donor_73aa53d
  misc_feature 1..23: note = RE
  misc_feature 24..25: note = Core
  misc_feature 26..50: note = LE
cggcttgacaacatcattgagattccttacctttcttctcgggtgctgta

SEQ ID NO: 34932 - DNA, 50 bp, unidentified
  source 1..50: mol_type = unassigned DNA; note = donor_73ab88e
  misc_feature 1..23: note = RE
  misc_feature 24..25: note = Core
  misc_feature 26..50: note = LE
gacagtgggggcgagtccatacataattacatggactcgcccacgccgag

SEQ ID NO: 34933 - DNA, 50 bp, unidentified
  source 1..50: mol_type = unassigned DNA; note = donor_73b05d3
  misc_feature 1..23: note = RE
  misc_feature 24..25: note = Core
  misc_feature 26..50: note = LE
aggcttgacttttcatagctggtcttgtatgattattaggaagctaataa

SEQ ID NO: 34934 - DNA, 50 bp, unidentified
  source 1..50: mol_type = unassigned DNA; note = donor_73b0e7a
  misc_feature 1..24: note = RE
  misc_feature 25: note = Core
  misc_feature 26..50: note = LE
ccacttgacgatccataggagcgtctgtgaggatcgattctgcagcctga

SEQ ID NO: 34935 - DNA, 50 bp, unidentified
  source 1..50: mol_type = unassigned DNA; note = donor_73b1cb8
  misc_feature 1..22: note = RE
  misc_feature 23..25: note = Core
  misc_feature 26..50: note = LE
ggcttgacacggtcattgagagtccttaagttcgtagttgcagttacttc

SEQ ID NO: 34936 - DNA, 50 bp, unidentified
  source 1..50: mol_type = unassigned DNA; note = donor_73bac5a
  misc_feature 1..24: note = RE
  misc_feature 25: note = Core
  misc_feature 26..50: note = LE
tggcaaaaagtgggcgtccatgtataatggaatggacgcccactatccaa

SEQ ID NO: 34937 - DNA, 50 bp, unidentified
  source 1..50: mol_type = unassigned DNA; note = donor_73bb2d4
  misc_feature 1..24: note = RE
  misc_feature 25: note = Core
  misc_feature 26..50: note = LE
ttggcataggggggcgtccatgtataatggcatggacgcccctactctgc

SEQ ID NO: 34938 - DNA, 50 bp, unidentified
  source 1..50: mol_type = unassigned DNA; note = donor_73bc40b
  misc_feature 1..23: note = RE
  misc_feature 24..25: note = Core
  misc_feature 26..50: note = LE
cttgacaaaggtcacttcataacagataatatgaagtggcctcctattgt

SEQ ID NO: 34939 - DNA, 50 bp, unidentified
  source 1..50: mol_type = unassigned DNA; note = donor_73c5f38
  misc_feature 1..24: note = RE
  misc_feature 25: note = Core
  misc_feature 26..50: note = LE
ttggcaaaccggggcgaccatctataatgggatggtcgcccctcctaaac

SEQ ID NO: 34940 - DNA, 50 bp, unidentified
  source 1..50: mol_type = unassigned DNA; note = donor_73c7700
  misc_feature 1..23: note = RE
  misc_feature 24..25: note = Core
  misc_feature 26..50: note = LE
gggcttgacttttatttgcaagtctgttacaataaatatagttgttaaat

SEQ ID NO: 34941 - DNA, 50 bp, unidentified
  source 1..50: mol_type = unassigned DNA; note = donor_73c9792
  misc_feature 1..23: note = RE
  misc_feature 24..25: note = Core
  misc_feature 26..50: note = LE
cgcttgacacaccacatagggcaccgttaccttgttggtggtcccgggtg

SEQ ID NO: 34942 - DNA, 50 bp, unidentified
  source 1..50: mol_type = unassigned DNA; note = donor_73ca8ca
  misc_feature 1..24: note = RE
  misc_feature 25: note = Core
  misc_feature 26..50: note = LE
ttgtttgttttttatctcagttcttcttaagttagattctctttaaattg

SEQ ID NO: 34943 - DNA, 50 bp, unidentified
  source 1..50: mol_type = unassigned DNA; note = donor_73cadef
  misc_feature 1..23: note = RE
  misc_feature 24..25: note = Core
  misc_feature 26..50: note = LE
gcatcgcgggcgtcgtccatacatgatgtggtggacgacgcccgctcccg

SEQ ID NO: 34944 - DNA, 50 bp, unidentified
  source 1..50: mol_type = unassigned DNA; note = donor_73d086b
  misc_feature 1..23: note = RE
  misc_feature 24..25: note = Core
  misc_feature 26..50: note = LE
gcttgacaagtttcatagaaagtcttatattaggtctgttgaatgtaaac

SEQ ID NO: 34945 - DNA, 50 bp, unidentified
  source 1..50: mol_type = unassigned DNA; note = donor_73ecbc1
  misc_feature 1..23: note = RE
  misc_feature 24..25: note = Core
  misc_feature 26..50: note = LE
actattgattttttatttgcaggctactacaatataaattggttaatgca

SEQ ID NO: 34946 - DNA, 50 bp, unidentified; identical to SEQ ID NO: 31823
  source 1..50: mol_type = unassigned DNA; note = donor_73ef0b3
  misc_feature 1..23: note = RE
  misc_feature 24..25: note = Core
  misc_feature 26..50: note = LE

SEQ ID NO: 34947 - DNA, 50 bp, unidentified
  source 1..50: mol_type = unassigned DNA; note = donor_73fc51d
  misc_feature 1..23: note = RE
  misc_feature 24..25: note = Core
  misc_feature 26..50: note = LE
gacccgcagggggcatccacacatgatgaggtggatgccccctgctccgc

SEQ ID NO: 34948 - DNA, 50 bp, unidentified
  source 1..50: mol_type = unassigned DNA; note = donor_73ff858
  misc_feature 1..23: note = RE
  misc_feature 24..25: note = Core
  misc_feature 26..50: note = LE
ctacttgatttttatatagttagctggtataatgataaaagactcatcta

SEQ ID NO: 34949 - DNA, 50 bp, unidentified
  source 1..50: mol_type = unassigned DNA; note = donor_74173c9
  misc_feature 1..21: note = RE
  misc_feature 22..25: note = Core
  misc_feature 26..50: note = LE
cggggggttgacacagggtgtctcactggactaccttcccttctgccatg

SEQ ID NO: 34950 - DNA, 50 bp, unidentified
  source 1..50: mol_type = unassigned DNA; note = donor_741974f
  misc_feature 1..23: note = RE
  misc_feature 24..25: note = Core
  misc_feature 26..50: note = LE
gccaacacggagccgtccacacatgatgctgtggacggctcctccaccgg

SEQ ID NO: 34951 - DNA, 50 bp, unidentified
  source 1..50: mol_type = unassigned DNA; note = donor_741de28
  misc_feature 1..23: note = RE
  misc_feature 24..25: note = Core
  misc_feature 26..50: note = LE
cgaagtgacgggcaagacggtatcttgtatctcgactgcagcctctcagg

SEQ ID NO: 34952 - DNA, 50 bp, unidentified
  source 1..50: mol_type = unassigned DNA; note = donor_7423083
  misc_feature 1..23: note = RE
  misc_feature 24..25: note = Core
  misc_feature 26..50: note = LE
tgacatctacgctcctgggatgtctaatcagttctgggagtaagccatcc

SEQ ID NO: 34953 - DNA, 50 bp, unidentified
  source 1..50: mol_type = unassigned DNA; note = donor_74244ad
  misc_feature 1..23: note = RE
  misc_feature 24..25: note = Core
  misc_feature 26..50: note = LE
gcgcccgcgggccgttccatacatgatgtggtggaacggcccgctccgac

SEQ ID NO: 34954 - DNA, 50 bp, unidentified
  source 1..50: mol_type = unassigned DNA; note = donor_74277e7
  misc_feature 1..24: note = RE
  misc_feature 25: note = Core
  misc_feature 26..50: note = LE
tggcaaaccgggggtgtccatgtacaatgggatggacgcccccacccgta

SEQ ID NO: 34955 - DNA, 50 bp, unidentified
  source 1..50: mol_type = unassigned DNA; note = donor_7427f77
  misc_feature 1..23: note = RE
  misc_feature 24..25: note = Core
  misc_feature 26..50: note = LE
aatattgacattctattagctggttcgtattataaggttaaccagttttt

SEQ ID NO: 34956 - DNA, 50 bp, unidentified
  source 1..50: mol_type = unassigned DNA; note = donor_74299f2
  misc_feature 1..23: note = RE
  misc_feature 24..25: note = Core
  misc_feature 26..50: note = LE
acccttgacttttatttgcaggtctgatacaatatatttgaccgaagaaa

SEQ ID NO: 34957 - DNA, 50 bp, unidentified
  source 1..50: mol_type = unassigned DNA; note = donor_7432895
  misc_feature 1..22: note = RE
  misc_feature 23..25: note = Core
  misc_feature 26..50: note = LE
gtcctattgctttatacatagcagtaattatgtaataaagcatagcgcag

SEQ ID NO: 34958 - DNA, 50 bp, unidentified
  source 1..50: mol_type = unassigned DNA; note = donor_7437d39
  misc_feature 1..23: note = RE
  misc_feature 24..25: note = Core
  misc_feature 26..50: note = LE
gcacaatgggcggcaaccacagaagatgggatggttgccgccctccccaa

SEQ ID NO: 34959 - DNA, 50 bp, unidentified
  source 1..50: mol_type = unassigned DNA; note = donor_744b582
  misc_feature 1..23: note = RE
  misc_feature 24..25: note = Core
  misc_feature 26..50: note = LE
tgacatctcagaacatgggatgtctaatggcttctgccgggctggtttgg

SEQ ID NO: 34960 - DNA, 50 bp, unidentified
  source 1..50: mol_type = unassigned DNA; note = donor_7450fe5
  misc_feature 1..22: note = RE
  misc_feature 23..25: note = Core
  misc_feature 26..50: note = LE
gtcctctactttctttcacactaatctccattccgcgcgccttcaggcgc

SEQ ID NO: 34961 - DNA, 50 bp, unidentified
  source 1..50: mol_type = unassigned DNA; note = donor_746dd8a
  misc_feature 1..21: note = RE
  misc_feature 22..25: note = Core
  misc_feature 26..50: note = LE
ggcttgacaacaccattgagattccgtaagactaaagccggcccaggagg

SEQ ID NO: 34962 - DNA, 50 bp, unidentified
  source 1..50: mol_type = unassigned DNA; note = donor_7474f6d
  misc_feature 1..23: note = RE
  misc_feature 24..25: note = Core
  misc_feature 26..50: note = LE
ttcgcttgaactcgagacagttacttgtatcttggcaacggagccgttgt

SEQ ID NO: 34963 - DNA, 50 bp, unidentified
  source 1..50: mol_type = unassigned DNA; note = donor_747c5ec
  misc_feature 1..24: note = RE
  misc_feature 25: note = Core
  misc_feature 26..50: note = LE
tggcaaagtgggggcgtccatgtacaatgggatggacgcccccactctaa

SEQ ID NO: 34964 - DNA, 50 bp, unidentified
  source 1..50: mol_type = unassigned DNA; note = donor_748a397
  misc_feature 1..23: note = RE
  misc_feature 24..25: note = Core
  misc_feature 26..50: note = LE
gcaagcagagggccgtccacatatgttggcgtggacggccctcgaccgca

SEQ ID NO: 34965 - DNA, 50 bp, unidentified
  source 1..50: mol_type = unassigned DNA; note = donor_748ecf8
  misc_feature 1..23: note = RE
  misc_feature 24..25: note = Core
  misc_feature 26..50: note = LE
gacacactccagccgtgggatgtctaatggggattgatcacctggtcccg

SEQ ID NO: 34966 - DNA, 50 bp, unidentified
  source 1..50: mol_type = unassigned DNA; note = donor_749937c
  misc_feature 1..23: note = RE
  misc_feature 24..25: note = Core
  misc_feature 26..50: note = LE
tgccaagcgggccgttccacatatgatggtgtggaacggccctccgagcc

SEQ ID NO: 34967 - DNA, 50 bp, unidentified
  source 1..50: mol_type = unassigned DNA; note = donor_74a55bb
  misc_feature 1..23: note = RE
  misc_feature 24..25: note = Core
  misc_feature 26..50: note = LE
gcaccgagggggccgtccacacacgttggggtggacggcccctgcggcat

SEQ ID NO: 34968 - DNA, 50 bp, unidentified
  source 1..50: mol_type = unassigned DNA; note = donor_74a7496
  misc_feature 1..24: note = RE
  misc_feature 25: note = Core
  misc_feature 26..50: note = LE
gcagaaaacaggctgaccatacattaatgagatggtcagcctgaccgaaa

SEQ ID NO: 34969 - DNA, 50 bp, unidentified
  source 1..50: mol_type = unassigned DNA; note = donor_74ac94c
  misc_feature 1..23: note = RE
  misc_feature 24..25: note = Core
  misc_feature 26..50: note = LE
ggccttgacaactcttggcaggtttgctacaatgtcaacaaccgggtgag

SEQ ID NO: 34970 - DNA, 50 bp, unidentified
  source 1..50: mol_type = unassigned DNA; note = donor_74af2ef
  misc_feature 1..23: note = RE
  misc_feature 24..25: note = Core
  misc_feature 26..50: note = LE
cggcttgacacgatcattgagattccttaagaatggttggcggtccggga

SEQ ID NO: 34971 - DNA, 50 bp, unidentified
  source 1..50: mol_type = unassigned DNA; note = donor_74b03ba
  misc_feature 1..23: note = RE
  misc_feature 24..25: note = Core
  misc_feature 26..50: note = LE
catgaattcgttcaagacggtatcttatatctcgattctgttctctacaa

SEQ ID NO: 34972 - DNA, 50 bp, unidentified
  source 1..50: mol_type = unassigned DNA; note = donor_74b305d
  misc_feature 1..24: note = RE
  misc_feature 25: note = Core
  misc_feature 26..50: note = LE
gctgcttgacatccataggagcatcagagatgatgttcatgagcacctcc

SEQ ID NO: 34973 - DNA, 50 bp, unidentified
  source 1..50: mol_type = unassigned DNA; note = donor_74b3520
  misc_feature 1..21: note = RE
  misc_feature 22..25: note = Core
  misc_feature 26..50: note = LE
cagcggcttgacacagggcaactcactggtgcaccatccttgtgtccggt

SEQ ID NO: 34974 - DNA, 50 bp, unidentified
  source 1..50: mol_type = unassigned DNA; note = donor_74ba17a
  misc_feature 1..24: note = RE
  misc_feature 25: note = Core
  misc_feature 26..50: note = LE
tcgcaaacgggaggcgttcatatagaatggaatgaacgcctcccacctat

SEQ ID NO: 34975 - DNA, 50 bp, unidentified
  source 1..50: mol_type = unassigned DNA; note = donor_74bf55e
  misc_feature 1..23: note = RE
  misc_feature 24..25: note = Core
  misc_feature 26..50: note = LE
gacaagtcgaggcccgttacagaagatggggtaacgggcctctggcgccg

SEQ ID NO: 34976 - DNA, 50 bp, unidentified
  source 1..50: mol_type = unassigned DNA; note = donor_74c277b
  misc_feature 1..24: note = RE
  misc_feature 25: note = Core
  misc_feature 26..50: note = LE
tcctcgacgaaagacatagagacaccgttatgtttttcgcggtcctgcaa

SEQ ID NO: 34977 - DNA, 50 bp, unidentified
  source 1..50: mol_type = unassigned DNA; note = donor_74c43db
  misc_feature 1..23: note = RE
  misc_feature 24..25: note = Core
  misc_feature 26..50: note = LE
tgccttgacttactaccacatgactcgtattatataaattaatccttacg

SEQ ID NO: 34978 - DNA, 50 bp, unidentified
  source 1..50: mol_type = unassigned DNA; note = donor_74ce447
  misc_feature 1..23: note = RE
  misc_feature 24..25: note = Core
  misc_feature 26..50: note = LE
gctttccttgggcggaccatgtaagatggcatggtccgcccacctaccgt

SEQ ID NO: 34979 - DNA, 50 bp, unidentified
  source 1..50: mol_type = unassigned DNA; note = donor_74d101d
  misc_feature 1..23: note = RE
  misc_feature 24..25: note = Core
  misc_feature 26..50: note = LE
tgcttgacagtccaagacagttgcttgtatcttgggccgagtgcctcaat

SEQ ID NO: 34980 - DNA, 50 bp, unidentified
  source 1..50: mol_type = unassigned DNA; note = donor_74d4e8e
  misc_feature 1..22: note = RE
  misc_feature 23..25: note = Core
  misc_feature 26..50: note = LE
gttgacatcaacatagggacaccccgttaccttcttcgtagtcccgcgcc

SEQ ID NO: 34981 - DNA, 50 bp, unidentified
  source 1..50: mol_type = unassigned DNA; note = donor_74d80cf
  misc_feature 1..24: note = RE
  misc_feature 25: note = Core
  misc_feature 26..50: note = LE
ttgcaatacgaggtggaccatatataatggaatggtccacctctcccata

SEQ ID NO: 34982 - DNA, 50 bp, unidentified
  source 1..50: mol_type = unassigned DNA; note = donor_74dd3aa
  misc_feature 1..22: note = RE
  misc_feature 23..25: note = Core
  misc_feature 26..50: note = LE
caacgcaggggccgtccatacatgatggggtggacggcccctgcacccgg

SEQ ID NO: 34983 - DNA, 50 bp, unidentified
  source 1..50: mol_type = unassigned DNA; note = donor_74dfb36
  misc_feature 1..24: note = RE
  misc_feature 25: note = Core
  misc_feature 26..50: note = LE
ccgcctcttgacacagaagggagcctacttgtttcattgacgtcaggacc

SEQ ID NO: 34984 - DNA, 50 bp, unidentified
  source 1..50: mol_type = unassigned DNA; note = donor_74e4c09
  misc_feature 1..24: note = RE
  misc_feature 25: note = Core
  misc_feature 26..50: note = LE
tgcaatatcgaggcggaccatacataatgagatggtccgcctcacctaat

SEQ ID NO: 34985 - DNA, 50 bp, unidentified
  source 1..50: mol_type = unassigned DNA; note = donor_74f6154
  misc_feature 1..23: note = RE
  misc_feature 24..25: note = Core
  misc_feature 26..50: note = LE
gcacccgacgggccgtccacacacgttggggtggacggccccgcggcatc

SEQ ID NO: 34986 - DNA, 50 bp, unidentified
  source 1..50: mol_type = unassigned DNA; note = donor_74fb065
  misc_feature 1..23: note = RE
  misc_feature 24..25: note = Core
  misc_feature 26..50: note = LE
gaggttggcatgaaccatagaatcttgtatggttttcctgcaggtccaaa

SEQ ID NO: 34987 - DNA, 50 bp, unidentified; identical to SEQ ID NO: 34715
  source 1..50: mol_type = unassigned DNA; note = donor_74fbc22
  misc_feature 1..24: note = RE
  misc_feature 25: note = Core
  misc_feature 26..50: note = LE

SEQ ID NO: 34988 - DNA, 50 bp, unidentified
  source 1..50: mol_type = unassigned DNA; note = donor_74fefbf
  misc_feature 1..23: note = RE
  misc_feature 24..25: note = Core
  misc_feature 26..50: note = LE
gacagcttcggcccgtgggatgtctaatggctctcgagcagcggacagaa

SEQ ID NO: 34989 - DNA, 50 bp, unidentified
  source 1..50: mol_type = unassigned DNA; note = donor_75004d6
  misc_feature 1..24: note = RE
  misc_feature 25: note = Core
  misc_feature 26..50: note = LE
tgcagaaatggggatatccatagataatgaaatggctatcccctcacacc

SEQ ID NO: 34990 - DNA, 50 bp, unidentified
  source 1..50: mol_type = unassigned DNA; note = donor_750377e
  misc_feature 1..23: note = RE
  misc_feature 24..25: note = Core
  misc_feature 26..50: note = LE
tgcctgcggggccgttccacatatgatgtggtggaacggccccgccacca

SEQ ID NO: 34991 - DNA, 50 bp, unidentified
  source 1..50: mol_type = unassigned DNA; note = donor_750bdba
  misc_feature 1..23: note = RE
  misc_feature 24..25: note = Core
  misc_feature 26..50: note = LE
atgcttgaccccaaacggagtatcttgtatgttgacgccatatgagttgg

SEQ ID NO: 34992 - DNA, 50 bp, unidentified
  source 1..50: mol_type = unassigned DNA; note = donor_7512b74
  misc_feature 1..23: note = RE
  misc_feature 24..25: note = Core
  misc_feature 26..50: note = LE
ggggggtggttgacagagggtgtctgatggctctaccctcccctcacgag

SEQ ID NO: 34993 - DNA, 50 bp, unidentified
  source 1..50: mol_type = unassigned DNA; note = donor_7513884
  misc_feature 1..23: note = RE
  misc_feature 24..25: note = Core
  misc_feature 26..50: note = LE
cgaagtgaggatcaagacggtatcttgtatctcgacttttgcctccttgc

SEQ ID NO: 34994 - DNA, 50 bp, unidentified
  source 1..50: mol_type = unassigned DNA; note = donor_751658e
  misc_feature 1..24: note = RE
  misc_feature 25: note = Core
  misc_feature 26..50: note = LE
ttgcaaacgggacgcgttcatatagaatgaaatgaacgcgtcccaccccg

SEQ ID NO: 34995 - DNA, 50 bp, unidentified
  source 1..50: mol_type = unassigned DNA; note = donor_7525de3
  misc_feature 1..23: note = RE
  misc_feature 24..25: note = Core
  misc_feature 26..50: note = LE
tatattgacttcatatagttagtcttgtataatgaacatgtagtaaaaat

SEQ ID NO: 34996 - DNA, 50 bp, unidentified
  source 1..50: mol_type = unassigned DNA; note = donor_7526066
  misc_feature 1..23: note = RE
  misc_feature 24..25: note = Core
  misc_feature 26..50: note = LE
gactaaccggatgcgaatagacaacatggggtaatcgcggcgcgattgtc

SEQ ID NO: 34997 - DNA, 50 bp, unidentified
  source 1..50: mol_type = unassigned DNA; note = donor_7527887
  misc_feature 1..23: note = RE
  misc_feature 24..25: note = Core
  misc_feature 26..50: note = LE
gacgaccaagggcccattacagaagatgccgtaatgggccggcaccggga

SEQ ID NO: 34998 - DNA, 50 bp, unidentified
  source 1..50: mol_type = unassigned DNA; note = donor_7529ed8
  misc_feature 1..21: note = RE
  misc_feature 22..25: note = Core
  misc_feature 26..50: note = LE
ccccgggttgacacagggcaactcactggtgcaccatcctggtgtcggtg

SEQ ID NO: 34999 - DNA, 50 bp, unidentified
  source 1..50: mol_type = unassigned DNA; note = donor_752a18d
  misc_feature 1..22: note = RE
  misc_feature 23..25: note = Core
  misc_feature 26..50: note = LE
gcggaaaagttattttcgtataaatcacccatggcctggcggccaccgtc

SEQ ID NO: 35000 - DNA, 50 bp, unidentified
  source 1..50: mol_type = unassigned DNA; note = donor_753e1a3
  misc_feature 1..23: note = RE
  misc_feature 24..25: note = Core
  misc_feature 26..50: note = LE
gacccgcagggggcatccacacatgatggggtggatgccccctgctccgc

SEQ ID NO: 35001 - DNA, 50 bp, unidentified
  source 1..50: mol_type = unassigned DNA; note = donor_753e7df
  misc_feature 1..23: note = RE
  misc_feature 24..25: note = Core
  misc_feature 26..50: note = LE
tgacagttagaaccgtgggatgtctaatgggactgcaccggttccgtctg

SEQ ID NO: 35002 - DNA, 50 bp, unidentified; identical to SEQ ID NO: 33417
  source 1..50: mol_type = unassigned DNA; note = donor_753f3ca
  misc_feature 1..23: note = RE
  misc_feature 24..25: note = Core
  misc_feature 26..50: note = LE

SEQ ID NO: 35003 - DNA, 50 bp, unidentified
  source 1..50: mol_type = unassigned DNA; note = donor_7542186
  misc_feature 1..23: note = RE
  misc_feature 24..25: note = Core
  misc_feature 26..50: note = LE
gggatattcatgcaccatagaatcttgtatggtaggacttgaagggagga

SEQ ID NO: 35004 - DNA, 50 bp, unidentified
  source 1..50: mol_type = unassigned DNA; note = donor_7544c5c
  misc_feature 1..21: note = RE
  misc_feature 22..25: note = Core
  misc_feature 26..50: note = LE
ggcttgacatcctcattgagactccgtaagttgttaggcggcccgggagg

SEQ ID NO: 35005 - DNA, 50 bp, unidentified
  source 1..50: mol_type = unassigned DNA; note = donor_7546ef6
  misc_feature 1..23: note = RE
  misc_feature 24..25: note = Core
  misc_feature 26..50: note = LE
gcaaaaacgggggtgaccatagattaatgagatggtccccccccaccctg

SEQ ID NO: 35006 - DNA, 50 bp, unidentified
  source 1..50: mol_type = unassigned DNA; note = donor_7548491
  misc_feature 1..23: note = RE
  misc_feature 24..25: note = Core
  misc_feature 26..50: note = LE
acaaaaacgggagtgaccatagattaatgagatggtcactccctccttct

SEQ ID NO: 35007 - DNA, 50 bp, unidentified
  source 1..50: mol_type = unassigned DNA; note = donor_75489da
  misc_feature 1..22: note = RE
  misc_feature 23..25: note = Core
  misc_feature 26..50: note = LE
cccttgacttcttatagttggtcacgtataattaaaaccatctcgaaagg

SEQ ID NO: 35008 - DNA, 50 bp, unidentified
  source 1..50: mol_type = unassigned DNA; note = donor_7562e6a
  misc_feature 1..24: note = RE
  misc_feature 25: note = Core
  misc_feature 26..50: note = LE
cttgcgttgggtcggtgtccatatatggacacctccccatattggcttca

SEQ ID NO: 35009 - DNA, 50 bp, unidentified
  source 1..50: mol_type = unassigned DNA; note = donor_7566e73
  misc_feature 1..22: note = RE
  misc_feature 23..25: note = Core
  misc_feature 26..50: note = LE
atttaacccgggagtccatataagatgtatggactccctcccctcgggga

SEQ ID NO: 35010 - DNA, 50 bp, unidentified
  source 1..50: mol_type = unassigned DNA; note = donor_757dcfe
  misc_feature 1..23: note = RE
  misc_feature 24..25: note = Core
  misc_feature 26..50: note = LE
aagccgcttgatcacaacggatacttgtcttatgcatcaggcgtcgccgt

SEQ ID NO: 35011 - DNA, 50 bp, unidentified
  source 1..50: mol_type = unassigned DNA; note = donor_75829da
  misc_feature 1..21: note = RE
  misc_feature 22..25: note = Core
  misc_feature 26..50: note = LE
ttgacgaaacccatagggacaccccgttaccttcttggtgtccccgatga

SEQ ID NO: 35012 - DNA, 50 bp, unidentified
  source 1..50: mol_type = unassigned DNA; note = donor_7587aa1
  misc_feature 1..23: note = RE
  misc_feature 24..25: note = Core
  misc_feature 26..50: note = LE
gccaactcgcagccgtccacacatgatgctgtggacggctcctccaccgg

SEQ ID NO: 35013 - DNA, 50 bp, unidentified; identical to SEQ ID NO: 33802
  source 1..50: mol_type = unassigned DNA; note = donor_7589d8f
  misc_feature 1..23: note = RE
  misc_feature 24..25: note = Core
  misc_feature 26..50: note = LE

SEQ ID NO: 35014 - DNA, 50 bp, unidentified; identical to SEQ ID NO: 32049
  source 1..50: mol_type = unassigned DNA; note = donor_7595a44
  misc_feature 1..23: note = RE
  misc_feature 24..25: note = Core
  misc_feature 26..50: note = LE

SEQ ID NO: 35015 - DNA, 50 bp, unidentified
  source 1..50: mol_type = unassigned DNA; note = donor_7596e0d
  misc_feature 1..24: note = RE
  misc_feature 25: note = Core
  misc_feature 26..50: note = LE
cttgccaacggggcgggccatacgtatgggatggcccgcccctccggccg

SEQ ID NO: 35016 - DNA, 50 bp, unidentified
  source 1..50: mol_type = unassigned DNA; note = donor_7599f0e
  misc_feature 1..23: note = RE
  misc_feature 24..25: note = Core
  misc_feature 26..50: note = LE
aggcttgaccacgaacataggatcttgtatgttcctcccggctcccacga

SEQ ID NO: 35017 - DNA, 50 bp, unidentified
  source 1..50: mol_type = unassigned DNA; note = donor_759c0f6
  misc_feature 1..20: note = RE
  misc_feature 21..25: note = Core
  misc_feature 26..50: note = LE
gggattatatattttcacagaaaaacattcatgagttttttacacccaac

SEQ ID NO: 35018 - DNA, 50 bp, unidentified
  source 1..50: mol_type = unassigned DNA; note = donor_75a1281
  misc_feature 1..23: note = RE
  misc_feature 24..25: note = Core
  misc_feature 26..50: note = LE
tagcttgactttttatttgcaggctactacaatatatttatggttaatat

SEQ ID NO: 35019 - DNA, 50 bp, unidentified; identical to SEQ ID NO: 32754
  source 1..50: mol_type = unassigned DNA; note = donor_75b910c
  misc_feature 1..24: note = RE
  misc_feature 25: note = Core
  misc_feature 26..50: note = LE

SEQ ID NO: 35020 - DNA, 50 bp, unidentified
  source 1..50: mol_type = unassigned DNA; note = donor_75ba03f
  misc_feature 1..23: note = RE
  misc_feature 24..25: note = Core
  misc_feature 26..50: note = LE
gaccctgatcggccgattagagaagatggggtaatcggccgacgagcttg

SEQ ID NO: 35021 - DNA, 50 bp, unidentified
  source 1..50: mol_type = unassigned DNA; note = donor_75d043f
  misc_feature 1..22: note = RE
  misc_feature 23..25: note = Core
  misc_feature 26..50: note = LE
gtcgcttgcttttctacatagcagtaattatgtaagaaaagcatagcgca

SEQ ID NO: 35022 - DNA, 50 bp, unidentified
  source 1..50: mol_type = unassigned DNA; note = donor_75d1fa5
  misc_feature 1..22: note = RE
  misc_feature 23..25: note = Core
  misc_feature 26..50: note = LE
gaatggcatggtgaagacagttgcttgtgtcttgatctaggaataaactc

SEQ ID NO: 35023 - DNA, 50 bp, unidentified
  source 1..50: mol_type = unassigned DNA; note = donor_75d64ad
  misc_feature 1..24: note = RE
  misc_feature 25: note = Core
  misc_feature 26..50: note = LE
ttgcaaacgggacgcgttcatataatgaaatgaacgcgtcccaccctgcg

SEQ ID NO: 35024 - DNA, 50 bp, unidentified
  source 1..50: mol_type = unassigned DNA; note = donor_75df7cf
  misc_feature 1..22: note = RE
  misc_feature 23..25: note = Core
  misc_feature 26..50: note = LE
ctcttgacttttaatagttagtcttgtattatatatttatagtttatata

SEQ ID NO: 35025 - DNA, 50 bp, unidentified
  source 1..50: mol_type = unassigned DNA; note = donor_75ee3e0
  misc_feature 1..22: note = RE
  misc_feature 23..25: note = Core
  misc_feature 26..50: note = LE
tcacttgtttttcttatagttaaatggtatatacaaattaagctcatcca

SEQ ID NO: 35026 - DNA, 50 bp, unidentified
  source 1..50: mol_type = unassigned DNA; note = donor_760452a
  misc_feature 1..22: note = RE
  misc_feature 23..25: note = Core
  misc_feature 26..50: note = LE
aatgttgacaaactattagctggttcgtaatataaggttaaccagttttt

SEQ ID NO: 35027 - DNA, 50 bp, unidentified
  source 1..50: mol_type = unassigned DNA; note = donor_76060aa
  misc_feature 1..22: note = RE
  misc_feature 23..25: note = Core
  misc_feature 26..50: note = LE
cgcttgacttccaatacggttgcttgtatattccctcctgtggcgccgcc

SEQ ID NO: 35028 - DNA, 50 bp, unidentified
  source 1..50: mol_type = unassigned DNA; note = donor_7609010
  misc_feature 1..23: note = RE
  misc_feature 24..25: note = Core
  misc_feature 26..50: note = LE
ttgcaaaagggaggcgtccatatagaatgaaatggacgcctcccacctcg

SEQ ID NO: 35029 - DNA, 50 bp, unidentified
  source 1..50: mol_type = unassigned DNA; note = donor_760b060
  misc_feature 1..24: note = RE
  misc_feature 25: note = Core
  misc_feature 26..50: note = LE
atatttggattaaaacataggaagctttaactttgcagtttgaaacaaga

SEQ ID NO: 35030 - DNA, 50 bp, unidentified
  source 1..50: mol_type = unassigned DNA; note = donor_760bbd2
  misc_feature 1..22: note = RE
  misc_feature 23..25: note = Core
  misc_feature 26..50: note = LE
agaaaacaataagatattatagggagcattcctgtaacaaacaaaaatga

SEQ ID NO: 35031 - DNA, 50 bp, unidentified
  source 1..50: mol_type = unassigned DNA; note = donor_761a68c
  misc_feature 1..24: note = RE
  misc_feature 25: note = Core
  misc_feature 26..50: note = LE
tgcaccgcgggcgccgtccatacatgatgtggtggacggcgcccgctctt

SEQ ID NO: 35032 - DNA, 50 bp, unidentified
  source 1..50: mol_type = unassigned DNA; note = donor_761c096
  misc_feature 1..21: note = RE
  misc_feature 22..25: note = Core
  misc_feature 26..50: note = LE
gcttgacttatatttgcaggtttgctactattagtttgacccccaaacag

SEQ ID NO: 35033 - DNA, 50 bp, unidentified
  source 1..50: mol_type = unassigned DNA; note = donor_762635b
  misc_feature 1..22: note = RE
  misc_feature 23..25: note = Core
  misc_feature 26..50: note = LE
caacgcgggagccatccacacaagatggagtggatggcccccgctcccgg

SEQ ID NO: 35034 - DNA, 50 bp, unidentified
  source 1..50: mol_type = unassigned DNA; note = donor_763fa64
  misc_feature 1..23: note = RE
  misc_feature 24..25: note = Core
  misc_feature 26..50: note = LE
agtcttgacttctaatagttagtcttgtattattaaattagtaagaattg

SEQ ID NO: 35035 - DNA, 50 bp, unidentified
  source 1..50: mol_type = unassigned DNA; note = donor_7643b14
  misc_feature 1..23: note = RE
  misc_feature 24..25: note = Core
  misc_feature 26..50: note = LE
cggcttgacaacgtcattgggaagtcctacctttcttgatgtgggtctga

SEQ ID NO: 35036 - DNA, 50 bp, unidentified
  source 1..50: mol_type = unassigned DNA; note = donor_7653395
  misc_feature 1..24: note = RE
  misc_feature 25: note = Core
  misc_feature 26..50: note = LE
ctgccccttgacataaaggggagcctacttaagactggcgcctgggtctg

SEQ ID NO: 35037 - DNA, 50 bp, unidentified; identical to SEQ ID NO: 32543
  source 1..50: mol_type = unassigned DNA; note = donor_766a256
  misc_feature 1..24: note = RE
  misc_feature 25: note = Core
  misc_feature 26..50: note = LE

SEQ ID NO: 35038 - DNA, 50 bp, unidentified
  source 1..50: mol_type = unassigned DNA; note = donor_766d6b7
  misc_feature 1..23: note = RE
  misc_feature 24..25: note = Core
  misc_feature 26..50: note = LE
aggttaatcatccaagatggttgcttatatctttcgattggttcaaactt

SEQ ID NO: 35039 - DNA, 50 bp, unidentified
  source 1..50: mol_type = unassigned DNA; note = donor_76755a7
  misc_feature 1..23: note = RE
  misc_feature 24..25: note = Core
  misc_feature 26..50: note = LE
gccaaaggagcgccgtccacacatgatgctgtggacggctctccgccccc

SEQ ID NO: 35040 - DNA, 50 bp, unidentified
  source 1..50: mol_type = unassigned DNA; note = donor_7675cf7
  misc_feature 1..23: note = RE
  misc_feature 24..25: note = Core
  misc_feature 26..50: note = LE
ccgccacttgacatacagaggcgctgacttgtttgatggggctaggccgt

SEQ ID NO: 35041 - DNA, 50 bp, unidentified
  source 1..50: mol_type = unassigned DNA; note = donor_76916c0
  misc_feature 1..23: note = RE
  misc_feature 24..25: note = Core
  misc_feature 26..50: note = LE
gcaaagaccgggctgaccatagattaatgagatggtcagcccggtccctc

SEQ ID NO: 35042 - DNA, 50 bp, unidentified
  source 1..50: mol_type = unassigned DNA; note = donor_7697203
  misc_feature 1..23: note = RE
  misc_feature 24..25: note = Core
  misc_feature 26..50: note = LE
aggggggaattaaatatagttgactcctaccattaattactgtataacta

SEQ ID NO: 35043 - DNA, 50 bp, unidentified
  source 1..50: mol_type = unassigned DNA; note = donor_7698b33
  misc_feature 1..23: note = RE
  misc_feature 24..25: note = Core
  misc_feature 26..50: note = LE
cctcttgactttttatttgcaggctactacaatatatttataggttataa

SEQ ID NO: 35044 - DNA, 50 bp, unidentified
  source 1..50: mol_type = unassigned DNA; note = donor_769f566
  misc_feature 1..23: note = RE
  misc_feature 24..25: note = Core
  misc_feature 26..50: note = LE
gttgacagtggggagtctacataagataattagactccccacacttaacc

SEQ ID NO: 35045 - DNA, 50 bp, unidentified
  source 1..50: mol_type = unassigned DNA; note = donor_76a2c81
  misc_feature 1..24: note = RE
  misc_feature 25: note = Core
  misc_feature 26..50: note = LE
tggcatagagggggcgtccatgtataatggcatggacgcccctgctttta

SEQ ID NO: 35046 - DNA, 50 bp, unidentified
  source 1..50: mol_type = unassigned DNA; note = donor_76a468b
  misc_feature 1..22: note = RE
  misc_feature 23..25: note = Core
  misc_feature 26..50: note = LE
atcggcgggcgccgtccagacatgatggggtggacggcgcccgcaacggc

SEQ ID NO: 35047 - DNA, 50 bp, unidentified
  source 1..50: mol_type = unassigned DNA; note = donor_76a6f46
  misc_feature 1..23: note = RE
  misc_feature 24..25: note = Core
  misc_feature 26..50: note = LE
gggcttgactttttatttgcaggctgttactataatatttgccccttggt

SEQ ID NO: 35048 - DNA, 50 bp, unidentified
  source 1..50: mol_type = unassigned DNA; note = donor_76a72d3
  misc_feature 1..24: note = RE
  misc_feature 25: note = Core
  misc_feature 26..50: note = LE
ctattgactactaatagtttgtcacgtataatccaatcatgttagaaaag

SEQ ID NO: 35049 - DNA, 50 bp, unidentified
  source 1..50: mol_type = unassigned DNA; note = donor_76aeb0d
  misc_feature 1..23: note = RE
  misc_feature 24..25: note = Core
  misc_feature 26..50: note = LE
atgcttaaatctcaagacagttgcttgtatctctcggcttgtgacacgat

SEQ ID NO: 35050 - DNA, 50 bp, unidentified
  source 1..50: mol_type = unassigned DNA; note = donor_76af956
  misc_feature 1..22: note = RE
  misc_feature 23..25: note = Core
  misc_feature 26..50: note = LE
cgttcgtcggggcgtccacagatgatggggtggacgccccccgacggcat

SEQ ID NO: 35051 - DNA, 50 bp, unidentified
  source 1..50: mol_type = unassigned DNA; note = donor_76c3ed6
  misc_feature 1..22: note = RE
  misc_feature 23..25: note = Core
  misc_feature 26..50: note = LE
aaaacaacttgactaattagggaggagcttcctgtataattcaaatatag

SEQ ID NO: 35052 - DNA, 50 bp, unidentified
  source 1..50: mol_type = unassigned DNA; note = donor_76c4504
  misc_feature 1..23: note = RE
  misc_feature 24..25: note = Core
  misc_feature 26..50: note = LE
acgcttgaccagaaagacggtatcttgtatctttcatcccgtggtgatta

SEQ ID NO: 35053 - DNA, 50 bp, unidentified
  source 1..50: mol_type = unassigned DNA; note = donor_76cbebf
  misc_feature 1..23: note = RE
  misc_feature 24..25: note = Core
  misc_feature 26..50: note = LE
tgcaagagggggccgtccacatatgttggggtggacggctcccaacggca

SEQ ID NO: 35054 - DNA, 50 bp, unidentified
  source 1..50: mol_type = unassigned DNA; note = donor_76d005e
  misc_feature 1..22: note = RE
  misc_feature 23..25: note = Core
  misc_feature 26..50: note = LE
accccacggctgcgattagacaacatggggtaatcgcgggagcgcgtcga

SEQ ID NO: 35055 - DNA, 50 bp, unidentified
  source 1..50: mol_type = unassigned DNA; note = donor_76d1cac
  misc_feature 1..22: note = RE
  misc_feature 23..25: note = Core
  misc_feature 26..50: note = LE
actcttgactctcaacacggtatcttgtatgttgcacctatcgcttgact

SEQ ID NO: 35056 - DNA, 50 bp, unidentified
  source 1..50: mol_type = unassigned DNA; note = donor_76d62d9
  misc_feature 1..23: note = RE
  misc_feature 24..25: note = Core
  misc_feature 26..50: note = LE
agaccggtatagagagatggtatcttgtatctctctgtgataggtgttta

SEQ ID NO: 35057 - DNA, 50 bp, unidentified; identical to SEQ ID NO: 32397
  source 1..50: mol_type = unassigned DNA; note = donor_76daa93
  misc_feature 1..23: note = RE
  misc_feature 24..25: note = Core
  misc_feature 26..50: note = LE

SEQ ID NO: 35058 - DNA, 50 bp, unidentified
  source 1..50: mol_type = unassigned DNA; note = donor_76ddcbd
  misc_feature 1..23: note = RE
  misc_feature 24..25: note = Core
  misc_feature 26..50: note = LE
gcatccggagggacgtccacacacgatggggtggacgccccctgacggca

SEQ ID NO: 35059 - DNA, 50 bp, unidentified
  source 1..50: mol_type = unassigned DNA; note = donor_76e4f35
  misc_feature 1..23: note = RE
  misc_feature 24..25: note = Core
  misc_feature 26..50: note = LE
gacacccaacggcccattacggaagatgccgtaatgggcctccagcagga

SEQ ID NO: 35060 - DNA, 50 bp, unidentified
  source 1..50: mol_type = unassigned DNA; note = donor_76e9904
  misc_feature 1..22: note = RE
  misc_feature 23..25: note = Core
  misc_feature 26..50: note = LE
agtcttgacttttaatagttagactcgtattataaagtagtagtgtttat

SEQ ID NO: 35061 - DNA, 50 bp, unidentified
  source 1..50: mol_type = unassigned DNA; note = donor_76ec493
  misc_feature 1..24: note = RE
  misc_feature 25: note = Core
  misc_feature 26..50: note = LE
ttgcaatcgggcggggtccatatacaatggtatggaccccgcccttggct

SEQ ID NO: 35062 - DNA, 50 bp, unidentified
  source 1..50: mol_type = unassigned DNA; note = donor_76fb172
  misc_feature 1..24: note = RE
  misc_feature 25: note = Core
  misc_feature 26..50: note = LE
aatgatcacttgacataggagcttcacttccgcagaatgaggtagatggg

SEQ ID NO: 35063 - DNA, 50 bp, unidentified
  source 1..50: mol_type = unassigned DNA; note = donor_76fd535
  misc_feature 1..24: note = RE
  misc_feature 25: note = Core
  misc_feature 26..50: note = LE
gcaaaaacggcggcggaccatacatactggcatggtccgccgcctaaggc

SEQ ID NO: 35064 - DNA, 50 bp, unidentified
  source 1..50: mol_type = unassigned DNA; note = donor_76ff73e
  misc_feature 1..23: note = RE
  misc_feature 24..25: note = Core
  misc_feature 26..50: note = LE
atccttgacttttcatagttggtctcgtatgataaagttaggttttttag

SEQ ID NO: 35065 - DNA, 50 bp, unidentified
  source 1..50: mol_type = unassigned DNA; note = donor_7705517
  misc_feature 1..23: note = RE
  misc_feature 24..25: note = Core
  misc_feature 26..50: note = LE
cataacgtcgtccaagacggtatcttatgtcttggaaccagtccctgtgg

SEQ ID NO: 35066 - DNA, 50 bp, unidentified
  source 1..50: mol_type = unassigned DNA; note = donor_7719b77
  misc_feature 1..23: note = RE
  misc_feature 24..25: note = Core
  misc_feature 26..50: note = LE
ggcctgaggttgacagaggatgtctgatagcgctaccttctttcatggct

SEQ ID NO: 35067 - DNA, 50 bp, unidentified
  source 1..50: mol_type = unassigned DNA; note = donor_771e82e
  misc_feature 1..23: note = RE
  misc_feature 24..25: note = Core
  misc_feature 26..50: note = LE
cacgggcttgaccaatacggatacttgtcttatgaattggccagctcctg

SEQ ID NO: 35068 - DNA, 50 bp, unidentified
  source 1..50: mol_type = unassigned DNA; note = donor_7734c1a
  misc_feature 1..22: note = RE
  misc_feature 23..25: note = Core
  misc_feature 26..50: note = LE
agcttgactttttatagttggtcttgtataatgtatttaggttaataaag

SEQ ID NO: 35069 - DNA, 50 bp, unidentified; identical to SEQ ID NO: 32598
  source 1..50: mol_type = unassigned DNA; note = donor_77366cb
  misc_feature 1..23: note = RE
  misc_feature 24..25: note = Core
  misc_feature 26..50: note = LE

SEQ ID NO: 35070 - DNA, 50 bp, unidentified
  source 1..50: mol_type = unassigned DNA; note = donor_773c8ae
  misc_feature 1..24: note = RE
  misc_feature 25: note = Core
  misc_feature 26..50: note = LE
ttgcaaaagggaggcgtccatatagaatgaaatggacgcctcccgccaag

SEQ ID NO: 35071 - DNA, 50 bp, unidentified
  source 1..50: mol_type = unassigned DNA; note = donor_773d176
  misc_feature 1..24: note = RE
  misc_feature 25: note = Core
  misc_feature 26..50: note = LE
tgccacaagggaggcgtccatataatggtatggacgcctcccgccgcatc

SEQ ID NO: 35072 - DNA, 50 bp, unidentified
  source 1..50: mol_type = unassigned DNA; note = donor_773ee7a
  misc_feature 1..24: note = RE
  misc_feature 25: note = Core
  misc_feature 26..50: note = LE
gacttgacaaacaacacggttactcttgtatgttctcaggcgaccggcac

SEQ ID NO: 35073 - DNA, 50 bp, unidentified
  source 1..50: mol_type = unassigned DNA; note = donor_7742f1c
  misc_feature 1..24: note = RE
  misc_feature 25: note = Core
  misc_feature 26..50: note = LE
aaaacaaaggttaggtttcacagtactcccatgtcctgcacacttgacac

SEQ ID NO: 35074 - DNA, 50 bp, unidentified
  source 1..50: mol_type = unassigned DNA; note = donor_774a361
  misc_feature 1..21: note = RE
  misc_feature 22..25: note = Core
  misc_feature 26..50: note = LE
cggcagcttgacatagggctactcactggtccaccatgtctgtgttggtg

SEQ ID NO: 35075 - DNA, 50 bp, unidentified
  source 1..50: mol_type = unassigned DNA; note = donor_774e085
  misc_feature 1..21: note = RE
  misc_feature 22..25: note = Core
  misc_feature 26..50: note = LE
tgcgtgacttgacctagagagctcattggatgagtatggggacgcgggtc

SEQ ID NO: 35076 - DNA, 50 bp, unidentified
  source 1..50: mol_type = unassigned DNA; note = donor_7751f1a
  misc_feature 1..23: note = RE
  misc_feature 24..25: note = Core
  misc_feature 26..50: note = LE
gcatgggaggcggcaaccacacaagatggggtggttgccgccatctcccg

SEQ ID NO: 35077 - DNA, 50 bp, unidentified
  source 1..50: mol_type = unassigned DNA; note = donor_77551e9
  misc_feature 1..23: note = RE
  misc_feature 24..25: note = Core
  misc_feature 26..50: note = LE
gtaacacctgaggcgtccatatatgatgtgatggacgccccttcctaagg

SEQ ID NO: 35078 - DNA, 50 bp, unidentified
  source 1..50: mol_type = unassigned DNA; note = donor_775cc71
  misc_feature 1..23: note = RE
  misc_feature 24..25: note = Core
  misc_feature 26..50: note = LE
gggcttgacttttaatagttagtcttgtattatagagtcgtagcgttata

SEQ ID NO: 35079 - DNA, 50 bp, unidentified
  source 1..50: mol_type = unassigned DNA; note = donor_7762628
  misc_feature 1..21: note = RE
  misc_feature 22..25: note = Core
  misc_feature 26..50: note = LE
tcgcttgaccgcgaacataagagacgtcatgttcgcgggctgagccggtg

SEQ ID NO: 35080 - DNA, 50 bp, unidentified
  source 1..50: mol_type = unassigned DNA; note = donor_7765657
  misc_feature 1..24: note = RE
  misc_feature 25: note = Core
  misc_feature 26..50: note = LE
ggacttgacgtgacatagaagcatctgtaagtctctgaggtggctggcct

SEQ ID NO: 35081 - DNA, 50 bp, unidentified; identical to SEQ ID NO: 32910
  source 1..50: mol_type = unassigned DNA; note = donor_7767200
  misc_feature 1..23: note = RE
  misc_feature 24..25: note = Core
  misc_feature 26..50: note = LE

SEQ ID NO: 35082 - DNA, 50 bp, unidentified
  source 1..50: mol_type = unassigned DNA; note = donor_7767b72
  misc_feature 1..23: note = RE
  misc_feature 24..25: note = Core
  misc_feature 26..50: note = LE
agcgggcttgatcacaacggaaacttgtcttatgacttttccgctggttt

SEQ ID NO: 35083 - DNA, 50 bp, unidentified
  source 1..50: mol_type = unassigned DNA; note = donor_776db52
  misc_feature 1..23: note = RE
  misc_feature 24..25: note = Core
  misc_feature 26..50: note = LE
acccggaggttgacagagggtgtctgatgggtctaccttcccttcgcacg

SEQ ID NO: 35084 - DNA, 50 bp, unidentified
  source 1..50: mol_type = unassigned DNA; note = donor_776e302
  misc_feature 1..24: note = RE
  misc_feature 25: note = Core
  misc_feature 26..50: note = LE
gctacgacttattttcgtagcaaggactcatgaaagattttcacagctgt

SEQ ID NO: 35085 - DNA, 50 bp, unidentified
  source 1..50: mol_type = unassigned DNA; note = donor_777c640
  misc_feature 1..23: note = RE
  misc_feature 24..25: note = Core
  misc_feature 26..50: note = LE
tgcaccgcgggcgccgtcacacatgatgtggtggacggcgcccgctcccg

SEQ ID NO: 35086 - DNA, 50 bp, unidentified
  source 1..50: mol_type = unassigned DNA; note = donor_777f535
  misc_feature 1..23: note = RE
  misc_feature 24..25: note = Core
  misc_feature 26..50: note = LE
tgtccttgacttttgttagcaggttagtaccataaatagtgtaagaaaga

SEQ ID NO: 35087 - DNA, 50 bp, unidentified
  source 1..50: mol_type = unassigned DNA; note = donor_777fc4c
  misc_feature 1..22: note = RE
  misc_feature 23..25: note = Core
  misc_feature 26..50: note = LE
cttgacaataaagaccccatacaagatactatggggtggcggcgaggaaa

SEQ ID NO: 35088 - DNA, 50 bp, unidentified
  source 1..50: mol_type = unassigned DNA; note = donor_7783216
  misc_feature 1..23: note = RE
  misc_feature 24..25: note = Core
  misc_feature 26..50: note = LE
gacgaacaaaggcccattacagaagatgcctaatgggccggcgtctcacg

SEQ ID NO: 35089 - DNA, 50 bp, unidentified
  source 1..50: mol_type = unassigned DNA; note = donor_7789ed0
  misc_feature 1..23: note = RE
  misc_feature 24..25: note = Core
  misc_feature 26..50: note = LE
gacgcaactatgccgaatagagaagatgggatattcggcttgagccctat

SEQ ID NO: 35090 - DNA, 50 bp, unidentified; identical to SEQ ID NO: 32497
  source 1..50: mol_type = unassigned DNA; note = donor_7792eba
  misc_feature 1..24: note = RE
  misc_feature 25: note = Core
  misc_feature 26..50: note = LE

SEQ ID NO: 35091 - DNA, 50 bp, unidentified
  source 1..50: mol_type = unassigned DNA; note = donor_779d4a0
  misc_feature 1..23: note = RE
  misc_feature 24..25: note = Core
  misc_feature 26..50: note = LE
tggcttgacttttaatagttagtcttgtattatagagtagtagtttttat

SEQ ID NO: 35092 - DNA, 50 bp, unidentified
  source 1..50: mol_type = unassigned DNA; note = donor_77a91fc
  misc_feature 1..23: note = RE
  misc_feature 24..25: note = Core
  misc_feature 26..50: note = LE
tcgcttgacaacggagagagtatcttgtatcttcagtttcgaagtctcga

SEQ ID NO: 35093 - DNA, 50 bp, unidentified
  source 1..50: mol_type = unassigned DNA; note = donor_77ae454
  misc_feature 1..23: note = RE
  misc_feature 24..25: note = Core
  misc_feature 26..50: note = LE
gcaaaaaggggggtgaccatagattaatgagatggtcacccccaccctgt

SEQ ID NO: 35094 - DNA, 50 bp, unidentified
  source 1..50: mol_type = unassigned DNA; note = donor_77c2eef
  misc_feature 1..23: note = RE
  misc_feature 24..25: note = Core
  misc_feature 26..50: note = LE
tgacattcaagctcctgggatgtctaatcagttctgggagtgagccatcc

SEQ ID NO: 35095 - DNA, 50 bp, unidentified
  source 1..50: mol_type = unassigned DNA; note = donor_77c7ac7
  misc_feature 1..24: note = RE
  misc_feature 25: note = Core
  misc_feature 26..50: note = LE
tggatttgtgcttaacctagaatacctttgttcttaaaccttgtaattat

SEQ ID NO: 35096 - DNA, 50 bp, unidentified
  source 1..50: mol_type = unassigned DNA; note = donor_77c9e5d
  misc_feature 1..23: note = RE
  misc_feature 24..25: note = Core
  misc_feature 26..50: note = LE
aaactgcttgatcaagacggatacttgtcttatgatttttaagcttcatc

SEQ ID NO: 35097 - DNA, 50 bp, unidentified
  source 1..50: mol_type = unassigned DNA; note = donor_77cef68
  misc_feature 1..22: note = RE
  misc_feature 23..25: note = Core
  misc_feature 26..50: note = LE
catcttacggggcgtccacagatgatggggtggacgccccccgacggcct

SEQ ID NO: 35098 - DNA, 50 bp, unidentified
  source 1..50: mol_type = unassigned DNA; note = donor_77cf59e
  misc_feature 1..23: note = RE
  misc_feature 24..25: note = Core
  misc_feature 26..50: note = LE
cggcttgacaacacgattggaaagtcctacctttcaagggtggttgctct

SEQ ID NO: 35099 - DNA, 50 bp, unidentified
  source 1..50: mol_type = unassigned DNA; note = donor_77d9ea5
  misc_feature 1..23: note = RE
  misc_feature 24..25: note = Core
  misc_feature 26..50: note = LE
tcgcttgaccggcaagacggtatcttgtatctttctctccgtgatggtta

SEQ ID NO: 35100 - DNA, 50 bp, unidentified
  source 1..50: mol_type = unassigned DNA; note = donor_77dfd89
  misc_feature 1..23: note = RE
  misc_feature 24..25: note = Core
  misc_feature 26..50: note = LE
gacaccaaccgcgcttgggatgtctaatggggatcggccatctcgttcgt

SEQ ID NO: 35101 - DNA, 50 bp, unidentified
  source 1..50: mol_type = unassigned DNA; note = donor_77e305f
  misc_feature 1..22: note = RE
  misc_feature 23..25: note = Core
  misc_feature 26..50: note = LE
tgccatagggggcgtccacatatgatgatgtggacgcccccgcgccggcg

SEQ ID NO: 35102 - DNA, 50 bp, unidentified
  source 1..50: mol_type = unassigned DNA; note = donor_77ea57b
  misc_feature 1..22: note = RE
  misc_feature 23..25: note = Core
  misc_feature 26..50: note = LE
ggggagcgatgaaagacagttggcttgtgtctttgatcagggtaatgtct

SEQ ID NO: 35103 - DNA, 50 bp, unidentified
  source 1..50: mol_type = unassigned DNA; note = donor_77ea6b8
  misc_feature 1..23: note = RE
  misc_feature 24..25: note = Core
  misc_feature 26..50: note = LE
gcgtcacacggggcgtccacacatgatggggtggacgccccccaacggcc

SEQ ID NO: 35104 - DNA, 50 bp, unidentified
  source 1..50: mol_type = unassigned DNA; note = donor_77f23cd
  misc_feature 1..24: note = RE
  misc_feature 25: note = Core
  misc_feature 26..50: note = LE
caaccacttgacacaaagaggcttctgattgatacttggggcgcgttgcg

SEQ ID NO: 35105 - DNA, 50 bp, unidentified; identical to SEQ ID NO: 30838
  source 1..50: mol_type = unassigned DNA; note = donor_77f89a0
  misc_feature 1..23: note = RE
  misc_feature 24..25: note = Core
  misc_feature 26..50: note = LE

SEQ ID NO: 35106 - DNA, 50 bp, unidentified
  source 1..50: mol_type = unassigned DNA; note = donor_77f93cd
  misc_feature 1..24: note = RE
  misc_feature 25: note = Core
  misc_feature 26..50: note = LE
tgcaaaacggaggtagtccatagataatgggatggactacctcctcccgc

SEQ ID NO: 35107 - DNA, 50 bp, unidentified
  source 1..50: mol_type = unassigned DNA; note = donor_7804c80
  misc_feature 1..23: note = RE
  misc_feature 24..25: note = Core
  misc_feature 26..50: note = LE
aaccagcttgaccaagacggatacttgtcttatgacttttcgtgccgatt

SEQ ID NO: 35108 - DNA, 50 bp, unidentified
  source 1..50: mol_type = unassigned DNA; note = donor_7804ee1
  misc_feature 1..23: note = RE
  misc_feature 24..25: note = Core
  misc_feature 26..50: note = LE
ttatttggattttaatatagttcgtcgtacatttgtacggtaaaaaaatt

SEQ ID NO: 35109 - DNA, 50 bp, unidentified; identical to SEQ ID NO: 31428
  source 1..50: mol_type = unassigned DNA; note = donor_780a77c
  misc_feature 1..22: note = RE
  misc_feature 23..25: note = Core
  misc_feature 26..50: note = LE

SEQ ID NO: 35110 - DNA, 50 bp, unidentified
  source 1..50: mol_type = unassigned DNA; note = donor_7814589
  misc_feature 1..24: note = RE
  misc_feature 25: note = Core
  misc_feature 26..50: note = LE
cagacttgacgaatataggagcgtctgtgagtcttggcatgtcggtaccg

SEQ ID NO: 35111 - DNA, 50 bp, unidentified
  source 1..50: mol_type = unassigned DNA; note = donor_7815827
  misc_feature 1..24: note = RE
  misc_feature 25: note = Core
  misc_feature 26..50: note = LE
atgacttgaccccaataggagcgtctgcgatgatcccggcggtcacggtc

SEQ ID NO: 35112 - DNA, 50 bp, unidentified
  source 1..50: mol_type = unassigned DNA; note = donor_781ecd6
  misc_feature 1..23: note = RE
  misc_feature 24..25: note = Core
  misc_feature 26..50: note = LE
taattaggtaattaagatagtacctcatatctttacattattatatcaaa

SEQ ID NO: 35113 - DNA, 50 bp, unidentified
  source 1..50: mol_type = unassigned DNA; note = donor_7821b5d
  misc_feature 1..22: note = RE
  misc_feature 23..25: note = Core
  misc_feature 26..50: note = LE
cactaacggagacgtccacacatgatggtgtggacggctccaccccgacg

SEQ ID NO: 35114 - DNA, 50 bp, unidentified
  source 1..50: mol_type = unassigned DNA; note = donor_7823c38
  misc_feature 1..23: note = RE
  misc_feature 24..25: note = Core
  misc_feature 26..50: note = LE
tgcaaacgggggacgttcatgtagaatgaaatgaacgtcccccacccatc

SEQ ID NO: 35115 - DNA, 50 bp, unidentified
  source 1..50: mol_type = unassigned DNA; note = donor_78250cb
  misc_feature 1..23: note = RE
  misc_feature 24..25: note = Core
  misc_feature 26..50: note = LE
agtcttgacttttaatagttagtctcgtattatatagtagtagtgtttat

SEQ ID NO: 35116 - DNA, 50 bp, unidentified; identical to SEQ ID NO: 33701
  source 1..50: mol_type = unassigned DNA; note = donor_782beb4
  misc_feature 1..23: note = RE
  misc_feature 24..25: note = Core
  misc_feature 26..50: note = LE

SEQ ID NO: 35117 - DNA, 50 bp, unidentified
  source 1..50: mol_type = unassigned DNA; note = donor_7834120
  misc_feature 1..22: note = RE
  misc_feature 23..25: note = Core
  misc_feature 26..50: note = LE
aaacttgtttttgatcttggaatgcctttagtttgtatttcaaatatata

SEQ ID NO: 35118 - DNA, 50 bp, unidentified
  source 1..50: mol_type = unassigned DNA; note = donor_78373ae
  misc_feature 1..24: note = RE
  misc_feature 25: note = Core
  misc_feature 26..50: note = LE
tgcaaaaccggggcagaccatacataatggaatggtctgcccctcctgcc

SEQ ID NO: 35119 - DNA, 50 bp, unidentified
  source 1..50: mol_type = unassigned DNA; note = donor_783e583
  misc_feature 1..22: note = RE
  misc_feature 23..25: note = Core
  misc_feature 26..50: note = LE
caacgcaggggccgtccatacatgatggggtggacggcccctgcacccgc

SEQ ID NO: 35120 - DNA, 50 bp, unidentified; identical to SEQ ID NO: 31212
  source 1..50: mol_type = unassigned DNA; note = donor_7840163
  misc_feature 1..24: note = RE
  misc_feature 25: note = Core
  misc_feature 26..50: note = LE

SEQ ID NO: 35121 - DNA, 50 bp, unidentified
  source 1..50: mol_type = unassigned DNA; note = donor_7841cd6
  misc_feature 1..23: note = RE
  misc_feature 24..25: note = Core
  misc_feature 26..50: note = LE
gacccaaaggagccgtccacacatgttggtgtggacggccccacggcatc

SEQ ID NO: 35122 - DNA, 50 bp, unidentified
  source 1..50: mol_type = unassigned DNA; note = donor_784c8b0
  misc_feature 1..23: note = RE
  misc_feature 24..25: note = Core
  misc_feature 26..50: note = LE
acgcttgacgcgaaagacagtcgcttgtatctcacggttgccgaccggct

SEQ ID NO: 35123 - DNA, 50 bp, unidentified
  source 1..50: mol_type = unassigned DNA; note = donor_784f8bd
  misc_feature 1..23: note = RE
  misc_feature 24..25: note = Core
  misc_feature 26..50: note = LE
cggcttgacaacctcattgagaatccttacctttcttggagggtgttcgg

SEQ ID NO: 35124 - DNA, 50 bp, unidentified
  source 1..50: mol_type = unassigned DNA; note = donor_785a9d9
  misc_feature 1..23: note = RE
  misc_feature 24..25: note = Core
  misc_feature 26..50: note = LE
gcagaaacgggatgaccataaatttaatgagatggtcatccccaccctcc

SEQ ID NO: 35125 - DNA, 50 bp, unidentified
  source 1..50: mol_type = unassigned DNA; note = donor_785df2a
  misc_feature 1..23: note = RE
  misc_feature 24..25: note = Core
  misc_feature 26..50: note = LE
atcaggcttgaccatcacggatacttgttttatgacttcggtcggctcct

SEQ ID NO: 35126 - DNA, 50 bp, unidentified
  source 1..50: mol_type = unassigned DNA; note = donor_78600db
  misc_feature 1..24: note = RE
  misc_feature 25: note = Core
  misc_feature 26..50: note = LE
tgcaaaagtggggagtaccatacataattagatggtactccccacacccc

SEQ ID NO: 35127 - DNA, 50 bp, unidentified
  source 1..50: mol_type = unassigned DNA; note = donor_787101e
  misc_feature 1..24: note = RE
  misc_feature 25: note = Core
  misc_feature 26..50: note = LE
catgatcacttgacataggagcttcacttcctcagaatggtgcgggtgag

SEQ ID NO: 35128 - DNA, 50 bp, unidentified
  source 1..50: mol_type = unassigned DNA; note = donor_78a6711
  misc_feature 1..21: note = RE
  misc_feature 22..25: note = Core
  misc_feature 26..50: note = LE
cttgacgaccccatagagacaccccgttaccttcttgatcaagcccggtg

SEQ ID NO: 35129 - DNA, 50 bp, unidentified
  source 1..50: mol_type = unassigned DNA; note = donor_78a92a3
  misc_feature 1..23: note = RE
  misc_feature 24..25: note = Core
  misc_feature 26..50: note = LE
gttcttgacttattaccacatgactcgtatattaaaaataatccttttgt

SEQ ID NO: 35130 - DNA, 50 bp, unidentified
  source 1..50: mol_type = unassigned DNA; note = donor_78b5109
  misc_feature 1..23: note = RE
  misc_feature 24..25: note = Core
  misc_feature 26..50: note = LE
tgctaaacgggccgttccacatatgatggtgtggaacggccctcctcagg

SEQ ID NO: 35131 - DNA, 50 bp, unidentified; identical to SEQ ID NO: 35007
  source 1..50: mol_type = unassigned DNA; note = donor_78ce472
  misc_feature 1..22: note = RE
  misc_feature 23..25: note = Core
  misc_feature 26..50: note = LE

SEQ ID NO: 35132 - DNA, 50 bp, unidentified
  source 1..50: mol_type = unassigned DNA; note = donor_78d1df5
  misc_feature 1..23: note = RE
  misc_feature 24..25: note = Core
  misc_feature 26..50: note = LE
tgtttgatttggagagatggtatcttgtatctctccaatctaatgatata

SEQ ID NO: 35133 - DNA, 50 bp, unidentified
  source 1..50: mol_type = unassigned DNA; note = donor_78db4cf
  misc_feature 1..22: note = RE
  misc_feature 23..25: note = Core
  misc_feature 26..50: note = LE
cgatccgggaggcgcccatataagatggtatgggcgcctccctccggcaa

SEQ ID NO: 35134 - DNA, 50 bp, unidentified
  source 1..50: mol_type = unassigned DNA; note = donor_78dec47
  misc_feature 1..22: note = RE
  misc_feature 23..25: note = Core
  misc_feature 26..50: note = LE
ccaaaaccgagccgtccacacatgatgctgtggacggctcctccgtcggc

SEQ ID NO: 35135 - DNA, 50 bp, unidentified
  source 1..50: mol_type = unassigned DNA; note = donor_78ee40e
  misc_feature 1..23: note = RE
  misc_feature 24..25: note = Core
  misc_feature 26..50: note = LE
accgttgacaggaaagacggtatcttgtatcttgtttcccgtggtggtga

SEQ ID NO: 35136 - DNA, 50 bp, unidentified
  source 1..50: mol_type = unassigned DNA; note = donor_78f461b
  misc_feature 1..22: note = RE
  misc_feature 23..25: note = Core
  misc_feature 26..50: note = LE
gacgaacggaacgcgattagacaacatggggtaatcgcggcgcgatcgcc

SEQ ID NO: 35137 - DNA, 50 bp, unidentified
  source 1..50: mol_type = unassigned DNA; note = donor_78faaff
  misc_feature 1..24: note = RE
  misc_feature 25: note = Core
  misc_feature 26..50: note = LE
gcggcttgacacccataggagcatcagtgaggatgtggcgtggtgacgct

SEQ ID NO: 35138 - DNA, 50 bp, unidentified
  source 1..50: mol_type = unassigned DNA; note = donor_78fcedf
  misc_feature 1..22: note = RE
  misc_feature 23..25: note = Core
  misc_feature 26..50: note = LE
gcaaacggggaggcgttcatacagaatgagatgaacgctccccactcctt

SEQ ID NO: 35139 - DNA, 50 bp, unidentified; identical to SEQ ID NO: 32007
  source 1..50: mol_type = unassigned DNA; note = donor_7902765
  misc_feature 1..23: note = RE
  misc_feature 24..25: note = Core
  misc_feature 26..50: note = LE

SEQ ID NO: 35140 - DNA, 50 bp, unidentified
  source 1..50: mol_type = unassigned DNA; note = donor_79176e8
  misc_feature 1..24: note = RE
  misc_feature 25: note = Core
  misc_feature 26..50: note = LE
cctggcatagggggcgtccatgtacaatgggatggacgcccccacctgta

SEQ ID NO: 35141 - DNA, 50 bp, unidentified; identical to SEQ ID NO: 32048
  source 1..50: mol_type = unassigned DNA; note = donor_791a840
  misc_feature 1..24: note = RE
  misc_feature 25: note = Core
  misc_feature 26..50: note = LE

SEQ ID NO: 35142 - DNA, 50 bp, unidentified; identical to SEQ ID NO: 30838
  source 1..50: mol_type = unassigned DNA; note = donor_791f60f
  misc_feature 1..22: note = RE
  misc_feature 23..25: note = Core
  misc_feature 26..50: note = LE

SEQ ID NO: 35143 - DNA, 50 bp, unidentified
  source 1..50: mol_type = unassigned DNA; note = donor_79227c2
  misc_feature 1..24: note = RE
  misc_feature 25: note = Core
  misc_feature 26..50: note = LE
cttgcaggcggggcgggccatacgtatgggatggcccgctcctttccccc

SEQ ID NO: 35144 - DNA, 50 bp, unidentified
  source 1..50: mol_type = unassigned DNA; note = donor_7928684
  misc_feature 1..23: note = RE
  misc_feature 24..25: note = Core
  misc_feature 26..50: note = LE
tgacatccaacctccagggatgtctaatgggagctaccgggtcggccgcc

SEQ ID NO: 35145 - DNA, 50 bp, unidentified
  source 1..50: mol_type = unassigned DNA; note = donor_792bcc6
  misc_feature 1..24: note = RE
  misc_feature 25: note = Core
  misc_feature 26..50: note = LE
gcaaaaaagggggtgaccatagattaatgagatggtcacccccacaccct

SEQ ID NO: 35146 - DNA, 50 bp, unidentified
  source 1..50: mol_type = unassigned DNA; note = donor_7932a2e
  misc_feature 1..22: note = RE
  misc_feature 23..25: note = Core
  misc_feature 26..50: note = LE
actgttgacaacctgattgagattccttacctcgttgctcgggcggttcc

SEQ ID NO: 35147 - DNA, 50 bp, unidentified
  source 1..50: mol_type = unassigned DNA; note = donor_793e085
  misc_feature 1..24: note = RE
  misc_feature 25: note = Core
  misc_feature 26..50: note = LE
gacaacctggggggaatccatgtagaatgacatggattccccctcccgag

SEQ ID NO: 35148 - DNA, 50 bp, unidentified
  source 1..50: mol_type = unassigned DNA; note = donor_7953fb2
  misc_feature 1..24: note = RE
  misc_feature 25: note = Core
  misc_feature 26..50: note = LE
tggtggtttgcatatcctagaatacctttggactttaaagggggaaaact

SEQ ID NO: 35149 - DNA, 50 bp, unidentified
  source 1..50: mol_type = unassigned DNA; note = donor_79570f0
  misc_feature 1..23: note = RE
  misc_feature 24..25: note = Core
  misc_feature 26..50: note = LE
gaccaaccgaggcccgttacagaagatggggtaacgggctggggcttggc

SEQ ID NO: 35150 - DNA, 50 bp, unidentified
  source 1..50: mol_type = unassigned DNA; note = donor_795ab3d
  misc_feature 1..23: note = RE
  misc_feature 24..25: note = Core
  misc_feature 26..50: note = LE
accattgaccggaaacagagtatcttgtatgttgaaccttaatgaattga

SEQ ID NO: 35151 - DNA, 50 bp, unidentified; identical to SEQ ID NO: 30492
  source 1..50: mol_type = unassigned DNA; note = donor_796baad
  misc_feature 1..24: note = RE
  misc_feature 25: note = Core
  misc_feature 26..50: note = LE

SEQ ID NO: 35152 - DNA, 50 bp, unidentified
  source 1..50: mol_type = unassigned DNA; note = donor_7970815
  misc_feature 1..23: note = RE
  misc_feature 24..25: note = Core
  misc_feature 26..50: note = LE
ttcacttgaaaacaagacagttacttgtatcttggcatttcagccggtgt

SEQ ID NO: 35153 - DNA, 50 bp, unidentified
  source 1..50: mol_type = unassigned DNA; note = donor_7975646
  misc_feature 1..23: note = RE
  misc_feature 24..25: note = Core
  misc_feature 26..50: note = LE
tgcagcccgggccgttccacatatgatggtgtggaacggcccttcgaacc

SEQ ID NO: 35154 - DNA, 50 bp, unidentified
  source 1..50: mol_type = unassigned DNA; note = donor_79827c1
  misc_feature 1..23: note = RE
  misc_feature 24..25: note = Core
  misc_feature 26..50: note = LE
ccccttgactttttatttgcagactattacaatagatttacggttagagg

SEQ ID NO: 35155 - DNA, 50 bp, unidentified
  source 1..50: mol_type = unassigned DNA; note = donor_7989f64
  misc_feature 1..22: note = RE
  misc_feature 23..25: note = Core
  misc_feature 26..50: note = LE
ttgccataggggcgtccacatatgatgatgtggacgcccccgcaccggct

SEQ ID NO: 35156 - DNA, 50 bp, unidentified
  source 1..50: mol_type = unassigned DNA; note = donor_7991895
  misc_feature 1..21: note = RE
  misc_feature 22..25: note = Core
  misc_feature 26..50: note = LE
ttgacgaacgacatagggacaccccgttaccttcttcgtggtccccgggt

SEQ ID NO: 35157 - DNA, 50 bp, unidentified
  source 1..50: mol_type = unassigned DNA; note = donor_799ed3e
  misc_feature 1..24: note = RE
  misc_feature 25: note = Core
  misc_feature 26..50: note = LE
tggcaaaacgggggtgtccatgtacaatgggatggacgcccccacccgta

SEQ ID NO: 35158 - DNA, 50 bp, unidentified
  source 1..50: mol_type = unassigned DNA; note = donor_79a9fc9
  misc_feature 1..24: note = RE
  misc_feature 25: note = Core
  misc_feature 26..50: note = LE
ttggcaaatgtgggcgtccatgtataatggaatggacgcccactacccta

SEQ ID NO: 35159 - DNA, 50 bp, unidentified
  source 1..50: mol_type = unassigned DNA; note = donor_79ad03d
  misc_feature 1..23: note = RE
  misc_feature 24..25: note = Core
  misc_feature 26..50: note = LE
cagccgcttgacacacagaggcgctgacttgttcaatcgggcccagacgc

SEQ ID NO: 35160 - DNA, 50 bp, unidentified
  source 1..50: mol_type = unassigned DNA; note = donor_79b30b7
  misc_feature 1..24: note = RE
  misc_feature 25: note = Core
  misc_feature 26..50: note = LE
ttatttgttttttacctcagttcttcttaagtttgtcttttaataaattt

SEQ ID NO: 35161 - DNA, 50 bp, unidentified
  source 1..50: mol_type = unassigned DNA; note = donor_79b6940
  misc_feature 1..21: note = RE
  misc_feature 22..25: note = Core
  misc_feature 26..50: note = LE
aagcttgtttttaaacacagatcatcctatgtttgtataattattaaatt

SEQ ID NO: 35162 - DNA, 50 bp, unidentified
  source 1..50: mol_type = unassigned DNA; note = donor_79b8113
  misc_feature 1..23: note = RE
  misc_feature 24..25: note = Core
  misc_feature 26..50: note = LE
ctatacttgacaacttagagtatctcgtgtattgtcaaaagagagagtat

SEQ ID NO: 35163 - DNA, 50 bp, unidentified; identical to SEQ ID NO: 32462
  source 1..50: mol_type = unassigned DNA; note = donor_79bc638
  misc_feature 1..23: note = RE
  misc_feature 24..25: note = Core
  misc_feature 26..50: note = LE

SEQ ID NO: 35164 - DNA, 50 bp, unidentified
  source 1..50: mol_type = unassigned DNA; note = donor_79d1340
  misc_feature 1..23: note = RE
  misc_feature 24..25: note = Core
  misc_feature 26..50: note = LE
cagcttgacaacacgattgggaagtcctacctttcaggtgtgggtctgac

SEQ ID NO: 35165 - DNA, 50 bp, unidentified
  source 1..50: mol_type = unassigned DNA; note = donor_79f05f8
  misc_feature 1..24: note = RE
  misc_feature 25: note = Core
  misc_feature 26..50: note = LE
tgcattcagacggcggaccatacatactgagatggtccgccgcttgatct

SEQ ID NO: 35166 - DNA, 50 bp, unidentified
  source 1..50: mol_type = unassigned DNA; note = donor_79faf3a
  misc_feature 1..23: note = RE
  misc_feature 24..25: note = Core
  misc_feature 26..50: note = LE
ggtgttgacttttaatagttagtctcgtattatatagtagtagttattta

SEQ ID NO: 35167 - DNA, 50 bp, unidentified
  source 1..50: mol_type = unassigned DNA; note = donor_7a0852f
  misc_feature 1..23: note = RE
  misc_feature 24..25: note = Core
  misc_feature 26..50: note = LE
gcttgaaatttccagcgggatgatctaccatcggaatttagcagatagca

SEQ ID NO: 35168 - DNA, 50 bp, unidentified
  source 1..50: mol_type = unassigned DNA; note = donor_7a0f34f
  misc_feature 1..23: note = RE
  misc_feature 24..25: note = Core
  misc_feature 26..50: note = LE
ggggttgacttttaatagttaatcttgtattatagagtagtagtgattaa

SEQ ID NO: 35169 - DNA, 50 bp, unidentified
  source 1..50: mol_type = unassigned DNA; note = donor_7a1ea2e
  misc_feature 1..23: note = RE
  misc_feature 24..25: note = Core
  misc_feature 26..50: note = LE
ccttgaaaatccaagagggatgttctaccattggattttgcggagacgtg

SEQ ID NO: 35170 - DNA, 50 bp, unidentified
  source 1..50: mol_type = unassigned DNA; note = donor_7a27021
  misc_feature 1..22: note = RE
  misc_feature 23..25: note = Core
  misc_feature 26..50: note = LE
acttgacaattacattagcaagattcataatgtaagagtaaggtctatcc

SEQ ID NO: 35171 - DNA, 50 bp, unidentified
  source 1..50: mol_type = unassigned DNA; note = donor_7a34fce
  misc_feature 1..23: note = RE
  misc_feature 24..25: note = Core
  misc_feature 26..50: note = LE
tgacatccaagctccagggatgtctaatgggaactaccgggtccgcctca

SEQ ID NO: 35172 - DNA, 50 bp, unidentified
  source 1..50: mol_type = unassigned DNA; note = donor_7a3d299
  misc_feature 1..23: note = RE
  misc_feature 24..25: note = Core
  misc_feature 26..50: note = LE
tgacaggtttcgccatgggatgtctaatgagagttaccggctcggcccgt

SEQ ID NO: 35173 - DNA, 50 bp, unidentified; identical to SEQ ID NO: 32539
  source 1..50: mol_type = unassigned DNA; note = donor_7a45ba6
  misc_feature 1..24: note = RE
  misc_feature 25: note = Core
  misc_feature 26..50: note = LE

SEQ ID NO: 35174 - DNA, 50 bp, unidentified; identical to SEQ ID NO: 32122
  source 1..50: mol_type = unassigned DNA; note = donor_7a4dad3
  misc_feature 1..24: note = RE
  misc_feature 25: note = Core
  misc_feature 26..50: note = LE

SEQ ID NO: 35175 - DNA, 50 bp, unidentified
  source 1..50: mol_type = unassigned DNA; note = donor_7a500bf
  misc_feature 1..23: note = RE
  misc_feature 24..25: note = Core
  misc_feature 26..50: note = LE
atgatttggttttgtcatagaaatcctttagatttgtttttgataattta

SEQ ID NO: 35176 - DNA, 50 bp, unidentified
  source 1..50: mol_type = unassigned DNA; note = donor_7a532f0
  misc_feature 1..24: note = RE
  misc_feature 25: note = Core
  misc_feature 26..50: note = LE
accgcttgacaaacgacataggggcgttactttcttcgtgacccgttcgg

SEQ ID NO: 35177 - DNA, 50 bp, unidentified; identical to SEQ ID NO: 30783
  source 1..50: mol_type = unassigned DNA; note = donor_7a5d159
  misc_feature 1..22: note = RE
  misc_feature 23..25: note = Core
  misc_feature 26..50: note = LE

SEQ ID NO: 35178 - DNA, 50 bp, unidentified
  source 1..50: mol_type = unassigned DNA; note = donor_7a5dd7e
  misc_feature 1..24: note = RE
  misc_feature 25: note = Core
  misc_feature 26..50: note = LE
tggcattaagggggcgtccatgtacaatgggatggacgctcccaccctaa

SEQ ID NO: 35179 - DNA, 50 bp, unidentified
  source 1..50: mol_type = unassigned DNA; note = donor_7a617da
  misc_feature 1..23: note = RE
  misc_feature 24..25: note = Core
  misc_feature 26..50: note = LE
acgcttgacaagcaagacggttgcttgtatctttgcagctcggaccggct

SEQ ID NO: 35180 - DNA, 50 bp, unidentified
  source 1..50: mol_type = unassigned DNA; note = donor_7a78f79
  misc_feature 1..22: note = RE
  misc_feature 23..25: note = Core
  misc_feature 26..50: note = LE
accccaaaccgccgaatagagaagatgggatattcggccggcttggtcgc

SEQ ID NO: 35181 - DNA, 50 bp, unidentified
  source 1..50: mol_type = unassigned DNA; note = donor_7a7c564
  misc_feature 1..23: note = RE
  misc_feature 24..25: note = Core
  misc_feature 26..50: note = LE
gcaagccgggaggcgttcatatagaatgaaatgaacgcctcccaccctgt

SEQ ID NO: 35182 - DNA, 50 bp, unidentified
  source 1..50: mol_type = unassigned DNA; note = donor_7a7f641
  misc_feature 1..21: note = RE
  misc_feature 22..25: note = Core
  misc_feature 26..50: note = LE
atcacgggcggcaaccacagaagatggggtggttgccgccctcccgagac

SEQ ID NO: 35183 - DNA, 50 bp, unidentified
  source 1..50: mol_type = unassigned DNA; note = donor_7a8d61e
  misc_feature 1..22: note = RE
  misc_feature 23..25: note = Core
  misc_feature 26..50: note = LE
cgcgaacgggggtatccatacatgatggggtggataccccctcccgacgg

SEQ ID NO: 35184 - DNA, 50 bp, unidentified
  source 1..50: mol_type = unassigned DNA; note = donor_7a932f7
  misc_feature 1..23: note = RE
  misc_feature 24..25: note = Core
  misc_feature 26..50: note = LE
atagttgcaagagacttagaattcatttacttttgcactattcaataaca

SEQ ID NO: 35185 - DNA, 50 bp, unidentified
  source 1..50: mol_type = unassigned DNA; note = donor_7a983cc
  misc_feature 1..23: note = RE
  misc_feature 24..25: note = Core
  misc_feature 26..50: note = LE
gaccccagccggccgattagagaagatggggtaatcggccagagttcttg

SEQ ID NO: 35186 - DNA, 50 bp, unidentified
  source 1..50: mol_type = unassigned DNA; note = donor_7a9ea7e
  misc_feature 1..23: note = RE
  misc_feature 24..25: note = Core
  misc_feature 26..50: note = LE
gttattcctttctttatagagggagcattcctgtaatgaagaaaaatgag

SEQ ID NO: 35187 - DNA, 50 bp, unidentified
  source 1..50: mol_type = unassigned DNA; note = donor_7aa27a7
  misc_feature 1..24: note = RE
  misc_feature 25: note = Core
  misc_feature 26..50: note = LE
tgcaaacgaggaggagtccatacacaatgggatggactcctcctcacctg

SEQ ID NO: 35188 - DNA, 50 bp, unidentified
  source 1..50: mol_type = unassigned DNA; note = donor_7aa8d1d
  misc_feature 1..24: note = RE
  misc_feature 25: note = Core
  misc_feature 26..50: note = LE
accccttgaccaaagtcataggggcccccccattaccgtcttcgtagccc

SEQ ID NO: 35189 - DNA, 50 bp, unidentified
  source 1..50: mol_type = unassigned DNA; note = donor_7aa9232
  misc_feature 1..23: note = RE
  misc_feature 24..25: note = Core
  misc_feature 26..50: note = LE
ataagttgcatatgtcatagaaatcctttagatttgtaaaagaaaaatga

SEQ ID NO: 35190 - DNA, 50 bp, unidentified
  source 1..50: mol_type = unassigned DNA; note = donor_7ab6127
  misc_feature 1..23: note = RE
  misc_feature 24..25: note = Core
  misc_feature 26..50: note = LE
ttgacgaggggggtgtccacatatgatggtgtggacacccccgccacttc

SEQ ID NO: 35191 - DNA, 50 bp, unidentified
  source 1..50: mol_type = unassigned DNA; note = donor_7ab7214
  misc_feature 1..21: note = RE
  misc_feature 22..25: note = Core
  misc_feature 26..50: note = LE
ttgacaacgaacatagggacaccccgttacctttctggtggccccagacg

SEQ ID NO: 35192 - DNA, 50 bp, unidentified
  source 1..50: mol_type = unassigned DNA; note = donor_7ab7847
  misc_feature 1..23: note = RE
  misc_feature 24..25: note = Core
  misc_feature 26..50: note = LE
tgcaagtgagagccgtccacatatgttggtgtggacggctcccaacggca

SEQ ID NO: 35193 - DNA, 50 bp, unidentified
  source 1..50: mol_type = unassigned DNA; note = donor_7ab94f5
  misc_feature 1..24: note = RE
  misc_feature 25: note = Core
  misc_feature 26..50: note = LE
tgcagaaacgggggtgaccatagataatgggatggtcacccccacaccct

SEQ ID NO: 35194 - DNA, 50 bp, unidentified
  source 1..50: mol_type = unassigned DNA; note = donor_7abf5d8
  misc_feature 1..24: note = RE
  misc_feature 25: note = Core
  misc_feature 26..50: note = LE
gcaaaaacgggggcgatcatagattaatgagatgatcgcccccacctgcg

SEQ ID NO: 35195 - DNA, 50 bp, unidentified; identical to SEQ ID NO: 30609
  source 1..50: mol_type = unassigned DNA; note = donor_7ac6748
  misc_feature 1..22: note = RE
  misc_feature 23..25: note = Core
  misc_feature 26..50: note = LE

SEQ ID NO: 35196 - DNA, 50 bp, unidentified
  source 1..50: mol_type = unassigned DNA; note = donor_7ac83d8
  misc_feature 1..24: note = RE
  misc_feature 25: note = Core
  misc_feature 26..50: note = LE
tgcgacgcacggccggaccatacataatgggatggtccggccgtgttcct

SEQ ID NO: 35197 - DNA, 50 bp, unidentified
  source 1..50: mol_type = unassigned DNA; note = donor_7acd090
  misc_feature 1..23: note = RE
  misc_feature 24..25: note = Core
  misc_feature 26..50: note = LE
ggtgtaaaaaaaacgttactcagaattcccctcttttccaaaaaaaaata

SEQ ID NO: 35198 - DNA, 50 bp, unidentified
  source 1..50: mol_type = unassigned DNA; note = donor_7acd84e
  misc_feature 1..23: note = RE
  misc_feature 24..25: note = Core
  misc_feature 26..50: note = LE
acttgacaagcgacatagaaagtcttatattagctctgttgcagacattc

SEQ ID NO: 35199 - DNA, 50 bp, unidentified
  source 1..50: mol_type = unassigned DNA; note = donor_7ad4216
  misc_feature 1..21: note = RE
  misc_feature 22..25: note = Core
  misc_feature 26..50: note = LE
aggccgcttgacatagggctactcactggtccaccatccaagtgtcggca

SEQ ID NO: 35200 - DNA, 50 bp, unidentified
  source 1..50: mol_type = unassigned DNA; note = donor_7ad44a4
  misc_feature 1..24: note = RE
  misc_feature 25: note = Core
  misc_feature 26..50: note = LE
cggcccttgacaacaaacaggcttctgatagatggttctggtggacgtgg

SEQ ID NO: 35201 - DNA, 50 bp, unidentified
  source 1..50: mol_type = unassigned DNA; note = donor_7ad63db
  misc_feature 1..24: note = RE
  misc_feature 25: note = Core
  misc_feature 26..50: note = LE
cttgcagacggggcgggccatacgtatgggatggcccgcccctcaccgac

SEQ ID NO: 35202 - DNA, 50 bp, unidentified
  source 1..50: mol_type = unassigned DNA; note = donor_7ad8c85
  misc_feature 1..23: note = RE
  misc_feature 24..25: note = Core
  misc_feature 26..50: note = LE
ccaactcgggcggcgtccatataagatgagatggacgccgccctcttctg

SEQ ID NO: 35203 - DNA, 50 bp, unidentified
  source 1..50: mol_type = unassigned DNA; note = donor_7adf34f
  misc_feature 1..22: note = RE
  misc_feature 23..25: note = Core
  misc_feature 26..50: note = LE
tcctgatccttcacaacagttgcttgtgtcttggtttcggactacaatcg

SEQ ID NO: 35204 - DNA, 50 bp, unidentified
  source 1..50: mol_type = unassigned DNA; note = donor_7ae0d25
  misc_feature 1..23: note = RE
  misc_feature 24..25: note = Core
  misc_feature 26..50: note = LE
gggcttgacttttatttgcaggtctgttacaatgtaattgacgggtaaaa

SEQ ID NO: 35205 - DNA, 50 bp, unidentified
  source 1..50: mol_type = unassigned DNA; note = donor_7aea4c2
  misc_feature 1..24: note = RE
  misc_feature 25: note = Core
  misc_feature 26..50: note = LE
aaaatctactttatttttcactcttttttgtcattcctttcgcttcgctc

SEQ ID NO: 35206 - DNA, 50 bp, unidentified
  source 1..50: mol_type = unassigned DNA; note = donor_7aea9c9
  misc_feature 1..23: note = RE
  misc_feature 24..25: note = Core
  misc_feature 26..50: note = LE
gctttcgagggggcgtccacacacgatggggtggacgcccccactcgacg

SEQ ID NO: 35207 - DNA, 50 bp, unidentified
  source 1..50: mol_type = unassigned DNA; note = donor_7aec33b
  misc_feature 1..23: note = RE
  misc_feature 24..25: note = Core
  misc_feature 26..50: note = LE
cgcctgaggtgacaacacagttgcctgtctgttggcgaagtggtagcgtt

SEQ ID NO: 35208 - DNA, 50 bp, unidentified
  source 1..50: mol_type = unassigned DNA; note = donor_7af6b83
  misc_feature 1..23: note = RE
  misc_feature 24..25: note = Core
  misc_feature 26..50: note = LE
gccaactcggagccgtccacacatgatgctgtggacggctcctccacggg

SEQ ID NO: 35209 - DNA, 50 bp, unidentified
  source 1..50: mol_type = unassigned DNA; note = donor_7af8542
  misc_feature 1..23: note = RE
  misc_feature 24..25: note = Core
  misc_feature 26..50: note = LE
gcaaaatgggaagagaccatatacgatgtaatggtctcctcccccttata

SEQ ID NO: 35210 - DNA, 50 bp, unidentified; identical to SEQ ID NO: 30811
  source 1..50: mol_type = unassigned DNA; note = donor_7afaddd
  misc_feature 1..23: note = RE
  misc_feature 24..25: note = Core
  misc_feature 26..50: note = LE

SEQ ID NO: 35211 - DNA, 50 bp, unidentified
  source 1..50: mol_type = unassigned DNA; note = donor_7b0641f
  misc_feature 1..24: note = RE
  misc_feature 25: note = Core
  misc_feature 26..50: note = LE
cgaccacttgacacagagaggattctgcttcagacttgacgtgacgagtc

SEQ ID NO: 35212 - DNA, 50 bp, unidentified
  source 1..50: mol_type = unassigned DNA; note = donor_7b0b9f4
  misc_feature 1..22: note = RE
  misc_feature 23..25: note = Core
  misc_feature 26..50: note = LE
ctattgacatttaatagttagtcttgtattatataaatatagttaaatat

SEQ ID NO: 35213 - DNA, 50 bp, unidentified
  source 1..50: mol_type = unassigned DNA; note = donor_7b0f892
  misc_feature 1..23: note = RE
  misc_feature 24..25: note = Core
  misc_feature 26..50: note = LE
gcattaacggaagcatccacacatgatggggtggatgcttcctcccgacg

SEQ ID NO: 35214 - DNA, 50 bp, unidentified
  source 1..50: mol_type = unassigned DNA; note = donor_7b0f907
  misc_feature 1..24: note = RE
  misc_feature 25: note = Core
  misc_feature 26..50: note = LE
attatttggttttatcatagtaatcctttagatttgctaaatgtaaaatt

SEQ ID NO: 35215 - DNA, 50 bp, unidentified
  source 1..50: mol_type = unassigned DNA; note = donor_7b17084
  misc_feature 1..24: note = RE
  misc_feature 25: note = Core
  misc_feature 26..50: note = LE
aatccccttgacacaaagaggcttctgattgatacttgtgtcgggtgttg

SEQ ID NO: 35216 - DNA, 50 bp, unidentified
  source 1..50: mol_type = unassigned DNA; note = donor_7b2ab35
  misc_feature 1..23: note = RE
  misc_feature 24..25: note = Core
  misc_feature 26..50: note = LE
tctattgacttttaatagttagtctcgtattatatatttatagtatttaa

SEQ ID NO: 35217 - DNA, 50 bp, unidentified
  source 1..50: mol_type = unassigned DNA; note = donor_7b2dd55
  misc_feature 1..24: note = RE
  misc_feature 25: note = Core
  misc_feature 26..50: note = LE
gcaaaaatcgggctgaccatagattaatgagatggtcagcccgatcccca

SEQ ID NO: 35218 - DNA, 50 bp, unidentified
  source 1..50: mol_type = unassigned DNA; note = donor_7b32eab
  misc_feature 1..23: note = RE
  misc_feature 24..25: note = Core
  misc_feature 26..50: note = LE
gaccccagccggccgattagagaagatggggtaatcggccggcagcttgt

SEQ ID NO: 35219 - DNA, 50 bp, unidentified
  source 1..50: mol_type = unassigned DNA; note = donor_7b375a1
  misc_feature 1..24: note = RE
  misc_feature 25: note = Core
  misc_feature 26..50: note = LE
cttgcggacccgaaccgatgcaggttagatgacatgcatcgggccgtact

SEQ ID NO: 35220 - DNA, 50 bp, unidentified
  source 1..50: mol_type = unassigned DNA; note = donor_7b3d452
  misc_feature 1..23: note = RE
  misc_feature 24..25: note = Core
  misc_feature 26..50: note = LE
gccaaccaggagccgtccacacatgatgctgtggacggctcctccctggg

SEQ ID NO: 35221 - DNA, 50 bp, unidentified
  source 1..50: mol_type = unassigned DNA; note = donor_7b46c7e
  misc_feature 1..23: note = RE
  misc_feature 24..25: note = Core
  misc_feature 26..50: note = LE
gtgccacggaggccgtccacatatgatggtgtggacggccccctacggca

SEQ ID NO: 35222 - DNA, 50 bp, unidentified
  source 1..50: mol_type = unassigned DNA; note = donor_7b49e27
  misc_feature 1..21: note = RE
  misc_feature 22..25: note = Core
  misc_feature 26..50: note = LE
ctattgacttttaatagttagtcacgtataatcaatcttaaggaattatt

SEQ ID NO: 35223 - DNA, 50 bp, unidentified
  source 1..50: mol_type = unassigned DNA; note = donor_7b4a6f9
  misc_feature 1..23: note = RE
  misc_feature 24..25: note = Core
  misc_feature 26..50: note = LE
tgccaacaggggccgtccacatatgatgatgtggacggccccgcccgaac

SEQ ID NO: 35224 - DNA, 50 bp, unidentified
  source 1..50: mol_type = unassigned DNA; note = donor_7b56e43
  misc_feature 1..24: note = RE
  misc_feature 25: note = Core
  misc_feature 26..50: note = LE
tgcaccgcacggccggaccatacataatgggatggtccggccgtgctccg

SEQ ID NO: 35225 - DNA, 50 bp, unidentified
  source 1..50: mol_type = unassigned DNA; note = donor_7b593b1
  misc_feature 1..22: note = RE
  misc_feature 23..25: note = Core
  misc_feature 26..50: note = LE
ttaattggaaatcaacacagaatctcctatgtttgcaaagagaataataa

SEQ ID NO: 35226 - DNA, 50 bp, unidentified; identical to SEQ ID NO: 35208
  source 1..50: mol_type = unassigned DNA; note = donor_7b63e51
  misc_feature 1..23: note = RE
  misc_feature 24..25: note = Core
  misc_feature 26..50: note = LE

SEQ ID NO: 35227 - DNA, 50 bp, unidentified
  source 1..50: mol_type = unassigned DNA; note = donor_7b73709
  misc_feature 1..23: note = RE
  misc_feature 24..25: note = Core
  misc_feature 26..50: note = LE
cgagcaggggggccgtccacgtatgttggggtggacggcccccgaacggc

SEQ ID NO: 35228 - DNA, 50 bp, unidentified
  source 1..50: mol_type = unassigned DNA; note = donor_7b847cd
  misc_feature 1..23: note = RE
  misc_feature 24..25: note = Core
  misc_feature 26..50: note = LE
gcaataatcgaggagtccatatatgatgatatggactcctcttcactccc

SEQ ID NO: 35229 - DNA, 50 bp, unidentified
  source 1..50: mol_type = unassigned DNA; note = donor_7b873ea
  misc_feature 1..24: note = RE
  misc_feature 25: note = Core
  misc_feature 26..50: note = LE
gacaaaagtgggtaagcccttgtagaatgaaagggacttccccgtcccat

SEQ ID NO: 35230 - DNA, 50 bp, unidentified; identical to SEQ ID NO: 33703
  source 1..50: mol_type = unassigned DNA; note = donor_7b8744d
  misc_feature 1..21: note = RE
  misc_feature 22..25: note = Core
  misc_feature 26..50: note = LE

SEQ ID NO: 35231 - DNA, 50 bp, unidentified; identical to SEQ ID NO: 34496
  source 1..50: mol_type = unassigned DNA; note = donor_7b8768f
  misc_feature 1..21: note = RE
  misc_feature 22..25: note = Core
  misc_feature 26..50: note = LE

SEQ ID NO: 35232 - DNA, 50 bp, unidentified
  source 1..50: mol_type = unassigned DNA; note = donor_7b97d44
  misc_feature 1..24: note = RE
  misc_feature 25: note = Core
  misc_feature 26..50: note = LE
ttagttgctttttaccacagttcttcttaagtttacaaagtagtaaattt

SEQ ID NO: 35233 - DNA, 50 bp, unidentified
  source 1..50: mol_type = unassigned DNA; note = donor_7b9c8bb
  misc_feature 1..24: note = RE
  misc_feature 25: note = Core
  misc_feature 26..50: note = LE
gctacttgacgcttagaagggcgtcagtaagaatatctgtgccagttgtt

SEQ ID NO: 35234 - DNA, 50 bp, unidentified
  source 1..50: mol_type = unassigned DNA; note = donor_7bb73bf
  misc_feature 1..21: note = RE
  misc_feature 22..25: note = Core
  misc_feature 26..50: note = LE
gccatggttgacacaggatgtctcactggactaccctttcgcgaaagtcc

SEQ ID NO: 35235 - DNA, 50 bp, unidentified
  source 1..50: mol_type = unassigned DNA; note = donor_7bc6939
  misc_feature 1..22: note = RE
  misc_feature 23..25: note = Core
  misc_feature 26..50: note = LE
aatattgacaaactattagctggttcgtaatataaggttaaccagatttt

SEQ ID NO: 35236 - DNA, 50 bp, unidentified
  source 1..50: mol_type = unassigned DNA; note = donor_7bcc94e
  misc_feature 1..24: note = RE
  misc_feature 25: note = Core
  misc_feature 26..50: note = LE
aggacttgacgaaacacataggggccgttaccttgtaggtagcccttgaa

SEQ ID NO: 35237 - DNA, 50 bp, unidentified
  source 1..50: mol_type = unassigned DNA; note = donor_7bcd781
  misc_feature 1..23: note = RE
  misc_feature 24..25: note = Core
  misc_feature 26..50: note = LE
acccttgacagctcttggcaggtttgctacaatgtcaacaggccggataa

SEQ ID NO: 35238 - DNA, 50 bp, unidentified
  source 1..50: mol_type = unassigned DNA; note = donor_7bce501
  misc_feature 1..24: note = RE
  misc_feature 25: note = Core
  misc_feature 26..50: note = LE
ttggcatatgggggcgtccatgtataatggcatggacgcccctgctcggc

SEQ ID NO: 35239 - DNA, 50 bp, unidentified
  source 1..50: mol_type = unassigned DNA; note = donor_7bcef95
  misc_feature 1..21: note = RE
  misc_feature 22..25: note = Core
  misc_feature 26..50: note = LE
cttgacaaccaccatagggacacccgttacattcattggtaggtcctcac

SEQ ID NO: 35240 - DNA, 50 bp, unidentified
  source 1..50: mol_type = unassigned DNA; note = donor_7bd969d
  misc_feature 1..23: note = RE
  misc_feature 24..25: note = Core
  misc_feature 26..50: note = LE
agccttgactttttatttgcaggctactacaatgattttatagttaatat

SEQ ID NO: 35241 - DNA, 50 bp, unidentified
  source 1..50: mol_type = unassigned DNA; note = donor_7beaae3
  misc_feature 1..24: note = RE
  misc_feature 25: note = Core
  misc_feature 26..50: note = LE
tggcaaaatggggacgaccatctataatgggatggtcgccccttcccgag

SEQ ID NO: 35242 - DNA, 50 bp, unidentified
  source 1..50: mol_type = unassigned DNA; note = donor_7beca9d
  misc_feature 1..23: note = RE
  misc_feature 24..25: note = Core
  misc_feature 26..50: note = LE
gcatccaaaggggcgtccacagatgatggggtggacgccccccgacggca

SEQ ID NO: 35243 - DNA, 50 bp, unidentified
  source 1..50: mol_type = unassigned DNA; note = donor_7bf5f92
  misc_feature 1..21: note = RE
  misc_feature 22..25: note = Core
  misc_feature 26..50: note = LE
ggcttgacttttaatagttagtcacgtataataaaaaccatctcgaaagg

SEQ ID NO: 35244 - DNA, 50 bp, unidentified
  source 1..50: mol_type = unassigned DNA; note = donor_7c034c3
  misc_feature 1..24: note = RE
  misc_feature 25: note = Core
  misc_feature 26..50: note = LE
tgcagaaatgggggtaaccatagataatgaaatggctacccccgcctcac

SEQ ID NO: 35245 - DNA, 50 bp, unidentified
  source 1..50: mol_type = unassigned DNA; note = donor_7c0c260
  misc_feature 1..24: note = RE
  misc_feature 25: note = Core
  misc_feature 26..50: note = LE
ttattttgaaaaatccataggaagctttaactttgcagcatatatataag

SEQ ID NO: 35246 - DNA, 50 bp, unidentified
  source 1..50: mol_type = unassigned DNA; note = donor_7c12115
  misc_feature 1..21: note = RE
  misc_feature 22..25: note = Core
  misc_feature 26..50: note = LE
cagcggcttgacacagggctactcactggtgcaccatccttgtgtcagca

SEQ ID NO: 35247 - DNA, 50 bp, unidentified
  source 1..50: mol_type = unassigned DNA; note = donor_7c1db41
  misc_feature 1..19: note = RE
  misc_feature 20..25: note = Core
  misc_feature 26..50: note = LE
ttgacaacctacatagggacaccccgttaccttgattctgtccccgtaag

SEQ ID NO: 35248 - DNA, 50 bp, unidentified
  source 1..50: mol_type = unassigned DNA; note = donor_7c39615
  misc_feature 1..22: note = RE
  misc_feature 23..25: note = Core
  misc_feature 26..50: note = LE
ataggacttgacaatagagggtcttatacattaaactaatgccaggcccc

SEQ ID NO: 35249 - DNA, 50 bp, unidentified
  source 1..50: mol_type = unassigned DNA; note = donor_7c3a391
  misc_feature 1..23: note = RE
  misc_feature 24..25: note = Core
  misc_feature 26..50: note = LE
gctcttgacagtggagacagttgcttgtatcttgaaccccgcatctcgat

SEQ ID NO: 35250 - DNA, 50 bp, unidentified
  source 1..50: mol_type = unassigned DNA; note = donor_7c3af9b
  misc_feature 1..24: note = RE
  misc_feature 25: note = Core
  misc_feature 26..50: note = LE
tggcaaaccggggacgaccatctataatgggatggtcgtcccctcctgaa

SEQ ID NO: 35251 - DNA, 50 bp, unidentified
  source 1..50: mol_type = unassigned DNA; note = donor_7c3c288
  misc_feature 1..24: note = RE
  misc_feature 25: note = Core
  misc_feature 26..50: note = LE
tgcaaaatgagaggagtccatatacaatgggatggactcctctcgactat

SEQ ID NO: 35252 - DNA, 50 bp, unidentified
  source 1..50: mol_type = unassigned DNA; note = donor_7c40524
  misc_feature 1..22: note = RE
  misc_feature 23..25: note = Core
  misc_feature 26..50: note = LE
acttgacaaaaacatagggacacccgttaccttgtgagtgtccccgataa

SEQ ID NO: 35253 - DNA, 50 bp, unidentified
  source 1..50: mol_type = unassigned DNA; note = donor_7c493b0
  misc_feature 1..23: note = RE
  misc_feature 24..25: note = Core
  misc_feature 26..50: note = LE
aaaaacatcgttcaagacagttgcttgtatcttagtaattcggtactatt

SEQ ID NO: 35254 - DNA, 50 bp, unidentified; identical to SEQ ID NO: 34514
  source 1..50: mol_type = unassigned DNA; note = donor_7c50240
  misc_feature 1..22: note = RE
  misc_feature 23..25: note = Core
  misc_feature 26..50: note = LE

SEQ ID NO: 35255 - DNA, 50 bp, unidentified
  source 1..50: mol_type = unassigned DNA; note = donor_7c51990
  misc_feature 1..22: note = RE
  misc_feature 23..25: note = Core
  misc_feature 26..50: note = LE
acgcctcagcagcgattagacaacatggggtaatcgcaggagcgagttgc

SEQ ID NO: 35256 - DNA, 50 bp, unidentified
  source 1..50: mol_type = unassigned DNA; note = donor_7c592c5
  misc_feature 1..23: note = RE
  misc_feature 24..25: note = Core
  misc_feature 26..50: note = LE
ttgcttgacttttaatagctggtctggtaaaatatagtcaaattgtcaca

SEQ ID NO: 35257 - DNA, 50 bp, unidentified
  source 1..50: mol_type = unassigned DNA; note = donor_7c5dfd3
  misc_feature 1..23: note = RE
  misc_feature 24..25: note = Core
  misc_feature 26..50: note = LE
aagcttgcattgcgacatagaatcttgtatgtttgttctgacaggtctaa

SEQ ID NO: 35258 - DNA, 50 bp, unidentified
  source 1..50: mol_type = unassigned DNA; note = donor_7c752ae
  misc_feature 1..24: note = RE
  misc_feature 25: note = Core
  misc_feature 26..50: note = LE
tgcaaggatggggcgggtcatacataatgggatggtccgccccgtctccc

SEQ ID NO: 35259 - DNA, 50 bp, unidentified
  source 1..50: mol_type = unassigned DNA; note = donor_7c7ba67
  misc_feature 1..23: note = RE
  misc_feature 24..25: note = Core
  misc_feature 26..50: note = LE
tgacatccgcggtccagggatgtctaatgggaggtatcaagcctggccgg

SEQ ID NO: 35260 - DNA, 50 bp, unidentified
  source 1..50: mol_type = unassigned DNA; note = donor_7c87083
  misc_feature 1..24: note = RE
  misc_feature 25: note = Core
  misc_feature 26..50: note = LE
accacttgacgaaaaacataggggcgttacgtttttcgtagcccgtttcc

SEQ ID NO: 35261 - DNA, 50 bp, unidentified
  source 1..50: mol_type = unassigned DNA; note = donor_7c8ac24
  misc_feature 1..23: note = RE
  misc_feature 24..25: note = Core
  misc_feature 26..50: note = LE
tgacatctaagctcctgggatgtctaatgagtgttagcgagttgccatac

SEQ ID NO: 35262 - DNA, 50 bp, unidentified; identical to SEQ ID NO: 34950
  source 1..50: mol_type = unassigned DNA; note = donor_7c8b644
  misc_feature 1..23: note = RE
  misc_feature 24..25: note = Core
  misc_feature 26..50: note = LE

SEQ ID NO: 35263 - DNA, 50 bp, unidentified
  source 1..50: mol_type = unassigned DNA; note = donor_7c8e96c
  misc_feature 1..23: note = RE
  misc_feature 24..25: note = Core
  misc_feature 26..50: note = LE
aagacgcttgatcaagacggatacttgtcttatggttttcccagcttttg

SEQ ID NO: 35264 - DNA, 50 bp, unidentified
  source 1..50: mol_type = unassigned DNA; note = donor_7c93a25
  misc_feature 1..24: note = RE
  misc_feature 25: note = Core
  misc_feature 26..50: note = LE
cctgggattgacatagaggggcgcctacttgttgtattgacctacggctg

SEQ ID NO: 35265 - DNA, 50 bp, unidentified
  source 1..50: mol_type = unassigned DNA; note = donor_7c96d9c
  misc_feature 1..23: note = RE
  misc_feature 24..25: note = Core
  misc_feature 26..50: note = LE
gacagcttcggggcgtgggatgtctaatggggatcgaccagctcgttcgg

SEQ ID NO: 35266 - DNA, 50 bp, unidentified; identical to SEQ ID NO: 30841
  source 1..50: mol_type = unassigned DNA; note = donor_7c9a84a
  misc_feature 1..23: note = RE
  misc_feature 24..25: note = Core
  misc_feature 26..50: note = LE

SEQ ID NO: 35267 - DNA, 50 bp, unidentified
  source 1..50: mol_type = unassigned DNA; note = donor_7cae1b7
  misc_feature 1..23: note = RE
  misc_feature 24..25: note = Core
  misc_feature 26..50: note = LE
acttgataatccaagaggaatgttctaccattgtattttacaggtgacgg

SEQ ID NO: 35268 - DNA, 50 bp, unidentified
  source 1..50: mol_type = unassigned DNA; note = donor_7cc7ede
  misc_feature 1..23: note = RE
  misc_feature 24..25: note = Core
  misc_feature 26..50: note = LE
gccaacagggggccgtccacacatgatgccgtggacggctcccacccgaa

SEQ ID NO: 35269 - DNA, 50 bp, unidentified
  source 1..50: mol_type = unassigned DNA; note = donor_7cdc829
  misc_feature 1..23: note = RE
  misc_feature 24..25: note = Core
  misc_feature 26..50: note = LE
acttgacaggtttaatacatatcagacataatgtattaaacctgtcctac

SEQ ID NO: 35270 - DNA, 50 bp, unidentified
  source 1..50: mol_type = unassigned DNA; note = donor_7cef3d1
  misc_feature 1..24: note = RE
  misc_feature 25: note = Core
  misc_feature 26..50: note = LE
accgcttgacaaacagaagggcgtcagtaagtatgcttaggccagtgttc

SEQ ID NO: 35271 - DNA, 50 bp, unidentified
  source 1..50: mol_type = unassigned DNA; note = donor_7cf6a2a
  misc_feature 1..21: note = RE
  misc_feature 22..25: note = Core
  misc_feature 26..50: note = LE
ccgcagcttgacacagggctactcactggtgcaccatccttgtatcggta

SEQ ID NO: 35272 - DNA, 50 bp, unidentified
  source 1..50: mol_type = unassigned DNA; note = donor_7cf833a
  misc_feature 1..21: note = RE
  misc_feature 22..25: note = Core
  misc_feature 26..50: note = LE
tattgacttttgttagcaggactcctacaatatagtttgtggacacggca

SEQ ID NO: 35273 - DNA, 50 bp, unidentified; identical to SEQ ID NO: 34440
  source 1..50: mol_type = unassigned DNA; note = donor_7cfecdd
  misc_feature 1..23: note = RE
  misc_feature 24..25: note = Core
  misc_feature 26..50: note = LE

SEQ ID NO: 35274 - DNA, 50 bp, unidentified
  source 1..50: mol_type = unassigned DNA; note = donor_7cffa40
  misc_feature 1..23: note = RE
  misc_feature 24..25: note = Core
  misc_feature 26..50: note = LE
aggtcgatgtggagagatggtatcttgtatctctccaggtgaagtgatta

SEQ ID NO: 35275 - DNA, 50 bp, unidentified
  source 1..50: mol_type = unassigned DNA; note = donor_7d07b9e
  misc_feature 1..23: note = RE
  misc_feature 24..25: note = Core
  misc_feature 26..50: note = LE
tggccgcttgacacagagaggtgccaacttgttgaatccggctggagttc

SEQ ID NO: 35276 - DNA, 50 bp, unidentified; identical to SEQ ID NO: 30412
  source 1..50: mol_type = unassigned DNA; note = donor_7d14c73
  misc_feature 1..23: note = RE
  misc_feature 24..25: note = Core
  misc_feature 26..50: note = LE

SEQ ID NO: 35277 - DNA, 50 bp, unidentified; identical to SEQ ID NO: 30383
  source 1..50: mol_type = unassigned DNA; note = donor_7d1e16c
  misc_feature 1..23: note = RE
  misc_feature 24..25: note = Core
  misc_feature 26..50: note = LE

SEQ ID NO: 35278 - DNA, 50 bp, unidentified
  source 1..50: mol_type = unassigned DNA; note = donor_7d2323c
  misc_feature 1..24: note = RE
  misc_feature 25: note = Core
  misc_feature 26..50: note = LE
ccgcttgacaacgggataggggcaccgttaccttcttgatcaccgttgga

SEQ ID NO: 35279 - DNA, 50 bp, unidentified
  source 1..50: mol_type = unassigned DNA; note = donor_7d2ab91
  misc_feature 1..23: note = RE
  misc_feature 24..25: note = Core
  misc_feature 26..50: note = LE
gcaggaggtgggctgaccatacattaatgagatggtcagcccggttcgag

SEQ ID NO: 35280 - DNA, 50 bp, unidentified; identical to SEQ ID NO: 31591
  source 1..50: mol_type = unassigned DNA; note = donor_7d30224
  misc_feature 1..23: note = RE
  misc_feature 24..25: note = Core
  misc_feature 26..50: note = LE

SEQ ID NO: 35281 - DNA, 50 bp, unidentified
  source 1..50: mol_type = unassigned DNA; note = donor_7d3902c
  misc_feature 1..23: note = RE
  misc_feature 24..25: note = Core
  misc_feature 26..50: note = LE
cctgttgtgctgtgccatagaatcttgtatggtttctctgcaggtccaaa

SEQ ID NO: 35282 - DNA, 50 bp, unidentified
  source 1..50: mol_type = unassigned DNA; note = donor_7d39af0
  misc_feature 1..24: note = RE
  misc_feature 25: note = Core
  misc_feature 26..50: note = LE
tagggttgactttttatttgaaggcctgttactatatatttggttgatgg

SEQ ID NO: 35283 - DNA, 50 bp, unidentified
  source 1..50: mol_type = unassigned DNA; note = donor_7d455d0
  misc_feature 1..22: note = RE
  misc_feature 23..25: note = Core
  misc_feature 26..50: note = LE
accaccaccgcccgaatagagaagatggggtattcggccggtcggcttgc

SEQ ID NO: 35284 - DNA, 50 bp, unidentified
  source 1..50: mol_type = unassigned DNA; note = donor_7d47356
  misc_feature 1..20: note = RE
  misc_feature 21..25: note = Core
  misc_feature 26..50: note = LE
cttgacttcatatagctggtctcctatctttaagtcgttgcatctgagag

SEQ ID NO: 35285 - DNA, 50 bp, unidentified
  source 1..50: mol_type = unassigned DNA; note = donor_7d49f5e
  misc_feature 1..23: note = RE
  misc_feature 24..25: note = Core
  misc_feature 26..50: note = LE
gcattttccggggtgtccacacacgatggggtggacacccctccgacggc

SEQ ID NO: 35286 - DNA, 50 bp, unidentified; identical to SEQ ID NO: 30492
  source 1..50: mol_type = unassigned DNA; note = donor_7d4cd7b
  misc_feature 1..24: note = RE
  misc_feature 25: note = Core
  misc_feature 26..50: note = LE

SEQ ID NO: 35287 - DNA, 50 bp, unidentified; identical to SEQ ID NO: 32366
  source 1..50: mol_type = unassigned DNA; note = donor_7d55079
  misc_feature 1..22: note = RE
  misc_feature 23..25: note = Core
  misc_feature 26..50: note = LE

SEQ ID NO: 35288 - DNA, 50 bp, unidentified; identical to SEQ ID NO: 32212
  source 1..50: mol_type = unassigned DNA; note = donor_7d65c68
  misc_feature 1..23: note = RE
  misc_feature 24..25: note = Core
  misc_feature 26..50: note = LE

SEQ ID NO: 35289 - DNA, 50 bp, unidentified
  source 1..50: mol_type = unassigned DNA; note = donor_7d67056
  misc_feature 1..23: note = RE
  misc_feature 24..25: note = Core
  misc_feature 26..50: note = LE
gcttgacaagcgtcatagaaagtcttatattaactctgttgaaggttgtc

SEQ ID NO: 35290 - DNA, 50 bp, unidentified; identical to SEQ ID NO: 31959
  source 1..50: mol_type = unassigned DNA; note = donor_7d69558
  misc_feature 1..23: note = RE
  misc_feature 24..25: note = Core
  misc_feature 26..50: note = LE

SEQ ID NO: 35291 - DNA, 50 bp, unidentified
  source 1..50: mol_type = unassigned DNA; note = donor_7d78ae3
  misc_feature 1..23: note = RE
  misc_feature 24..25: note = Core
  misc_feature 26..50: note = LE
gaacggtcgcgacttaatggttgcttgtaatagcgacttggattattgtc

SEQ ID NO: 35292 - DNA, 50 bp, unidentified
  source 1..50: mol_type = unassigned DNA; note = donor_7d7f033
  misc_feature 1..24: note = RE
  misc_feature 25: note = Core
  misc_feature 26..50: note = LE
tgcaaaagaggaggagtccatacacaatgggatggactcctcctcgcctt

SEQ ID NO: 35293 - DNA, 50 bp, unidentified; identical to SEQ ID NO: 32338
  source 1..50: mol_type = unassigned DNA; note = donor_7d846d9
  misc_feature 1..23: note = RE
  misc_feature 24..25: note = Core
  misc_feature 26..50: note = LE

SEQ ID NO: 35294 - DNA, 50 bp, unidentified; identical to SEQ ID NO: 35217
  source 1..50: mol_type = unassigned DNA; note = donor_7d8a59c
  misc_feature 1..23: note = RE
  misc_feature 24..25: note = Core
  misc_feature 26..50: note = LE

SEQ ID NO: 35295 - DNA, 50 bp, unidentified
  source 1..50: mol_type = unassigned DNA; note = donor_7d8f69d
  misc_feature 1..22: note = RE
  misc_feature 23..25: note = Core
  misc_feature 26..50: note = LE
ggacttgatttttattagcaggtctattacaatatatttggacaggaagc

SEQ ID NO: 35296 - DNA, 50 bp, unidentified
  source 1..50: mol_type = unassigned DNA; note = donor_7d8f85a
  misc_feature 1..23: note = RE
  misc_feature 24..25: note = Core
  misc_feature 26..50: note = LE
gcaaaacggctggcatccacacaagatggggcggatgccagccttctccg

SEQ ID NO: 35297 - DNA, 50 bp, unidentified
  source 1..50: mol_type = unassigned DNA; note = donor_7d8fbc0
  misc_feature 1..23: note = RE
  misc_feature 24..25: note = Core
  misc_feature 26..50: note = LE
acttgacaagcgtcatagaaagtcttatattaactccgtaggacgatttt

SEQ ID NO: 35298 - DNA, 50 bp, unidentified
  source 1..50: mol_type = unassigned DNA; note = donor_7db1e68
  misc_feature 1..23: note = RE
  misc_feature 24..25: note = Core
  misc_feature 26..50: note = LE
gggcttgatttttaatagttagtcttgtattatagagtagtagtttttag

SEQ ID NO: 35299 - DNA, 50 bp, unidentified
  source 1..50: mol_type = unassigned DNA; note = donor_7dbb137
  misc_feature 1..24: note = RE
  misc_feature 25: note = Core
  misc_feature 26..50: note = LE
ttgcaatcgggcggggtccatatacaatggtatggaccccgccctcgccc

SEQ ID NO: 35300 - DNA, 50 bp, unidentified
  source 1..50: mol_type = unassigned DNA; note = donor_7dbce82
  misc_feature 1..23: note = RE
  misc_feature 24..25: note = Core
  misc_feature 26..50: note = LE
ataacttgattttgtcatagaaatcctttagatttgtagaaaaatatatc

SEQ ID NO: 35301 - DNA, 50 bp, unidentified; identical to SEQ ID NO: 31714
  source 1..50: mol_type = unassigned DNA; note = donor_7dc5747
  misc_feature 1..23: note = RE
  misc_feature 24..25: note = Core
  misc_feature 26..50: note = LE

SEQ ID NO: 35302 - DNA, 50 bp, unidentified
  source 1..50: mol_type = unassigned DNA; note = donor_7dce3aa
  misc_feature 1..23: note = RE
  misc_feature 24..25: note = Core
  misc_feature 26..50: note = LE
ttacttgacttcatatagttagtcttgtataatgaacatgtagtcgttct

SEQ ID NO: 35303 - DNA, 50 bp, unidentified
  source 1..50: mol_type = unassigned DNA; note = donor_7dd77c2
  misc_feature 1..23: note = RE
  misc_feature 24..25: note = Core
  misc_feature 26..50: note = LE
ctacttgactttttttagcaggtctattacaatatgtttggatgtggaag

SEQ ID NO: 35304 - DNA, 50 bp, unidentified
  source 1..50: mol_type = unassigned DNA; note = donor_7dd8802
  misc_feature 1..22: note = RE
  misc_feature 23..25: note = Core
  misc_feature 26..50: note = LE
acaacttacggtcaaggggtgtctaatgggagtggaaggttgcttgattt

SEQ ID NO: 35305 - DNA, 50 bp, unidentified
  source 1..50: mol_type = unassigned DNA; note = donor_7ddb49a
  misc_feature 1..23: note = RE
  misc_feature 24..25: note = Core
  misc_feature 26..50: note = LE
gacgcccaagccgcgattagacaacatggggtaatcgccggagcggcgcc

SEQ ID NO: 35306 - DNA, 50 bp, unidentified
  source 1..50: mol_type = unassigned DNA; note = donor_7dea2b2
  misc_feature 1..23: note = RE
  misc_feature 24..25: note = Core
  misc_feature 26..50: note = LE
gctacctctccacatcacagttgcttgtgtacggaaaatggcggagagta

SEQ ID NO: 35307 - DNA, 50 bp, unidentified
  source 1..50: mol_type = unassigned DNA; note = donor_7dea59b
  misc_feature 1..22: note = RE
  misc_feature 23..25: note = Core
  misc_feature 26..50: note = LE
actaaatccggccgaatagagaagatggggtattcggcctgttgctgagc

SEQ ID NO: 35308 - DNA, 50 bp, unidentified
  source 1..50: mol_type = unassigned DNA; note = donor_7deb680
  misc_feature 1..22: note = RE
  misc_feature 23..25: note = Core
  misc_feature 26..50: note = LE
cggcttgactccgtcactgaaactccgtaagttgttcggtggcccgggag

SEQ ID NO: 35309 - DNA, 50 bp, unidentified
  source 1..50: mol_type = unassigned DNA; note = donor_7deddeb
  misc_feature 1..23: note = RE
  misc_feature 24..25: note = Core
  misc_feature 26..50: note = LE
cttgacaaaacgccccccatatcagaccgtatggggggctggggcctccg

SEQ ID NO: 35310 - DNA, 50 bp, unidentified
  source 1..50: mol_type = unassigned DNA; note = donor_7df6f66
  misc_feature 1..23: note = RE
  misc_feature 24..25: note = Core
  misc_feature 26..50: note = LE
gaaccctgcgggccgtccacacatgttgaggtggacggcccaacggcatc

SEQ ID NO: 35311 - DNA, 50 bp, unidentified
  source 1..50: mol_type = unassigned DNA; note = donor_7df7028
  misc_feature 1..24: note = RE
  misc_feature 25: note = Core
  misc_feature 26..50: note = LE
tggcaataagggggcgtccatgtataatggcatggacgcccctgcttggt

SEQ ID NO: 35312 - DNA, 50 bp, unidentified
  source 1..50: mol_type = unassigned DNA; note = donor_7e0ad12
  misc_feature 1..22: note = RE
  misc_feature 23..25: note = Core
  misc_feature 26..50: note = LE
ctttcctggagacgtccatgtaagatggcatggacgtctccacctacacc

SEQ ID NO: 35313 - DNA, 50 bp, unidentified
  source 1..50: mol_type = unassigned DNA; note = donor_7e0e3fa
  misc_feature 1..24: note = RE
  misc_feature 25: note = Core
  misc_feature 26..50: note = LE
tggcaaaccaggggcgaccatctataatggaatggtcgcccctttctaag

SEQ ID NO: 35314 - DNA, 50 bp, unidentified
  source 1..50: mol_type = unassigned DNA; note = donor_7e218d2
  misc_feature 1..22: note = RE
  misc_feature 23..25: note = Core
  misc_feature 26..50: note = LE
caaacagggagccatccacacaggatggggtggatggctcccgcccacgg

SEQ ID NO: 35315 - DNA, 50 bp, unidentified
  source 1..50: mol_type = unassigned DNA; note = donor_7e21908
  misc_feature 1..23: note = RE
  misc_feature 24..25: note = Core
  misc_feature 26..50: note = LE
tgtcttgacttttaagacggtatcttgtatctttatccaggtcgtgatta

SEQ ID NO: 35316 - DNA, 50 bp, unidentified
  source 1..50: mol_type = unassigned DNA; note = donor_7e32b92
  misc_feature 1..23: note = RE
  misc_feature 24..25: note = Core
  misc_feature 26..50: note = LE
tgacacttacagccgtgggatgtctaatagggattgatcgtcgtggtcgg

SEQ ID NO: 35317 - DNA, 50 bp, unidentified
  source 1..50: mol_type = unassigned DNA; note = donor_7e35cd3
  misc_feature 1..22: note = RE
  misc_feature 23..25: note = Core
  misc_feature 26..50: note = LE
cagcgcaggggccatccacagatgatgcggtggatggcccctgtgtccga

SEQ ID NO: 35318 - DNA, 50 bp, unidentified
  source 1..50: mol_type = unassigned DNA; note = donor_7e3829a
  misc_feature 1..23: note = RE
  misc_feature 24..25: note = Core
  misc_feature 26..50: note = LE
gcgagaagggggccgtccacatatgttggggtggacggcccccgcggcat

SEQ ID NO: 35319 - DNA, 50 bp, unidentified
  source 1..50: mol_type = unassigned DNA; note = donor_7e3cb0c
  misc_feature 1..23: note = RE
  misc_feature 24..25: note = Core
  misc_feature 26..50: note = LE
actggtctacttcaacacagttgcttgtgtctgcaaaatctgccagaatg

SEQ ID NO: 35320 - DNA, 50 bp, unidentified
  source 1..50: mol_type = unassigned DNA; note = donor_7e3f88c
  misc_feature 1..23: note = RE
  misc_feature 24..25: note = Core
  misc_feature 26..50: note = LE
aattttatcgttcaagacagttgcttgtatcttgaaatttagttagcata

SEQ ID NO: 35321 - DNA, 50 bp, unidentified
  source 1..50: mol_type = unassigned DNA; note = donor_7e48106
  misc_feature 1..23: note = RE
  misc_feature 24..25: note = Core
  misc_feature 26..50: note = LE
gacacgcaccacccgtgggatgtctaatgggggcggatcgtcgtggccgt

SEQ ID NO: 35322 - DNA, 50 bp, unidentified
  source 1..50: mol_type = unassigned DNA; note = donor_7e4e5c8
  misc_feature 1..23: note = RE
  misc_feature 24..25: note = Core
  misc_feature 26..50: note = LE
aatgttgacttccaagacggtatcttgtatcttaatctctgtcatggtta

SEQ ID NO: 35323 - DNA, 50 bp, unidentified
  source 1..50: mol_type = unassigned DNA; note = donor_7e4fc72
  misc_feature 1..23: note = RE
  misc_feature 24..25: note = Core
  misc_feature 26..50: note = LE
gcaaaacgggtggagtccatagataatgcaatagactccacccaccctga

SEQ ID NO: 35324 - DNA, 50 bp, unidentified
  source 1..50: mol_type = unassigned DNA; note = donor_7e52d6f
  misc_feature 1..23: note = RE
  misc_feature 24..25: note = Core
  misc_feature 26..50: note = LE
cggggtgagggtcaagacggtatcttgtatctcgactttcgcctcacaag

SEQ ID NO: 35325 - DNA, 50 bp, unidentified
  source 1..50: mol_type = unassigned DNA; note = donor_7e5c512
  misc_feature 1..22: note = RE
  misc_feature 23..25: note = Core
  misc_feature 26..50: note = LE
actcgggggtgccgcttcacagaagatgggatgaagcggctggccgccac

SEQ ID NO: 35326 - DNA, 50 bp, unidentified
  source 1..50: mol_type = unassigned DNA; note = donor_7e5e63d
  misc_feature 1..23: note = RE
  misc_feature 24..25: note = Core
  misc_feature 26..50: note = LE
tttcttgacttttcttagcaggtctattacaataaagatggaaaggaaag

SEQ ID NO: 35327 - DNA, 50 bp, unidentified
  source 1..50: mol_type = unassigned DNA; note = donor_7e6218d
  misc_feature 1..24: note = RE
  misc_feature 25: note = Core
  misc_feature 26..50: note = LE
ttggcacgcaggggcgtccatgtataatggcatggacgcccctgcttctt

SEQ ID NO: 35328 - DNA, 50 bp, unidentified
  source 1..50: mol_type = unassigned DNA; note = donor_7e65223
  misc_feature 1..23: note = RE
  misc_feature 24..25: note = Core
  misc_feature 26..50: note = LE
atacttgactttatttagattgtcacgtataatgagtttagtaaattgaa

SEQ ID NO: 35329 - DNA, 50 bp, unidentified
  source 1..50: mol_type = unassigned DNA; note = donor_7e662ec
  misc_feature 1..23: note = RE
  misc_feature 24..25: note = Core
  misc_feature 26..50: note = LE
gcatcacgggcggcgaccacagaagatgggatggttgccgccctcccccg

SEQ ID NO: 35330 - DNA, 50 bp, unidentified
  source 1..50: mol_type = unassigned DNA; note = donor_7e66cb3
  misc_feature 1..23: note = RE
  misc_feature 24..25: note = Core
  misc_feature 26..50: note = LE
gactaccggccgcttaatggttgcttgtattagcgcgcgatgttaccctg

SEQ ID NO: 35331 - DNA, 50 bp, unidentified
  source 1..50: mol_type = unassigned DNA; note = donor_7e7afd8
  misc_feature 1..21: note = RE
  misc_feature 22..25: note = Core
  misc_feature 26..50: note = LE
cctggggttgacacagggagtgtcactagggcaccatccttgtgacggag

SEQ ID NO: 35332 - DNA, 50 bp, unidentified
  source 1..50: mol_type = unassigned DNA; note = donor_7e7cd32
  misc_feature 1..23: note = RE
  misc_feature 24..25: note = Core
  misc_feature 26..50: note = LE
ctacttgactttaatatagttgtctggtatattgaagttactcatacaaa

SEQ ID NO: 35333 - DNA, 50 bp, unidentified
  source 1..50: mol_type = unassigned DNA; note = donor_7e7d064
  misc_feature 1..23: note = RE
  misc_feature 24..25: note = Core
  misc_feature 26..50: note = LE
ccgcttgacatttaatagttagtctcgtattatatggtcatacccgttct

SEQ ID NO: 35334 - DNA, 50 bp, unidentified
  source 1..50: mol_type = unassigned DNA; note = donor_7e8184c
  misc_feature 1..23: note = RE
  misc_feature 24..25: note = Core
  misc_feature 26..50: note = LE
gtgcttgacagcggagacagttacttgtatcttgagagtggcgtggcaga

SEQ ID NO: 35335 - DNA, 50 bp, unidentified
  source 1..50: mol_type = unassigned DNA; note = donor_7e8d86c
  misc_feature 1..23: note = RE
  misc_feature 24..25: note = Core
  misc_feature 26..50: note = LE
agcttgacagacggcattaggaatccctacgttgtacaccgggacagggc

SEQ ID NO: 35336 - DNA, 50 bp, unidentified
  source 1..50: mol_type = unassigned DNA; note = donor_7e9c0db
  misc_feature 1..23: note = RE
  misc_feature 24..25: note = Core
  misc_feature 26..50: note = LE
atgcttgcgttcaaagagagaatcttgtatgttgcgaggtgaggcgtgac

SEQ ID NO: 35337 - DNA, 50 bp, unidentified
  source 1..50: mol_type = unassigned DNA; note = donor_7e9c819
  misc_feature 1..24: note = RE
  misc_feature 25: note = Core
  misc_feature 26..50: note = LE
ttttcttgacttttatatagttagcctggtatattgtaaatgactcatct

SEQ ID NO: 35338 - DNA, 50 bp, unidentified
  source 1..50: mol_type = unassigned DNA; note = donor_7e9eb2b
  misc_feature 1..23: note = RE
  misc_feature 24..25: note = Core
  misc_feature 26..50: note = LE
ccgcttgacgttcaagacggtagcttgtatcctgaacagatagctgatta

SEQ ID NO: 35339 - DNA, 50 bp, unidentified
  source 1..50: mol_type = unassigned DNA; note = donor_7ea1780
  misc_feature 1..24: note = RE
  misc_feature 25: note = Core
  misc_feature 26..50: note = LE
gagcttgacaaaaacatagagacacgttactttatgactatccccgataa

SEQ ID NO: 35340 - DNA, 50 bp, unidentified
  source 1..50: mol_type = unassigned DNA; note = donor_7ea42e7
  misc_feature 1..23: note = RE
  misc_feature 24..25: note = Core
  misc_feature 26..50: note = LE
caatgcgggagccatccacagaggatgaggtggatggctcccgctcgcgg

SEQ ID NO: 35341 - DNA, 50 bp, unidentified
  source 1..50: mol_type = unassigned DNA; note = donor_7ea8d9c
  misc_feature 1..24: note = RE
  misc_feature 25: note = Core
  misc_feature 26..50: note = LE
aagcttggaattctacacagttcttcttaagtttagattttattaaaagt

SEQ ID NO: 35342 - DNA, 50 bp, unidentified
  source 1..50: mol_type = unassigned DNA; note = donor_7eba8a0
  misc_feature 1..23: note = RE
  misc_feature 24..25: note = Core
  misc_feature 26..50: note = LE
ccgcttgacgacggagagagtatcttgtatctccgttttcgggctcagac

SEQ ID NO: 35343 - DNA, 50 bp, unidentified
  source 1..50: mol_type = unassigned DNA; note = donor_7eba924
  misc_feature 1..23: note = RE
  misc_feature 24..25: note = Core
  misc_feature 26..50: note = LE
gggcttgacatttaagacagttgcttgtatcttggaattgtggtacatga

SEQ ID NO: 35344 - DNA, 50 bp, unidentified
  source 1..50: mol_type = unassigned DNA; note = donor_7ebaeef
  misc_feature 1..22: note = RE
  misc_feature 23..25: note = Core
  misc_feature 26..50: note = LE
actcttgacaaacattagcaagattcttaatatatgagtagaggctttta

SEQ ID NO: 35345 - DNA, 50 bp, unidentified
  source 1..50: mol_type = unassigned DNA; note = donor_7ec2151
  misc_feature 1..23: note = RE
  misc_feature 24..25: note = Core
  misc_feature 26..50: note = LE
tgtttgtggttgacaaagggtgtctgatggctctaccctcccttccgggg

SEQ ID NO: 35346 - DNA, 50 bp, unidentified; identical to SEQ ID NO: 30454
  source 1..50: mol_type = unassigned DNA; note = donor_7ec263c
  misc_feature 1..23: note = RE
  misc_feature 24..25: note = Core
  misc_feature 26..50: note = LE

SEQ ID NO: 35347 - DNA, 50 bp, unidentified
  source 1..50: mol_type = unassigned DNA; note = donor_7ec6a50
  misc_feature 1..24: note = RE
  misc_feature 25: note = Core
  misc_feature 26..50: note = LE
ttggtttattgggagcgtccatatataatgaaatggacgctccaactttt

SEQ ID NO: 35348 - DNA, 50 bp, unidentified
  source 1..50: mol_type = unassigned DNA; note = donor_7eced79
  misc_feature 1..23: note = RE
  misc_feature 24..25: note = Core
  misc_feature 26..50: note = LE
ggtcttgacttttaatagttagtctcgtattatatagtagtagtttttag

SEQ ID NO: 35349 - DNA, 50 bp, unidentified
  source 1..50: mol_type = unassigned DNA; note = donor_7ed910d
  misc_feature 1..22: note = RE
  misc_feature 23..25: note = Core
  misc_feature 26..50: note = LE
caacgcaggggccgtccatacatgatggggtggacggcccctgcaccgct

SEQ ID NO: 35350 - DNA, 50 bp, unidentified
  source 1..50: mol_type = unassigned DNA; note = donor_7ed970e
  misc_feature 1..22: note = RE
  misc_feature 23..25: note = Core
  misc_feature 26..50: note = LE
aatattgacaaactattagctggttcgtattataaggttagccagataag

SEQ ID NO: 35351 - DNA, 50 bp, unidentified; identical to SEQ ID NO: 30847
  source 1..50: mol_type = unassigned DNA; note = donor_7edc94d
  misc_feature 1..24: note = RE
  misc_feature 25: note = Core
  misc_feature 26..50: note = LE

SEQ ID NO: 35352 - DNA, 50 bp, unidentified
  source 1..50: mol_type = unassigned DNA; note = donor_7ee04d0
  misc_feature 1..23: note = RE
  misc_feature 24..25: note = Core
  misc_feature 26..50: note = LE
aatattgacaactattagctggtttcgtaatataaggttagccagaattt

SEQ ID NO: 35353 - DNA, 50 bp, unidentified
  source 1..50: mol_type = unassigned DNA; note = donor_7ee443a
  misc_feature 1..23: note = RE
  misc_feature 24..25: note = Core
  misc_feature 26..50: note = LE
tgacactcaacctccagggatgtctaatgggacctaccaagccagccagg

SEQ ID NO: 35354 - DNA, 50 bp, unidentified
  source 1..50: mol_type = unassigned DNA; note = donor_7ee820b
  misc_feature 1..24: note = RE
  misc_feature 25: note = Core
  misc_feature 26..50: note = LE
ctacttgacttccttatagttaaatggtatatacaaattaggctcatcca

SEQ ID NO: 35355 - DNA, 50 bp, unidentified
  source 1..50: mol_type = unassigned DNA; note = donor_7eea941
  misc_feature 1..23: note = RE
  misc_feature 24..25: note = Core
  misc_feature 26..50: note = LE
ttgggaccgaaaaataatggttgcttgtaatagcaaaatgtgtttatgtt

SEQ ID NO: 35356 - DNA, 50 bp, unidentified
  source 1..50: mol_type = unassigned DNA; note = donor_7eec9c3
  misc_feature 1..22: note = RE
  misc_feature 23..25: note = Core
  misc_feature 26..50: note = LE
cgtccttcctcgctacgtaggacgtagcacatcgggaagatggctcgacg

SEQ ID NO: 35357 - DNA, 50 bp, unidentified
  source 1..50: mol_type = unassigned DNA; note = donor_7eed0a2
  misc_feature 1..23: note = RE
  misc_feature 24..25: note = Core
  misc_feature 26..50: note = LE
cttgccaaggaggcgtccacatatgatgatgtggacgcctccaccaccgg

SEQ ID NO: 35358 - DNA, 50 bp, unidentified; identical to SEQ ID NO: 30869
  source 1..50: mol_type = unassigned DNA; note = donor_7ef0f8c
  misc_feature 1..24: note = RE
  misc_feature 25: note = Core
  misc_feature 26..50: note = LE

SEQ ID NO: 35359 - DNA, 50 bp, unidentified
  source 1..50: mol_type = unassigned DNA; note = donor_7ef45fe
  misc_feature 1..22: note = RE
  misc_feature 23..25: note = Core
  misc_feature 26..50: note = LE
cacgacgagcggcaaccacagaagatggggtggttgccgccctctcctga

SEQ ID NO: 35360 - DNA, 50 bp, unidentified
  source 1..50: mol_type = unassigned DNA; note = donor_7ef603f
  misc_feature 1..24: note = RE
  misc_feature 25: note = Core
  misc_feature 26..50: note = LE
ccgcctcttgacacagaggggtgcctacttatctactggtggtacgaccg

SEQ ID NO: 35361 - DNA, 50 bp, unidentified
  source 1..50: mol_type = unassigned DNA; note = donor_7ef73af
  misc_feature 1..22: note = RE
  misc_feature 23..25: note = Core
  misc_feature 26..50: note = LE
ttcttgacttttaatagttagtcttgtataatgtatttaggttaataaag

SEQ ID NO: 35362 - DNA, 50 bp, unidentified; identical to SEQ ID NO: 33935
  source 1..50: mol_type = unassigned DNA; note = donor_7f01215
  misc_feature 1..24: note = RE
  misc_feature 25: note = Core
  misc_feature 26..50: note = LE

SEQ ID NO: 35363 - DNA, 50 bp, unidentified; identical to SEQ ID NO: 30373
  source 1..50: mol_type = unassigned DNA; note = donor_7f15471
  misc_feature 1..23: note = RE
  misc_feature 24..25: note = Core
  misc_feature 26..50: note = LE

SEQ ID NO: 35364 - DNA, 50 bp, unidentified
  source 1..50: mol_type = unassigned DNA; note = donor_7f15561
  misc_feature 1..23: note = RE
  misc_feature 24..25: note = Core
  misc_feature 26..50: note = LE
gcgccgaaggggccatccacacatgatgtggtggacggcccttccacctt

SEQ ID NO: 35365 - DNA, 50 bp, unidentified
  source 1..50: mol_type = unassigned DNA; note = donor_7f28e67
  misc_feature 1..23: note = RE
  misc_feature 24..25: note = Core
  misc_feature 26..50: note = LE
gacaagttacggtcgtgggatgtctaatggggatcgaccacgtcgctctg

SEQ ID NO: 35366 - DNA, 50 bp, unidentified
  source 1..50: mol_type = unassigned DNA; note = donor_7f2fef0
  misc_feature 1..22: note = RE
  misc_feature 23..25: note = Core
  misc_feature 26..50: note = LE
acccttgacttttatttgcaggtctgatacaatatatttgaccgagaaag

SEQ ID NO: 35367 - DNA, 50 bp, unidentified
  source 1..50: mol_type = unassigned DNA; note = donor_7f360a8
  misc_feature 1..24: note = RE
  misc_feature 25: note = Core
  misc_feature 26..50: note = LE
tgcaacaaggccgcggaccatacataatgggatggtccgcggcttttatc

SEQ ID NO: 35368 - DNA, 50 bp, unidentified
  source 1..50: mol_type = unassigned DNA; note = donor_7f380a3
  misc_feature 1..21: note = RE
  misc_feature 22..25: note = Core
  misc_feature 26..50: note = LE
gacccaaatgcccgattagagaagcatgcgtaatcgggcggtcccacaag

SEQ ID NO: 35369 - DNA, 50 bp, unidentified
  source 1..50: mol_type = unassigned DNA; note = donor_7f40ceb
  misc_feature 1..24: note = RE
  misc_feature 25: note = Core
  misc_feature 26..50: note = LE
catccacttgacacaaagaggcttctgattgatacttgtgacgggtgttt

SEQ ID NO: 35370 - DNA, 50 bp, unidentified
  source 1..50: mol_type = unassigned DNA; note = donor_7f44241
  misc_feature 1..24: note = RE
  misc_feature 25: note = Core
  misc_feature 26..50: note = LE
ttgcgagtcaggggccgtccacatatgttggagtggacggccccgaacgg

SEQ ID NO: 35371 - DNA, 50 bp, unidentified
  source 1..50: mol_type = unassigned DNA; note = donor_7f47e8f
  misc_feature 1..23: note = RE
  misc_feature 24..25: note = Core
  misc_feature 26..50: note = LE
ctatgcgggagccatccacacaagatggggtggatggctcccggtcccgg

SEQ ID NO: 35372 - DNA, 50 bp, unidentified
  source 1..50: mol_type = unassigned DNA; note = donor_7f4c66e
  misc_feature 1..24: note = RE
  misc_feature 25: note = Core
  misc_feature 26..50: note = LE
agagcttgactttttatttgcaggcctgttactatatatttggttgagga

SEQ ID NO: 35373 - DNA, 50 bp, unidentified
  source 1..50: mol_type = unassigned DNA; note = donor_7f4e286
  misc_feature 1..23: note = RE
  misc_feature 24..25: note = Core
  misc_feature 26..50: note = LE
gcacatcgggaggcgtccatataaaatggtatggacgcctcccacttcaa

SEQ ID NO: 35374 - DNA, 50 bp, unidentified; identical to SEQ ID NO: 30668
  source 1..50: mol_type = unassigned DNA; note = donor_7f5b075
  misc_feature 1..23: note = RE
  misc_feature 24..25: note = Core
  misc_feature 26..50: note = LE

SEQ ID NO: 35375 - DNA, 50 bp, unidentified
  source 1..50: mol_type = unassigned DNA; note = donor_7f5c867
  misc_feature 1..23: note = RE
  misc_feature 24..25: note = Core
  misc_feature 26..50: note = LE
gggcttgacttttgttagcaggtctattacaataaatttggttggaagcc

SEQ ID NO: 35376 - DNA, 50 bp, unidentified
  source 1..50: mol_type = unassigned DNA; note = donor_7f5dd58
  misc_feature 1..24: note = RE
  misc_feature 25: note = Core
  misc_feature 26..50: note = LE
aatgcttggttaaaccatagaaaacctttagatttgcattttaattaaat

SEQ ID NO: 35377 - DNA, 50 bp, unidentified
  source 1..50: mol_type = unassigned DNA; note = donor_7f5e7f5
  misc_feature 1..23: note = RE
  misc_feature 24..25: note = Core
  misc_feature 26..50: note = LE
gttgacaagagggagtccacataagataattggactccctcacccttaac

SEQ ID NO: 35378 - DNA, 50 bp, unidentified
  source 1..50: mol_type = unassigned DNA; note = donor_7f6c78a
  misc_feature 1..24: note = RE
  misc_feature 25: note = Core
  misc_feature 26..50: note = LE
acacttgacaatgtataggagcatcgttgataatggttataccggtttcc

SEQ ID NO: 35379 - DNA, 50 bp, unidentified
  source 1..50: mol_type = unassigned DNA; note = donor_7f735f0
  misc_feature 1..24: note = RE
  misc_feature 25: note = Core
  misc_feature 26..50: note = LE
aatgttgacaactattggctggtttcgtaatataagtttaaccagttttt

SEQ ID NO: 35380 - DNA, 50 bp, unidentified
  source 1..50: mol_type = unassigned DNA; note = donor_7f8452f
  misc_feature 1..23: note = RE
  misc_feature 24..25: note = Core
  misc_feature 26..50: note = LE
aagcttgaccgtgaacagagtatcttgtatgttgctcagacaccctgagg

SEQ ID NO: 35381 - DNA, 50 bp, unidentified
  source 1..50: mol_type = unassigned DNA; note = donor_7f84cac
  misc_feature 1..23: note = RE
  misc_feature 24..25: note = Core
  misc_feature 26..50: note = LE
acttgaaaatccaagagggatgttctaccattgaattttgtacggagacg

SEQ ID NO: 35382 - DNA, 50 bp, unidentified
  source 1..50: mol_type = unassigned DNA; note = donor_7f864aa
  misc_feature 1..23: note = RE
  misc_feature 24..25: note = Core
  misc_feature 26..50: note = LE
gcaataacgaggcggaccatacattaattagatggtccgcctcacctctg

SEQ ID NO: 35383 - DNA, 50 bp, unidentified
  source 1..50: mol_type = unassigned DNA; note = donor_7f8719c
  misc_feature 1..24: note = RE
  misc_feature 25: note = Core
  misc_feature 26..50: note = LE
ttgaccgcagagggagtccatgtagaatgatatggactccccctgctccc

SEQ ID NO: 35384 - DNA, 50 bp, unidentified
  source 1..50: mol_type = unassigned DNA; note = donor_7f8a1d6
  misc_feature 1..24: note = RE
  misc_feature 25: note = Core
  misc_feature 26..50: note = LE
ccatcccttgacataaaggggagcctacttaagactgggtggcaggaccg

SEQ ID NO: 35385 - DNA, 50 bp, unidentified
  source 1..50: mol_type = unassigned DNA; note = donor_7f8a692
  misc_feature 1..24: note = RE
  misc_feature 25: note = Core
  misc_feature 26..50: note = LE
agtccttgacagatataggagcttctgtgagtgtcatactgcagcctgat

SEQ ID NO: 35386 - DNA, 50 bp, unidentified
  source 1..50: mol_type = unassigned DNA; note = donor_7f93d63
  misc_feature 1..24: note = RE
  misc_feature 25: note = Core
  misc_feature 26..50: note = LE
tgctttattgtggaagtccttatagaatgaaagggacttccccgtcccga

SEQ ID NO: 35387 - DNA, 50 bp, unidentified
  source 1..50: mol_type = unassigned DNA; note = donor_7f9808d
  misc_feature 1..24: note = RE
  misc_feature 25: note = Core
  misc_feature 26..50: note = LE
tgcagtccggcggcggaccatacataatgagatggtccgccgcttgattc

SEQ ID NO: 35388 - DNA, 50 bp, unidentified
  source 1..50: mol_type = unassigned DNA; note = donor_7fa25e5
  misc_feature 1..23: note = RE
  misc_feature 24..25: note = Core
  misc_feature 26..50: note = LE
ttgcggacggggcgggccatacgttatggaatggcccgccccaactctcc

SEQ ID NO: 35389 - DNA, 50 bp, unidentified
  source 1..50: mol_type = unassigned DNA; note = donor_7fb0567
  misc_feature 1..24: note = RE
  misc_feature 25: note = Core
  misc_feature 26..50: note = LE
cttgcagatggggcgggccatacgtatggaatggcccgcccctctccttt

SEQ ID NO: 35390 - DNA, 50 bp, unidentified
  source 1..50: mol_type = unassigned DNA; note = donor_7fb2274
  misc_feature 1..23: note = RE
  misc_feature 24..25: note = Core
  misc_feature 26..50: note = LE
tgcagaaaagggggtaaccatagatgagatggctacccccgccgccccct

SEQ ID NO: 35391 - DNA, 50 bp, unidentified
  source 1..50: mol_type = unassigned DNA; note = donor_7fb4b8c
  misc_feature 1..23: note = RE
  misc_feature 24..25: note = Core
  misc_feature 26..50: note = LE
aaaattgaattccaagagagaatcttgtatcttgcttgcaactgcccgat

SEQ ID NO: 35392 - DNA, 50 bp, unidentified
  source 1..50: mol_type = unassigned DNA; note = donor_7fc6108
  misc_feature 1..23: note = RE
  misc_feature 24..25: note = Core
  misc_feature 26..50: note = LE
ctgcttgacttttaatagttagtctcgtattatatagtcataccccttct

SEQ ID NO: 35393 - DNA, 50 bp, unidentified
  source 1..50: mol_type = unassigned DNA; note = donor_7fd4688
  misc_feature 1..24: note = RE
  misc_feature 25: note = Core
  misc_feature 26..50: note = LE
ttgacaaacgggggcgtccatgtacaatgggatggacgcccccactcgta

SEQ ID NO: 35394 - DNA, 50 bp, unidentified
  source 1..50: mol_type = unassigned DNA; note = donor_7fd4b3c
  misc_feature 1..23: note = RE
  misc_feature 24..25: note = Core
  misc_feature 26..50: note = LE
tgcacaactggggcgtccatatatgatgtgatggacgtcccctttttcag

SEQ ID NO: 35395 - DNA, 50 bp, unidentified
  source 1..50: mol_type = unassigned DNA; note = donor_7ff4f53
  misc_feature 1..22: note = RE
  misc_feature 23..25: note = Core
  misc_feature 26..50: note = LE
atcggcgggcaccgtccagacatgatgggatggacggtgcccgcttccgc

SEQ ID NO: 35396 - DNA, 50 bp, unidentified
  source 1..50: mol_type = unassigned DNA; note = donor_7ff8bdc
  misc_feature 1..23: note = RE
  misc_feature 24..25: note = Core
  misc_feature 26..50: note = LE
tgccaaccgggccgttccacatatgatggtgtggaacggcgcttcgcacc

SEQ ID NO: 35397 - DNA, 50 bp, unidentified; identical to SEQ ID NO: 34861
  source 1..50: mol_type = unassigned DNA; note = donor_800041b
  misc_feature 1..24: note = RE
  misc_feature 25: note = Core
  misc_feature 26..50: note = LE

SEQ ID NO: 35398 - DNA, 50 bp, unidentified
  source 1..50: mol_type = unassigned DNA; note = donor_800a9b1
  misc_feature 1..23: note = RE
  misc_feature 24..25: note = Core
  misc_feature 26..50: note = LE
acccggaggttatgtttcacagtaacccctattcctgcacacttggcacc

SEQ ID NO: 35399 - DNA, 50 bp, unidentified
  source 1..50: mol_type = unassigned DNA; note = donor_800ca88
  misc_feature 1..24: note = RE
  misc_feature 25: note = Core
  misc_feature 26..50: note = LE
cgcctcttgacaacagaggggtgcctacttgatgcttgtgggtaggaccg

SEQ ID NO: 35400 - DNA, 50 bp, unidentified; identical to SEQ ID NO: 31692
  source 1..50: mol_type = unassigned DNA; note = donor_8010607
  misc_feature 1..24: note = RE
  misc_feature 25: note = Core
  misc_feature 26..50: note = LE

SEQ ID NO: 35401 - DNA, 50 bp, unidentified
  source 1..50: mol_type = unassigned DNA; note = donor_80121d8
  misc_feature 1..23: note = RE
  misc_feature 24..25: note = Core
  misc_feature 26..50: note = LE
tatcttgactctttatagttagtctcgtattatatagtagtagtgtttat

SEQ ID NO: 35402 - DNA, 50 bp, unidentified
  source 1..50: mol_type = unassigned DNA; note = donor_801d981
  misc_feature 1..24: note = RE
  misc_feature 25: note = Core
  misc_feature 26..50: note = LE
accgcttgacgaaagacatagaggcgttatgtttttcgcggtcctgcaat

SEQ ID NO: 35403 - DNA, 50 bp, unidentified; identical to SEQ ID NO: 30576
  source 1..50: mol_type = unassigned DNA; note = donor_802074c
  misc_feature 1..24: note = RE
  misc_feature 25: note = Core
  misc_feature 26..50: note = LE

SEQ ID NO: 35404 - DNA, 50 bp, unidentified
  source 1..50: mol_type = unassigned DNA; note = donor_803bbdf
  misc_feature 1..23: note = RE
  misc_feature 24..25: note = Core
  misc_feature 26..50: note = LE
acctgccttgaacaacacggatacttgtcttatgattttctgtgccgagc

SEQ ID NO: 35405 - DNA, 50 bp, unidentified
  source 1..50: mol_type = unassigned DNA; note = donor_8047c8f
  misc_feature 1..22: note = RE
  misc_feature 23..25: note = Core
  misc_feature 26..50: note = LE
aattgacaaaaacataggaacacccattaccatgtttggtaggtcccggt

SEQ ID NO: 35406 - DNA, 50 bp, unidentified
  source 1..50: mol_type = unassigned DNA; note = donor_804ba56
  misc_feature 1..23: note = RE
  misc_feature 24..25: note = Core
  misc_feature 26..50: note = LE
aaagttgactttcaagacggtatcttgtatctttacttccgccatggtta

SEQ ID NO: 35407 - DNA, 50 bp, unidentified
  source 1..50: mol_type = unassigned DNA; note = donor_8053fef
  misc_feature 1..23: note = RE
  misc_feature 24..25: note = Core
  misc_feature 26..50: note = LE
ataatttggttttatcatagaaatcctttagacttgtaaataaatatata

SEQ ID NO: 35408 - DNA, 50 bp, unidentified
  source 1..50: mol_type = unassigned DNA; note = donor_805d93b
  misc_feature 1..23: note = RE
  misc_feature 24..25: note = Core
  misc_feature 26..50: note = LE
aagaatgaattgatgatagttgactcctaccatcaattcatagtataaat

SEQ ID NO: 35409 - DNA, 50 bp, unidentified; identical to SEQ ID NO: 31522
  source 1..50: mol_type = unassigned DNA; note = donor_805ed55
  misc_feature 1..23: note = RE
  misc_feature 24..25: note = Core
  misc_feature 26..50: note = LE

SEQ ID NO: 35410 - DNA, 50 bp, unidentified
  source 1..50: mol_type = unassigned DNA; note = donor_806accb
  misc_feature 1..22: note = RE
  misc_feature 23..25: note = Core
  misc_feature 26..50: note = LE
aatgttgacaaactattagctggttcgtaatataaggttagccagatttt

SEQ ID NO: 35411 - DNA, 50 bp, unidentified
  source 1..50: mol_type = unassigned DNA; note = donor_8070a48
  misc_feature 1..24: note = RE
  misc_feature 25: note = Core
  misc_feature 26..50: note = LE
ccggcttgacaaacagaagggcgtcagtaagagtgccctggctaggtgtt

SEQ ID NO: 35412 - DNA, 50 bp, unidentified
  source 1..50: mol_type = unassigned DNA; note = donor_8073b9b
  misc_feature 1..20: note = RE
  misc_feature 21..25: note = Core
  misc_feature 26..50: note = LE
gccctgggctaggagcttctgccctgaaagggcagaagctcctagcccag

SEQ ID NO: 35413 - DNA, 50 bp, unidentified
  source 1..50: mol_type = unassigned DNA; note = donor_80799b2
  misc_feature 1..23: note = RE
  misc_feature 24..25: note = Core
  misc_feature 26..50: note = LE
gaccccaaccggccgattagagaagatggggtaatcggccggccggcgaa

SEQ ID NO: 35414 - DNA, 50 bp, unidentified
  source 1..50: mol_type = unassigned DNA; note = donor_8087a9a
  misc_feature 1..21: note = RE
  misc_feature 22..25: note = Core
  misc_feature 26..50: note = LE
gtattgacaaataaaacggaatcttgtattctggaaattatactaagaaa

SEQ ID NO: 35415 - DNA, 50 bp, unidentified
  source 1..50: mol_type = unassigned DNA; note = donor_808a8b9
  misc_feature 1..23: note = RE
  misc_feature 24..25: note = Core
  misc_feature 26..50: note = LE
cagcttgacatcagcattgggaagtcctaccttgaagacgtgggtctgat

SEQ ID NO: 35416 - DNA, 50 bp, unidentified
  source 1..50: mol_type = unassigned DNA; note = donor_808c730
  misc_feature 1..23: note = RE
  misc_feature 24..25: note = Core
  misc_feature 26..50: note = LE
tgcaaaccggggccgtccacatatgatggtgtggacggcccctgcgcggc

SEQ ID NO: 35417 - DNA, 50 bp, unidentified
  source 1..50: mol_type = unassigned DNA; note = donor_80917ea
  misc_feature 1..23: note = RE
  misc_feature 24..25: note = Core
  misc_feature 26..50: note = LE
aactccctccagcaacaccgttgcttatctgttcggaatctggcagctta

SEQ ID NO: 35418 - DNA, 50 bp, unidentified
  source 1..50: mol_type = unassigned DNA; note = donor_8097ffd
  misc_feature 1..24: note = RE
  misc_feature 25: note = Core
  misc_feature 26..50: note = LE
tgcaagccggggggagtccatatacaatgggatggactcccccctcctaa

SEQ ID NO: 35419 - DNA, 50 bp, unidentified
  source 1..50: mol_type = unassigned DNA; note = donor_8098d6a
  misc_feature 1..20: note = RE
  misc_feature 21..25: note = Core
  misc_feature 26..50: note = LE
agcaggttgacaccggatgtctcataaggcaacctcttgttctttgaagc

SEQ ID NO: 35420 - DNA, 50 bp, unidentified
  source 1..50: mol_type = unassigned DNA; note = donor_809c72d
  misc_feature 1..24: note = RE
  misc_feature 25: note = Core
  misc_feature 26..50: note = LE
tgcattcgcgcgtcggaccatacataatgagatggtccgccgcttgatca

SEQ ID NO: 35421 - DNA, 50 bp, unidentified
  source 1..50: mol_type = unassigned DNA; note = donor_80a0650
  misc_feature 1..23: note = RE
  misc_feature 24..25: note = Core
  misc_feature 26..50: note = LE
aaaccgtggttgacaaagggtgtctgatggctctaccctcctgagtcatg

SEQ ID NO: 35422 - DNA, 50 bp, unidentified
  source 1..50: mol_type = unassigned DNA; note = donor_80a093a
  misc_feature 1..23: note = RE
  misc_feature 24..25: note = Core
  misc_feature 26..50: note = LE
caacgcaggggccgtccatacaggatggggtggacggcccctgctacggc

SEQ ID NO: 35423 - DNA, 50 bp, unidentified; identical to SEQ ID NO: 33448
  source 1..50: mol_type = unassigned DNA; note = donor_80a1d7d
  misc_feature 1..24: note = RE
  misc_feature 25: note = Core
  misc_feature 26..50: note = LE

SEQ ID NO: 35424 - DNA, 50 bp, unidentified
  source 1..50: mol_type = unassigned DNA; note = donor_80a315a
  misc_feature 1..24: note = RE
  misc_feature 25: note = Core
  misc_feature 26..50: note = LE
ctattgacatttattagctggacttagtataataatggtgtagtcagtaa

SEQ ID NO: 35425 - DNA, 50 bp, unidentified; identical to SEQ ID NO: 30816
  source 1..50: mol_type = unassigned DNA; note = donor_80af510
  misc_feature 1..23: note = RE
  misc_feature 24..25: note = Core
  misc_feature 26..50: note = LE

SEQ ID NO: 35426 - DNA, 50 bp, unidentified
  source 1..50: mol_type = unassigned DNA; note = donor_80b17d6
  misc_feature 1..23: note = RE
  misc_feature 24..25: note = Core
  misc_feature 26..50: note = LE
aggcttgacttctaatagttaatcttgtattatagagtagtagtttataa

SEQ ID NO: 35427 - DNA, 50 bp, unidentified
  source 1..50: mol_type = unassigned DNA; note = donor_80b6211
  misc_feature 1..22: note = RE
  misc_feature 23..25: note = Core
  misc_feature 26..50: note = LE
ccagccgggggccatccacacatgatggggtggatggcccccttgcggca

SEQ ID NO: 35428 - DNA, 50 bp, unidentified
  source 1..50: mol_type = unassigned DNA; note = donor_80c21fa
  misc_feature 1..23: note = RE
  misc_feature 24..25: note = Core
  misc_feature 26..50: note = LE
tgcaaaccggagtgggtccatatataatggtatggacccactccacttcc

SEQ ID NO: 35429 - DNA, 50 bp, unidentified
  source 1..50: mol_type = unassigned DNA; note = donor_80cd103
  misc_feature 1..22: note = RE
  misc_feature 23..25: note = Core
  misc_feature 26..50: note = LE
aatgttgacaaactattagctggttcgtattatgaagtcagccagttttt

SEQ ID NO: 35430 - DNA, 50 bp, unidentified
  source 1..50: mol_type = unassigned DNA; note = donor_80d1deb
  misc_feature 1..23: note = RE
  misc_feature 24..25: note = Core
  misc_feature 26..50: note = LE
ggcttgacagaccgcatgaggaatccctacgttgttctgcgggacgtggg

SEQ ID NO: 35431 - DNA, 50 bp, unidentified; identical to SEQ ID NO: 30383
  source 1..50: mol_type = unassigned DNA; note = donor_80e43b1
  misc_feature 1..23: note = RE
  misc_feature 24..25: note = Core
  misc_feature 26..50: note = LE

SEQ ID NO: 35432 - DNA, 50 bp, unidentified
  source 1..50: mol_type = unassigned DNA; note = donor_80ffafc
  misc_feature 1..22: note = RE
  misc_feature 23..25: note = Core
  misc_feature 26..50: note = LE
acaagtgggggccgtccacatctgctggtgtggacggcctctcatcccca

SEQ ID NO: 35433 - DNA, 50 bp, unidentified
  source 1..50: mol_type = unassigned DNA; note = donor_8102585
  misc_feature 1..23: note = RE
  misc_feature 24..25: note = Core
  misc_feature 26..50: note = LE
gacaacttacgaccgtgggatgtctaatgggggtgcaccgcttcagtcgg

SEQ ID NO: 35434 - DNA, 50 bp, unidentified; identical to SEQ ID NO: 32193
  source 1..50: mol_type = unassigned DNA; note = donor_8106c5f
  misc_feature 1..23: note = RE
  misc_feature 24..25: note = Core
  misc_feature 26..50: note = LE

SEQ ID NO: 35435 - DNA, 50 bp, unidentified
  source 1..50: mol_type = unassigned DNA; note = donor_810c61f
  misc_feature 1..23: note = RE
  misc_feature 24..25: note = Core
  misc_feature 26..50: note = LE
gcgagacgggggccgtccacatatgttggggtggacggcccccttacggc

SEQ ID NO: 35436 - DNA, 50 bp, unidentified; identical to SEQ ID NO: 34575
  source 1..50: mol_type = unassigned DNA; note = donor_810e55f
  misc_feature 1..24: note = RE
  misc_feature 25: note = Core
  misc_feature 26..50: note = LE

SEQ ID NO: 35437 - DNA, 50 bp, unidentified
  source 1..50: mol_type = unassigned DNA; note = donor_81190bd
  misc_feature 1..22: note = RE
  misc_feature 23..25: note = Core
  misc_feature 26..50: note = LE
atcagcgggcgccgtccagacatgatggggtggacggcgcccgcaacggc

SEQ ID NO: 35438 - DNA, 50 bp, unidentified
  source 1..50: mol_type = unassigned DNA; note = donor_81197b4
  misc_feature 1..24: note = RE
  misc_feature 25: note = Core
  misc_feature 26..50: note = LE
ggcaaacgagggggagtccatatacaatgggatggactccccctcacctg

SEQ ID NO: 35439 - DNA, 50 bp, unidentified
  source 1..50: mol_type = unassigned DNA; note = donor_811e820
  misc_feature 1..23: note = RE
  misc_feature 24..25: note = Core
  misc_feature 26..50: note = LE
tttttcttgacgaaacacagtagcttgtatgtaatagacatatggtggtt

SEQ ID NO: 35440 - DNA, 50 bp, unidentified; identical to SEQ ID NO: 32453
  source 1..50: mol_type = unassigned DNA; note = donor_812f805
  misc_feature 1..24: note = RE
  misc_feature 25: note = Core
  misc_feature 26..50: note = LE

SEQ ID NO: 35441 - DNA, 50 bp, unidentified
  source 1..50: mol_type = unassigned DNA; note = donor_813acee
  misc_feature 1..24: note = RE
  misc_feature 25: note = Core
  misc_feature 26..50: note = LE
tattgacaatggctttctcatattagacgatatgagaaagccatttgggt

SEQ ID NO: 35442 - DNA, 50 bp, unidentified
  source 1..50: mol_type = unassigned DNA; note = donor_81455bd
  misc_feature 1..23: note = RE
  misc_feature 24..25: note = Core
  misc_feature 26..50: note = LE
cgaggtaatgggcaagacggtatcttgtatctcgactacagcctcacgag

SEQ ID NO: 35443 - DNA, 50 bp, unidentified
  source 1..50: mol_type = unassigned DNA; note = donor_814896a
  misc_feature 1..24: note = RE
  misc_feature 25: note = Core
  misc_feature 26..50: note = LE
tggcaaatggggggcgaccatctataatggaatggtcgcccctactcaaa

SEQ ID NO: 35444 - DNA, 50 bp, unidentified
  source 1..50: mol_type = unassigned DNA; note = donor_8156bb2
  misc_feature 1..24: note = RE
  misc_feature 25: note = Core
  misc_feature 26..50: note = LE
tgcggaacggcggcggaccatacataatgggatggtccgccgcctttacc

SEQ ID NO: 35445 - DNA, 50 bp, unidentified
  source 1..50: mol_type = unassigned DNA; note = donor_815c20d
  misc_feature 1..22: note = RE
  misc_feature 23..25: note = Core
  misc_feature 26..50: note = LE
tgtgcctcttgacatagagggtcttatatgttactatttttctagaccct

SEQ ID NO: 35446 - DNA, 50 bp, unidentified
  source 1..50: mol_type = unassigned DNA; note = donor_815dd5f
  misc_feature 1..23: note = RE
  misc_feature 24..25: note = Core
  misc_feature 26..50: note = LE
ttatacttgacttttcatagctggtatgatgtttatagaagcttaaacat

SEQ ID NO: 35447 - DNA, 50 bp, unidentified
  source 1..50: mol_type = unassigned DNA; note = donor_816086d
  misc_feature 1..23: note = RE
  misc_feature 24..25: note = Core
  misc_feature 26..50: note = LE
taccttgactctttataggatgtctggtattatcctcacctgatataccg

SEQ ID NO: 35448 - DNA, 50 bp, unidentified
  source 1..50: mol_type = unassigned DNA; note = donor_8161295
  misc_feature 1..23: note = RE
  misc_feature 24..25: note = Core
  misc_feature 26..50: note = LE
gttgacaagggggagtccacataagataattggactccctcactccctac

SEQ ID NO: 35449 - DNA, 50 bp, unidentified
  source 1..50: mol_type = unassigned DNA; note = donor_8162e68
  misc_feature 1..24: note = RE
  misc_feature 25: note = Core
  misc_feature 26..50: note = LE
tgcaaaaaaaggggtgaccatagataatgagatggtcacccccggcacct

SEQ ID NO: 35450 - DNA, 50 bp, unidentified
  source 1..50: mol_type = unassigned DNA; note = donor_8163acf
  misc_feature 1..24: note = RE
  misc_feature 25: note = Core
  misc_feature 26..50: note = LE
gtgcaaatgggaggcgctcatatagaatggaatgagcgcctctcacccgt

SEQ ID NO: 35451 - DNA, 50 bp, unidentified
  source 1..50: mol_type = unassigned DNA; note = donor_816a058
  misc_feature 1..23: note = RE
  misc_feature 24..25: note = Core
  misc_feature 26..50: note = LE
aaacttgcaggccataacagtatcttgtattatccttcctgagcagagag

SEQ ID NO: 35452 - DNA, 50 bp, unidentified
  source 1..50: mol_type = unassigned DNA; note = donor_8172a43
  misc_feature 1..24: note = RE
  misc_feature 25: note = Core
  misc_feature 26..50: note = LE
agcaaacgagggggagtccatatacaatgggatggactcctcctcacctt

SEQ ID NO: 35453 - DNA, 50 bp, unidentified
  source 1..50: mol_type = unassigned DNA; note = donor_817772e
  misc_feature 1..23: note = RE
  misc_feature 24..25: note = Core
  misc_feature 26..50: note = LE
gttgacacgggggagtccacataagataattggactccccaacccttgag

SEQ ID NO: 35454 - DNA, 50 bp, unidentified
  source 1..50: mol_type = unassigned DNA; note = donor_8178a31
  misc_feature 1..23: note = RE
  misc_feature 24..25: note = Core
  misc_feature 26..50: note = LE
catcaacggggggcgtccatagatgatggaatggacgccccctcctgacg

SEQ ID NO: 35455 - DNA, 50 bp, unidentified
  source 1..50: mol_type = unassigned DNA; note = donor_8183422
  misc_feature 1..23: note = RE
  misc_feature 24..25: note = Core
  misc_feature 26..50: note = LE
atagttgatttcgaacagagaatcttgtatgttgcgttcagaggcgtgag

SEQ ID NO: 35456 - DNA, 50 bp, unidentified; identical to SEQ ID NO: 30604
  source 1..50: mol_type = unassigned DNA; note = donor_8187c60
  misc_feature 1..23: note = RE
  misc_feature 24..25: note = Core
  misc_feature 26..50: note = LE

SEQ ID NO: 35457 - DNA, 50 bp, unidentified
  source 1..50: mol_type = unassigned DNA; note = donor_8188be1
  misc_feature 1..23: note = RE
  misc_feature 24..25: note = Core
  misc_feature 26..50: note = LE
tcttcctctactttctttcacactaatctccattccgccgccttcggctg

SEQ ID NO: 35458 - DNA, 50 bp, unidentified
  source 1..50: mol_type = unassigned DNA; note = donor_818cf33
  misc_feature 1..23: note = RE
  misc_feature 24..25: note = Core
  misc_feature 26..50: note = LE
gggcttgacttttatttgcaggtctactataataaatttagacgttaaat

SEQ ID NO: 35459 - DNA, 50 bp, unidentified
  source 1..50: mol_type = unassigned DNA; note = donor_8194f1e
  misc_feature 1..24: note = RE
  misc_feature 25: note = Core
  misc_feature 26..50: note = LE
tgcagtcccgcggcggaccatacataatgagatggtccgccgcttgattc

SEQ ID NO: 35460 - DNA, 50 bp, unidentified
  source 1..50: mol_type = unassigned DNA; note = donor_819d616
  misc_feature 1..23: note = RE
  misc_feature 24..25: note = Core
  misc_feature 26..50: note = LE
tgtggcctgacaagttgtatagaagtctcccaataagtggctgatgtttc

SEQ ID NO: 35461 - DNA, 50 bp, unidentified
  source 1..50: mol_type = unassigned DNA; note = donor_819fc40
  misc_feature 1..23: note = RE
  misc_feature 24..25: note = Core
  misc_feature 26..50: note = LE
gcacaatatgaggagtccatataagatgtatggactcctcccctttaagg

SEQ ID NO: 35462 - DNA, 50 bp, unidentified
  source 1..50: mol_type = unassigned DNA; note = donor_81a0510
  misc_feature 1..24: note = RE
  misc_feature 25: note = Core
  misc_feature 26..50: note = LE
cttgcagacggggcgggccatacgtatggaatggcccgccccttccgtcc

SEQ ID NO: 35463 - DNA, 50 bp, unidentified
  source 1..50: mol_type = unassigned DNA; note = donor_81a7a22
  misc_feature 1..23: note = RE
  misc_feature 24..25: note = Core
  misc_feature 26..50: note = LE
gacctgccgcaatctaatggttgcttgtattagcgcgaatcattacagtg

SEQ ID NO: 35464 - DNA, 50 bp, unidentified
  source 1..50: mol_type = unassigned DNA; note = donor_81a81d1
  misc_feature 1..23: note = RE
  misc_feature 24..25: note = Core
  misc_feature 26..50: note = LE
gcaataacggggcggaccatacattaattatatggtccgcctcatcctaa

SEQ ID NO: 35465 - DNA, 50 bp, unidentified
  source 1..50: mol_type = unassigned DNA; note = donor_81b36d0
  misc_feature 1..23: note = RE
  misc_feature 24..25: note = Core
  misc_feature 26..50: note = LE
gccaacagggagccgtccacacatgatgcagtggacggctcccacccgga

SEQ ID NO: 35466 - DNA, 50 bp, unidentified
  source 1..50: mol_type = unassigned DNA; note = donor_81b742b
  misc_feature 1..22: note = RE
  misc_feature 23..25: note = Core
  misc_feature 26..50: note = LE
tgcttgacacggtcattcagattccctaaggttgttgttgtctggggttg

SEQ ID NO: 35467 - DNA, 50 bp, unidentified
  source 1..50: mol_type = unassigned DNA; note = donor_81b8085
  misc_feature 1..22: note = RE
  misc_feature 23..25: note = Core
  misc_feature 26..50: note = LE
ccaacagggagccgtccacacatgatgcagtggacggctcccacccgccg

SEQ ID NO: 35468 - DNA, 50 bp, unidentified
  source 1..50: mol_type = unassigned DNA; note = donor_81bb5ea
  misc_feature 1..23: note = RE
  misc_feature 24..25: note = Core
  misc_feature 26..50: note = LE
ttacttgacttttattagcaggtctgatacaatataattgaccgaagaaa

SEQ ID NO: 35469 - DNA, 50 bp, unidentified
  source 1..50: mol_type = unassigned DNA; note = donor_81bbc95
  misc_feature 1..24: note = RE
  misc_feature 25: note = Core
  misc_feature 26..50: note = LE
tggcaagacgggggcgtccatgtacaatagaatggacgcccccaactatt

SEQ ID NO: 35470 - DNA, 50 bp, unidentified
  source 1..50: mol_type = unassigned DNA; note = donor_81be08d
  misc_feature 1..24: note = RE
  misc_feature 25: note = Core
  misc_feature 26..50: note = LE
ttgcaaaaggggatggttcatatataatgtaatgaaccatccctatccac

SEQ ID NO: 35471 - DNA, 50 bp, unidentified
  source 1..50: mol_type = unassigned DNA; note = donor_81bf5ca
  misc_feature 1..22: note = RE
  misc_feature 23..25: note = Core
  misc_feature 26..50: note = LE
gtgttccccccaaacatagaatctcgcttgtatgtttagacttgaagggg

SEQ ID NO: 35472 - DNA, 50 bp, unidentified
  source 1..50: mol_type = unassigned DNA; note = donor_81c06c3
  misc_feature 1..24: note = RE
  misc_feature 25: note = Core
  misc_feature 26..50: note = LE
ggggcttgactttttatttgcaggcctgttactatatatttgccccttga

SEQ ID NO: 35473 - DNA, 50 bp, unidentified
  source 1..50: mol_type = unassigned DNA; note = donor_81c3bc0
  misc_feature 1..23: note = RE
  misc_feature 24..25: note = Core
  misc_feature 26..50: note = LE
cggcttgacaacttcattgagaatccttacctttcttgcagggtggtcgt

SEQ ID NO: 35474 - DNA, 50 bp, unidentified
  source 1..50: mol_type = unassigned DNA; note = donor_81c5b30
  misc_feature 1..23: note = RE
  misc_feature 24..25: note = Core
  misc_feature 26..50: note = LE
gcgtctgaaggggcgtccacagatgatggggtggacgccccccgacggca

SEQ ID NO: 35475 - DNA, 50 bp, unidentified
  source 1..50: mol_type = unassigned DNA; note = donor_81c7574
  misc_feature 1..20: note = RE
  misc_feature 21..25: note = Core
  misc_feature 26..50: note = LE
acggaggttgacttagggctactcactggtgcaccctcttcttgccgggc

SEQ ID NO: 35476 - DNA, 50 bp, unidentified
  source 1..50: mol_type = unassigned DNA; note = donor_81c7f83
  misc_feature 1..23: note = RE
  misc_feature 24..25: note = Core
  misc_feature 26..50: note = LE
cctattgacatttcttagctggactagtataataatgatatagctacaag

SEQ ID NO: 35477 - DNA, 50 bp, unidentified
  source 1..50: mol_type = unassigned DNA; note = donor_81cc70a
  misc_feature 1..22: note = RE
  misc_feature 23..25: note = Core
  misc_feature 26..50: note = LE
catcgagggcggcaaccagagaagatgggatggttgccgccctccccaga

SEQ ID NO: 35478 - DNA, 50 bp, unidentified
  source 1..50: mol_type = unassigned DNA; note = donor_81cda8b
  misc_feature 1..22: note = RE
  misc_feature 23..25: note = Core
  misc_feature 26..50: note = LE
cttgacttttcttatagtttgtcttatattagatttagtgcagttagcta

SEQ ID NO: 35479 - DNA, 50 bp, unidentified
  source 1..50: mol_type = unassigned DNA; note = donor_81d6dea
  misc_feature 1..21: note = RE
  misc_feature 22..25: note = Core
  misc_feature 26..50: note = LE
taatttgacaaaacttagataatcacgtataatgttgaacataaagaatt

SEQ ID NO: 35480 - DNA, 50 bp, unidentified
  source 1..50: mol_type = unassigned DNA; note = donor_81e2d73
  misc_feature 1..21: note = RE
  misc_feature 22..25: note = Core
  misc_feature 26..50: note = LE
aggcggcttgacatagggcttctcactggactacctttcttgtgtcagcg

SEQ ID NO: 35481 - DNA, 50 bp, unidentified
  source 1..50: mol_type = unassigned DNA; note = donor_81e30c8
  misc_feature 1..20: note = RE
  misc_feature 21..25: note = Core
  misc_feature 26..50: note = LE
tttggaatttaaaacagtaccttttatttttgtatagaatttgaaaaaag

SEQ ID NO: 35482 - DNA, 50 bp, unidentified
  source 1..50: mol_type = unassigned DNA; note = donor_81e8402
  misc_feature 1..24: note = RE
  misc_feature 25: note = Core
  misc_feature 26..50: note = LE
gcaataacgggacgtaccatatattaatgagatggtacgtccctccctac

SEQ ID NO: 35483 - DNA, 50 bp, unidentified
  source 1..50: mol_type = unassigned DNA; note = donor_81fc683
  misc_feature 1..21: note = RE
  misc_feature 22..25: note = Core
  misc_feature 26..50: note = LE
cgaaacgggggccgtccacacatgatggggtggacggcccccacccggca

SEQ ID NO: 35484 - DNA, 50 bp, unidentified
  source 1..50: mol_type = unassigned DNA; note = donor_8201f7c
  misc_feature 1..23: note = RE
  misc_feature 24..25: note = Core
  misc_feature 26..50: note = LE
aaccagcttgatcaaaacggatacttgtcttatgattattcctgcttctt

SEQ ID NO: 35485 - DNA, 50 bp, unidentified
  source 1..50: mol_type = unassigned DNA; note = donor_820e43e
  misc_feature 1..23: note = RE
  misc_feature 24..25: note = Core
  misc_feature 26..50: note = LE
aagcttgaccggcaacagagtatcttgtatgttgctcctgcaccaaggag

SEQ ID NO: 35486 - DNA, 50 bp, unidentified
  source 1..50: mol_type = unassigned DNA; note = donor_820eb00
  misc_feature 1..23: note = RE
  misc_feature 24..25: note = Core
  misc_feature 26..50: note = LE
gccaactcggagccgtccacacatgatgctgtggacggctcctccacctg

SEQ ID NO: 35487 - DNA, 50 bp, unidentified
  source 1..50: mol_type = unassigned DNA; note = donor_821a299
  misc_feature 1..24: note = RE
  misc_feature 25: note = Core
  misc_feature 26..50: note = LE
tcttgcagacgggcgggccatacgtatggaatggcccgccctttcaccct

SEQ ID NO: 35488 - DNA, 50 bp, unidentified; identical to SEQ ID NO: 30885
  source 1..50: mol_type = unassigned DNA; note = donor_8222954
  misc_feature 1..23: note = RE
  misc_feature 24..25: note = Core
  misc_feature 26..50: note = LE

SEQ ID NO: 35489 - DNA, 50 bp, unidentified
  source 1..50: mol_type = unassigned DNA; note = donor_82277fb
  misc_feature 1..24: note = RE
  misc_feature 25: note = Core
  misc_feature 26..50: note = LE
acggctccggatgggggcgccatataagacaaaatggcgccccttctggg

SEQ ID NO: 35490 - DNA, 50 bp, unidentified
  source 1..50: mol_type = unassigned DNA; note = donor_823299d
  misc_feature 1..23: note = RE
  misc_feature 24..25: note = Core
  misc_feature 26..50: note = LE
gacttcaaaacgccgaatagagaagatggggtattcggcttgtgccccat

SEQ ID NO: 35491 - DNA, 50 bp, unidentified
  source 1..50: mol_type = unassigned DNA; note = donor_82330d2
  misc_feature 1..24: note = RE
  misc_feature 25: note = Core
  misc_feature 26..50: note = LE
tggcaaaacaggggcgaccatctataatggaatggtcgccccttcccgaa

SEQ ID NO: 35492 - DNA, 50 bp, unidentified
  source 1..50: mol_type = unassigned DNA; note = donor_8233e4b
  misc_feature 1..24: note = RE
  misc_feature 25: note = Core
  misc_feature 26..50: note = LE
aaatttgcctgttcagttagaaagccctaactttgcgacatcaatcttta

SEQ ID NO: 35493 - DNA, 50 bp, unidentified; identical to SEQ ID NO: 30604
  source 1..50: mol_type = unassigned DNA; note = donor_8235cea
  misc_feature 1..23: note = RE
  misc_feature 24..25: note = Core
  misc_feature 26..50: note = LE

SEQ ID NO: 35494 - DNA, 50 bp, unidentified
  source 1..50: mol_type = unassigned DNA; note = donor_8239ade
  misc_feature 1..24: note = RE
  misc_feature 25: note = Core
  misc_feature 26..50: note = LE
tgcgacaaggcggcggaccatacataatgggatggtccgccgccttcacc

SEQ ID NO: 35495 - DNA, 50 bp, unidentified; identical to SEQ ID NO: 30668
  source 1..50: mol_type = unassigned DNA; note = donor_8246a65
  misc_feature 1..23: note = RE
  misc_feature 24..25: note = Core
  misc_feature 26..50: note = LE

SEQ ID NO: 35496 - DNA, 50 bp, unidentified
  source 1..50: mol_type = unassigned DNA; note = donor_824a0a4
  misc_feature 1..23: note = RE
  misc_feature 24..25: note = Core
  misc_feature 26..50: note = LE
tgacttcaaacgacatggggtgtctaatgggagctgccgggtcagggaag

SEQ ID NO: 35497 - DNA, 50 bp, unidentified; identical to SEQ ID NO: 31549
  source 1..50: mol_type = unassigned DNA; note = donor_82598c7
  misc_feature 1..22: note = RE
  misc_feature 23..25: note = Core
  misc_feature 26..50: note = LE

SEQ ID NO: 35498 - DNA, 50 bp, unidentified; identical to SEQ ID NO: 35459
  source 1..50: mol_type = unassigned DNA; note = donor_8266ff3
  misc_feature 1..24: note = RE
  misc_feature 25: note = Core
  misc_feature 26..50: note = LE

SEQ ID NO: 35499 - DNA, 50 bp, unidentified
  source 1..50: mol_type = unassigned DNA; note = donor_826e18f
  misc_feature 1..23: note = RE
  misc_feature 24..25: note = Core
  misc_feature 26..50: note = LE
gacgcaacaaaagcgattagacaacatggggtaatcgcgggagcgagtcg

SEQ ID NO: 35500 - DNA, 50 bp, unidentified
  source 1..50: mol_type = unassigned DNA; note = donor_8270bb8
  misc_feature 1..22: note = RE
  misc_feature 23..25: note = Core
  misc_feature 26..50: note = LE
ctcttgacttttaatagttagtcttatataatgtatttacgttaattaag

SEQ ID NO: 35501 - DNA, 50 bp, unidentified
  source 1..50: mol_type = unassigned DNA; note = donor_82756d3
  misc_feature 1..23: note = RE
  misc_feature 24..25: note = Core
  misc_feature 26..50: note = LE
cgcaaaagggacgcgttcatatagaatggaatgaacgcgtcccacccgtg

SEQ ID NO: 35502 - DNA, 50 bp, unidentified
  source 1..50: mol_type = unassigned DNA; note = donor_82788a1
  misc_feature 1..23: note = RE
  misc_feature 24..25: note = Core
  misc_feature 26..50: note = LE
ccgcattcgcatgaacacagttgcctgtgtgttggtttcggtgtatggtt

SEQ ID NO: 35503 - DNA, 50 bp, unidentified
  source 1..50: mol_type = unassigned DNA; note = donor_8288960
  misc_feature 1..23: note = RE
  misc_feature 24..25: note = Core
  misc_feature 26..50: note = LE
tgacaccaatcgacatgggatgtctaatgagagctatcaagcctgaactc

SEQ ID NO: 35504 - DNA, 50 bp, unidentified
  source 1..50: mol_type = unassigned DNA; note = donor_82a29a4
  misc_feature 1..23: note = RE
  misc_feature 24..25: note = Core
  misc_feature 26..50: note = LE
gacggcttacgcccgtgggatgtctaatggggctcgaccgttctgctctt

SEQ ID NO: 35505 - DNA, 50 bp, unidentified
  source 1..50: mol_type = unassigned DNA; note = donor_82a8f5a
  misc_feature 1..24: note = RE
  misc_feature 25: note = Core
  misc_feature 26..50: note = LE
tgaatttggtgaaaccatagaaaacctttagatttgtatttctaaataaa

SEQ ID NO: 35506 - DNA, 50 bp, unidentified
  source 1..50: mol_type = unassigned DNA; note = donor_82bba68
  misc_feature 1..23: note = RE
  misc_feature 24..25: note = Core
  misc_feature 26..50: note = LE
cacgggcttgaccaatacggatacttgtcttacaagtagccaggctctca

SEQ ID NO: 35507 - DNA, 50 bp, unidentified
  source 1..50: mol_type = unassigned DNA; note = donor_82be1de
  misc_feature 1..23: note = RE
  misc_feature 24..25: note = Core
  misc_feature 26..50: note = LE
gacctcaacacgccgattagagaagatggggtaatcggcttcgtgcccca

SEQ ID NO: 35508 - DNA, 50 bp, unidentified
  source 1..50: mol_type = unassigned DNA; note = donor_82c1bb2
  misc_feature 1..23: note = RE
  misc_feature 24..25: note = Core
  misc_feature 26..50: note = LE
aagcataaaatgagagatggtatcttgtatctctcagtaatagatgatta

SEQ ID NO: 35509 - DNA, 50 bp, unidentified
  source 1..50: mol_type = unassigned DNA; note = donor_82c8940
  misc_feature 1..24: note = RE
  misc_feature 25: note = Core
  misc_feature 26..50: note = LE
ccgacttgacgaagaacatagaggcgttatgttcgtggtgatcccgcaag

SEQ ID NO: 35510 - DNA, 50 bp, unidentified
  source 1..50: mol_type = unassigned DNA; note = donor_82c8a32
  misc_feature 1..24: note = RE
  misc_feature 25: note = Core
  misc_feature 26..50: note = LE
tgcaaccgcggggcggaccatacataatgggatggcccgccccgcatcca

SEQ ID NO: 35511 - DNA, 50 bp, unidentified
  source 1..50: mol_type = unassigned DNA; note = donor_82cb75a
  misc_feature 1..24: note = RE
  misc_feature 25: note = Core
  misc_feature 26..50: note = LE
tcgcactcgaataaactgacttggttgtctctcaaatctgtgctttactg

SEQ ID NO: 35512 - DNA, 50 bp, unidentified
  source 1..50: mol_type = unassigned DNA; note = donor_82cde11
  misc_feature 1..23: note = RE
  misc_feature 24..25: note = Core
  misc_feature 26..50: note = LE
gcaagcagggggccgtccacatatgttggggtggacggcccccgacggca

SEQ ID NO: 35513 - DNA, 50 bp, unidentified
  source 1..50: mol_type = unassigned DNA; note = donor_82d3f0f
  misc_feature 1..24: note = RE
  misc_feature 25: note = Core
  misc_feature 26..50: note = LE
tgcaaaagaggaggagtccatatacaatgggatggactcctcctccccta

SEQ ID NO: 35514 - DNA, 50 bp, unidentified
  source 1..50: mol_type = unassigned DNA; note = donor_82d6f00
  misc_feature 1..23: note = RE
  misc_feature 24..25: note = Core
  misc_feature 26..50: note = LE
tccgcgcttgaccaacacggatacttgtcttatcgatgggctggctctcg

SEQ ID NO: 35515 - DNA, 50 bp, unidentified
  source 1..50: mol_type = unassigned DNA; note = donor_82dca37
  misc_feature 1..23: note = RE
  misc_feature 24..25: note = Core
  misc_feature 26..50: note = LE
cggttgacaaaactataggaacaccattacagttttgaagcgtagttggt

SEQ ID NO: 35516 - DNA, 50 bp, unidentified
  source 1..50: mol_type = unassigned DNA; note = donor_82dcd1d
  misc_feature 1..23: note = RE
  misc_feature 24..25: note = Core
  misc_feature 26..50: note = LE
gacaacgaagggcccgtgacagaagatggcgtaacgggccgccgcggggc

SEQ ID NO: 35517 - DNA, 50 bp, unidentified
  source 1..50: mol_type = unassigned DNA; note = donor_82ddfa6
  misc_feature 1..23: note = RE
  misc_feature 24..25: note = Core
  misc_feature 26..50: note = LE
tgcccgcggggccgttccacatatgatggggtggaacggccccgctaccg

SEQ ID NO: 35518 - DNA, 50 bp, unidentified
  source 1..50: mol_type = unassigned DNA; note = donor_82de26b
  misc_feature 1..22: note = RE
  misc_feature 23..25: note = Core
  misc_feature 26..50: note = LE
cttgacggaactataggacacccccattacagtctgagataagccatcga

SEQ ID NO: 35519 - DNA, 50 bp, unidentified
  source 1..50: mol_type = unassigned DNA; note = donor_82ec748
  misc_feature 1..23: note = RE
  misc_feature 24..25: note = Core
  misc_feature 26..50: note = LE
gtggcacgggggccgtccacatatgatggagtggacggccccctacggca

SEQ ID NO: 35520 - DNA, 50 bp, unidentified
  source 1..50: mol_type = unassigned DNA; note = donor_82f389c
  misc_feature 1..24: note = RE
  misc_feature 25: note = Core
  misc_feature 26..50: note = LE
cgcttgacctggaagacagatgctcttgcatcttgcggtcagcccgatct

SEQ ID NO: 35521 - DNA, 50 bp, unidentified
  source 1..50: mol_type = unassigned DNA; note = donor_82f4aa1
  misc_feature 1..22: note = RE
  misc_feature 23..25: note = Core
  misc_feature 26..50: note = LE
ctgcttgactttttatttgcagactacaatatatttatggttaatatccc

SEQ ID NO: 35522 - DNA, 50 bp, unidentified
  source 1..50: mol_type = unassigned DNA; note = donor_82f5cff
  misc_feature 1..22: note = RE
  misc_feature 23..25: note = Core
  misc_feature 26..50: note = LE
gcaagcaggggccatccatagatgatggtatggacgccccctgtcgcggc

SEQ ID NO: 35523 - DNA, 50 bp, unidentified
  source 1..50: mol_type = unassigned DNA; note = donor_82fea0c
  misc_feature 1..24: note = RE
  misc_feature 25: note = Core
  misc_feature 26..50: note = LE
ttgcaaaaacgagggcgaccatagaatgagatggccgccctcaccttgtt

SEQ ID NO: 35524 - DNA, 50 bp, unidentified; identical to SEQ ID NO: 33096
  source 1..50: mol_type = unassigned DNA; note = donor_82ff2a9
  misc_feature 1..23: note = RE
  misc_feature 24..25: note = Core
  misc_feature 26..50: note = LE

SEQ ID NO: 35525 - DNA, 50 bp, unidentified
  source 1..50: mol_type = unassigned DNA; note = donor_8310ca2
  misc_feature 1..23: note = RE
  misc_feature 24..25: note = Core
  misc_feature 26..50: note = LE
atccttgcttcccaacagagaatcttgtatgttgcgttcagaggcgtaac

SEQ ID NO: 35526 - DNA, 50 bp, unidentified
  source 1..50: mol_type = unassigned DNA; note = donor_8316c85
  misc_feature 1..24: note = RE
  misc_feature 25: note = Core
  misc_feature 26..50: note = LE
accgtccctgcataactgacttggttgtctctcaaatctatgctttactg

SEQ ID NO: 35527 - DNA, 50 bp, unidentified
  source 1..50: mol_type = unassigned DNA; note = donor_8318439
  misc_feature 1..23: note = RE
  misc_feature 24..25: note = Core
  misc_feature 26..50: note = LE
ttaatagtaaatcaacacagaatctcctatgtttgcaaagttgtgaattt

SEQ ID NO: 35528 - DNA, 50 bp, unidentified
  source 1..50: mol_type = unassigned DNA; note = donor_8327e8c
  misc_feature 1..23: note = RE
  misc_feature 24..25: note = Core
  misc_feature 26..50: note = LE
ttgcttgatttttaacacggttgcttgtatgtttcattttgcccgatgga

SEQ ID NO: 35529 - DNA, 50 bp, unidentified; identical to SEQ ID NO: 33215
  source 1..50: mol_type = unassigned DNA; note = donor_8332f80
  misc_feature 1..23: note = RE
  misc_feature 24..25: note = Core
  misc_feature 26..50: note = LE

SEQ ID NO: 35530 - DNA, 50 bp, unidentified
  source 1..50: mol_type = unassigned DNA; note = donor_833787e
  misc_feature 1..24: note = RE
  misc_feature 25: note = Core
  misc_feature 26..50: note = LE
accgcttgacaaacatagaagagtctgtgagtcttgtggtggctggtctg

SEQ ID NO: 35531 - DNA, 50 bp, unidentified; identical to SEQ ID NO: 32111
  source 1..50: mol_type = unassigned DNA; note = donor_8345b23
  misc_feature 1..23: note = RE
  misc_feature 24..25: note = Core
  misc_feature 26..50: note = LE

SEQ ID NO: 35532 - DNA, 50 bp, unidentified
  source 1..50: mol_type = unassigned DNA; note = donor_834a7c0
  misc_feature 1..24: note = RE
  misc_feature 25: note = Core
  misc_feature 26..50: note = LE
tttcgcattttttaatatagttcgttgtatattaaattttataagtatat

SEQ ID NO: 35533 - DNA, 50 bp, unidentified
  source 1..50: mol_type = unassigned DNA; note = donor_8357c1d
  misc_feature 1..22: note = RE
  misc_feature 23..25: note = Core
  misc_feature 26..50: note = LE
tttcttgacttttgttagcaggtctattacaataaatttggacaggaaag

SEQ ID NO: 35534 - DNA, 50 bp, unidentified
  source 1..50: mol_type = unassigned DNA; note = donor_8361239
  misc_feature 1..23: note = RE
  misc_feature 24..25: note = Core
  misc_feature 26..50: note = LE
attgacacgaggcccgttacagaagatggtgtaacgggccgaggcggcgc

SEQ ID NO: 35535 - DNA, 50 bp, unidentified
  source 1..50: mol_type = unassigned DNA; note = donor_8369b3f
  misc_feature 1..23: note = RE
  misc_feature 24..25: note = Core
  misc_feature 26..50: note = LE
agacttgacttttaatagttagtctcgtattattaaatagtagtatttat

SEQ ID NO: 35536 - DNA, 50 bp, unidentified
  source 1..50: mol_type = unassigned DNA; note = donor_8374a1c
  misc_feature 1..24: note = RE
  misc_feature 25: note = Core
  misc_feature 26..50: note = LE
gaaccacttgacacaaagaggattctgatagaggctgtgatgcaaggacg

SEQ ID NO: 35537 - DNA, 50 bp, unidentified
  source 1..50: mol_type = unassigned DNA; note = donor_8377831
  misc_feature 1..23: note = RE
  misc_feature 24..25: note = Core
  misc_feature 26..50: note = LE
gaccccaaacggccgattagagaagatggggtaatcggccttgcagcttg

SEQ ID NO: 35538 - DNA, 50 bp, unidentified
  source 1..50: mol_type = unassigned DNA; note = donor_837aa4c
  misc_feature 1..23: note = RE
  misc_feature 24..25: note = Core
  misc_feature 26..50: note = LE
cttattgacttttaatagttagtctcgtattattaaagtagtagtgttta

SEQ ID NO: 35539 - DNA, 50 bp, unidentified
  source 1..50: mol_type = unassigned DNA; note = donor_8381b73
  misc_feature 1..23: note = RE
  misc_feature 24..25: note = Core
  misc_feature 26..50: note = LE
ccgcttgattttcaagacagttgcttgtatctaccgaagggttgaaactg

SEQ ID NO: 35540 - DNA, 50 bp, unidentified
  source 1..50: mol_type = unassigned DNA; note = donor_83849d4
  misc_feature 1..23: note = RE
  misc_feature 24..25: note = Core
  misc_feature 26..50: note = LE
gcaccgcgggcgtcgtccatacatgatgtggtggacgacgcccgctcccg

SEQ ID NO: 35541 - DNA, 50 bp, unidentified
  source 1..50: mol_type = unassigned DNA; note = donor_838b432
  misc_feature 1..22: note = RE
  misc_feature 23..25: note = Core
  misc_feature 26..50: note = LE
caagagaggggccgtccacatctgctggtgtggacggctcctcgccccac

SEQ ID NO: 35542 - DNA, 50 bp, unidentified
  source 1..50: mol_type = unassigned DNA; note = donor_8392726
  misc_feature 1..24: note = RE
  misc_feature 25: note = Core
  misc_feature 26..50: note = LE
acaacttgacacttagaagggcgtcagtaataatgtcagtgtcagttttc

SEQ ID NO: 35543 - DNA, 50 bp, unidentified
  source 1..50: mol_type = unassigned DNA; note = donor_83b279d
  misc_feature 1..23: note = RE
  misc_feature 24..25: note = Core
  misc_feature 26..50: note = LE
ggggttgactttttatttgcaggctattacaatataaacatagatcaggg

SEQ ID NO: 35544 - DNA, 50 bp, unidentified; identical to SEQ ID NO: 30488
  source 1..50: mol_type = unassigned DNA; note = donor_83b676b
  misc_feature 1..24: note = RE
  misc_feature 25: note = Core
  misc_feature 26..50: note = LE

SEQ ID NO: 35545 - DNA, 50 bp, unidentified
  source 1..50: mol_type = unassigned DNA; note = donor_83bf050
  misc_feature 1..24: note = RE
  misc_feature 25: note = Core
  misc_feature 26..50: note = LE
accaaaccgggaggcgtccatataatgtaatggacgcctccctcctgccc

SEQ ID NO: 35546 - DNA, 50 bp, unidentified
  source 1..50: mol_type = unassigned DNA; note = donor_83c1840
  misc_feature 1..23: note = RE
  misc_feature 24..25: note = Core
  misc_feature 26..50: note = LE
ccctaccttgaccaacacggatacttgtcttatgactttctctgccgaat

SEQ ID NO: 35547 - DNA, 50 bp, unidentified; identical to SEQ ID NO: 33675
  source 1..50: mol_type = unassigned DNA; note = donor_83c8f8c
  misc_feature 1..23: note = RE
  misc_feature 24..25: note = Core
  misc_feature 26..50: note = LE

SEQ ID NO: 35548 - DNA, 50 bp, unidentified
  source 1..50: mol_type = unassigned DNA; note = donor_83cf144
  misc_feature 1..22: note = RE
  misc_feature 23..25: note = Core
  misc_feature 26..50: note = LE
aatcttgacaagatattagctggttcgtattatgaggtcagccagttttt

SEQ ID NO: 35549 - DNA, 50 bp, unidentified
  source 1..50: mol_type = unassigned DNA; note = donor_83da6e6
  misc_feature 1..21: note = RE
  misc_feature 22..25: note = Core
  misc_feature 26..50: note = LE
ttgacaacttccatagggacaccccgttaccttcttcgtagctcctgatc

SEQ ID NO: 35550 - DNA, 50 bp, unidentified
  source 1..50: mol_type = unassigned DNA; note = donor_83dd2b5
  misc_feature 1..23: note = RE
  misc_feature 24..25: note = Core
  misc_feature 26..50: note = LE
gatatataggcatttatagagggagcattcctgttacaaatttttagggc

SEQ ID NO: 35551 - DNA, 50 bp, unidentified
  source 1..50: mol_type = unassigned DNA; note = donor_83e7f72
  misc_feature 1..23: note = RE
  misc_feature 24..25: note = Core
  misc_feature 26..50: note = LE
cttgcgcagggggcgtccatagattatggaatgagcgccccttgcacctg

SEQ ID NO: 35552 - DNA, 50 bp, unidentified
  source 1..50: mol_type = unassigned DNA; note = donor_83ef993
  misc_feature 1..23: note = RE
  misc_feature 24..25: note = Core
  misc_feature 26..50: note = LE
acgcttgacttcaaagacggttacttgtatcttatgtgccgaccggcgcg

SEQ ID NO: 35553 - DNA, 50 bp, unidentified
  source 1..50: mol_type = unassigned DNA; note = donor_83f429a
  misc_feature 1..23: note = RE
  misc_feature 24..25: note = Core
  misc_feature 26..50: note = LE
gagaagtcctcacttaatggttgcttgtattgatgcgaatcactacagtg

SEQ ID NO: 35554 - DNA, 50 bp, unidentified
  source 1..50: mol_type = unassigned DNA; note = donor_83f61f1
  misc_feature 1..24: note = RE
  misc_feature 25: note = Core
  misc_feature 26..50: note = LE
agattgacagggtcacaccatatcagtcattatggtgtgaccggctcgat

SEQ ID NO: 35555 - DNA, 50 bp, unidentified
  source 1..50: mol_type = unassigned DNA; note = donor_83f7abf
  misc_feature 1..23: note = RE
  misc_feature 24..25: note = Core
  misc_feature 26..50: note = LE
gctaggaggcggccgtccacatatgttggtgtggacggcctccgacggca

SEQ ID NO: 35556 - DNA, 50 bp, unidentified
  source 1..50: mol_type = unassigned DNA; note = donor_83fb31e
  misc_feature 1..24: note = RE
  misc_feature 25: note = Core
  misc_feature 26..50: note = LE
tgacatgccgtggaagcccttatagaatggaagtgacttcccctgattgc

SEQ ID NO: 35557 - DNA, 50 bp, unidentified; identical to SEQ ID NO: 32777
  source 1..50: mol_type = unassigned DNA; note = donor_83fe252
  misc_feature 1..23: note = RE
  misc_feature 24..25: note = Core
  misc_feature 26..50: note = LE

SEQ ID NO: 35558 - DNA, 50 bp, unidentified
  source 1..50: mol_type = unassigned DNA; note = donor_83fe43b
  misc_feature 1..23: note = RE
  misc_feature 24..25: note = Core
  misc_feature 26..50: note = LE
atttatttatttacatagagtgtctaataggttataataaatatatagta

SEQ ID NO: 35559 - DNA, 50 bp, unidentified
  source 1..50: mol_type = unassigned DNA; note = donor_8401394
  misc_feature 1..23: note = RE
  misc_feature 24..25: note = Core
  misc_feature 26..50: note = LE
ccccatgagggtggacacagttgcttatttgtcccgattgcgcgaaagta

SEQ ID NO: 35560 - DNA, 50 bp, unidentified
  source 1..50: mol_type = unassigned DNA; note = donor_8408271
  misc_feature 1..23: note = RE
  misc_feature 24..25: note = Core
  misc_feature 26..50: note = LE
gctattgacttttgtttgcaggactcctacaatatagtttaggtgatagg

SEQ ID NO: 35561 - DNA, 50 bp, unidentified
  source 1..50: mol_type = unassigned DNA; note = donor_840ccdf
  misc_feature 1..22: note = RE
  misc_feature 23..25: note = Core
  misc_feature 26..50: note = LE
catcaacgggggcatccacacatgatggagtggatgccccctcccgacgg

SEQ ID NO: 35562 - DNA, 50 bp, unidentified
  source 1..50: mol_type = unassigned DNA; note = donor_84120da
  misc_feature 1..23: note = RE
  misc_feature 24..25: note = Core
  misc_feature 26..50: note = LE
gccgggcgacttcgccacagttgcttgtgtccggaaaatctgtcagaatg

SEQ ID NO: 35563 - DNA, 50 bp, unidentified
  source 1..50: mol_type = unassigned DNA; note = donor_8421bd0
  misc_feature 1..23: note = RE
  misc_feature 24..25: note = Core
  misc_feature 26..50: note = LE
tcgcttgacttattatagtaagtcttgtatactcagaactgtaataatag

SEQ ID NO: 35564 - DNA, 50 bp, unidentified
  source 1..50: mol_type = unassigned DNA; note = donor_8423a0d
  misc_feature 1..23: note = RE
  misc_feature 24..25: note = Core
  misc_feature 26..50: note = LE
tctcttgacatctttaccggttgctcgtataatatttgtataagatctta

SEQ ID NO: 35565 - DNA, 50 bp, unidentified
  source 1..50: mol_type = unassigned DNA; note = donor_8434b11
  misc_feature 1..23: note = RE
  misc_feature 24..25: note = Core
  misc_feature 26..50: note = LE
acgcttgacttcgaacacagtcgcttgtaactcgccaaagaccggtcggc

SEQ ID NO: 35566 - DNA, 50 bp, unidentified
  source 1..50: mol_type = unassigned DNA; note = donor_8436857
  misc_feature 1..23: note = RE
  misc_feature 24..25: note = Core
  misc_feature 26..50: note = LE
gtcttgacacgccgttatgggatctgacataggtcgtagtggagagcgat

SEQ ID NO: 35567 - DNA, 50 bp, unidentified
  source 1..50: mol_type = unassigned DNA; note = donor_843e796
  misc_feature 1..23: note = RE
  misc_feature 24..25: note = Core
  misc_feature 26..50: note = LE
tatggttgacttttcatagctggtcattttacttccttgtatgataatta

SEQ ID NO: 35568 - DNA, 50 bp, unidentified
  source 1..50: mol_type = unassigned DNA; note = donor_8443127
  misc_feature 1..22: note = RE
  misc_feature 23..25: note = Core
  misc_feature 26..50: note = LE
cttgacaattcgctttaacaggcatataaaggaactgcccttccgagcta

SEQ ID NO: 35569 - DNA, 50 bp, unidentified
  source 1..50: mol_type = unassigned DNA; note = donor_844a76e
  misc_feature 1..23: note = RE
  misc_feature 24..25: note = Core
  misc_feature 26..50: note = LE
gcgcaaacggagccgtccacacatgatggtgtggacggctccaccccgac

SEQ ID NO: 35570 - DNA, 50 bp, unidentified
  source 1..50: mol_type = unassigned DNA; note = donor_8450974
  misc_feature 1..24: note = RE
  misc_feature 25: note = Core
  misc_feature 26..50: note = LE
aggcgtcttgacacagaagggagcctacttgtttcattgacgcaggatcg

SEQ ID NO: 35571 - DNA, 50 bp, unidentified
  source 1..50: mol_type = unassigned DNA; note = donor_8454c23
  misc_feature 1..23: note = RE
  misc_feature 24..25: note = Core
  misc_feature 26..50: note = LE
ggtggccgcttgacatagaggcgctgacttgctttgatcgtgccagcacc

SEQ ID NO: 35572 - DNA, 50 bp, unidentified
  source 1..50: mol_type = unassigned DNA; note = donor_84669b5
  misc_feature 1..24: note = RE
  misc_feature 25: note = Core
  misc_feature 26..50: note = LE
ttattgacaagatattagctggtttcgtattatgaggtcagccagttttt

SEQ ID NO: 35573 - DNA, 50 bp, unidentified
  source 1..50: mol_type = unassigned DNA; note = donor_846de39
  misc_feature 1..23: note = RE
  misc_feature 24..25: note = Core
  misc_feature 26..50: note = LE
ggacttgacttttaatagttagtctcgtattatatagtagtagtgtttat

SEQ ID NO: 35574 - DNA, 50 bp, unidentified; identical to SEQ ID NO: 30838
  source 1..50: mol_type = unassigned DNA; note = donor_846e88e
  misc_feature 1..23: note = RE
  misc_feature 24..25: note = Core
  misc_feature 26..50: note = LE

SEQ ID NO: 35575 - DNA, 50 bp, unidentified
  source 1..50: mol_type = unassigned DNA; note = donor_84703c5
  misc_feature 1..23: note = RE
  misc_feature 24..25: note = Core
  misc_feature 26..50: note = LE
cttgacaaaaaaagccccatacaagatgctatggggcgagcggcgaggac

SEQ ID NO: 35576 - DNA, 50 bp, unidentified; identical to SEQ ID NO: 33485
  source 1..50: mol_type = unassigned DNA; note = donor_8477b93
  misc_feature 1..23: note = RE
  misc_feature 24..25: note = Core
  misc_feature 26..50: note = LE

SEQ ID NO: 35577 - DNA, 50 bp, unidentified
  source 1..50: mol_type = unassigned DNA; note = donor_8480030
  misc_feature 1..24: note = RE
  misc_feature 25: note = Core
  misc_feature 26..50: note = LE
ttacttgttttttaccacagtacttcttaagttagcattctattaaaatc

SEQ ID NO: 35578 - DNA, 50 bp, unidentified
  source 1..50: mol_type = unassigned DNA; note = donor_8483f6a
  misc_feature 1..24: note = RE
  misc_feature 25: note = Core
  misc_feature 26..50: note = LE
tggcaaactgggggcgtccatgtacaatgggatggacgccccctcctcta

SEQ ID NO: 35579 - DNA, 50 bp, unidentified
  source 1..50: mol_type = unassigned DNA; note = donor_8485d45
  misc_feature 1..22: note = RE
  misc_feature 23..25: note = Core
  misc_feature 26..50: note = LE
gacttgacttcttatagttagtcacgtataatctaattatggtctaaatg

SEQ ID NO: 35580 - DNA, 50 bp, unidentified
  source 1..50: mol_type = unassigned DNA; note = donor_8488c71
  misc_feature 1..22: note = RE
  misc_feature 23..25: note = Core
  misc_feature 26..50: note = LE
ttgccagggcgccgtccacacgtgatgctgtggacggcgcccactcttcg

SEQ ID NO: 35581 - DNA, 50 bp, unidentified
  source 1..50: mol_type = unassigned DNA; note = donor_8495232
  misc_feature 1..23: note = RE
  misc_feature 24..25: note = Core
  misc_feature 26..50: note = LE
ccacgggttgacacacagaggcgctgacttgtctactagggacagatgcg

SEQ ID NO: 35582 - DNA, 50 bp, unidentified
  source 1..50: mol_type = unassigned DNA; note = donor_8497aca
  misc_feature 1..23: note = RE
  misc_feature 24..25: note = Core
  misc_feature 26..50: note = LE
tgcgcttgaactcaagacagttacttgtatcttggcaattgaaccgctgt

SEQ ID NO: 35583 - DNA, 50 bp, unidentified
  source 1..50: mol_type = unassigned DNA; note = donor_849c361
  misc_feature 1..22: note = RE
  misc_feature 23..25: note = Core
  misc_feature 26..50: note = LE
aaatcttgacaactattagctggttcgtaatataaggttagccagatata

SEQ ID NO: 35584 - DNA, 50 bp, unidentified
  source 1..50: mol_type = unassigned DNA; note = donor_849e917
  misc_feature 1..22: note = RE
  misc_feature 23..25: note = Core
  misc_feature 26..50: note = LE
tattaggaaatcaacacagaatctcctatgtttgcatagttagaaaatca

SEQ ID NO: 35585 - DNA, 50 bp, unidentified
  source 1..50: mol_type = unassigned DNA; note = donor_84a83e0
  misc_feature 1..24: note = RE
  misc_feature 25: note = Core
  misc_feature 26..50: note = LE
ccaaggcttgacaaagaggggagcctacttcttgaatggacgtacggctt

SEQ ID NO: 35586 - DNA, 50 bp, unidentified
  source 1..50: mol_type = unassigned DNA; note = donor_84aa953
  misc_feature 1..23: note = RE
  misc_feature 24..25: note = Core
  misc_feature 26..50: note = LE
ggggttgtggtgaaccatagaatcttgtatggttttcctacaggtccaaa

SEQ ID NO: 35587 - DNA, 50 bp, unidentified
  source 1..50: mol_type = unassigned DNA; note = donor_84ac9ef
  misc_feature 1..23: note = RE
  misc_feature 24..25: note = Core
  misc_feature 26..50: note = LE
cgaggtgagcttcaagacggtatcttgtatctcgaccacagcctttcagt

SEQ ID NO: 35588 - DNA, 50 bp, unidentified
  source 1..50: mol_type = unassigned DNA; note = donor_84b2b92
  misc_feature 1..24: note = RE
  misc_feature 25: note = Core
  misc_feature 26..50: note = LE
ggcttgacgaaggccatagagacaccgttgccttcttcacgccctcacag

SEQ ID NO: 35589 - DNA, 50 bp, unidentified
  source 1..50: mol_type = unassigned DNA; note = donor_84b8ef3
  misc_feature 1..23: note = RE
  misc_feature 24..25: note = Core
  misc_feature 26..50: note = LE
gcaatcctgggggacgttcatatagaatggaatgaacgtcccccacccgc

SEQ ID NO: 35590 - DNA, 50 bp, unidentified
  source 1..50: mol_type = unassigned DNA; note = donor_84bd0c3
  misc_feature 1..21: note = RE
  misc_feature 22..25: note = Core
  misc_feature 26..50: note = LE
gggcggcttgacacagggcttctcactggtgcaccatccttaggtcatca

SEQ ID NO: 35591 - DNA, 50 bp, unidentified
  source 1..50: mol_type = unassigned DNA; note = donor_84c6006
  misc_feature 1..24: note = RE
  misc_feature 25: note = Core
  misc_feature 26..50: note = LE
tgcatctcggaggtcgtccatacatgatggtgtggacgacctccacctaa

SEQ ID NO: 35592 - DNA, 50 bp, unidentified
  source 1..50: mol_type = unassigned DNA; note = donor_84c7c04
  misc_feature 1..24: note = RE
  misc_feature 25: note = Core
  misc_feature 26..50: note = LE
accccttgacgaactacataggggcgttaccttgtaggtagcccttgaag

SEQ ID NO: 35593 - DNA, 50 bp, unidentified
  source 1..50: mol_type = unassigned DNA; note = donor_84de0f5
  misc_feature 1..23: note = RE
  misc_feature 24..25: note = Core
  misc_feature 26..50: note = LE
cggcttgacatcagcattgggaagtcctacctttcacgcgtgggtctgat

SEQ ID NO: 35594 - DNA, 50 bp, unidentified
  source 1..50: mol_type = unassigned DNA; note = donor_84e6641
  misc_feature 1..23: note = RE
  misc_feature 24..25: note = Core
  misc_feature 26..50: note = LE
atatttgataattaacacagaatctatgtttgttgttataacgaaaaaca

SEQ ID NO: 35595 - DNA, 50 bp, unidentified
  source 1..50: mol_type = unassigned DNA; note = donor_84e8f7a
  misc_feature 1..23: note = RE
  misc_feature 24..25: note = Core
  misc_feature 26..50: note = LE
gcaaaagcgggggtgaccatagattaatgagatggtcacccccatctcgt

SEQ ID NO: 35596 - DNA, 50 bp, unidentified
  source 1..50: mol_type = unassigned DNA; note = donor_84e969f
  misc_feature 1..23: note = RE
  misc_feature 24..25: note = Core
  misc_feature 26..50: note = LE
aagccgcttgaccaaaacggatacttgtcttatgaaaatcccgctgtttg

SEQ ID NO: 35597 - DNA, 50 bp, unidentified; identical to SEQ ID NO: 34338
  source 1..50: mol_type = unassigned DNA; note = donor_84eae3d
  misc_feature 1..23: note = RE
  misc_feature 24..25: note = Core
  misc_feature 26..50: note = LE

SEQ ID NO: 35598 - DNA, 50 bp, unidentified
  source 1..50: mol_type = unassigned DNA; note = donor_84ec4e5
  misc_feature 1..21: note = RE
  misc_feature 22..25: note = Core
  misc_feature 26..50: note = LE
gggcagcttgacacagggcaactcactggtgcaccatccttgtgtcggtg

SEQ ID NO: 35599 - DNA, 50 bp, unidentified
  source 1..50: mol_type = unassigned DNA; note = donor_84f759a
  misc_feature 1..23: note = RE
  misc_feature 24..25: note = Core
  misc_feature 26..50: note = LE
aacaccttgccaaataggagcgtcactgatattttctgtattgaagacgt

SEQ ID NO: 35600 - DNA, 50 bp, unidentified
  source 1..50: mol_type = unassigned DNA; note = donor_84f8775
  misc_feature 1..23: note = RE
  misc_feature 24..25: note = Core
  misc_feature 26..50: note = LE
gccctgaagggggcgtccacagatgatggggtggacgccccccgacggca

SEQ ID NO: 35601 - DNA, 50 bp, unidentified
  source 1..50: mol_type = unassigned DNA; note = donor_8506cc8
  misc_feature 1..24: note = RE
  misc_feature 25: note = Core
  misc_feature 26..50: note = LE
tggtagatttaatatcctagaatacctttggattgaaataagctatttac

SEQ ID NO: 35602 - DNA, 50 bp, unidentified
  source 1..50: mol_type = unassigned DNA; note = donor_8508df6
  misc_feature 1..23: note = RE
  misc_feature 24..25: note = Core
  misc_feature 26..50: note = LE
gagctccctgcacaacacagttgcttatctgttcggattctgtcagtgtg

SEQ ID NO: 35603 - DNA, 50 bp, unidentified
  source 1..50: mol_type = unassigned DNA; note = donor_8515010
  misc_feature 1..23: note = RE
  misc_feature 24..25: note = Core
  misc_feature 26..50: note = LE
gaccccaaccggccgattagagaagatggggtaatcggccgagcgttctt

SEQ ID NO: 35604 - DNA, 50 bp, unidentified
  source 1..50: mol_type = unassigned DNA; note = donor_851b8b6
  misc_feature 1..23: note = RE
  misc_feature 24..25: note = Core
  misc_feature 26..50: note = LE
ggacttgacttttatttgcaggtctgttacaataaataaggacgtataaa

SEQ ID NO: 35605 - DNA, 50 bp, unidentified
  source 1..50: mol_type = unassigned DNA; note = donor_851f081
  misc_feature 1..23: note = RE
  misc_feature 24..25: note = Core
  misc_feature 26..50: note = LE
cttgacaaaaaaagccccatacaagatgctatggggcggcggcgaggata

SEQ ID NO: 35606 - DNA, 50 bp, unidentified
  source 1..50: mol_type = unassigned DNA; note = donor_8532c47
  misc_feature 1..21: note = RE
  misc_feature 22..25: note = Core
  misc_feature 26..50: note = LE
gtcgaggttgacacaggaagtctcactggtgtacctgtacaggttgagag

SEQ ID NO: 35607 - DNA, 50 bp, unidentified
  source 1..50: mol_type = unassigned DNA; note = donor_8533aee
  misc_feature 1..23: note = RE
  misc_feature 24..25: note = Core
  misc_feature 26..50: note = LE
gacaccgccagaacctgtgatgtctaatgggttctgccgatgcctctggc

SEQ ID NO: 35608 - DNA, 50 bp, unidentified
  source 1..50: mol_type = unassigned DNA; note = donor_853dcd4
  misc_feature 1..23: note = RE
  misc_feature 24..25: note = Core
  misc_feature 26..50: note = LE
aagtttgactttgaacagagtatcttgtatgatcaaaattaataaaatat

SEQ ID NO: 35609 - DNA, 50 bp, unidentified
  source 1..50: mol_type = unassigned DNA; note = donor_854387c
  misc_feature 1..24: note = RE
  misc_feature 25: note = Core
  misc_feature 26..50: note = LE
tgcaattgaggaggagtccatatacaatgggatggactcctcctcccctt

SEQ ID NO: 35610 - DNA, 50 bp, unidentified
  source 1..50: mol_type = unassigned DNA; note = donor_8543f06
  misc_feature 1..24: note = RE
  misc_feature 25: note = Core
  misc_feature 26..50: note = LE
tgcaacagggcggcggaccatacataatgggatggtccgccgcctttacc

SEQ ID NO: 35611 - DNA, 50 bp, unidentified
  source 1..50: mol_type = unassigned DNA; note = donor_8544b89
  misc_feature 1..23: note = RE
  misc_feature 24..25: note = Core
  misc_feature 26..50: note = LE
atgcttgcgtggcataacagtatcttgtattatcctcccgtacagaaaga

SEQ ID NO: 35612 - DNA, 50 bp, unidentified
  source 1..50: mol_type = unassigned DNA; note = donor_8555d16
  misc_feature 1..22: note = RE
  misc_feature 23..25: note = Core
  misc_feature 26..50: note = LE
cacttgacaccaaccatagaatcttgtatggtgtagcggggtgagtcgtg

SEQ ID NO: 35613 - DNA, 50 bp, unidentified
  source 1..50: mol_type = unassigned DNA; note = donor_85585a4
  misc_feature 1..23: note = RE
  misc_feature 24..25: note = Core
  misc_feature 26..50: note = LE
gcagaaggtgggctgaccatacattaatgagatggtcagcccggcgagaa

SEQ ID NO: 35614 - DNA, 50 bp, unidentified
  source 1..50: mol_type = unassigned DNA; note = donor_855b90e
  misc_feature 1..23: note = RE
  misc_feature 24..25: note = Core
  misc_feature 26..50: note = LE
gacgaacgaaggcccattacagaagatgccgtaatgggccggccttcgcg

SEQ ID NO: 35615 - DNA, 50 bp, unidentified
  source 1..50: mol_type = unassigned DNA; note = donor_855db92
  misc_feature 1..21: note = RE
  misc_feature 22..25: note = Core
  misc_feature 26..50: note = LE
ccttgacttcatatagctggtctcctatctttaagtcgttgcatttttga

SEQ ID NO: 35616 - DNA, 50 bp, unidentified
  source 1..50: mol_type = unassigned DNA; note = donor_8560622
  misc_feature 1..24: note = RE
  misc_feature 25: note = Core
  misc_feature 26..50: note = LE
gccccgcgacaaaatgacagttgcttgtatgaagcgacaggagcatagtg

SEQ ID NO: 35617 - DNA, 50 bp, unidentified
  source 1..50: mol_type = unassigned DNA; note = donor_85615d4
  misc_feature 1..22: note = RE
  misc_feature 23..25: note = Core
  misc_feature 26..50: note = LE
cactacgggcggcaaccacagaagatggggtggttgccgccctccccaga

SEQ ID NO: 35618 - DNA, 50 bp, unidentified
  source 1..50: mol_type = unassigned DNA; note = donor_8566a05
  misc_feature 1..23: note = RE
  misc_feature 24..25: note = Core
  misc_feature 26..50: note = LE
cggcttgacatcagcattgggaagctctaccttccttttgggttcgtccc

SEQ ID NO: 35619 - DNA, 50 bp, unidentified
  source 1..50: mol_type = unassigned DNA; note = donor_8568464
  misc_feature 1..23: note = RE
  misc_feature 24..25: note = Core
  misc_feature 26..50: note = LE
gcacagcgggggccgtccacacatgttggagtggacggcccccgacggca

SEQ ID NO: 35620 - DNA, 50 bp, unidentified
  source 1..50: mol_type = unassigned DNA; note = donor_8578dcd
  misc_feature 1..21: note = RE
  misc_feature 22..25: note = Core
  misc_feature 26..50: note = LE
gccaaccggggccgtccacatatgatgatgtggacgaccccaccctaacg

SEQ ID NO: 35621 - DNA, 50 bp, unidentified
  source 1..50: mol_type = unassigned DNA; note = donor_857a28c
  misc_feature 1..23: note = RE
  misc_feature 24..25: note = Core
  misc_feature 26..50: note = LE
cacaaacgggagacgttcatatagaatgaaatgaacgtctcccaccctcg

SEQ ID NO: 35622 - DNA, 50 bp, unidentified
  source 1..50: mol_type = unassigned DNA; note = donor_857cf2d
  misc_feature 1..23: note = RE
  misc_feature 24..25: note = Core
  misc_feature 26..50: note = LE
aaggttgactgagaacagagtatcttgtatgtttaacacataaggcttgt

SEQ ID NO: 35623 - DNA, 50 bp, unidentified
  source 1..50: mol_type = unassigned DNA; note = donor_8580d38
  misc_feature 1..24: note = RE
  misc_feature 25: note = Core
  misc_feature 26..50: note = LE
tggcaaaccgggggcgtccatgtacaatgggatggacgcccccacctcta

SEQ ID NO: 35624 - DNA, 50 bp, unidentified
  source 1..50: mol_type = unassigned DNA; note = donor_85822ad
  misc_feature 1..24: note = RE
  misc_feature 25: note = Core
  misc_feature 26..50: note = LE
cttgcagacggggcgggccatacgtatgggatggcccgcccctctcggga

SEQ ID NO: 35625 - DNA, 50 bp, unidentified
  source 1..50: mol_type = unassigned DNA; note = donor_858567f
  misc_feature 1..23: note = RE
  misc_feature 24..25: note = Core
  misc_feature 26..50: note = LE
acgcttgcgctcaaacatagaatcttgtatgttcatctacggcaagcgta

SEQ ID NO: 35626 - DNA, 50 bp, unidentified
  source 1..50: mol_type = unassigned DNA; note = donor_858664b
  misc_feature 1..22: note = RE
  misc_feature 23..25: note = Core
  misc_feature 26..50: note = LE
accgggccggggcctcacagataagatgccatgtgagggggacctccccg

SEQ ID NO: 35627 - DNA, 50 bp, unidentified
  source 1..50: mol_type = unassigned DNA; note = donor_85891dd
  misc_feature 1..22: note = RE
  misc_feature 23..25: note = Core
  misc_feature 26..50: note = LE
cccttgacttttaatagttagtcttgtattatatatttgtagtatttaag

SEQ ID NO: 35628 - DNA, 50 bp, unidentified
  source 1..50: mol_type = unassigned DNA; note = donor_858a54c
  misc_feature 1..23: note = RE
  misc_feature 24..25: note = Core
  misc_feature 26..50: note = LE
gcttgacaagtctcatagaaagtcttatattaggtctgttgcagatattc

SEQ ID NO: 35629 - DNA, 50 bp, unidentified
  source 1..50: mol_type = unassigned DNA; note = donor_858c18b
  misc_feature 1..24: note = RE
  misc_feature 25: note = Core
  misc_feature 26..50: note = LE
cgcaaaaagggaggcgtccatataatggaatggacgcctcccaccccacg

SEQ ID NO: 35630 - DNA, 50 bp, unidentified
  source 1..50: mol_type = unassigned DNA; note = donor_858f280
  misc_feature 1..24: note = RE
  misc_feature 25: note = Core
  misc_feature 26..50: note = LE
tggcataccgggggcgtccatgtacaatgggatggacgcccccacctcgt

SEQ ID NO: 35631 - DNA, 50 bp, unidentified
  source 1..50: mol_type = unassigned DNA; note = donor_8591366
  misc_feature 1..23: note = RE
  misc_feature 24..25: note = Core
  misc_feature 26..50: note = LE
gacttatcgaggcccgttacagaagatggggtaacgggcgccggcaagcg

SEQ ID NO: 35632 - DNA, 50 bp, unidentified
  source 1..50: mol_type = unassigned DNA; note = donor_8596d48
  misc_feature 1..23: note = RE
  misc_feature 24..25: note = Core
  misc_feature 26..50: note = LE
ctacttgactttcattagcaggtctattacaatatatttggacaggaaag

SEQ ID NO: 35633 - DNA, 50 bp, unidentified
  source 1..50: mol_type = unassigned DNA; note = donor_8597a62
  misc_feature 1..23: note = RE
  misc_feature 24..25: note = Core
  misc_feature 26..50: note = LE
gtacttgactgtttatagtttgtcacgtataatccaattatcagttgatg

SEQ ID NO: 35634 - DNA, 50 bp, unidentified
  source 1..50: mol_type = unassigned DNA; note = donor_859dbdc
  misc_feature 1..20: note = RE
  misc_feature 21..25: note = Core
  misc_feature 26..50: note = LE
tgacgaaatccatagggacacccccgttaccttcttcgtgggccttgaag

SEQ ID NO: 35635 - DNA, 50 bp, unidentified
  source 1..50: mol_type = unassigned DNA; note = donor_859e295
  misc_feature 1..23: note = RE
  misc_feature 24..25: note = Core
  misc_feature 26..50: note = LE
cactcagcgcttcaacatagttgcttgtgtgtttccggcatgctattctt

SEQ ID NO: 35636 - DNA, 50 bp, unidentified
  source 1..50: mol_type = unassigned DNA; note = donor_85a2065
  misc_feature 1..23: note = RE
  misc_feature 24..25: note = Core
  misc_feature 26..50: note = LE
ttgcagacggggcgggccatacgttatggaatggcccgtccctttctccg

SEQ ID NO: 35637 - DNA, 50 bp, unidentified
  source 1..50: mol_type = unassigned DNA; note = donor_85a8e57
  misc_feature 1..24: note = RE
  misc_feature 25: note = Core
  misc_feature 26..50: note = LE
atgttgacaagctattagctggtatcgtattatgaggtcaaccaattctt

SEQ ID NO: 35638 - DNA, 50 bp, unidentified
  source 1..50: mol_type = unassigned DNA; note = donor_85b3cf0
  misc_feature 1..23: note = RE
  misc_feature 24..25: note = Core
  misc_feature 26..50: note = LE
gcaaaacacggggcgtccatatatgatgtgatggacgccccccttacggc

SEQ ID NO: 35639 - DNA, 50 bp, unidentified
  source 1..50: mol_type = unassigned DNA; note = donor_85c30ef
  misc_feature 1..23: note = RE
  misc_feature 24..25: note = Core
  misc_feature 26..50: note = LE
tgccctctactttctttcacactaatctccattccgccgccaagcggcgg

SEQ ID NO: 35640 - DNA, 50 bp, unidentified
  source 1..50: mol_type = unassigned DNA; note = donor_85d5ea1
  misc_feature 1..22: note = RE
  misc_feature 23..25: note = Core
  misc_feature 26..50: note = LE
cagctgtgcttttctacatagcagtaattatgtaagaaaagcatagcgca

SEQ ID NO: 35641 - DNA, 50 bp, unidentified
  source 1..50: mol_type = unassigned DNA; note = donor_85d8916
  misc_feature 1..23: note = RE
  misc_feature 24..25: note = Core
  misc_feature 26..50: note = LE
atatcttgacaaagtcatagtgttccattagactatgtaagtgtagaaaa

SEQ ID NO: 35642 - DNA, 50 bp, unidentified
  source 1..50: mol_type = unassigned DNA; note = donor_85dfa92
  misc_feature 1..24: note = RE
  misc_feature 25: note = Core
  misc_feature 26..50: note = LE
tggcaaaacgggggcgaccatctataatgggatggtcgcccccttctgag

SEQ ID NO: 35643 - DNA, 50 bp, unidentified
  source 1..50: mol_type = unassigned DNA; note = donor_85e1258
  misc_feature 1..22: note = RE
  misc_feature 23..25: note = Core
  misc_feature 26..50: note = LE
tgccaaagggggcgtccacatatgatgatgtggacgcccccgcccaacgg

SEQ ID NO: 35644 - DNA, 50 bp, unidentified
  source 1..50: mol_type = unassigned DNA; note = donor_85e3d48
  misc_feature 1..23: note = RE
  misc_feature 24..25: note = Core
  misc_feature 26..50: note = LE
gaccccaaccggccgattagagaagatggggtaatcggccggcagcttgt

SEQ ID NO: 35645 - DNA, 50 bp, unidentified
  source 1..50: mol_type = unassigned DNA; note = donor_85e5cff
  misc_feature 1..23: note = RE
  misc_feature 24..25: note = Core
  misc_feature 26..50: note = LE
cgcaaacgggacgcgttcatatagaatgaaatgaacgcgtcccacccgcg

SEQ ID NO: 35646 - DNA, 50 bp, unidentified; identical to SEQ ID NO: 32998
  source 1..50: mol_type = unassigned DNA; note = donor_85ec5c9
  misc_feature 1..23: note = RE
  misc_feature 24..25: note = Core
  misc_feature 26..50: note = LE

SEQ ID NO: 35647 - DNA, 50 bp, unidentified; identical to SEQ ID NO: 30519
  source 1..50: mol_type = unassigned DNA; note = donor_85ec888
  misc_feature 1..23: note = RE
  misc_feature 24..25: note = Core
  misc_feature 26..50: note = LE

SEQ ID NO: 35648 - DNA, 50 bp, unidentified
  source 1..50: mol_type = unassigned DNA; note = donor_85ef341
  misc_feature 1..24: note = RE
  misc_feature 25: note = Core
  misc_feature 26..50: note = LE
ataacgacttgacacttagaagggcagtaagaatgtctgtgtcagttctc

SEQ ID NO: 35649 - DNA, 50 bp, unidentified
  source 1..50: mol_type = unassigned DNA; note = donor_85f839a
  misc_feature 1..23: note = RE
  misc_feature 24..25: note = Core
  misc_feature 26..50: note = LE
aaagcttgactgtaaacagagtatccttgtatgttgccttggtgccaagg

SEQ ID NO: 35650 - DNA, 50 bp, unidentified
  source 1..50: mol_type = unassigned DNA; note = donor_8605b96
  misc_feature 1..23: note = RE
  misc_feature 24..25: note = Core
  misc_feature 26..50: note = LE
actattgacaattaatagttagtcttgtataatataatcaacgactaaaa

SEQ ID NO: 35651 - DNA, 50 bp, unidentified; identical to SEQ ID NO: 30414
  source 1..50: mol_type = unassigned DNA; note = donor_8606be2
  misc_feature 1..24: note = RE
  misc_feature 25: note = Core
  misc_feature 26..50: note = LE

SEQ ID NO: 35652 - DNA, 50 bp, unidentified
  source 1..50: mol_type = unassigned DNA; note = donor_860e9b5
  misc_feature 1..24: note = RE
  misc_feature 25: note = Core
  misc_feature 26..50: note = LE
accgcttgacgaaagacatagaggcgttatgttttctgcggtcctgcaag

SEQ ID NO: 35653 - DNA, 50 bp, unidentified
  source 1..50: mol_type = unassigned DNA; note = donor_8611e6e
  misc_feature 1..24: note = RE
  misc_feature 25: note = Core
  misc_feature 26..50: note = LE
tgcagaaacgggagggaccatagataatggaatggtccctcccttccgcc

SEQ ID NO: 35654 - DNA, 50 bp, unidentified
  source 1..50: mol_type = unassigned DNA; note = donor_861570c
  misc_feature 1..24: note = RE
  misc_feature 25: note = Core
  misc_feature 26..50: note = LE
ggcgacgcacggccggaccatacataatgggatggtccggccgtgctctt

SEQ ID NO: 35655 - DNA, 50 bp, unidentified
  source 1..50: mol_type = unassigned DNA; note = donor_8622965
  misc_feature 1..22: note = RE
  misc_feature 23..25: note = Core
  misc_feature 26..50: note = LE
tctctttcaatttttattcagattaaccttccattcctttccgcctgcgg

SEQ ID NO: 35656 - DNA, 50 bp, unidentified
  source 1..50: mol_type = unassigned DNA; note = donor_862f3e4
  misc_feature 1..23: note = RE
  misc_feature 24..25: note = Core
  misc_feature 26..50: note = LE
gcgaggcgggggccgtccacatatgttggggtggacggcccccttacggc

SEQ ID NO: 35657 - DNA, 50 bp, unidentified
  source 1..50: mol_type = unassigned DNA; note = donor_8630582
  misc_feature 1..23: note = RE
  misc_feature 24..25: note = Core
  misc_feature 26..50: note = LE
ttgcttgacttttaatagttagtctcgtataattaaatagtagtagtttt

SEQ ID NO: 35658 - DNA, 50 bp, unidentified
  source 1..50: mol_type = unassigned DNA; note = donor_86372f5
  misc_feature 1..22: note = RE
  misc_feature 23..25: note = Core
  misc_feature 26..50: note = LE
ccaaacgggcgccatccagacatgatgtagtggatggcgccctcggacgg

SEQ ID NO: 35659 - DNA, 50 bp, unidentified
  source 1..50: mol_type = unassigned DNA; note = donor_863b683
  misc_feature 1..24: note = RE
  misc_feature 25: note = Core
  misc_feature 26..50: note = LE
gcaaaacaggaggcgtccaatatacaatggaatggacgcctccttcctcc

SEQ ID NO: 35660 - DNA, 50 bp, unidentified
  source 1..50: mol_type = unassigned DNA; note = donor_86407fb
  misc_feature 1..24: note = RE
  misc_feature 25: note = Core
  misc_feature 26..50: note = LE
tgcaaaacggaggtagtccatagataatgggatggactacctccaccctc

SEQ ID NO: 35661 - DNA, 50 bp, unidentified
  source 1..50: mol_type = unassigned DNA; note = donor_8643357
  misc_feature 1..23: note = RE
  misc_feature 24..25: note = Core
  misc_feature 26..50: note = LE
ctgtttgacattcaagacggttgcttgtatcttgccgatggtgcttccaa

SEQ ID NO: 35662 - DNA, 50 bp, unidentified
  source 1..50: mol_type = unassigned DNA; note = donor_8646a2f
  misc_feature 1..24: note = RE
  misc_feature 25: note = Core
  misc_feature 26..50: note = LE
cttgcactgggtcggtgtccatatatggacacctccccataatcggcttc

SEQ ID NO: 35663 - DNA, 50 bp, unidentified
  source 1..50: mol_type = unassigned DNA; note = donor_8648c50
  misc_feature 1..23: note = RE
  misc_feature 24..25: note = Core
  misc_feature 26..50: note = LE
ctaacaaccaggagtttctggggagcatgggccaccccgttggggtggtt

SEQ ID NO: 35664 - DNA, 50 bp, unidentified
  source 1..50: mol_type = unassigned DNA; note = donor_864bf70
  misc_feature 1..23: note = RE
  misc_feature 24..25: note = Core
  misc_feature 26..50: note = LE
gacacctacggggcgtgggatgtctaatgggggtcgaccatctcgctctt

SEQ ID NO: 35665 - DNA, 50 bp, unidentified
  source 1..50: mol_type = unassigned DNA; note = donor_864f235
  misc_feature 1..23: note = RE
  misc_feature 24..25: note = Core
  misc_feature 26..50: note = LE
cctgacggacggcaagacggtatcttatgtgtcgattctcctcggaggtt

SEQ ID NO: 35666 - DNA, 50 bp, unidentified
  source 1..50: mol_type = unassigned DNA; note = donor_865082e
  misc_feature 1..23: note = RE
  misc_feature 24..25: note = Core
  misc_feature 26..50: note = LE
gcgcaacgggcggcaaccacagaagatggggtggttgccgccctccccag

SEQ ID NO: 35667 - DNA, 50 bp, unidentified
  source 1..50: mol_type = unassigned DNA; note = donor_8658120
  misc_feature 1..24: note = RE
  misc_feature 25: note = Core
  misc_feature 26..50: note = LE
tgacatgccggggaagcccttatagaatggaagggactcccctggatatg

SEQ ID NO: 35668 - DNA, 50 bp, unidentified
  source 1..50: mol_type = unassigned DNA; note = donor_8661dbd
  misc_feature 1..23: note = RE
  misc_feature 24..25: note = Core
  misc_feature 26..50: note = LE
cttgcgttaggggcgtctacacatgatgatgtagacgccccccgacggca

SEQ ID NO: 35669 - DNA, 50 bp, unidentified
  source 1..50: mol_type = unassigned DNA; note = donor_866cedc
  misc_feature 1..24: note = RE
  misc_feature 25: note = Core
  misc_feature 26..50: note = LE
agatcaacgcataaactgacttggttgtctctcaaatttatgttttactg

SEQ ID NO: 35670 - DNA, 50 bp, unidentified
  source 1..50: mol_type = unassigned DNA; note = donor_867e834
  misc_feature 1..23: note = RE
  misc_feature 24..25: note = Core
  misc_feature 26..50: note = LE
taatttgcatagtaacatagaacatggtaagtttgcattagtaaaaatag

SEQ ID NO: 35671 - DNA, 50 bp, unidentified
  source 1..50: mol_type = unassigned DNA; note = donor_8683b04
  misc_feature 1..23: note = RE
  misc_feature 24..25: note = Core
  misc_feature 26..50: note = LE
aagatttggttttatcatagaaatcctttagatttgttttttgaaattta

SEQ ID NO: 35672 - DNA, 50 bp, unidentified
  source 1..50: mol_type = unassigned DNA; note = donor_868635d
  misc_feature 1..23: note = RE
  misc_feature 24..25: note = Core
  misc_feature 26..50: note = LE
aaaccgcctgagaaatacagttgcttctgtatctcgagtttgctaactta

SEQ ID NO: 35673 - DNA, 50 bp, unidentified; identical to SEQ ID NO: 33584
  source 1..50: mol_type = unassigned DNA; note = donor_8686520
  misc_feature 1..22: note = RE
  misc_feature 23..25: note = Core
  misc_feature 26..50: note = LE

SEQ ID NO: 35674 - DNA, 50 bp, unidentified
  source 1..50: mol_type = unassigned DNA; note = donor_868acbf
  misc_feature 1..23: note = RE
  misc_feature 24..25: note = Core
  misc_feature 26..50: note = LE
tgagacgaactcatgatagttgactcctaccatgagttcatgtataagaa

SEQ ID NO: 35675 - DNA, 50 bp, unidentified
  source 1..50: mol_type = unassigned DNA; note = donor_868b049
  misc_feature 1..23: note = RE
  misc_feature 24..25: note = Core
  misc_feature 26..50: note = LE
tgcagacggggcgggccatacgtttatgggatggcccgcccctccggcga

SEQ ID NO: 35676 - DNA, 50 bp, unidentified
  source 1..50: mol_type = unassigned DNA; note = donor_868d750
  misc_feature 1..24: note = RE
  misc_feature 25: note = Core
  misc_feature 26..50: note = LE
cttgcagacggggcgggccatacgtatgggatggcccgccctcttccccc

SEQ ID NO: 35677 - DNA, 50 bp, unidentified
  source 1..50: mol_type = unassigned DNA; note = donor_868eeff
  misc_feature 1..24: note = RE
  misc_feature 25: note = Core
  misc_feature 26..50: note = LE
tgggcttgactttttatttgcaggcctgttactataaatttgtccctgtt

SEQ ID NO: 35678 - DNA, 50 bp, unidentified; identical to SEQ ID NO: 33348
  source 1..50: mol_type = unassigned DNA; note = donor_8693524
  misc_feature 1..22: note = RE
  misc_feature 23..25: note = Core
  misc_feature 26..50: note = LE

SEQ ID NO: 35679 - DNA, 50 bp, unidentified
  source 1..50: mol_type = unassigned DNA; note = donor_869e6d0
  misc_feature 1..22: note = RE
  misc_feature 23..25: note = Core
  misc_feature 26..50: note = LE
attcgattttcttattatagttcattgtatattatttaatcattatattt

SEQ ID NO: 35680 - DNA, 50 bp, unidentified
  source 1..50: mol_type = unassigned DNA; note = donor_86a14ee
  misc_feature 1..24: note = RE
  misc_feature 25: note = Core
  misc_feature 26..50: note = LE
accgcttgacctcacccatagaggcgttacgttcttcgtggtccccgacg

SEQ ID NO: 35681 - DNA, 50 bp, unidentified
  source 1..50: mol_type = unassigned DNA; note = donor_86b79e0
  misc_feature 1..23: note = RE
  misc_feature 24..25: note = Core
  misc_feature 26..50: note = LE
agggttgacttttcatagttggtcttgtaggatgttttcagaagaaaaaa

SEQ ID NO: 35682 - DNA, 50 bp, unidentified
  source 1..50: mol_type = unassigned DNA; note = donor_86c0eeb
  misc_feature 1..23: note = RE
  misc_feature 24..25: note = Core
  misc_feature 26..50: note = LE
ttacttgtttttttatacagttcgtcgtacatttgtatatagttaaacaa

SEQ ID NO: 35683 - DNA, 50 bp, unidentified
  source 1..50: mol_type = unassigned DNA; note = donor_86c3c09
  misc_feature 1..23: note = RE
  misc_feature 24..25: note = Core
  misc_feature 26..50: note = LE
ttgcagacggggcgggccatacgttatggaatggcccgccccaactctcc

SEQ ID NO: 35684 - DNA, 50 bp, unidentified; identical to SEQ ID NO: 32172
  source 1..50: mol_type = unassigned DNA; note = donor_86d6f60
  misc_feature 1..24: note = RE
  misc_feature 25: note = Core
  misc_feature 26..50: note = LE

SEQ ID NO: 35685 - DNA, 50 bp, unidentified
  source 1..50: mol_type = unassigned DNA; note = donor_86de056
  misc_feature 1..20: note = RE
  misc_feature 21..25: note = Core
  misc_feature 26..50: note = LE
cttgacgaaagacatagggacacccgttaccttctttatggccctagatg

SEQ ID NO: 35686 - DNA, 50 bp, unidentified; identical to SEQ ID NO: 30486
  source 1..50: mol_type = unassigned DNA; note = donor_86e4f09
  misc_feature 1..19: note = RE
  misc_feature 20..25: note = Core
  misc_feature 26..50: note = LE

SEQ ID NO: 35687 - DNA, 50 bp, unidentified
  source 1..50: mol_type = unassigned DNA; note = donor_86eb8c6
  misc_feature 1..22: note = RE
  misc_feature 23..25: note = Core
  misc_feature 26..50: note = LE
tgacttgtatattaacacagaatctcctatgtttgtgtcaagcaaatgta

SEQ ID NO: 35688 - DNA, 50 bp, unidentified
  source 1..50: mol_type = unassigned DNA; note = donor_86f3d65
  misc_feature 1..23: note = RE
  misc_feature 24..25: note = Core
  misc_feature 26..50: note = LE
tgcaaagtgggtcgttccacatatgatgaggtggaacgacccgctaccga

SEQ ID NO: 35689 - DNA, 50 bp, unidentified
  source 1..50: mol_type = unassigned DNA; note = donor_86f44b9
  misc_feature 1..23: note = RE
  misc_feature 24..25: note = Core
  misc_feature 26..50: note = LE
ttatttgcagattaacacagaatctcctatgtttgtataagttataattt

SEQ ID NO: 35690 - DNA, 50 bp, unidentified
  source 1..50: mol_type = unassigned DNA; note = donor_86f89fe
  misc_feature 1..23: note = RE
  misc_feature 24..25: note = Core
  misc_feature 26..50: note = LE
gcaatcgggcgctttaatggttgcttgtattagcgcgccgggttaggatg

SEQ ID NO: 35691 - DNA, 50 bp, unidentified
  source 1..50: mol_type = unassigned DNA; note = donor_86fbe0a
  misc_feature 1..23: note = RE
  misc_feature 24..25: note = Core
  misc_feature 26..50: note = LE
cgatcgggcgaatctaatggttgcttgttttagcgcaccggactagaatg

SEQ ID NO: 35692 - DNA, 50 bp, unidentified
  source 1..50: mol_type = unassigned DNA; note = donor_870158a
  misc_feature 1..22: note = RE
  misc_feature 23..25: note = Core
  misc_feature 26..50: note = LE
ccaaaagggagccgtccacacatgatgcggtggacggctcccacccgacg

SEQ ID NO: 35693 - DNA, 50 bp, unidentified
  source 1..50: mol_type = unassigned DNA; note = donor_870afa8
  misc_feature 1..22: note = RE
  misc_feature 23..25: note = Core
  misc_feature 26..50: note = LE
caatgcgggcgtcgtccacacatgatgtagtggacgacgcccgctcccgg

SEQ ID NO: 35694 - DNA, 50 bp, unidentified
  source 1..50: mol_type = unassigned DNA; note = donor_8711229
  misc_feature 1..23: note = RE
  misc_feature 24..25: note = Core
  misc_feature 26..50: note = LE
gacactggaaggcccgttacagaagatggggtaacgggccggccggaagc

SEQ ID NO: 35695 - DNA, 50 bp, unidentified
  source 1..50: mol_type = unassigned DNA; note = donor_8717048
  misc_feature 1..23: note = RE
  misc_feature 24..25: note = Core
  misc_feature 26..50: note = LE
cggcttgacatcagcattgggaagctctaccttccttctgggatcgcccc

SEQ ID NO: 35696 - DNA, 50 bp, unidentified
  source 1..50: mol_type = unassigned DNA; note = donor_8724cf0
  misc_feature 1..22: note = RE
  misc_feature 23..25: note = Core
  misc_feature 26..50: note = LE
cgtcaaaggggccgtccacacatgatgcggtggacggcccccgagcggca

SEQ ID NO: 35697 - DNA, 50 bp, unidentified; identical to SEQ ID NO: 30921
  source 1..50: mol_type = unassigned DNA; note = donor_8731e47
  misc_feature 1..24: note = RE
  misc_feature 25: note = Core
  misc_feature 26..50: note = LE

SEQ ID NO: 35698 - DNA, 50 bp, unidentified
  source 1..50: mol_type = unassigned DNA; note = donor_8739fca
  misc_feature 1..23: note = RE
  misc_feature 24..25: note = Core
  misc_feature 26..50: note = LE
gcaaggcggggaacgtccatagatgatgagatggacgtcccccagttccg

SEQ ID NO: 35699 - DNA, 50 bp, unidentified; identical to SEQ ID NO: 35465
  source 1..50: mol_type = unassigned DNA; note = donor_873c8e0
  misc_feature 1..23: note = RE
  misc_feature 24..25: note = Core
  misc_feature 26..50: note = LE

SEQ ID NO: 35700 - DNA, 50 bp, unidentified
  source 1..50: mol_type = unassigned DNA; note = donor_874034a
  misc_feature 1..23: note = RE
  misc_feature 24..25: note = Core
  misc_feature 26..50: note = LE
cctcttgacatctaatagttagtcttgtattatagagtagtagtttttag

SEQ ID NO: 35701 - DNA, 50 bp, unidentified
  source 1..50: mol_type = unassigned DNA; note = donor_87464c2
  misc_feature 1..24: note = RE
  misc_feature 25: note = Core
  misc_feature 26..50: note = LE
ttacttgtttttagccacagttcttcttaagttagcattttataaattta

SEQ ID NO: 35702 - DNA, 50 bp, unidentified
  source 1..50: mol_type = unassigned DNA; note = donor_874af79
  misc_feature 1..23: note = RE
  misc_feature 24..25: note = Core
  misc_feature 26..50: note = LE
agacttgacaagcgataccgtatctcgtatagtaaggaggtccgattcct

SEQ ID NO: 35703 - DNA, 50 bp, unidentified
  source 1..50: mol_type = unassigned DNA; note = donor_87598ee
  misc_feature 1..23: note = RE
  misc_feature 24..25: note = Core
  misc_feature 26..50: note = LE
ggcttgacaagaccctatgggatctgatataccgccttgtgaggtcgatg

SEQ ID NO: 35704 - DNA, 50 bp, unidentified
  source 1..50: mol_type = unassigned DNA; note = donor_8767d0d
  misc_feature 1..23: note = RE
  misc_feature 24..25: note = Core
  misc_feature 26..50: note = LE
gacatccaagccccatgggatgtctaatgagagttaacgggtcggccgtc

SEQ ID NO: 35705 - DNA, 50 bp, unidentified
  source 1..50: mol_type = unassigned DNA; note = donor_8770a77
  misc_feature 1..23: note = RE
  misc_feature 24..25: note = Core
  misc_feature 26..50: note = LE
ggcttgcgtctgaaacacggttgcttgtgtctctcgaatcatgcaggatc

SEQ ID NO: 35706 - DNA, 50 bp, unidentified
  source 1..50: mol_type = unassigned DNA; note = donor_87732b6
  misc_feature 1..24: note = RE
  misc_feature 25: note = Core
  misc_feature 26..50: note = LE
tgctacttgacactaaaggggagcctacttagcattggcggcagggctcg

SEQ ID NO: 35707 - DNA, 50 bp, unidentified
  source 1..50: mol_type = unassigned DNA; note = donor_877dc15
  misc_feature 1..23: note = RE
  misc_feature 24..25: note = Core
  misc_feature 26..50: note = LE
aaatttggttgagacttagaattcatttacttttgcactattcaataaca

SEQ ID NO: 35708 - DNA, 50 bp, unidentified
  source 1..50: mol_type = unassigned DNA; note = donor_877e626
  misc_feature 1..23: note = RE
  misc_feature 24..25: note = Core
  misc_feature 26..50: note = LE
tgcataatggggcgtaccatacattaattagatggtacgcccctccattc

SEQ ID NO: 35709 - DNA, 50 bp, unidentified; identical to SEQ ID NO: 30380
  source 1..50: mol_type = unassigned DNA; note = donor_878d369
  misc_feature 1..23: note = RE
  misc_feature 24..25: note = Core
  misc_feature 26..50: note = LE

SEQ ID NO: 35710 - DNA, 50 bp, unidentified; identical to SEQ ID NO: 34147
  source 1..50: mol_type = unassigned DNA; note = donor_87a1524
  misc_feature 1..23: note = RE
  misc_feature 24..25: note = Core
  misc_feature 26..50: note = LE

SEQ ID NO: 35711 - DNA, 50 bp, unidentified
  source 1..50: mol_type = unassigned DNA; note = donor_87b07e9
  misc_feature 1..24: note = RE
  misc_feature 25: note = Core
  misc_feature 26..50: note = LE
acacaccgcttgacatagaagcatctattggtcatgatgatccgggccgg

SEQ ID NO: 35712 - DNA, 50 bp, unidentified
  source 1..50: mol_type = unassigned DNA; note = donor_87b2f4c
  misc_feature 1..24: note = RE
  misc_feature 25: note = Core
  misc_feature 26..50: note = LE
cggcataggctttaactgacttggttgtctgtgcgatccatgctttacta

SEQ ID NO: 35713 - DNA, 50 bp, unidentified
  source 1..50: mol_type = unassigned DNA; note = donor_87ddeaf
  misc_feature 1..23: note = RE
  misc_feature 24..25: note = Core
  misc_feature 26..50: note = LE
ccagaaagttaaagatacagttgcttctgtatcctcagtttgctatattg

SEQ ID NO: 35714 - DNA, 50 bp, unidentified
  source 1..50: mol_type = unassigned DNA; note = donor_87e0d8d
  misc_feature 1..20: note = RE
  misc_feature 21..25: note = Core
  misc_feature 26..50: note = LE
cttgacacacattagcaggtttgctacaatatgcttgaccccaaaagcag

SEQ ID NO: 35715 - DNA, 50 bp, unidentified
  source 1..50: mol_type = unassigned DNA; note = donor_87e498d
  misc_feature 1..23: note = RE
  misc_feature 24..25: note = Core
  misc_feature 26..50: note = LE
gcgattgccttcggccatagaatcttgtatggtaggacttgaagggagga

SEQ ID NO: 35716 - DNA, 50 bp, unidentified
  source 1..50: mol_type = unassigned DNA; note = donor_87f33bf
  misc_feature 1..24: note = RE
  misc_feature 25: note = Core
  misc_feature 26..50: note = LE
atgtttggtttttacctcagttcttcttaagtttgatctttaataaatca

SEQ ID NO: 35717 - DNA, 50 bp, unidentified
  source 1..50: mol_type = unassigned DNA; note = donor_87f457f
  misc_feature 1..23: note = RE
  misc_feature 24..25: note = Core
  misc_feature 26..50: note = LE
atgcttgacacgaaagagagaatcttgtatgttgcattcagaggcgtgag

SEQ ID NO: 35718 - DNA, 50 bp, unidentified
  source 1..50: mol_type = unassigned DNA; note = donor_87f48ab
  misc_feature 1..23: note = RE
  misc_feature 24..25: note = Core
  misc_feature 26..50: note = LE
gacatcatcgggcccattacagaagatgcggtaatgggccctgctccgag

SEQ ID NO: 35719 - DNA, 50 bp, unidentified
  source 1..50: mol_type = unassigned DNA; note = donor_87f59c1
  misc_feature 1..23: note = RE
  misc_feature 24..25: note = Core
  misc_feature 26..50: note = LE
gtgcttgacgtgggacacagttgcttgtatgttcaacccaccgccattga

SEQ ID NO: 35720 - DNA, 50 bp, unidentified
  source 1..50: mol_type = unassigned DNA; note = donor_8806643
  misc_feature 1..23: note = RE
  misc_feature 24..25: note = Core
  misc_feature 26..50: note = LE
agggggcttgatcaagacggatacttgtcttatgaatatcccagcttttg

SEQ ID NO: 35721 - DNA, 50 bp, unidentified
  source 1..50: mol_type = unassigned DNA; note = donor_8807aa1
  misc_feature 1..23: note = RE
  misc_feature 24..25: note = Core
  misc_feature 26..50: note = LE
gaacccagcgggccgtccacacatgttgaggtggacggcccaacggcatc

SEQ ID NO: 35722 - DNA, 50 bp, unidentified
  source 1..50: mol_type = unassigned DNA; note = donor_8811c09
  misc_feature 1..23: note = RE
  misc_feature 24..25: note = Core
  misc_feature 26..50: note = LE
gggcttgacttttaatagttagtcttgtattatagagtagtagttattaa

SEQ ID NO: 35723 - DNA, 50 bp, unidentified
  source 1..50: mol_type = unassigned DNA; note = donor_8811f41
  misc_feature 1..23: note = RE
  misc_feature 24..25: note = Core
  misc_feature 26..50: note = LE
aattgaatccatttagacagttgcttgtgtcttaagtcaggaataaactg

SEQ ID NO: 35724 - DNA, 50 bp, unidentified
  source 1..50: mol_type = unassigned DNA; note = donor_881275c
  misc_feature 1..23: note = RE
  misc_feature 24..25: note = Core
  misc_feature 26..50: note = LE
gactaatcgaggcccgttacagaagatggggtaacgggccgaccaagcaa

SEQ ID NO: 35725 - DNA, 50 bp, unidentified
  source 1..50: mol_type = unassigned DNA; note = donor_88143ee
  misc_feature 1..22: note = RE
  misc_feature 23..25: note = Core
  misc_feature 26..50: note = LE
ctcaacgggggccgtccacacatgatggggtggacggcccccgacccacg

SEQ ID NO: 35726 - DNA, 50 bp, unidentified
  source 1..50: mol_type = unassigned DNA; note = donor_88284b4
  misc_feature 1..23: note = RE
  misc_feature 24..25: note = Core
  misc_feature 26..50: note = LE
gcaccaacgggggcgtccacacatgatggggtggacgccccctgacggca

SEQ ID NO: 35727 - DNA, 50 bp, unidentified
  source 1..50: mol_type = unassigned DNA; note = donor_882a4bf
  misc_feature 1..23: note = RE
  misc_feature 24..25: note = Core
  misc_feature 26..50: note = LE
tcttttacttgactaatcgtaggaaacatactaagattagaggggaacat

SEQ ID NO: 35728 - DNA, 50 bp, unidentified
  source 1..50: mol_type = unassigned DNA; note = donor_882d0d9
  misc_feature 1..23: note = RE
  misc_feature 24..25: note = Core
  misc_feature 26..50: note = LE
gggattgacttttaatagttagtctcgtattatagagtagtagttatttg

SEQ ID NO: 35729 - DNA, 50 bp, unidentified
  source 1..50: mol_type = unassigned DNA; note = donor_882ee0d
  misc_feature 1..23: note = RE
  misc_feature 24..25: note = Core
  misc_feature 26..50: note = LE
gcaataacggggcggaccatacattaattatatggtccgccccactctca

SEQ ID NO: 35730 - DNA, 50 bp, unidentified
  source 1..50: mol_type = unassigned DNA; note = donor_8832b84
  misc_feature 1..24: note = RE
  misc_feature 25: note = Core
  misc_feature 26..50: note = LE
atcatttgtttatatcatagtaatcctttagatttgttgaatgagaaaat

SEQ ID NO: 35731 - DNA, 50 bp, unidentified
  source 1..50: mol_type = unassigned DNA; note = donor_884d758
  misc_feature 1..23: note = RE
  misc_feature 24..25: note = Core
  misc_feature 26..50: note = LE
tttgcttgaaaaccagacagttacttgtatcttggcatttcagctggtgt

SEQ ID NO: 35732 - DNA, 50 bp, unidentified
  source 1..50: mol_type = unassigned DNA; note = donor_88565c6
  misc_feature 1..24: note = RE
  misc_feature 25: note = Core
  misc_feature 26..50: note = LE
gccgcttgacatccataggagcatcagagatgatgtaagtgagcacctcc

SEQ ID NO: 35733 - DNA, 50 bp, unidentified
  source 1..50: mol_type = unassigned DNA; note = donor_8859a78
  misc_feature 1..23: note = RE
  misc_feature 24..25: note = Core
  misc_feature 26..50: note = LE
gcatcgacgggggcgtccacacatgatggggtggacgccccctgacggca

SEQ ID NO: 35734 - DNA, 50 bp, unidentified
  source 1..50: mol_type = unassigned DNA; note = donor_8867ad8
  misc_feature 1..24: note = RE
  misc_feature 25: note = Core
  misc_feature 26..50: note = LE
ttgacaaaagagggagtccatgtagaatgatatggactccctctacctgg

SEQ ID NO: 35735 - DNA, 50 bp, unidentified
  source 1..50: mol_type = unassigned DNA; note = donor_8868c66
  misc_feature 1..22: note = RE
  misc_feature 23..25: note = Core
  misc_feature 26..50: note = LE
caacgcaggggccgtccatacatgatggggtggacggcccctgtcgcccg

SEQ ID NO: 35736 - DNA, 50 bp, unidentified
  source 1..50: mol_type = unassigned DNA; note = donor_886baef
  misc_feature 1..23: note = RE
  misc_feature 24..25: note = Core
  misc_feature 26..50: note = LE
gcatcttcgggggcatccacacatgatggggtggatgccccctcccgacg

SEQ ID NO: 35737 - DNA, 50 bp, unidentified
  source 1..50: mol_type = unassigned DNA; note = donor_8872eb8
  misc_feature 1..23: note = RE
  misc_feature 24..25: note = Core
  misc_feature 26..50: note = LE
caacgcgggagccatccacagaagatggggtggatggctcccgctcccgg

SEQ ID NO: 35738 - DNA, 50 bp, unidentified; identical to SEQ ID NO: 31360
  source 1..50: mol_type = unassigned DNA; note = donor_887fda6
  misc_feature 1..24: note = RE
  misc_feature 25: note = Core
  misc_feature 26..50: note = LE

SEQ ID NO: 35739 - DNA, 50 bp, unidentified
  source 1..50: mol_type = unassigned DNA; note = donor_8882050
  misc_feature 1..23: note = RE
  misc_feature 24..25: note = Core
  misc_feature 26..50: note = LE
aagtcgcttgatcacaacggatacttgtcttatgaaaatctggtcgcttc

SEQ ID NO: 35740 - DNA, 50 bp, unidentified
  source 1..50: mol_type = unassigned DNA; note = donor_8898485
  misc_feature 1..23: note = RE
  misc_feature 24..25: note = Core
  misc_feature 26..50: note = LE
tgacatctaacgtccagggatgtctaatgggagctaccgggtcggctgtt

SEQ ID NO: 35741 - DNA, 50 bp, unidentified
  source 1..50: mol_type = unassigned DNA; note = donor_889db2e
  misc_feature 1..22: note = RE
  misc_feature 23..25: note = Core
  misc_feature 26..50: note = LE
aggcttgactctcaacacggtatcttgtatgttcgtttcatcgcttgact

SEQ ID NO: 35742 - DNA, 50 bp, unidentified
  source 1..50: mol_type = unassigned DNA; note = donor_88aa52f
  misc_feature 1..23: note = RE
  misc_feature 24..25: note = Core
  misc_feature 26..50: note = LE
taaattggtattcaagacagttgcttgtatcctgagatttagttaccatg

SEQ ID NO: 35743 - DNA, 50 bp, unidentified; identical to SEQ ID NO: 31527
  source 1..50: mol_type = unassigned DNA; note = donor_88afb05
  misc_feature 1..23: note = RE
  misc_feature 24..25: note = Core
  misc_feature 26..50: note = LE

SEQ ID NO: 35744 - DNA, 50 bp, unidentified
  source 1..50: mol_type = unassigned DNA; note = donor_88b1625
  misc_feature 1..23: note = RE
  misc_feature 24..25: note = Core
  misc_feature 26..50: note = LE
actattgacttttcatagttggtcttgtatgatgtatttagtccaaatac

SEQ ID NO: 35745 - DNA, 50 bp, unidentified
  source 1..50: mol_type = unassigned DNA; note = donor_88b613a
  misc_feature 1..22: note = RE
  misc_feature 23..25: note = Core
  misc_feature 26..50: note = LE
cccttgacttctaagacggttgcttgtatcttgatttgtggtcgtagaat

SEQ ID NO: 35746 - DNA, 50 bp, unidentified
  source 1..50: mol_type = unassigned DNA; note = donor_88bd5fe
  misc_feature 1..23: note = RE
  misc_feature 24..25: note = Core
  misc_feature 26..50: note = LE
gcgaggacggggccgtccacatatgttggtgtggacggcccccgacggca

SEQ ID NO: 35747 - DNA, 50 bp, unidentified
  source 1..50: mol_type = unassigned DNA; note = donor_88cb8b8
  misc_feature 1..23: note = RE
  misc_feature 24..25: note = Core
  misc_feature 26..50: note = LE
ttgcaaacgggacgcgttcatataaatgtaatgaacgcgtcccacccatt

SEQ ID NO: 35748 - DNA, 50 bp, unidentified
  source 1..50: mol_type = unassigned DNA; note = donor_88d7078
  misc_feature 1..23: note = RE
  misc_feature 24..25: note = Core
  misc_feature 26..50: note = LE
gacctcaacacgccgaatagagaagatggggtattcggcttgcgcccctt

SEQ ID NO: 35749 - DNA, 50 bp, unidentified
  source 1..50: mol_type = unassigned DNA; note = donor_88d717b
  misc_feature 1..21: note = RE
  misc_feature 22..25: note = Core
  misc_feature 26..50: note = LE
ttgttgatttctaatagttaatctcgtattatcaatataggtgttctaat

SEQ ID NO: 35750 - DNA, 50 bp, unidentified
  source 1..50: mol_type = unassigned DNA; note = donor_88d7cb6
  misc_feature 1..24: note = RE
  misc_feature 25: note = Core
  misc_feature 26..50: note = LE
attattgacaactattagctggtttcgtattattaggtcagccagaaaat

SEQ ID NO: 35751 - DNA, 50 bp, unidentified
  source 1..50: mol_type = unassigned DNA; note = donor_88d88a1
  misc_feature 1..22: note = RE
  misc_feature 23..25: note = Core
  misc_feature 26..50: note = LE
acccaaacccgccgaatagagaagatggggtattcggcttgcgccccatt

SEQ ID NO: 35752 - DNA, 50 bp, unidentified
  source 1..50: mol_type = unassigned DNA; note = donor_88e51a1
  misc_feature 1..23: note = RE
  misc_feature 24..25: note = Core
  misc_feature 26..50: note = LE
gtacgggttgacacacagaggcgctgacttgtctactggagtcaggcgct

SEQ ID NO: 35753 - DNA, 50 bp, unidentified
  source 1..50: mol_type = unassigned DNA; note = donor_88e5e40
  misc_feature 1..23: note = RE
  misc_feature 24..25: note = Core
  misc_feature 26..50: note = LE
cgccttgacactcaacagagtgtcttgtacgtttgctgtgggcatgtttt

SEQ ID NO: 35754 - DNA, 50 bp, unidentified
  source 1..50: mol_type = unassigned DNA; note = donor_88ebe55
  misc_feature 1..23: note = RE
  misc_feature 24..25: note = Core
  misc_feature 26..50: note = LE
aacccacttgatcacaacggatacttgtcttatgaacttcttgcttcttc

SEQ ID NO: 35755 - DNA, 50 bp, unidentified
  source 1..50: mol_type = unassigned DNA; note = donor_88f2d22
  misc_feature 1..23: note = RE
  misc_feature 24..25: note = Core
  misc_feature 26..50: note = LE
cagcttgacaaaatagagaggcaccgacttatatctccggtagcggtttc

SEQ ID NO: 35756 - DNA, 50 bp, unidentified
  source 1..50: mol_type = unassigned DNA; note = donor_8910bf4
  misc_feature 1..23: note = RE
  misc_feature 24..25: note = Core
  misc_feature 26..50: note = LE
tgcaagcggaggccgtccacatatgttgaggtgcacggctcccaacggca

SEQ ID NO: 35757 - DNA, 50 bp, unidentified
  source 1..50: mol_type = unassigned DNA; note = donor_89117b8
  misc_feature 1..24: note = RE
  misc_feature 25: note = Core
  misc_feature 26..50: note = LE
actacttgtggggagagtccatatatgctgtaatggactctccccgcgcc

SEQ ID NO: 35758 - DNA, 50 bp, unidentified; identical to SEQ ID NO: 31733
  source 1..50: mol_type = unassigned DNA; note = donor_89177c0
  misc_feature 1..23: note = RE
  misc_feature 24..25: note = Core
  misc_feature 26..50: note = LE

SEQ ID NO: 35759 - DNA, 50 bp, unidentified
  source 1..50: mol_type = unassigned DNA; note = donor_891bbc4
  misc_feature 1..23: note = RE
  misc_feature 24..25: note = Core
  misc_feature 26..50: note = LE
gcgacgtggcggcggaccatacataatgggatggtccgccgcctttacca

SEQ ID NO: 35760 - DNA, 50 bp, unidentified
  source 1..50: mol_type = unassigned DNA; note = donor_8923514
  misc_feature 1..23: note = RE
  misc_feature 24..25: note = Core
  misc_feature 26..50: note = LE
gcaaagggagagccgtccatagataatgggatggacggctctcccacccc

SEQ ID NO: 35761 - DNA, 50 bp, unidentified
  source 1..50: mol_type = unassigned DNA; note = donor_892f9ca
  misc_feature 1..23: note = RE
  misc_feature 24..25: note = Core
  misc_feature 26..50: note = LE
cacttgactgtttatagtttgtcacgtataatccaattatcctcttttga

SEQ ID NO: 35762 - DNA, 50 bp, unidentified
  source 1..50: mol_type = unassigned DNA; note = donor_893e29f
  misc_feature 1..24: note = RE
  misc_feature 25: note = Core
  misc_feature 26..50: note = LE
ggggcttgactttttatttgcaggcctgttactatgtatttgcccccgag

SEQ ID NO: 35763 - DNA, 50 bp, unidentified; identical to SEQ ID NO: 30381
  source 1..50: mol_type = unassigned DNA; note = donor_894450c
  misc_feature 1..24: note = RE
  misc_feature 25: note = Core
  misc_feature 26..50: note = LE

SEQ ID NO: 35764 - DNA, 50 bp, unidentified; identical to SEQ ID NO: 30609
  source 1..50: mol_type = unassigned DNA; note = donor_8945871
  misc_feature 1..22: note = RE
  misc_feature 23..25: note = Core
  misc_feature 26..50: note = LE

SEQ ID NO: 35765 - DNA, 50 bp, unidentified
  source 1..50: mol_type = unassigned DNA; note = donor_89540db
  misc_feature 1..23: note = RE
  misc_feature 24..25: note = Core
  misc_feature 26..50: note = LE
agtccggataggagagacggtatcttgtgtctctccacgggttgatggtt

SEQ ID NO: 35766 - DNA, 50 bp, unidentified
  source 1..50: mol_type = unassigned DNA; note = donor_8955377
  misc_feature 1..22: note = RE
  misc_feature 23..25: note = Core
  misc_feature 26..50: note = LE
gggttgacttttcatagttggtcttgtatgatatagtcaggttttatagg

SEQ ID NO: 35767 - DNA, 50 bp, unidentified; identical to SEQ ID NO: 33479
  source 1..50: mol_type = unassigned DNA; note = donor_8956365
  misc_feature 1..23: note = RE
  misc_feature 24..25: note = Core
  misc_feature 26..50: note = LE

SEQ ID NO: 35768 - DNA, 50 bp, unidentified
  source 1..50: mol_type = unassigned DNA; note = donor_8958388
  misc_feature 1..23: note = RE
  misc_feature 24..25: note = Core
  misc_feature 26..50: note = LE
cagcttgacccaaaccatagaaccttgtatggttaagttgtcggggtgga

SEQ ID NO: 35769 - DNA, 50 bp, unidentified
  source 1..50: mol_type = unassigned DNA; note = donor_895c711
  misc_feature 1..22: note = RE
  misc_feature 23..25: note = Core
  misc_feature 26..50: note = LE
acgtcccagcggcgattagacaacatggggtaatcgcgggagcgacgcgc

SEQ ID NO: 35770 - DNA, 50 bp, unidentified; identical to SEQ ID NO: 30422
  source 1..50: mol_type = unassigned DNA; note = donor_895d037
  misc_feature 1..23: note = RE
  misc_feature 24..25: note = Core
  misc_feature 26..50: note = LE

SEQ ID NO: 35771 - DNA, 50 bp, unidentified
  source 1..50: mol_type = unassigned DNA; note = donor_8960463
  misc_feature 1..24: note = RE
  misc_feature 25: note = Core
  misc_feature 26..50: note = LE
ttggcaagaaggggcgtccatgtataatggcatggacgcccctgctttta

SEQ ID NO: 35772 - DNA, 50 bp, unidentified
  source 1..50: mol_type = unassigned DNA; note = donor_8967f9e
  misc_feature 1..21: note = RE
  misc_feature 22..25: note = Core
  misc_feature 26..50: note = LE
atattgacaaatatagcaggactgctatataataacgtcatatcacaaat

SEQ ID NO: 35773 - DNA, 50 bp, unidentified
  source 1..50: mol_type = unassigned DNA; note = donor_896caf6
  misc_feature 1..22: note = RE
  misc_feature 23..25: note = Core
  misc_feature 26..50: note = LE
acctcaacacgccgaatagagaagatgggatattcggcttgggcccatcc

SEQ ID NO: 35774 - DNA, 50 bp, unidentified
  source 1..50: mol_type = unassigned DNA; note = donor_896fa49
  misc_feature 1..24: note = RE
  misc_feature 25: note = Core
  misc_feature 26..50: note = LE
tcacttgacttcctaatagttaaatggtatatataaattagctcatccag

SEQ ID NO: 35775 - DNA, 50 bp, unidentified
  source 1..50: mol_type = unassigned DNA; note = donor_896fac5
  misc_feature 1..23: note = RE
  misc_feature 24..25: note = Core
  misc_feature 26..50: note = LE
gcaagccgggggccgtccacatatgttggggtggacggcccccaaatcgg

SEQ ID NO: 35776 - DNA, 50 bp, unidentified
  source 1..50: mol_type = unassigned DNA; note = donor_8974a53
  misc_feature 1..24: note = RE
  misc_feature 25: note = Core
  misc_feature 26..50: note = LE
tgcggcgaagcggcggaccatacataatgggatggtccgccgctttagct

SEQ ID NO: 35777 - DNA, 50 bp, unidentified
  source 1..50: mol_type = unassigned DNA; note = donor_8974eb6
  misc_feature 1..24: note = RE
  misc_feature 25: note = Core
  misc_feature 26..50: note = LE
tggaaatataagaaacctagaatacctttggttttaatatagttctattt

SEQ ID NO: 35778 - DNA, 50 bp, unidentified
  source 1..50: mol_type = unassigned DNA; note = donor_897efd6
  misc_feature 1..24: note = RE
  misc_feature 25: note = Core
  misc_feature 26..50: note = LE
tcgctgcgacaagatgacagttgcttgtatgacgcgaaagaagcattgtg

SEQ ID NO: 35779 - DNA, 50 bp, unidentified
  source 1..50: mol_type = unassigned DNA; note = donor_8983420
  misc_feature 1..24: note = RE
  misc_feature 25: note = Core
  misc_feature 26..50: note = LE
accgcttgacgaaaaccataggggccgttaccttttccgtggccccgcta

SEQ ID NO: 35780 - DNA, 50 bp, unidentified
  source 1..50: mol_type = unassigned DNA; note = donor_898a1df
  misc_feature 1..21: note = RE
  misc_feature 22..25: note = Core
  misc_feature 26..50: note = LE
caggaggttgacacaggatgtctcactggagtaccttccagccgttgagt

SEQ ID NO: 35781 - DNA, 50 bp, unidentified
  source 1..50: mol_type = unassigned DNA; note = donor_898fee0
  misc_feature 1..23: note = RE
  misc_feature 24..25: note = Core
  misc_feature 26..50: note = LE
gcattacccggggcgtccacacacgatggggtggacgccccttttacggc

SEQ ID NO: 35782 - DNA, 50 bp, unidentified
  source 1..50: mol_type = unassigned DNA; note = donor_899288e
  misc_feature 1..23: note = RE
  misc_feature 24..25: note = Core
  misc_feature 26..50: note = LE
agtcttgactttttatttgcaggctactacaatatatttatgggtaatcc

SEQ ID NO: 35783 - DNA, 50 bp, unidentified
  source 1..50: mol_type = unassigned DNA; note = donor_89947d4
  misc_feature 1..22: note = RE
  misc_feature 23..25: note = Core
  misc_feature 26..50: note = LE
tccttgacattcaacacggttgcttgtatattgatttcggtcgttcacaa

SEQ ID NO: 35784 - DNA, 50 bp, unidentified
  source 1..50: mol_type = unassigned DNA; note = donor_8998724
  misc_feature 1..24: note = RE
  misc_feature 25: note = Core
  misc_feature 26..50: note = LE
gggacttgacttttattagcaggtcctattacaataaacatggaaccgga

SEQ ID NO: 35785 - DNA, 50 bp, unidentified
  source 1..50: mol_type = unassigned DNA; note = donor_89abcb9
  misc_feature 1..23: note = RE
  misc_feature 24..25: note = Core
  misc_feature 26..50: note = LE
ggctcccgtgaacatcacagttgcctgtctgtttcgatgatggtatgagt

SEQ ID NO: 35786 - DNA, 50 bp, unidentified
  source 1..50: mol_type = unassigned DNA; note = donor_89ad8b8
  misc_feature 1..21: note = RE
  misc_feature 22..25: note = Core
  misc_feature 26..50: note = LE
gcgagggttgacacaggatgtctcactggactaccctccctcgagcgaga

SEQ ID NO: 35787 - DNA, 50 bp, unidentified
  source 1..50: mol_type = unassigned DNA; note = donor_89b05db
  misc_feature 1..24: note = RE
  misc_feature 25: note = Core
  misc_feature 26..50: note = LE
tgcggaaaggcggcggaccatacataatgggatggtccgccgcctttacc

SEQ ID NO: 35788 - DNA, 50 bp, unidentified
  source 1..50: mol_type = unassigned DNA; note = donor_89b4f9c
  misc_feature 1..22: note = RE
  misc_feature 23..25: note = Core
  misc_feature 26..50: note = LE
ctattgacttttgatagttggtcttatataatgtatttaggttgataaag

SEQ ID NO: 35789 - DNA, 50 bp, unidentified
  source 1..50: mol_type = unassigned DNA; note = donor_89b7e91
  misc_feature 1..23: note = RE
  misc_feature 24..25: note = Core
  misc_feature 26..50: note = LE
cttgcgcatggggcggttacacatgatgatgtgaccgccccccgacggca

SEQ ID NO: 35790 - DNA, 50 bp, unidentified
  source 1..50: mol_type = unassigned DNA; note = donor_89bade0
  misc_feature 1..23: note = RE
  misc_feature 24..25: note = Core
  misc_feature 26..50: note = LE
cctgctagggggcaagacggtatcttgtatctggacatgtcgcccctaaa

SEQ ID NO: 35791 - DNA, 50 bp, unidentified
  source 1..50: mol_type = unassigned DNA; note = donor_89bc8ae
  misc_feature 1..23: note = RE
  misc_feature 24..25: note = Core
  misc_feature 26..50: note = LE
tagtcgcgctcgaaagacagttgcttgtatcttgaaagtggattactatg

SEQ ID NO: 35792 - DNA, 50 bp, unidentified; identical to SEQ ID NO: 30466
  source 1..50: mol_type = unassigned DNA; note = donor_89c0452
  misc_feature 1..23: note = RE
  misc_feature 24..25: note = Core
  misc_feature 26..50: note = LE

SEQ ID NO: 35793 - DNA, 50 bp, unidentified
  source 1..50: mol_type = unassigned DNA; note = donor_89c1bb8
  misc_feature 1..21: note = RE
  misc_feature 22..25: note = Core
  misc_feature 26..50: note = LE
gcggtgagttgacctagagagctcattggatgagtatgggcgggcaggtc

SEQ ID NO: 35794 - DNA, 50 bp, unidentified
  source 1..50: mol_type = unassigned DNA; note = donor_89cef98
  misc_feature 1..23: note = RE
  misc_feature 24..25: note = Core
  misc_feature 26..50: note = LE
tatgttgacatttttatagctggctcgtataataaatgtagtcttaaatg

SEQ ID NO: 35795 - DNA, 50 bp, unidentified
  source 1..50: mol_type = unassigned DNA; note = donor_89cf70e
  misc_feature 1..23: note = RE
  misc_feature 24..25: note = Core
  misc_feature 26..50: note = LE
tacttgacttcctatatagttgtctggtatatatgaattagcccatttaa

SEQ ID NO: 35796 - DNA, 50 bp, unidentified
  source 1..50: mol_type = unassigned DNA; note = donor_89cfb51
  misc_feature 1..24: note = RE
  misc_feature 25: note = Core
  misc_feature 26..50: note = LE
tggcaaactggggacgtccatgtacaatgggatggacgtccccaccctat

SEQ ID NO: 35797 - DNA, 50 bp, unidentified
  source 1..50: mol_type = unassigned DNA; note = donor_89d0041
  misc_feature 1..24: note = RE
  misc_feature 25: note = Core
  misc_feature 26..50: note = LE
acatgcttgacaacttaataggggcgttactttattcgtaccccttataa

SEQ ID NO: 35798 - DNA, 50 bp, unidentified
  source 1..50: mol_type = unassigned DNA; note = donor_89d2c30
  misc_feature 1..23: note = RE
  misc_feature 24..25: note = Core
  misc_feature 26..50: note = LE
acaggtacgcctgttttcatagaagatgtgatgaaaacaggtgtgcctcc

SEQ ID NO: 35799 - DNA, 50 bp, unidentified
  source 1..50: mol_type = unassigned DNA; note = donor_89d36ec
  misc_feature 1..23: note = RE
  misc_feature 24..25: note = Core
  misc_feature 26..50: note = LE
gacttcaccacgccgattagagaagatggggtaatcggcttcgcgcccca

SEQ ID NO: 35800 - DNA, 50 bp, unidentified
  source 1..50: mol_type = unassigned DNA; note = donor_89d3e35
  misc_feature 1..23: note = RE
  misc_feature 24..25: note = Core
  misc_feature 26..50: note = LE
gactcgctaaagcccgttacagaagatggtgtaacgggcggagcccagcc

SEQ ID NO: 35801 - DNA, 50 bp, unidentified
  source 1..50: mol_type = unassigned DNA; note = donor_89d58cd
  misc_feature 1..23: note = RE
  misc_feature 24..25: note = Core
  misc_feature 26..50: note = LE
tgacacccaaaaacatgggatgtctaatgagagctaccgggtcggcataa

SEQ ID NO: 35802 - DNA, 50 bp, unidentified
  source 1..50: mol_type = unassigned DNA; note = donor_89d6732
  misc_feature 1..24: note = RE
  misc_feature 25: note = Core
  misc_feature 26..50: note = LE
tggtattcttagaatcctagaatacctttggactttcaaatataagaaag

SEQ ID NO: 35803 - DNA, 50 bp, unidentified
  source 1..50: mol_type = unassigned DNA; note = donor_89da18e
  misc_feature 1..24: note = RE
  misc_feature 25: note = Core
  misc_feature 26..50: note = LE
ttgacgaacctgatagggacaccccgttaccttcttcgtgaccccgtacg

SEQ ID NO: 35804 - DNA, 50 bp, unidentified
  source 1..50: mol_type = unassigned DNA; note = donor_89dbda5
  misc_feature 1..24: note = RE
  misc_feature 25: note = Core
  misc_feature 26..50: note = LE
gccgcttgacatccataggagcatcagagatgatgttggtgagcacctcc

SEQ ID NO: 35805 - DNA, 50 bp, unidentified
  source 1..50: mol_type = unassigned DNA; note = donor_89e7897
  misc_feature 1..23: note = RE
  misc_feature 24..25: note = Core
  misc_feature 26..50: note = LE
aggcttgacacttaatagttagtctcgtattatagtgttgtagctttcct

SEQ ID NO: 35806 - DNA, 50 bp, unidentified
  source 1..50: mol_type = unassigned DNA; note = donor_89e850a
  misc_feature 1..23: note = RE
  misc_feature 24..25: note = Core
  misc_feature 26..50: note = LE
gacccttgtgttctttcattggagaggtggcatgaaagaggtcgcgctca

SEQ ID NO: 35807 - DNA, 50 bp, unidentified; identical to SEQ ID NO: 32562
  source 1..50: mol_type = unassigned DNA; note = donor_89e9e06
  misc_feature 1..23: note = RE
  misc_feature 24..25: note = Core
  misc_feature 26..50: note = LE

SEQ ID NO: 35808 - DNA, 50 bp, unidentified; identical to SEQ ID NO: 33133
  source 1..50: mol_type = unassigned DNA; note = donor_89eb3b5
  misc_feature 1..23: note = RE
  misc_feature 24..25: note = Core
  misc_feature 26..50: note = LE

SEQ ID NO: 35809 - DNA, 50 bp, unidentified
  source 1..50: mol_type = unassigned DNA; note = donor_89ee379
  misc_feature 1..23: note = RE
  misc_feature 24..25: note = Core
  misc_feature 26..50: note = LE
gcacctcaggggccgtccacacatgttggggtggacggctccgcggcatc

SEQ ID NO: 35810 - DNA, 50 bp, unidentified
  source 1..50: mol_type = unassigned DNA; note = donor_89ee729
  misc_feature 1..23: note = RE
  misc_feature 24..25: note = Core
  misc_feature 26..50: note = LE
gatcttgactttttatagttagtctcgtataatataaagtagtagttttt

SEQ ID NO: 35811 - DNA, 50 bp, unidentified
  source 1..50: mol_type = unassigned DNA; note = donor_89f69e8
  misc_feature 1..23: note = RE
  misc_feature 24..25: note = Core
  misc_feature 26..50: note = LE
ctcggcttgactcgggacataagagactgtatgtcccttatcttgcagag

SEQ ID NO: 35812 - DNA, 50 bp, unidentified
  source 1..50: mol_type = unassigned DNA; note = donor_89fb1f5
  misc_feature 1..23: note = RE
  misc_feature 24..25: note = Core
  misc_feature 26..50: note = LE
gcaaccgggacggcaaccacagaagatggggtggttgccgtcctccccaa

SEQ ID NO: 35813 - DNA, 50 bp, unidentified
  source 1..50: mol_type = unassigned DNA; note = donor_89fe079
  misc_feature 1..24: note = RE
  misc_feature 25: note = Core
  misc_feature 26..50: note = LE
tgatctcgaagggaagcccttgtagaatggaagggacttccccgtcccga

SEQ ID NO: 35814 - DNA, 50 bp, unidentified
  source 1..50: mol_type = unassigned DNA; note = donor_8a01091
  misc_feature 1..23: note = RE
  misc_feature 24..25: note = Core
  misc_feature 26..50: note = LE
tggcttgacctgcgctaggaactcatttagcctcggagggagtccgcagg

SEQ ID NO: 35815 - DNA, 50 bp, unidentified
  source 1..50: mol_type = unassigned DNA; note = donor_8a03bc9
  misc_feature 1..23: note = RE
  misc_feature 24..25: note = Core
  misc_feature 26..50: note = LE
ttacttgacttcatatagttagtcttgtataatgaacatagggaagaaca

SEQ ID NO: 35816 - DNA, 50 bp, unidentified
  source 1..50: mol_type = unassigned DNA; note = donor_8a04bec
  misc_feature 1..24: note = RE
  misc_feature 25: note = Core
  misc_feature 26..50: note = LE
ttgcaatgcgggacgaaccatatataatgggatggtccgttccgctcccc

SEQ ID NO: 35817 - DNA, 50 bp, unidentified
  source 1..50: mol_type = unassigned DNA; note = donor_8a0604c
  misc_feature 1..23: note = RE
  misc_feature 24..25: note = Core
  misc_feature 26..50: note = LE
taatttgcatagtaacatagaacatggtaagtttgcattagtaaatgtac

SEQ ID NO: 35818 - DNA, 50 bp, unidentified
  source 1..50: mol_type = unassigned DNA; note = donor_8a0a881
  misc_feature 1..24: note = RE
  misc_feature 25: note = Core
  misc_feature 26..50: note = LE
tgcaaacggggatgggtccatatataatggaatggacccatccccacttt

SEQ ID NO: 35819 - DNA, 50 bp, unidentified
  source 1..50: mol_type = unassigned DNA; note = donor_8a20bde
  misc_feature 1..23: note = RE
  misc_feature 24..25: note = Core
  misc_feature 26..50: note = LE
gcaccggagggggcgtccacacatgatggggtggacgccccccgacggca

SEQ ID NO: 35820 - DNA, 50 bp, unidentified; identical to SEQ ID NO: 35196
  source 1..50: mol_type = unassigned DNA; note = donor_8a27a69
  misc_feature 1..24: note = RE
  misc_feature 25: note = Core
  misc_feature 26..50: note = LE

SEQ ID NO: 35821 - DNA, 50 bp, unidentified
  source 1..50: mol_type = unassigned DNA; note = donor_8a33276
  misc_feature 1..24: note = RE
  misc_feature 25: note = Core
  misc_feature 26..50: note = LE
tgacgaaaaccatagaagcacccccgttacctttttcgtggcgcctggtt

SEQ ID NO: 35822 - DNA, 50 bp, unidentified
  source 1..50: mol_type = unassigned DNA; note = donor_8a39129
  misc_feature 1..23: note = RE
  misc_feature 24..25: note = Core
  misc_feature 26..50: note = LE
gcgggaagggggccgtccacatatgttggtgtggacggcctccacacggc

SEQ ID NO: 35823 - DNA, 50 bp, unidentified; identical to SEQ ID NO: 31563
  source 1..50: mol_type = unassigned DNA; note = donor_8a396d4
  misc_feature 1..23: note = RE
  misc_feature 24..25: note = Core
  misc_feature 26..50: note = LE

SEQ ID NO: 35824 - DNA, 50 bp, unidentified
  source 1..50: mol_type = unassigned DNA; note = donor_8a42c5f
  misc_feature 1..20: note = RE
  misc_feature 21..25: note = Core
  misc_feature 26..50: note = LE
tgacaaccacatagggacaccccccgttacctttttcgtggttcctgatc

SEQ ID NO: 35825 - DNA, 50 bp, unidentified; identical to SEQ ID NO: 35683
  source 1..50: mol_type = unassigned DNA; note = donor_8a46010
  misc_feature 1..23: note = RE
  misc_feature 24..25: note = Core
  misc_feature 26..50: note = LE

SEQ ID NO: 35826 - DNA, 50 bp, unidentified
  source 1..50: mol_type = unassigned DNA; note = donor_8a4c600
  misc_feature 1..23: note = RE
  misc_feature 24..25: note = Core
  misc_feature 26..50: note = LE
gcattccaccgcgcgattagacgacattgggtaatcgcggagcgagtcgc

SEQ ID NO: 35827 - DNA, 50 bp, unidentified
  source 1..50: mol_type = unassigned DNA; note = donor_8a54a62
  misc_feature 1..22: note = RE
  misc_feature 23..25: note = Core
  misc_feature 26..50: note = LE
cttgccaagaaccatagggacacccgttactttcttcctacccggttgag

SEQ ID NO: 35828 - DNA, 50 bp, unidentified
  source 1..50: mol_type = unassigned DNA; note = donor_8a5748b
  misc_feature 1..23: note = RE
  misc_feature 24..25: note = Core
  misc_feature 26..50: note = LE
ctcggtgagggccaagacggtatcttgtatctcgacttcagccctgtcaa

SEQ ID NO: 35829 - DNA, 50 bp, unidentified
  source 1..50: mol_type = unassigned DNA; note = donor_8a5a67d
  misc_feature 1..23: note = RE
  misc_feature 24..25: note = Core
  misc_feature 26..50: note = LE
gacagttcgaggcccgttacagaagatggcgtaacgggccggctctggcg

SEQ ID NO: 35830 - DNA, 50 bp, unidentified
  source 1..50: mol_type = unassigned DNA; note = donor_8a6135f
  misc_feature 1..23: note = RE
  misc_feature 24..25: note = Core
  misc_feature 26..50: note = LE
gcaaatcgggtggagtccatagataatgtgatggactccaccctcctgat

SEQ ID NO: 35831 - DNA, 50 bp, unidentified
  source 1..50: mol_type = unassigned DNA; note = donor_8a72e16
  misc_feature 1..23: note = RE
  misc_feature 24..25: note = Core
  misc_feature 26..50: note = LE
atcggacggcgctttaatggttgcttgtattagggcgccggactatagtg

SEQ ID NO: 35832 - DNA, 50 bp, unidentified
  source 1..50: mol_type = unassigned DNA; note = donor_8a755ba
  misc_feature 1..24: note = RE
  misc_feature 25: note = Core
  misc_feature 26..50: note = LE
tgcaggaggtgggctgactatacataatgagatggtcagcccagttcgag

SEQ ID NO: 35833 - DNA, 50 bp, unidentified
  source 1..50: mol_type = unassigned DNA; note = donor_8a831f7
  misc_feature 1..23: note = RE
  misc_feature 24..25: note = Core
  misc_feature 26..50: note = LE
agactggttaggagagatggtatcttgtatctctccgtgatgagtgttta

SEQ ID NO: 35834 - DNA, 50 bp, unidentified; identical to SEQ ID NO: 33284
  source 1..50: mol_type = unassigned DNA; note = donor_8a8f5d1
  misc_feature 1..24: note = RE
  misc_feature 25: note = Core
  misc_feature 26..50: note = LE

SEQ ID NO: 35835 - DNA, 50 bp, unidentified; identical to SEQ ID NO: 30383
  source 1..50: mol_type = unassigned DNA; note = donor_8a90fa9
  misc_feature 1..23: note = RE
  misc_feature 24..25: note = Core
  misc_feature 26..50: note = LE

SEQ ID NO: 35836 - DNA, 50 bp, unidentified; identical to SEQ ID NO: 32384
  source 1..50: mol_type = unassigned DNA; note = donor_8a91b9e
  misc_feature 1..21: note = RE
  misc_feature 22..25: note = Core
  misc_feature 26..50: note = LE

SEQ ID NO: 35837 - DNA, 50 bp, unidentified; identical to SEQ ID NO: 32995
  source 1..50: mol_type = unassigned DNA; note = donor_8a94e56
  misc_feature 1..23: note = RE
  misc_feature 24..25: note = Core
  misc_feature 26..50: note = LE

SEQ ID NO: 35838 - DNA, 50 bp, unidentified
  source 1..50: mol_type = unassigned DNA; note = donor_8aa9896
  misc_feature 1..23: note = RE
  misc_feature 24..25: note = Core
  misc_feature 26..50: note = LE
agccttgactttttatttgcaggctactacaatgtatttatggttgagat

SEQ ID NO: 35839 - DNA, 50 bp, unidentified
  source 1..50: mol_type = unassigned DNA; note = donor_8aad39f
  misc_feature 1..23: note = RE
  misc_feature 24..25: note = Core
  misc_feature 26..50: note = LE
gctgttgacagacgagacggtatcttgtatcttgtttcccgtggtggtta

SEQ ID NO: 35840 - DNA, 50 bp, unidentified
  source 1..50: mol_type = unassigned DNA; note = donor_8ab4afc
  misc_feature 1..24: note = RE
  misc_feature 25: note = Core
  misc_feature 26..50: note = LE
ttgcttgttttttaactcagttcttcttaagtttgttttctattaaatta

SEQ ID NO: 35841 - DNA, 50 bp, unidentified
  source 1..50: mol_type = unassigned DNA; note = donor_8aba232
  misc_feature 1..23: note = RE
  misc_feature 24..25: note = Core
  misc_feature 26..50: note = LE
aggaggtggttgacaaacggtgtctgatggctctaccttccttttccatc

SEQ ID NO: 35842 - DNA, 50 bp, unidentified; identical to SEQ ID NO: 33802
  source 1..50: mol_type = unassigned DNA; note = donor_8abf701
  misc_feature 1..23: note = RE
  misc_feature 24..25: note = Core
  misc_feature 26..50: note = LE

SEQ ID NO: 35843 - DNA, 50 bp, unidentified
  source 1..50: mol_type = unassigned DNA; note = donor_8ac1e52
  misc_feature 1..23: note = RE
  misc_feature 24..25: note = Core
  misc_feature 26..50: note = LE
tgggttgacttttaatagttagtcttgtattatagagtagtagttattag

SEQ ID NO: 35844 - DNA, 50 bp, unidentified
  source 1..50: mol_type = unassigned DNA; note = donor_8ac21f3
  misc_feature 1..24: note = RE
  misc_feature 25: note = Core
  misc_feature 26..50: note = LE
tgcatggacagggcgggtcatacataatgggatgacccgccctgtccttc

SEQ ID NO: 35845 - DNA, 50 bp, unidentified
  source 1..50: mol_type = unassigned DNA; note = donor_8ac25f9
  misc_feature 1..23: note = RE
  misc_feature 24..25: note = Core
  misc_feature 26..50: note = LE
caaattgaaaatcaagagagaatcttgtatcttgcttgcaactgcccgat

SEQ ID NO: 35846 - DNA, 50 bp, unidentified
  source 1..50: mol_type = unassigned DNA; note = donor_8acdb4e
  misc_feature 1..24: note = RE
  misc_feature 25: note = Core
  misc_feature 26..50: note = LE
cctgcttgacatccataggagcatcagtgagaatgatgtgtgtgggccag

SEQ ID NO: 35847 - DNA, 50 bp, unidentified
  source 1..50: mol_type = unassigned DNA; note = donor_8ad4d25
  misc_feature 1..24: note = RE
  misc_feature 25: note = Core
  misc_feature 26..50: note = LE
tgcaaaacgggaggagtccatatacaatggaatggactcctcccactcaa

SEQ ID NO: 35848 - DNA, 50 bp, unidentified; identical to SEQ ID NO: 32495
  source 1..50: mol_type = unassigned DNA; note = donor_8ad747e
  misc_feature 1..21: note = RE
  misc_feature 22..25: note = Core
  misc_feature 26..50: note = LE

SEQ ID NO: 35849 - DNA, 50 bp, unidentified
  source 1..50: mol_type = unassigned DNA; note = donor_8addd73
  misc_feature 1..23: note = RE
  misc_feature 24..25: note = Core
  misc_feature 26..50: note = LE
agccttgacttttaatagttagtctcgtataataaagtagtagtatttat

SEQ ID NO: 35850 - DNA, 50 bp, unidentified
  source 1..50: mol_type = unassigned DNA; note = donor_8adea31
  misc_feature 1..23: note = RE
  misc_feature 24..25: note = Core
  misc_feature 26..50: note = LE
tcgattgacttttaatagttagtctcgtattatagtgtcatagcccattt

SEQ ID NO: 35851 - DNA, 50 bp, unidentified; identical to SEQ ID NO: 31327
  source 1..50: mol_type = unassigned DNA; note = donor_8adecac
  misc_feature 1..23: note = RE
  misc_feature 24..25: note = Core
  misc_feature 26..50: note = LE

SEQ ID NO: 35852 - DNA, 50 bp, unidentified
  source 1..50: mol_type = unassigned DNA; note = donor_8af870d
  misc_feature 1..23: note = RE
  misc_feature 24..25: note = Core
  misc_feature 26..50: note = LE
gcactttgggcggcaaccacagaagatggaatggttgccgccctccccag

SEQ ID NO: 35853 - DNA, 50 bp, unidentified
  source 1..50: mol_type = unassigned DNA; note = donor_8b03402
  misc_feature 1..22: note = RE
  misc_feature 23..25: note = Core
  misc_feature 26..50: note = LE
attcatttttattattatagttcattgtatattgttttttttattatctt

SEQ ID NO: 35854 - DNA, 50 bp, unidentified
  source 1..50: mol_type = unassigned DNA; note = donor_8b0e4f0
  misc_feature 1..23: note = RE
  misc_feature 24..25: note = Core
  misc_feature 26..50: note = LE
aaaatttaattttacatagttgactcctacgtaaaagtatggtataaata

SEQ ID NO: 35855 - DNA, 50 bp, unidentified; identical to SEQ ID NO: 32588
  source 1..50: mol_type = unassigned DNA; note = donor_8b1dbec
  misc_feature 1..24: note = RE
  misc_feature 25: note = Core
  misc_feature 26..50: note = LE

SEQ ID NO: 35856 - DNA, 50 bp, unidentified
  source 1..50: mol_type = unassigned DNA; note = donor_8b218e0
  misc_feature 1..23: note = RE
  misc_feature 24..25: note = Core
  misc_feature 26..50: note = LE
ggggttgacatctaatagttaatcttgtattatagagtagtagttattag

SEQ ID NO: 35857 - DNA, 50 bp, unidentified
  source 1..50: mol_type = unassigned DNA; note = donor_8b2de06
  misc_feature 1..23: note = RE
  misc_feature 24..25: note = Core
  misc_feature 26..50: note = LE
tgcagacggggcgggccatacgtttatgggatggcccgcccctcaacatt

SEQ ID NO: 35858 - DNA, 50 bp, unidentified; identical to SEQ ID NO: 31591
  source 1..50: mol_type = unassigned DNA; note = donor_8b309a2
  misc_feature 1..23: note = RE
  misc_feature 24..25: note = Core
  misc_feature 26..50: note = LE

SEQ ID NO: 35859 - DNA, 50 bp, unidentified
  source 1..50: mol_type = unassigned DNA; note = donor_8b347b6
  misc_feature 1..23: note = RE
  misc_feature 24..25: note = Core
  misc_feature 26..50: note = LE
gccaaaggagagccgtccacacatgatgccgtggacggctctccaccaac

SEQ ID NO: 35860 - DNA, 50 bp, unidentified; identical to SEQ ID NO: 30717
  source 1..50: mol_type = unassigned DNA; note = donor_8b39d85
  misc_feature 1..23: note = RE
  misc_feature 24..25: note = Core
  misc_feature 26..50: note = LE

SEQ ID NO: 35861 - DNA, 50 bp, unidentified
  source 1..50: mol_type = unassigned DNA; note = donor_8b3f498
  misc_feature 1..23: note = RE
  misc_feature 24..25: note = Core
  misc_feature 26..50: note = LE
acagtaaaaggcgagtccatacataattggatggactcgccctcgccgag

SEQ ID NO: 35862 - DNA, 50 bp, unidentified; identical to SEQ ID NO: 31204
  source 1..50: mol_type = unassigned DNA; note = donor_8b40dfc
  misc_feature 1..22: note = RE
  misc_feature 23..25: note = Core
  misc_feature 26..50: note = LE

SEQ ID NO: 35863 - DNA, 50 bp, unidentified
  source 1..50: mol_type = unassigned DNA; note = donor_8b4665d
  misc_feature 1..24: note = RE
  misc_feature 25: note = Core
  misc_feature 26..50: note = LE
gccgcttgacatccataggagcatcagagatgatgttgatgagcacctcc

SEQ ID NO: 35864 - DNA, 50 bp, unidentified
  source 1..50: mol_type = unassigned DNA; note = donor_8b4e06e
  misc_feature 1..24: note = RE
  misc_feature 25: note = Core
  misc_feature 26..50: note = LE
aattgcttgacatttattagcaagtcgtactatataagagtagggaaaga

SEQ ID NO: 35865 - DNA, 50 bp, unidentified
  source 1..50: mol_type = unassigned DNA; note = donor_8b4f6ca
  misc_feature 1..23: note = RE
  misc_feature 24..25: note = Core
  misc_feature 26..50: note = LE
actattgactattcatagttggtcttgtatgatgtattagtagttaaata

SEQ ID NO: 35866 - DNA, 50 bp, unidentified
  source 1..50: mol_type = unassigned DNA; note = donor_8b53ebb
  misc_feature 1..24: note = RE
  misc_feature 25: note = Core
  misc_feature 26..50: note = LE
tttacttgatttttatatagttagcctggtatattattattgactcattt

SEQ ID NO: 35867 - DNA, 50 bp, unidentified
  source 1..50: mol_type = unassigned DNA; note = donor_8b54a96
  misc_feature 1..24: note = RE
  misc_feature 25: note = Core
  misc_feature 26..50: note = LE
ttgccccttgacacaaagaggcttctgattgatgatggaagagacgttgc

SEQ ID NO: 35868 - DNA, 50 bp, unidentified
  source 1..50: mol_type = unassigned DNA; note = donor_8b56b55
  misc_feature 1..23: note = RE
  misc_feature 24..25: note = Core
  misc_feature 26..50: note = LE
gttgacacgggggagtccacataagataattggactcccctccttcaaaa

SEQ ID NO: 35869 - DNA, 50 bp, unidentified
  source 1..50: mol_type = unassigned DNA; note = donor_8b59ab2
  misc_feature 1..23: note = RE
  misc_feature 24..25: note = Core
  misc_feature 26..50: note = LE
ttgacaaagggggagtccacataagataattggactcccccaactcagtg

SEQ ID NO: 35870 - DNA, 50 bp, unidentified
  source 1..50: mol_type = unassigned DNA; note = donor_8b5f155
  misc_feature 1..23: note = RE
  misc_feature 24..25: note = Core
  misc_feature 26..50: note = LE
aaatttggatgttaacatagaatgtgataagtttgcagaataaaaatcta

SEQ ID NO: 35871 - DNA, 50 bp, unidentified; identical to SEQ ID NO: 30745
  source 1..50: mol_type = unassigned DNA; note = donor_8b605fe
  misc_feature 1..24: note = RE
  misc_feature 25: note = Core
  misc_feature 26..50: note = LE

SEQ ID NO: 35872 - DNA, 50 bp, unidentified
  source 1..50: mol_type = unassigned DNA; note = donor_8b62cb5
  misc_feature 1..18: note = RE
  misc_feature 19..25: note = Core
  misc_feature 26..50: note = LE
attgacttcatatagctggtttcctatcttctagttgttgcattttcgag

SEQ ID NO: 35873 - DNA, 50 bp, unidentified
  source 1..50: mol_type = unassigned DNA; note = donor_8b7371d
  misc_feature 1..23: note = RE
  misc_feature 24..25: note = Core
  misc_feature 26..50: note = LE
actattgactatttatagtttgtcacgtataatccagttatcctcttatg

SEQ ID NO: 35874 - DNA, 50 bp, unidentified
  source 1..50: mol_type = unassigned DNA; note = donor_8b7bfe5
  misc_feature 1..23: note = RE
  misc_feature 24..25: note = Core
  misc_feature 26..50: note = LE
acgcccgctcagcaacacagttgcttatctgttcggaatctggcagcgta

SEQ ID NO: 35875 - DNA, 50 bp, unidentified
  source 1..50: mol_type = unassigned DNA; note = donor_8b87cca
  misc_feature 1..23: note = RE
  misc_feature 24..25: note = Core
  misc_feature 26..50: note = LE
cggtttgacaaaaaccatagaatcttgtatggtaaagcttaagagaatcg

SEQ ID NO: 35876 - DNA, 50 bp, unidentified
  source 1..50: mol_type = unassigned DNA; note = donor_8b8aadd
  misc_feature 1..21: note = RE
  misc_feature 22..25: note = Core
  misc_feature 26..50: note = LE
cctgaggttgactcaggaagtgtcactagggcaccatcctttcggcggat

SEQ ID NO: 35877 - DNA, 50 bp, unidentified
  source 1..50: mol_type = unassigned DNA; note = donor_8b8bb8e
  misc_feature 1..23: note = RE
  misc_feature 24..25: note = Core
  misc_feature 26..50: note = LE
tctattgacaattaatagttagtcttgtataatataataaagtttaaaat

SEQ ID NO: 35878 - DNA, 50 bp, unidentified
  source 1..50: mol_type = unassigned DNA; note = donor_8b90bfc
  misc_feature 1..23: note = RE
  misc_feature 24..25: note = Core
  misc_feature 26..50: note = LE
gggcttgtgttttaagagagtatcttgtatattaaaggcatctctaaaac

SEQ ID NO: 35879 - DNA, 50 bp, unidentified
  source 1..50: mol_type = unassigned DNA; note = donor_8b95f93
  misc_feature 1..23: note = RE
  misc_feature 24..25: note = Core
  misc_feature 26..50: note = LE
ctgattaagttgagagatggtatcttgtatgttgagattttggatgatta

SEQ ID NO: 35880 - DNA, 50 bp, unidentified
  source 1..50: mol_type = unassigned DNA; note = donor_8b98c64
  misc_feature 1..21: note = RE
  misc_feature 22..25: note = Core
  misc_feature 26..50: note = LE
ggcttgactgcgtcattgagactccgtaagttgttaggcggcccgggagg

SEQ ID NO: 35881 - DNA, 50 bp, unidentified
  source 1..50: mol_type = unassigned DNA; note = donor_8ba83ce
  misc_feature 1..22: note = RE
  misc_feature 23..25: note = Core
  misc_feature 26..50: note = LE
ccaacagggagccgtccacacatgatgcggtggacggctcccacccgacg

SEQ ID NO: 35882 - DNA, 50 bp, unidentified
  source 1..50: mol_type = unassigned DNA; note = donor_8babdf9
  misc_feature 1..23: note = RE
  misc_feature 24..25: note = Core
  misc_feature 26..50: note = LE
cttattgacttttaatagttagtctcgtattattaatttgtagtttttat

SEQ ID NO: 35883 - DNA, 50 bp, unidentified
  source 1..50: mol_type = unassigned DNA; note = donor_8bad61e
  misc_feature 1..24: note = RE
  misc_feature 25: note = Core
  misc_feature 26..50: note = LE
tgcaaacgaggtggggtccatatacaatgggatggaccccacctcaccta

SEQ ID NO: 35884 - DNA, 50 bp, unidentified
  source 1..50: mol_type = unassigned DNA; note = donor_8bb1a01
  misc_feature 1..23: note = RE
  misc_feature 24..25: note = Core
  misc_feature 26..50: note = LE
ctcattgactttcaagacagttgcttgtatcttcatttagcacgtatgaa

SEQ ID NO: 35885 - DNA, 50 bp, unidentified; identical to SEQ ID NO: 31965
  source 1..50: mol_type = unassigned DNA; note = donor_8bb6c5b
  misc_feature 1..23: note = RE
  misc_feature 24..25: note = Core
  misc_feature 26..50: note = LE

SEQ ID NO: 35886 - DNA, 50 bp, unidentified; identical to SEQ ID NO: 34957
  source 1..50: mol_type = unassigned DNA; note = donor_8bb7942
  misc_feature 1..22: note = RE
  misc_feature 23..25: note = Core
  misc_feature 26..50: note = LE

SEQ ID NO: 35887 - DNA, 50 bp, unidentified
  source 1..50: mol_type = unassigned DNA; note = donor_8bbe91d
  misc_feature 1..23: note = RE
  misc_feature 24..25: note = Core
  misc_feature 26..50: note = LE
tgacaaagggggccgtccagacatgatgggttggacggcccccggagcgg

SEQ ID NO: 35888 - DNA, 50 bp, unidentified
  source 1..50: mol_type = unassigned DNA; note = donor_8bc08de
  misc_feature 1..22: note = RE
  misc_feature 23..25: note = Core
  misc_feature 26..50: note = LE
acttcgatcggccaaatagagaagatggggtattcggccggcctgcgtgc

SEQ ID NO: 35889 - DNA, 50 bp, unidentified
  source 1..50: mol_type = unassigned DNA; note = donor_8bc8791
  misc_feature 1..23: note = RE
  misc_feature 24..25: note = Core
  misc_feature 26..50: note = LE
cagcttgacttttaagacggttgcttgtatctttacgatttgatttcgga

SEQ ID NO: 35890 - DNA, 50 bp, unidentified
  source 1..50: mol_type = unassigned DNA; note = donor_8bddddb
  misc_feature 1..24: note = RE
  misc_feature 25: note = Core
  misc_feature 26..50: note = LE
cttgcaaacggggcgggccatacgtataggatggcccgccccttttcccc

SEQ ID NO: 35891 - DNA, 50 bp, unidentified
  source 1..50: mol_type = unassigned DNA; note = donor_8bea280
  misc_feature 1..23: note = RE
  misc_feature 24..25: note = Core
  misc_feature 26..50: note = LE
tgactttctaaaacctgggatgtctaatggcttctatcgagcctgtttga

SEQ ID NO: 35892 - DNA, 50 bp, unidentified
  source 1..50: mol_type = unassigned DNA; note = donor_8beb0c8
  misc_feature 1..23: note = RE
  misc_feature 24..25: note = Core
  misc_feature 26..50: note = LE
ccccttgacttttcatagccggtctactataataaagtcgtatctacgcc

SEQ ID NO: 35893 - DNA, 50 bp, unidentified
  source 1..50: mol_type = unassigned DNA; note = donor_8bf2598
  misc_feature 1..23: note = RE
  misc_feature 24..25: note = Core
  misc_feature 26..50: note = LE
gccaaccgggcggcgtccatataagatgagatggacgccgcccgctcttc

SEQ ID NO: 35894 - DNA, 50 bp, unidentified
  source 1..50: mol_type = unassigned DNA; note = donor_8bf32e3
  misc_feature 1..21: note = RE
  misc_feature 22..25: note = Core
  misc_feature 26..50: note = LE
cctgaggttgacacagggagtgtcactagggcaccatccttgctgcgggc

SEQ ID NO: 35895 - DNA, 50 bp, unidentified
  source 1..50: mol_type = unassigned DNA; note = donor_8bf637d
  misc_feature 1..23: note = RE
  misc_feature 24..25: note = Core
  misc_feature 26..50: note = LE
ggtattgacttttaatagttagtctcgtattatataggcatacccattct

SEQ ID NO: 35896 - DNA, 50 bp, unidentified
  source 1..50: mol_type = unassigned DNA; note = donor_8c06e53
  misc_feature 1..23: note = RE
  misc_feature 24..25: note = Core
  misc_feature 26..50: note = LE
tgacaaactaaaacctgggatgtctaatggcttgtgccggggctgtttgg

SEQ ID NO: 35897 - DNA, 50 bp, unidentified
  source 1..50: mol_type = unassigned DNA; note = donor_8c0d502
  misc_feature 1..23: note = RE
  misc_feature 24..25: note = Core
  misc_feature 26..50: note = LE
cagcttgacatcacttagtaggtcttgtagaatgaagccaaagggagtaa

SEQ ID NO: 35898 - DNA, 50 bp, unidentified
  source 1..50: mol_type = unassigned DNA; note = donor_8c179b7
  misc_feature 1..23: note = RE
  misc_feature 24..25: note = Core
  misc_feature 26..50: note = LE
acctgcttgactttttatagttggtataatgtatttaggttgttcaaggg

SEQ ID NO: 35899 - DNA, 50 bp, unidentified
  source 1..50: mol_type = unassigned DNA; note = donor_8c1b173
  misc_feature 1..24: note = RE
  misc_feature 25: note = Core
  misc_feature 26..50: note = LE
cggcgtcttgacacagaagggagcctacttgtttcattgacgttaggacc

SEQ ID NO: 35900 - DNA, 50 bp, unidentified; identical to SEQ ID NO: 32555
  source 1..50: mol_type = unassigned DNA; note = donor_8c1c231
  misc_feature 1..23: note = RE
  misc_feature 24..25: note = Core
  misc_feature 26..50: note = LE

SEQ ID NO: 35901 - DNA, 50 bp, unidentified
  source 1..50: mol_type = unassigned DNA; note = donor_8c1c81f
  misc_feature 1..23: note = RE
  misc_feature 24..25: note = Core
  misc_feature 26..50: note = LE
ccgcttgacattcaagacagttgcttgtatctagttctgtgaggagtttg

SEQ ID NO: 35902 - DNA, 50 bp, unidentified
  source 1..50: mol_type = unassigned DNA; note = donor_8c1d0ee
  misc_feature 1..22: note = RE
  misc_feature 23..25: note = Core
  misc_feature 26..50: note = LE
gcccaaagggggccgtccatacatgctgggtggacggccccctgacggca

SEQ ID NO: 35903 - DNA, 50 bp, unidentified
  source 1..50: mol_type = unassigned DNA; note = donor_8c20411
  misc_feature 1..23: note = RE
  misc_feature 24..25: note = Core
  misc_feature 26..50: note = LE
ggaaaaccaaaaacgctcatgagagaccagatgagcgttttgcggcgtgc

SEQ ID NO: 35904 - DNA, 50 bp, unidentified
  source 1..50: mol_type = unassigned DNA; note = donor_8c24196
  misc_feature 1..23: note = RE
  misc_feature 24..25: note = Core
  misc_feature 26..50: note = LE
gccacgcctgatcaacatggttgcttgtctgttggagaagcggtaagctg

SEQ ID NO: 35905 - DNA, 50 bp, unidentified
  source 1..50: mol_type = unassigned DNA; note = donor_8c364f4
  misc_feature 1..24: note = RE
  misc_feature 25: note = Core
  misc_feature 26..50: note = LE
ggaccggttgacacagaagggagcctactagatgattgctccaggaccgg

SEQ ID NO: 35906 - DNA, 50 bp, unidentified
  source 1..50: mol_type = unassigned DNA; note = donor_8c3b76d
  misc_feature 1..22: note = RE
  misc_feature 23..25: note = Core
  misc_feature 26..50: note = LE
cggcttgacacgatcattgagattccttaagaatgttgggcggtccggga

SEQ ID NO: 35907 - DNA, 50 bp, unidentified
  source 1..50: mol_type = unassigned DNA; note = donor_8c3f2e0
  misc_feature 1..23: note = RE
  misc_feature 24..25: note = Core
  misc_feature 26..50: note = LE
gcctggaggggggcgtccacagatgatggagtggacgccccccgacggca

SEQ ID NO: 35908 - DNA, 50 bp, unidentified
  source 1..50: mol_type = unassigned DNA; note = donor_8c40feb
  misc_feature 1..23: note = RE
  misc_feature 24..25: note = Core
  misc_feature 26..50: note = LE
aatcttgactgccaagacggtatcttgtatcttattcccgtcatggttag

SEQ ID NO: 35909 - DNA, 50 bp, unidentified
  source 1..50: mol_type = unassigned DNA; note = donor_8c449ca
  misc_feature 1..24: note = RE
  misc_feature 25: note = Core
  misc_feature 26..50: note = LE
tgcagtcaggcggcggaccatacataatgagatggtccgccgccgagtac

SEQ ID NO: 35910 - DNA, 50 bp, unidentified
  source 1..50: mol_type = unassigned DNA; note = donor_8c497f3
  misc_feature 1..22: note = RE
  misc_feature 23..25: note = Core
  misc_feature 26..50: note = LE
attattgacaaatcttagaatgtcacgtataatactgagtagtaaattga

SEQ ID NO: 35911 - DNA, 50 bp, unidentified; identical to SEQ ID NO: 34868
  source 1..50: mol_type = unassigned DNA; note = donor_8c4e8ee
  misc_feature 1..21: note = RE
  misc_feature 22..25: note = Core
  misc_feature 26..50: note = LE

SEQ ID NO: 35912 - DNA, 50 bp, unidentified
  source 1..50: mol_type = unassigned DNA; note = donor_8c50c1e
  misc_feature 1..23: note = RE
  misc_feature 24..25: note = Core
  misc_feature 26..50: note = LE
cgggctacttctcagcatggttgcttgtgtccgcgaaatctgccagaatg

SEQ ID NO: 35913 - DNA, 50 bp, unidentified
  source 1..50: mol_type = unassigned DNA; note = donor_8c57724
  misc_feature 1..23: note = RE
  misc_feature 24..25: note = Core
  misc_feature 26..50: note = LE
ctgcttgactttcaagacagttgcttgtatctagatcctcagcagagttt

SEQ ID NO: 35914 - DNA, 50 bp, unidentified
  source 1..50: mol_type = unassigned DNA; note = donor_8c602b2
  misc_feature 1..24: note = RE
  misc_feature 25: note = Core
  misc_feature 26..50: note = LE
tgcagtcggacggcggaccatacataatgagatggtccgccgcttgattg

SEQ ID NO: 35915 - DNA, 50 bp, unidentified
  source 1..50: mol_type = unassigned DNA; note = donor_8c729aa
  misc_feature 1..23: note = RE
  misc_feature 24..25: note = Core
  misc_feature 26..50: note = LE
ggcttgacagacagcattaggaatccctacgttgttctgcgggaggtggt

SEQ ID NO: 35916 - DNA, 50 bp, unidentified
  source 1..50: mol_type = unassigned DNA; note = donor_8c8d3e3
  misc_feature 1..22: note = RE
  misc_feature 23..25: note = Core
  misc_feature 26..50: note = LE
gggcttgacttctattggcaggtttgctacaatatatttgcggtagggac

SEQ ID NO: 35917 - DNA, 50 bp, unidentified
  source 1..50: mol_type = unassigned DNA; note = donor_8c8e8ca
  misc_feature 1..24: note = RE
  misc_feature 25: note = Core
  misc_feature 26..50: note = LE
atgacttgaattttatatagttagcctggtatattataattgactcattt

SEQ ID NO: 35918 - DNA, 50 bp, unidentified
  source 1..50: mol_type = unassigned DNA; note = donor_8c8fb41
  misc_feature 1..22: note = RE
  misc_feature 23..25: note = Core
  misc_feature 26..50: note = LE
aaaaatacttgattatatgaggaggagcttcctgtataatttaaatggtg

SEQ ID NO: 35919 - DNA, 50 bp, unidentified
  source 1..50: mol_type = unassigned DNA; note = donor_8c95cab
  misc_feature 1..24: note = RE
  misc_feature 25: note = Core
  misc_feature 26..50: note = LE
tgactgttcggtgaagcccttatagaatgaaagggacttcccctcgatgt

SEQ ID NO: 35920 - DNA, 50 bp, unidentified
  source 1..50: mol_type = unassigned DNA; note = donor_8ca6fe4
  misc_feature 1..24: note = RE
  misc_feature 25: note = Core
  misc_feature 26..50: note = LE
ttgcaaaaggggatggttcatatataatgtaatgaaccatccccattccc

SEQ ID NO: 35921 - DNA, 50 bp, unidentified
  source 1..50: mol_type = unassigned DNA; note = donor_8ca87b8
  misc_feature 1..23: note = RE
  misc_feature 24..25: note = Core
  misc_feature 26..50: note = LE
ttactttatcctttataggatatctggtataattctcacactattacttt

SEQ ID NO: 35922 - DNA, 50 bp, unidentified
  source 1..50: mol_type = unassigned DNA; note = donor_8ca8f57
  misc_feature 1..23: note = RE
  misc_feature 24..25: note = Core
  misc_feature 26..50: note = LE
aggaaaactttttataccggaagcttatataaaacatattagtcagatct

SEQ ID NO: 35923 - DNA, 50 bp, unidentified
  source 1..50: mol_type = unassigned DNA; note = donor_8cb5bf1
  misc_feature 1..23: note = RE
  misc_feature 24..25: note = Core
  misc_feature 26..50: note = LE
tgacacctaagctcctgggatgtctaatgagagttagcgagtcgccatcc

SEQ ID NO: 35924 - DNA, 50 bp, unidentified
  source 1..50: mol_type = unassigned DNA; note = donor_8cc9369
  misc_feature 1..23: note = RE
  misc_feature 24..25: note = Core
  misc_feature 26..50: note = LE
ggcttgacgaccgctattgggaagtcctaccgttttagcgcgggccaact

SEQ ID NO: 35925 - DNA, 50 bp, unidentified
  source 1..50: mol_type = unassigned DNA; note = donor_8ccd8d7
  misc_feature 1..23: note = RE
  misc_feature 24..25: note = Core
  misc_feature 26..50: note = LE
acgcttgaccggaaagacggtatcttgtatctttcatcccgtggtggtta

SEQ ID NO: 35926 - DNA, 50 bp, unidentified
  source 1..50: mol_type = unassigned DNA; note = donor_8cd6b50
  misc_feature 1..23: note = RE
  misc_feature 24..25: note = Core
  misc_feature 26..50: note = LE
acaggttggttttatcatagaaatcctttagatttgaatttataatatat

SEQ ID NO: 35927 - DNA, 50 bp, unidentified
  source 1..50: mol_type = unassigned DNA; note = donor_8cda852
  misc_feature 1..23: note = RE
  misc_feature 24..25: note = Core
  misc_feature 26..50: note = LE
gacagtgtgggcgagtccatacataatcgatggactcgcccccgccgagg

SEQ ID NO: 35928 - DNA, 50 bp, unidentified
  source 1..50: mol_type = unassigned DNA; note = donor_8ce534b
  misc_feature 1..24: note = RE
  misc_feature 25: note = Core
  misc_feature 26..50: note = LE
tgcgacaaggcggcggaccatacataatgggatggtccgccgcctctacc

SEQ ID NO: 35929 - DNA, 50 bp, unidentified
  source 1..50: mol_type = unassigned DNA; note = donor_8ce7a4c
  misc_feature 1..23: note = RE
  misc_feature 24..25: note = Core
  misc_feature 26..50: note = LE
tattgacaatccacatagggacaccgttaccgtgatggtgtccccctcac

SEQ ID NO: 35930 - DNA, 50 bp, unidentified; identical to SEQ ID NO: 31263
  source 1..50: mol_type = unassigned DNA; note = donor_8cfcdf4
  misc_feature 1..23: note = RE
  misc_feature 24..25: note = Core
  misc_feature 26..50: note = LE

SEQ ID NO: 35931 - DNA, 50 bp, unidentified; identical to SEQ ID NO: 31537
  source 1..50: mol_type = unassigned DNA; note = donor_8d010c3
  misc_feature 1..23: note = RE
  misc_feature 24..25: note = Core
  misc_feature 26..50: note = LE

SEQ ID NO: 35932 - DNA, 50 bp, unidentified
  source 1..50: mol_type = unassigned DNA; note = donor_8d039c8
  misc_feature 1..24: note = RE
  misc_feature 25: note = Core
  misc_feature 26..50: note = LE
ttgcaattggtgagcgtccatgtataatgggatggacgctcaccacccta

SEQ ID NO: 35933 - DNA, 50 bp, unidentified
  source 1..50: mol_type = unassigned DNA; note = donor_8d08105
  misc_feature 1..23: note = RE
  misc_feature 24..25: note = Core
  misc_feature 26..50: note = LE
tgacgttcaagctcctgggatgtctaatgagggttggcgagcctgtcgtc

SEQ ID NO: 35934 - DNA, 50 bp, unidentified
  source 1..50: mol_type = unassigned DNA; note = donor_8d0b451
  misc_feature 1..24: note = RE
  misc_feature 25: note = Core
  misc_feature 26..50: note = LE
gcggcttgacatccataggagcatcagtgagtatgccgtagggcctgcac

SEQ ID NO: 35935 - DNA, 50 bp, unidentified
  source 1..50: mol_type = unassigned DNA; note = donor_8d0c3fb
  misc_feature 1..19: note = RE
  misc_feature 20..25: note = Core
  misc_feature 26..50: note = LE
ttcctctactttctttcacactaatctccattccgccgccttcggctggc

SEQ ID NO: 35936 - DNA, 50 bp, unidentified
  source 1..50: mol_type = unassigned DNA; note = donor_8d16b26
  misc_feature 1..24: note = RE
  misc_feature 25: note = Core
  misc_feature 26..50: note = LE
ttgacgaaaaacatagggacaccccgttacctttttagtagcccctctag

SEQ ID NO: 35937 - DNA, 50 bp, unidentified
  source 1..50: mol_type = unassigned DNA; note = donor_8d1bf09
  misc_feature 1..23: note = RE
  misc_feature 24..25: note = Core
  misc_feature 26..50: note = LE
atggcacttgaccaagacggatacttgtcttatgtttttcctatcaatct

SEQ ID NO: 35938 - DNA, 50 bp, unidentified
  source 1..50: mol_type = unassigned DNA; note = donor_8d218cb
  misc_feature 1..24: note = RE
  misc_feature 25: note = Core
  misc_feature 26..50: note = LE
ggcatattggggaacgtccatgtacaatgggatggacgcccccacccgtg

SEQ ID NO: 35939 - DNA, 50 bp, unidentified; identical to SEQ ID NO: 30631
  source 1..50: mol_type = unassigned DNA; note = donor_8d22cb0
  misc_feature 1..23: note = RE
  misc_feature 24..25: note = Core
  misc_feature 26..50: note = LE

SEQ ID NO: 35940 - DNA, 50 bp, unidentified
  source 1..50: mol_type = unassigned DNA; note = donor_8d38c32
  misc_feature 1..24: note = RE
  misc_feature 25: note = Core
  misc_feature 26..50: note = LE
gcggcttgacgaagcacataggggcgttaccttcttcgtggccccgcgat

SEQ ID NO: 35941 - DNA, 50 bp, unidentified
  source 1..50: mol_type = unassigned DNA; note = donor_8d4e50c
  misc_feature 1..24: note = RE
  misc_feature 25: note = Core
  misc_feature 26..50: note = LE
ttgacagtgaggaaagcccttgtagaatggaagggacttcccagtccccg

SEQ ID NO: 35942 - DNA, 50 bp, unidentified
  source 1..50: mol_type = unassigned DNA; note = donor_8d543d6
  misc_feature 1..23: note = RE
  misc_feature 24..25: note = Core
  misc_feature 26..50: note = LE
cttgaccccaccgcgattagacgacatggggtaatcgcggatcgtactga

SEQ ID NO: 35943 - DNA, 50 bp, unidentified
  source 1..50: mol_type = unassigned DNA; note = donor_8d58da8
  misc_feature 1..24: note = RE
  misc_feature 25: note = Core
  misc_feature 26..50: note = LE
gcttgacgaacccatagggacacccgttacctttttcgtagttcctgatc

SEQ ID NO: 35944 - DNA, 50 bp, unidentified
  source 1..50: mol_type = unassigned DNA; note = donor_8d5a662
  misc_feature 1..23: note = RE
  misc_feature 24..25: note = Core
  misc_feature 26..50: note = LE
accccttgtgttctttcattggagaggtggcatgaaagaggccgcgcccg

SEQ ID NO: 35945 - DNA, 50 bp, unidentified
  source 1..50: mol_type = unassigned DNA; note = donor_8d6c494
  misc_feature 1..24: note = RE
  misc_feature 25: note = Core
  misc_feature 26..50: note = LE
cccatttttatttatatagttgactttttccctcctagttaaatttggtt

SEQ ID NO: 35946 - DNA, 50 bp, unidentified
  source 1..50: mol_type = unassigned DNA; note = donor_8d6e965
  misc_feature 1..23: note = RE
  misc_feature 24..25: note = Core
  misc_feature 26..50: note = LE
aagcttgcaggcgataacagtatcttgtattatccttcctgtgcagaaag

SEQ ID NO: 35947 - DNA, 50 bp, unidentified
  source 1..50: mol_type = unassigned DNA; note = donor_8d768d6
  misc_feature 1..22: note = RE
  misc_feature 23..25: note = Core
  misc_feature 26..50: note = LE
gcaaaaccggagccatccacacatgatggtgtggatggctcctcccccga

SEQ ID NO: 35948 - DNA, 50 bp, unidentified; identical to SEQ ID NO: 35733
  source 1..50: mol_type = unassigned DNA; note = donor_8d77b2e
  misc_feature 1..23: note = RE
  misc_feature 24..25: note = Core
  misc_feature 26..50: note = LE

SEQ ID NO: 35949 - DNA, 50 bp, unidentified; identical to SEQ ID NO: 31563
  source 1..50: mol_type = unassigned DNA; note = donor_8d8012d
  misc_feature 1..23: note = RE
  misc_feature 24..25: note = Core
  misc_feature 26..50: note = LE

SEQ ID NO: 35950 - DNA, 50 bp, unidentified
  source 1..50: mol_type = unassigned DNA; note = donor_8d82173
  misc_feature 1..23: note = RE
  misc_feature 24..25: note = Core
  misc_feature 26..50: note = LE
agcttaattgcgagagatggtatcttgtatcttgcaacgatgaatagtta

SEQ ID NO: 35951 - DNA, 50 bp, unidentified
  source 1..50: mol_type = unassigned DNA; note = donor_8d82e2d
  misc_feature 1..23: note = RE
  misc_feature 24..25: note = Core
  misc_feature 26..50: note = LE
ataaaacacttgacatagttagtctcgtatgctagattattaatagttcc

SEQ ID NO: 35952 - DNA, 50 bp, unidentified
  source 1..50: mol_type = unassigned DNA; note = donor_8d86a31
  misc_feature 1..23: note = RE
  misc_feature 24..25: note = Core
  misc_feature 26..50: note = LE
aggcccctctctcaacacagttgcttatctgatcggaatctggcagcgta

SEQ ID NO: 35953 - DNA, 50 bp, unidentified
  source 1..50: mol_type = unassigned DNA; note = donor_8d97995
  misc_feature 1..23: note = RE
  misc_feature 24..25: note = Core
  misc_feature 26..50: note = LE
tgacttcaaagaaccggggatgtctaatggcatttatcgggcctctttgg

SEQ ID NO: 35954 - DNA, 50 bp, unidentified; identical to SEQ ID NO: 31731
  source 1..50: mol_type = unassigned DNA; note = donor_8d997e6
  misc_feature 1..23: note = RE
  misc_feature 24..25: note = Core
  misc_feature 26..50: note = LE

SEQ ID NO: 35955 - DNA, 50 bp, unidentified; identical to SEQ ID NO: 31223
  source 1..50: mol_type = unassigned DNA; note = donor_8da08bc
  misc_feature 1..23: note = RE
  misc_feature 24..25: note = Core
  misc_feature 26..50: note = LE

SEQ ID NO: 35956 - DNA, 50 bp, unidentified
  source 1..50: mol_type = unassigned DNA; note = donor_8daba93
  misc_feature 1..23: note = RE
  misc_feature 24..25: note = Core
  misc_feature 26..50: note = LE
atcaccatcgtccttaatggttgcttgtattagggcgatccgttatgatg

SEQ ID NO: 35957 - DNA, 50 bp, unidentified
  source 1..50: mol_type = unassigned DNA; note = donor_8db0631
  misc_feature 1..24: note = RE
  misc_feature 25: note = Core
  misc_feature 26..50: note = LE
gcaaagtggggtgcggtcgatatacaatgggatggacccctccccacacc

SEQ ID NO: 35958 - DNA, 50 bp, unidentified; identical to SEQ ID NO: 30422
  source 1..50: mol_type = unassigned DNA; note = donor_8db5040
  misc_feature 1..23: note = RE
  misc_feature 24..25: note = Core
  misc_feature 26..50: note = LE

SEQ ID NO: 35959 - DNA, 50 bp, unidentified
  source 1..50: mol_type = unassigned DNA; note = donor_8db69fe
  misc_feature 1..23: note = RE
  misc_feature 24..25: note = Core
  misc_feature 26..50: note = LE
tgacaccaaagctccaggggtgtctaatgggaggtaccaggtccctgcag

SEQ ID NO: 35960 - DNA, 50 bp, unidentified
  source 1..50: mol_type = unassigned DNA; note = donor_8db8f0f
  misc_feature 1..23: note = RE
  misc_feature 24..25: note = Core
  misc_feature 26..50: note = LE
ggacttgacttttaatagttagtcttgtattatagagtagtagtttttag

SEQ ID NO: 35961 - DNA, 50 bp, unidentified
  source 1..50: mol_type = unassigned DNA; note = donor_8dbf3de
  misc_feature 1..24: note = RE
  misc_feature 25: note = Core
  misc_feature 26..50: note = LE
cacgggttgacgacagaggggagcctactagagactccccggcaggaccg

SEQ ID NO: 35962 - DNA, 50 bp, unidentified
  source 1..50: mol_type = unassigned DNA; note = donor_8dc1d02
  misc_feature 1..21: note = RE
  misc_feature 22..25: note = Core
  misc_feature 26..50: note = LE
ttgacaagaaccatagggacaccccgttacctttttcgtagctcttgacc

SEQ ID NO: 35963 - DNA, 50 bp, unidentified
  source 1..50: mol_type = unassigned DNA; note = donor_8dc32a0
  misc_feature 1..24: note = RE
  misc_feature 25: note = Core
  misc_feature 26..50: note = LE
acggttgacaaaactataggaacacattacagtcgaaattgtcagcccgg

SEQ ID NO: 35964 - DNA, 50 bp, unidentified
  source 1..50: mol_type = unassigned DNA; note = donor_8dcb241
  misc_feature 1..22: note = RE
  misc_feature 23..25: note = Core
  misc_feature 26..50: note = LE
tttagggcttgacatagagagtcttatacagtaaactaagaacaagccct

SEQ ID NO: 35965 - DNA, 50 bp, unidentified
  source 1..50: mol_type = unassigned DNA; note = donor_8dcd2b8
  misc_feature 1..23: note = RE
  misc_feature 24..25: note = Core
  misc_feature 26..50: note = LE
ctacttgacttttatttgcaggtctgttacaatatatttagtcgggtaaa

SEQ ID NO: 35966 - DNA, 50 bp, unidentified
  source 1..50: mol_type = unassigned DNA; note = donor_8de0d09
  misc_feature 1..23: note = RE
  misc_feature 24..25: note = Core
  misc_feature 26..50: note = LE
ttagaggcgctagcatgtggtgcctcctcctcctacggggaattcacgca

SEQ ID NO: 35967 - DNA, 50 bp, unidentified
  source 1..50: mol_type = unassigned DNA; note = donor_8de5a9e
  misc_feature 1..21: note = RE
  misc_feature 22..25: note = Core
  misc_feature 26..50: note = LE
ggcttgactcagtcattgagactccgtaagttgttaggcggcccgggagg

SEQ ID NO: 35968 - DNA, 50 bp, unidentified
  source 1..50: mol_type = unassigned DNA; note = donor_8ded9ef
  misc_feature 1..23: note = RE
  misc_feature 24..25: note = Core
  misc_feature 26..50: note = LE
gccaaacagaccgcgattagacgacatggggtaatcgcgggaagcgagtc

SEQ ID NO: 35969 - DNA, 50 bp, unidentified
  source 1..50: mol_type = unassigned DNA; note = donor_8df2473
  misc_feature 1..23: note = RE
  misc_feature 24..25: note = Core
  misc_feature 26..50: note = LE
aattttatcgttcaagacagttgctccttgtatcttgaaacttagctacc

SEQ ID NO: 35970 - DNA, 50 bp, unidentified
  source 1..50: mol_type = unassigned DNA; note = donor_8dfa82f
  misc_feature 1..23: note = RE
  misc_feature 24..25: note = Core
  misc_feature 26..50: note = LE
tgacaacaacgctcatgggatgtctaatgagtgctagagcaaccgggtcg

SEQ ID NO: 35971 - DNA, 50 bp, unidentified
  source 1..50: mol_type = unassigned DNA; note = donor_8dfb6d4
  misc_feature 1..23: note = RE
  misc_feature 24..25: note = Core
  misc_feature 26..50: note = LE
cctcttgacattttaccgctggactcgtataatagtttttgtaaggttta

SEQ ID NO: 35972 - DNA, 50 bp, unidentified; identical to SEQ ID NO: 32699
  source 1..50: mol_type = unassigned DNA; note = donor_8e001ad
  misc_feature 1..24: note = RE
  misc_feature 25: note = Core
  misc_feature 26..50: note = LE

SEQ ID NO: 35973 - DNA, 50 bp, unidentified
  source 1..50: mol_type = unassigned DNA; note = donor_8e05f7f
  misc_feature 1..23: note = RE
  misc_feature 24..25: note = Core
  misc_feature 26..50: note = LE
gaccccaaacggccgattagagaagatggggtaatcggccggcgaacttg

SEQ ID NO: 35974 - DNA, 50 bp, unidentified
  source 1..50: mol_type = unassigned DNA; note = donor_8e08b5a
  misc_feature 1..24: note = RE
  misc_feature 25: note = Core
  misc_feature 26..50: note = LE
acaggccgcttgacatagaagcatctattggtacaagatggctgggccgg

SEQ ID NO: 35975 - DNA, 50 bp, unidentified
  source 1..50: mol_type = unassigned DNA; note = donor_8e12f5a
  misc_feature 1..23: note = RE
  misc_feature 24..25: note = Core
  misc_feature 26..50: note = LE
aacttaaacattcaagatggttgcttatatctttcaattacttcaaaatt

SEQ ID NO: 35976 - DNA, 50 bp, unidentified
  source 1..50: mol_type = unassigned DNA; note = donor_8e174ef
  misc_feature 1..23: note = RE
  misc_feature 24..25: note = Core
  misc_feature 26..50: note = LE
acccttgacttcatatagttagtcttgtataatgaaaacatagggaaatt

SEQ ID NO: 35977 - DNA, 50 bp, unidentified
  source 1..50: mol_type = unassigned DNA; note = donor_8e210e6
  misc_feature 1..23: note = RE
  misc_feature 24..25: note = Core
  misc_feature 26..50: note = LE
gcataaaaggggccgtccacacatgatggggtggacggcccctactcgac

SEQ ID NO: 35978 - DNA, 50 bp, unidentified
  source 1..50: mol_type = unassigned DNA; note = donor_8e22416
  misc_feature 1..23: note = RE
  misc_feature 24..25: note = Core
  misc_feature 26..50: note = LE
tgacatgaatcgccatggggtgtctaatgagacgagcagtgccaggtttg

SEQ ID NO: 35979 - DNA, 50 bp, unidentified
  source 1..50: mol_type = unassigned DNA; note = donor_8e25d82
  misc_feature 1..24: note = RE
  misc_feature 25: note = Core
  misc_feature 26..50: note = LE
ttgcaaacggggaggagaccatatatgatgagatggtctcctcccctctt

SEQ ID NO: 35980 - DNA, 50 bp, unidentified
  source 1..50: mol_type = unassigned DNA; note = donor_8e2c949
  misc_feature 1..24: note = RE
  misc_feature 25: note = Core
  misc_feature 26..50: note = LE
tggcaaaatgggagcgtccatatataatggtatggacgctcccccctgac

SEQ ID NO: 35981 - DNA, 50 bp, unidentified
  source 1..50: mol_type = unassigned DNA; note = donor_8e2f5a6
  misc_feature 1..23: note = RE
  misc_feature 24..25: note = Core
  misc_feature 26..50: note = LE
aagcttgactttttatttgcagactactactatataggtaaggatagtat

SEQ ID NO: 35982 - DNA, 50 bp, unidentified; identical to SEQ ID NO: 34487
  source 1..50: mol_type = unassigned DNA; note = donor_8e35cc5
  misc_feature 1..22: note = RE
  misc_feature 23..25: note = Core
  misc_feature 26..50: note = LE

SEQ ID NO: 35983 - DNA, 50 bp, unidentified
  source 1..50: mol_type = unassigned DNA; note = donor_8e3be1d
  misc_feature 1..23: note = RE
  misc_feature 24..25: note = Core
  misc_feature 26..50: note = LE
gcgcttgactcgaaagacggttacttgtatgtttcaggccggaccagcgc

SEQ ID NO: 35984 - DNA, 50 bp, unidentified; identical to SEQ ID NO: 33142
  source 1..50: mol_type = unassigned DNA; note = donor_8e44878
  misc_feature 1..24: note = RE
  misc_feature 25: note = Core
  misc_feature 26..50: note = LE

SEQ ID NO: 35985 - DNA, 50 bp, unidentified
  source 1..50: mol_type = unassigned DNA; note = donor_8e53598
  misc_feature 1..23: note = RE
  misc_feature 24..25: note = Core
  misc_feature 26..50: note = LE
aatattgacaaactattagctggttcgtattataaggttaaccagaaatg

SEQ ID NO: 35986 - DNA, 50 bp, unidentified
  source 1..50: mol_type = unassigned DNA; note = donor_8e53c6e
  misc_feature 1..23: note = RE
  misc_feature 24..25: note = Core
  misc_feature 26..50: note = LE
acataaaccggggcatccacacgtgatggattggatgcccctcctgttgg

SEQ ID NO: 35987 - DNA, 50 bp, unidentified
  source 1..50: mol_type = unassigned DNA; note = donor_8e567da
  misc_feature 1..24: note = RE
  misc_feature 25: note = Core
  misc_feature 26..50: note = LE
ccgtgtcttgacacagaggggtgcctacttgtttcattgacgcaggatcg

SEQ ID NO: 35988 - DNA, 50 bp, unidentified
  source 1..50: mol_type = unassigned DNA; note = donor_8e591c0
  misc_feature 1..23: note = RE
  misc_feature 24..25: note = Core
  misc_feature 26..50: note = LE
gacagaaacagaacctgggatgtctaatgggttctaccgatcctgtggca

SEQ ID NO: 35989 - DNA, 50 bp, unidentified
  source 1..50: mol_type = unassigned DNA; note = donor_8e5f3e2
  misc_feature 1..23: note = RE
  misc_feature 24..25: note = Core
  misc_feature 26..50: note = LE
ttgcagacggggcggaccatacgttatggatggtccgcccctcccgccga

SEQ ID NO: 35990 - DNA, 50 bp, unidentified; identical to SEQ ID NO: 31537
  source 1..50: mol_type = unassigned DNA; note = donor_8e8a943
  misc_feature 1..23: note = RE
  misc_feature 24..25: note = Core
  misc_feature 26..50: note = LE

SEQ ID NO: 35991 - DNA, 50 bp, unidentified
  source 1..50: mol_type = unassigned DNA; note = donor_8ea02dd
  misc_feature 1..24: note = RE
  misc_feature 25: note = Core
  misc_feature 26..50: note = LE
cttgccgacggggcgggccatacgtatggaatggcccgcccctcaccacg

SEQ ID NO: 35992 - DNA, 50 bp, unidentified
  source 1..50: mol_type = unassigned DNA; note = donor_8ea78fc
  misc_feature 1..23: note = RE
  misc_feature 24..25: note = Core
  misc_feature 26..50: note = LE
agacctcttgagaaatacagttgcttctgtatctcgagattgctatgctg

SEQ ID NO: 35993 - DNA, 50 bp, unidentified
  source 1..50: mol_type = unassigned DNA; note = donor_8eaa0bf
  misc_feature 1..22: note = RE
  misc_feature 23..25: note = Core
  misc_feature 26..50: note = LE
acacttgacttttaatagttagtcacgtataataaaaatcatccgaaagg

SEQ ID NO: 35994 - DNA, 50 bp, unidentified
  source 1..50: mol_type = unassigned DNA; note = donor_8eb4a56
  misc_feature 1..23: note = RE
  misc_feature 24..25: note = Core
  misc_feature 26..50: note = LE
cgcgatgagggtcaagacggtatcttgtatctcgactaacgcctcgtcag

SEQ ID NO: 35995 - DNA, 50 bp, unidentified; identical to SEQ ID NO: 33690
  source 1..50: mol_type = unassigned DNA; note = donor_8eb65da
  misc_feature 1..21: note = RE
  misc_feature 22..25: note = Core
  misc_feature 26..50: note = LE

SEQ ID NO: 35996 - DNA, 50 bp, unidentified
  source 1..50: mol_type = unassigned DNA; note = donor_8ec042b
  misc_feature 1..24: note = RE
  misc_feature 25: note = Core
  misc_feature 26..50: note = LE
tggccaagtgggggcgtccatgtacaatgggatggacgcccccaccctaa

SEQ ID NO: 35997 - DNA, 50 bp, unidentified
  source 1..50: mol_type = unassigned DNA; note = donor_8ec3c3e
  misc_feature 1..23: note = RE
  misc_feature 24..25: note = Core
  misc_feature 26..50: note = LE
tgacacattcatttcagggatgtctaatgagttctgggagtgagccatcc

SEQ ID NO: 35998 - DNA, 50 bp, unidentified
  source 1..50: mol_type = unassigned DNA; note = donor_8ec45e0
  misc_feature 1..24: note = RE
  misc_feature 25: note = Core
  misc_feature 26..50: note = LE
tgactaatcggggaagcccttatagaatgaaagggacttcccctaaatta

SEQ ID NO: 35999 - DNA, 50 bp, unidentified
  source 1..50: mol_type = unassigned DNA; note = donor_8ec46a9
  misc_feature 1..24: note = RE
  misc_feature 25: note = Core
  misc_feature 26..50: note = LE
tggccaaatgggggcgaccatctataatgggatggtcgcccctacccgaa

SEQ ID NO: 36000 - DNA, 50 bp, unidentified
  source 1..50: mol_type = unassigned DNA; note = donor_8ec63d1
  misc_feature 1..23: note = RE
  misc_feature 24..25: note = Core
  misc_feature 26..50: note = LE
aaatgaatgcttgacaagcgtgtcctgttctagtatactagacgtggatg

SEQ ID NO: 36001 - DNA, 50 bp, unidentified
  source 1..50: mol_type = unassigned DNA; note = donor_8ece399
  misc_feature 1..24: note = RE
  misc_feature 25: note = Core
  misc_feature 26..50: note = LE
tgcaaaacggcggcggaccatacatactggcatggtccgccgcctaagcc

SEQ ID NO: 36002 - DNA, 50 bp, unidentified
  source 1..50: mol_type = unassigned DNA; note = donor_8ed49cd
  misc_feature 1..24: note = RE
  misc_feature 25: note = Core
  misc_feature 26..50: note = LE
ggcttgacgcgcgacataggggcaccgttaccttcttcaggtcgcttgag

SEQ ID NO: 36003 - DNA, 50 bp, unidentified; identical to SEQ ID NO: 32699
  source 1..50: mol_type = unassigned DNA; note = donor_8edad3f
  misc_feature 1..24: note = RE
  misc_feature 25: note = Core
  misc_feature 26..50: note = LE

SEQ ID NO: 36004 - DNA, 50 bp, unidentified
  source 1..50: mol_type = unassigned DNA; note = donor_8edbc3a
  misc_feature 1..23: note = RE
  misc_feature 24..25: note = Core
  misc_feature 26..50: note = LE
atatttgcataagtcttagaatacctttagctttgcatcgcaaaagtaat

SEQ ID NO: 36005 - DNA, 50 bp, unidentified
  source 1..50: mol_type = unassigned DNA; note = donor_8f093da
  misc_feature 1..23: note = RE
  misc_feature 24..25: note = Core
  misc_feature 26..50: note = LE
cgcttgacaacaagacaggaacaccttaccttgttggtaggccctgagta

SEQ ID NO: 36006 - DNA, 50 bp, unidentified
  source 1..50: mol_type = unassigned DNA; note = donor_8f0d857
  misc_feature 1..24: note = RE
  misc_feature 25: note = Core
  misc_feature 26..50: note = LE
gcgcaaacgggacgcgttcatacataatggaatgaacgcgtcccacccgt

SEQ ID NO: 36007 - DNA, 50 bp, unidentified
  source 1..50: mol_type = unassigned DNA; note = donor_8f0ee33
  misc_feature 1..23: note = RE
  misc_feature 24..25: note = Core
  misc_feature 26..50: note = LE
caaaaaacggggggaccatagatttaatgagatggtccccccactgtcta

SEQ ID NO: 36008 - DNA, 50 bp, unidentified
  source 1..50: mol_type = unassigned DNA; note = donor_8f1090b
  misc_feature 1..22: note = RE
  misc_feature 23..25: note = Core
  misc_feature 26..50: note = LE
agtattgacttttattagcaggtttggtactgtataagtgtaattgttag

SEQ ID NO: 36009 - DNA, 50 bp, unidentified
  source 1..50: mol_type = unassigned DNA; note = donor_8f10c77
  misc_feature 1..22: note = RE
  misc_feature 23..25: note = Core
  misc_feature 26..50: note = LE
acccgcagggggcatccacacatgatgaggtggatgccccctgctcagcg

SEQ ID NO: 36010 - DNA, 50 bp, unidentified
  source 1..50: mol_type = unassigned DNA; note = donor_8f13b66
  misc_feature 1..22: note = RE
  misc_feature 23..25: note = Core
  misc_feature 26..50: note = LE
tcaagcgggggccatccacacatgatggggtggatggccccctgacggca

SEQ ID NO: 36011 - DNA, 50 bp, unidentified
  source 1..50: mol_type = unassigned DNA; note = donor_8f165dc
  misc_feature 1..24: note = RE
  misc_feature 25: note = Core
  misc_feature 26..50: note = LE
tggcaaacaggaggcgaccatctataatgaaatggtcgccccctacatct

SEQ ID NO: 36012 - DNA, 50 bp, unidentified; identical to SEQ ID NO: 30609
  source 1..50: mol_type = unassigned DNA; note = donor_8f31d1c
  misc_feature 1..22: note = RE
  misc_feature 23..25: note = Core
  misc_feature 26..50: note = LE

SEQ ID NO: 36013 - DNA, 50 bp, unidentified
  source 1..50: mol_type = unassigned DNA; note = donor_8f43510
  misc_feature 1..24: note = RE
  misc_feature 25: note = Core
  misc_feature 26..50: note = LE
tgcagataaggagcagaccatacataatgggatggtctgctccatccacc

SEQ ID NO: 36014 - DNA, 50 bp, unidentified
  source 1..50: mol_type = unassigned DNA; note = donor_8f49fda
  misc_feature 1..21: note = RE
  misc_feature 22..25: note = Core
  misc_feature 26..50: note = LE
aaggggcttgacacagggcttctcactggtccaccttcctggtgtcagcg

SEQ ID NO: 36015 - DNA, 50 bp, unidentified
  source 1..50: mol_type = unassigned DNA; note = donor_8f549a8
  misc_feature 1..23: note = RE
  misc_feature 24..25: note = Core
  misc_feature 26..50: note = LE
cttgcgcgggaggcgtccatagattatgggatggacgcctcccgcttttc

SEQ ID NO: 36016 - DNA, 50 bp, unidentified
  source 1..50: mol_type = unassigned DNA; note = donor_8f651e5
  misc_feature 1..23: note = RE
  misc_feature 24..25: note = Core
  misc_feature 26..50: note = LE
ttaccaccgtcatttaatggttgcttgtattagcgcggtccgttatgctg

SEQ ID NO: 36017 - DNA, 50 bp, unidentified
  source 1..50: mol_type = unassigned DNA; note = donor_8f68cb2
  misc_feature 1..21: note = RE
  misc_feature 22..25: note = Core
  misc_feature 26..50: note = LE
cctgaggttgactcaggaagtgtcactagggcaccatctttcttgcgggc

SEQ ID NO: 36018 - DNA, 50 bp, unidentified
  source 1..50: mol_type = unassigned DNA; note = donor_8f6e7e9
  misc_feature 1..23: note = RE
  misc_feature 24..25: note = Core
  misc_feature 26..50: note = LE
gacgccccagccgcgattagacaacatggggtaatcgcgggagcgatgcc

SEQ ID NO: 36019 - DNA, 50 bp, unidentified
  source 1..50: mol_type = unassigned DNA; note = donor_8f70a19
  misc_feature 1..23: note = RE
  misc_feature 24..25: note = Core
  misc_feature 26..50: note = LE
gccgggctacttcaacacagttgcttgtgtccagaaaatctgccagaatg

SEQ ID NO: 36020 - DNA, 50 bp, unidentified
  source 1..50: mol_type = unassigned DNA; note = donor_8f8476b
  misc_feature 1..23: note = RE
  misc_feature 24..25: note = Core
  misc_feature 26..50: note = LE
gccaaaccggggccgtccacacatgatgctgtggacggctccttcaccgg

SEQ ID NO: 36021 - DNA, 50 bp, unidentified; identical to SEQ ID NO: 31193
  source 1..50: mol_type = unassigned DNA; note = donor_8f893db
  misc_feature 1..22: note = RE
  misc_feature 23..25: note = Core
  misc_feature 26..50: note = LE

SEQ ID NO: 36022 - DNA, 50 bp, unidentified
  source 1..50: mol_type = unassigned DNA; note = donor_8f94aad
  misc_feature 1..23: note = RE
  misc_feature 24..25: note = Core
  misc_feature 26..50: note = LE
tgacacccaaaaagctgggatgtctaatgggatgtacggggttggtcgtg

SEQ ID NO: 36023 - DNA, 50 bp, unidentified
  source 1..50: mol_type = unassigned DNA; note = donor_8fa025f
  misc_feature 1..23: note = RE
  misc_feature 24..25: note = Core
  misc_feature 26..50: note = LE
gcgaaagccaggctgaccatacattaatgagatggtcagcctgacctcga

SEQ ID NO: 36024 - DNA, 50 bp, unidentified
  source 1..50: mol_type = unassigned DNA; note = donor_8fcc1bc
  misc_feature 1..24: note = RE
  misc_feature 25: note = Core
  misc_feature 26..50: note = LE
ccgcttgacaacgccatagagacaccgttaccttgctcgcaggcccgaac

SEQ ID NO: 36025 - DNA, 50 bp, unidentified
  source 1..50: mol_type = unassigned DNA; note = donor_8fd6476
  misc_feature 1..22: note = RE
  misc_feature 23..25: note = Core
  misc_feature 26..50: note = LE
acctcaacccgccgaatagagaagatggggtattcggccggcaggcgtcc

SEQ ID NO: 36026 - DNA, 50 bp, unidentified; identical to SEQ ID NO: 32250
  source 1..50: mol_type = unassigned DNA; note = donor_8fdb04d
  misc_feature 1..21: note = RE
  misc_feature 22..25: note = Core
  misc_feature 26..50: note = LE

SEQ ID NO: 36027 - DNA, 50 bp, unidentified; identical to SEQ ID NO: 33765
  source 1..50: mol_type = unassigned DNA; note = donor_8fe6c53
  misc_feature 1..24: note = RE
  misc_feature 25: note = Core
  misc_feature 26..50: note = LE

SEQ ID NO: 36028 - DNA, 50 bp, unidentified; identical to SEQ ID NO: 30770
  source 1..50: mol_type = unassigned DNA; note = donor_8fed381
  misc_feature 1..24: note = RE
  misc_feature 25: note = Core
  misc_feature 26..50: note = LE

SEQ ID NO: 36029 - DNA, 50 bp, unidentified
  source 1..50: mol_type = unassigned DNA; note = donor_8fefa05
  misc_feature 1..22: note = RE
  misc_feature 23..25: note = Core
  misc_feature 26..50: note = LE
cttgactaaaaaaaccccatacaagatgctatggggcggcggcgaggcta

SEQ ID NO: 36030 - DNA, 50 bp, unidentified
  source 1..50: mol_type = unassigned DNA; note = donor_8ff260c
  misc_feature 1..22: note = RE
  misc_feature 23..25: note = Core
  misc_feature 26..50: note = LE
gttcttgacatttgttagcaggtctattacaatataatttggttggaagc

SEQ ID NO: 36031 - DNA, 50 bp, unidentified
  source 1..50: mol_type = unassigned DNA; note = donor_8ff3ea8
  misc_feature 1..23: note = RE
  misc_feature 24..25: note = Core
  misc_feature 26..50: note = LE
gggcttgacttttaatagttagtcttgtattataaagtaatagtttatag

SEQ ID NO: 36032 - DNA, 50 bp, unidentified
  source 1..50: mol_type = unassigned DNA; note = donor_8ffb8b7
  misc_feature 1..23: note = RE
  misc_feature 24..25: note = Core
  misc_feature 26..50: note = LE
gcaaaaacggggaagaccatagattaatgagatggtcttccccaccttgt

SEQ ID NO: 36033 - DNA, 50 bp, unidentified
  source 1..50: mol_type = unassigned DNA; note = donor_90029e6
  misc_feature 1..21: note = RE
  misc_feature 22..25: note = Core
  misc_feature 26..50: note = LE
catagaaaacttggattaaccatagctatctcttaggtttgcagtttaaa

SEQ ID NO: 36034 - DNA, 50 bp, unidentified; identical to SEQ ID NO: 31299
  source 1..50: mol_type = unassigned DNA; note = donor_9012747
  misc_feature 1..23: note = RE
  misc_feature 24..25: note = Core
  misc_feature 26..50: note = LE

SEQ ID NO: 36035 - DNA, 50 bp, unidentified
  source 1..50: mol_type = unassigned DNA; note = donor_901c3a9
  misc_feature 1..21: note = RE
  misc_feature 22..25: note = Core
  misc_feature 26..50: note = LE
ttgccatggggccgtccacatatgatgatgtggacggcctctcctcaacg

SEQ ID NO: 36036 - DNA, 50 bp, unidentified
  source 1..50: mol_type = unassigned DNA; note = donor_902161c
  misc_feature 1..23: note = RE
  misc_feature 24..25: note = Core
  misc_feature 26..50: note = LE
gcgcaaaaggagccgtccacacatgatggtgtggacggctccacccaaac

SEQ ID NO: 36037 - DNA, 50 bp, unidentified
  source 1..50: mol_type = unassigned DNA; note = donor_902b37f
  misc_feature 1..23: note = RE
  misc_feature 24..25: note = Core
  misc_feature 26..50: note = LE
gagcctgctttgacatagaggcgctgacttgtttggatgggtcaagcacc

SEQ ID NO: 36038 - DNA, 50 bp, unidentified
  source 1..50: mol_type = unassigned DNA; note = donor_902cc66
  misc_feature 1..23: note = RE
  misc_feature 24..25: note = Core
  misc_feature 26..50: note = LE
gccaggggagagccgtccacacatgatgctgtggacggctctcatccaac

SEQ ID NO: 36039 - DNA, 50 bp, unidentified
  source 1..50: mol_type = unassigned DNA; note = donor_902fcba
  misc_feature 1..23: note = RE
  misc_feature 24..25: note = Core
  misc_feature 26..50: note = LE
gacaccccaaagcgatgggatgtctaatgggactcgtcgggtcgtgagag

SEQ ID NO: 36040 - DNA, 50 bp, unidentified
  source 1..50: mol_type = unassigned DNA; note = donor_903ded7
  misc_feature 1..23: note = RE
  misc_feature 24..25: note = Core
  misc_feature 26..50: note = LE
caagccaattgaagatacagttgcttctgtatctgtgatctgctagtctg

SEQ ID NO: 36041 - DNA, 50 bp, unidentified
  source 1..50: mol_type = unassigned DNA; note = donor_903eda7
  misc_feature 1..23: note = RE
  misc_feature 24..25: note = Core
  misc_feature 26..50: note = LE
ctgctccacactcataacagttgcctgtgtctgatggttctgtcatgatg

SEQ ID NO: 36042 - DNA, 50 bp, unidentified
  source 1..50: mol_type = unassigned DNA; note = donor_903fa12
  misc_feature 1..22: note = RE
  misc_feature 23..25: note = Core
  misc_feature 26..50: note = LE
ttttatttggatattaactggaaagtacctatgtttgatatccaaataaa

SEQ ID NO: 36043 - DNA, 50 bp, unidentified
  source 1..50: mol_type = unassigned DNA; note = donor_903fd3d
  misc_feature 1..23: note = RE
  misc_feature 24..25: note = Core
  misc_feature 26..50: note = LE
gacagaaccagaacctgggatgtctaatgggttctaccgatcctctggca

SEQ ID NO: 36044 - DNA, 50 bp, unidentified
  source 1..50: mol_type = unassigned DNA; note = donor_9042200
  misc_feature 1..24: note = RE
  misc_feature 25: note = Core
  misc_feature 26..50: note = LE
catgattacttgacataggagcttcacttccccagaatggtgtgggtggg

SEQ ID NO: 36045 - DNA, 50 bp, unidentified
  source 1..50: mol_type = unassigned DNA; note = donor_905233f
  misc_feature 1..23: note = RE
  misc_feature 24..25: note = Core
  misc_feature 26..50: note = LE
agcttgacgaatgcgattagagaacatagcgtcaatcgccgatgggcctc

SEQ ID NO: 36046 - DNA, 50 bp, unidentified
  source 1..50: mol_type = unassigned DNA; note = donor_905d7c2
  misc_feature 1..23: note = RE
  misc_feature 24..25: note = Core
  misc_feature 26..50: note = LE
gttgactatggggagtccacataagataattggactccccaacctaatag

SEQ ID NO: 36047 - DNA, 50 bp, unidentified
  source 1..50: mol_type = unassigned DNA; note = donor_90701bf
  misc_feature 1..23: note = RE
  misc_feature 24..25: note = Core
  misc_feature 26..50: note = LE
gccgttgactttaaacacagctgcttgtatgtttaaagtcacttcagtta

SEQ ID NO: 36048 - DNA, 50 bp, unidentified
  source 1..50: mol_type = unassigned DNA; note = donor_907b6d4
  misc_feature 1..23: note = RE
  misc_feature 24..25: note = Core
  misc_feature 26..50: note = LE
agggttgacctccaacagggtatcttgtatgttcgccccagagattcagg

SEQ ID NO: 36049 - DNA, 50 bp, unidentified
  source 1..50: mol_type = unassigned DNA; note = donor_907c6c8
  misc_feature 1..21: note = RE
  misc_feature 22..25: note = Core
  misc_feature 26..50: note = LE
ggttgaaatttattagcaggtttgctattattagtttagccccttacagc

SEQ ID NO: 36050 - DNA, 50 bp, unidentified
  source 1..50: mol_type = unassigned DNA; note = donor_907ce10
  misc_feature 1..23: note = RE
  misc_feature 24..25: note = Core
  misc_feature 26..50: note = LE
agacttgacttttcatagctggtcttgtatgatgtttatagaagcaaaaa

SEQ ID NO: 36051 - DNA, 50 bp, unidentified
  source 1..50: mol_type = unassigned DNA; note = donor_908cdf9
  misc_feature 1..23: note = RE
  misc_feature 24..25: note = Core
  misc_feature 26..50: note = LE
cctcttgactttttatagctggtctcgtataatagatttacgttttagat

SEQ ID NO: 36052 - DNA, 50 bp, unidentified
  source 1..50: mol_type = unassigned DNA; note = donor_90c1832
  misc_feature 1..23: note = RE
  misc_feature 24..25: note = Core
  misc_feature 26..50: note = LE
cgcccctgacatcaacatggttgcttgtctgttgaaggcctgctaggttg

SEQ ID NO: 36053 - DNA, 50 bp, unidentified
  source 1..50: mol_type = unassigned DNA; note = donor_90c26f0
  misc_feature 1..23: note = RE
  misc_feature 24..25: note = Core
  misc_feature 26..50: note = LE
agccttgttaggcaccatagaatcttgtatggtttcccggcaggtcttaa

SEQ ID NO: 36054 - DNA, 50 bp, unidentified
  source 1..50: mol_type = unassigned DNA; note = donor_90c9690
  misc_feature 1..23: note = RE
  misc_feature 24..25: note = Core
  misc_feature 26..50: note = LE
cttaatggactttaagacggtatcttatatcttgattctgagtttttaaa

SEQ ID NO: 36055 - DNA, 50 bp, unidentified; identical to SEQ ID NO: 31193
  source 1..50: mol_type = unassigned DNA; note = donor_90cbcfd
  misc_feature 1..22: note = RE
  misc_feature 23..25: note = Core
  misc_feature 26..50: note = LE

SEQ ID NO: 36056 - DNA, 50 bp, unidentified; identical to SEQ ID NO: 35844
  source 1..50: mol_type = unassigned DNA; note = donor_90cf46a
  misc_feature 1..24: note = RE
  misc_feature 25: note = Core
  misc_feature 26..50: note = LE

SEQ ID NO: 36057 - DNA, 50 bp, unidentified
  source 1..50: mol_type = unassigned DNA; note = donor_90d1854
  misc_feature 1..23: note = RE
  misc_feature 24..25: note = Core
  misc_feature 26..50: note = LE
gggcttgacatttgtttgcaggactcctacaatatagttacggtgaaagg

SEQ ID NO: 36058 - DNA, 50 bp, unidentified
  source 1..50: mol_type = unassigned DNA; note = donor_90dd4cf
  misc_feature 1..24: note = RE
  misc_feature 25: note = Core
  misc_feature 26..50: note = LE
ttacttgcatatgaacttagaaagctttaagtttgcagagtgaaaaggaa

SEQ ID NO: 36059 - DNA, 50 bp, unidentified
  source 1..50: mol_type = unassigned DNA; note = donor_90e329f
  misc_feature 1..23: note = RE
  misc_feature 24..25: note = Core
  misc_feature 26..50: note = LE
cgggttgacatcagcattgggaagtcctaccttcttgacgtggccctgct

SEQ ID NO: 36060 - DNA, 50 bp, unidentified; identical to SEQ ID NO: 33735
  source 1..50: mol_type = unassigned DNA; note = donor_90edc63
  misc_feature 1..24: note = RE
  misc_feature 25: note = Core
  misc_feature 26..50: note = LE

SEQ ID NO: 36061 - DNA, 50 bp, unidentified
  source 1..50: mol_type = unassigned DNA; note = donor_90f9538
  misc_feature 1..23: note = RE
  misc_feature 24..25: note = Core
  misc_feature 26..50: note = LE
attattgacttttaatagttagtctcgtataataaagtagtagttattaa

SEQ ID NO: 36062 - DNA, 50 bp, unidentified
  source 1..50: mol_type = unassigned DNA; note = donor_9100bd7
  misc_feature 1..23: note = RE
  misc_feature 24..25: note = Core
  misc_feature 26..50: note = LE
gacaccttccagccgtgggatgtctaatgggaatcgatcaccttcgcccg

SEQ ID NO: 36063 - DNA, 50 bp, unidentified
  source 1..50: mol_type = unassigned DNA; note = donor_9105805
  misc_feature 1..24: note = RE
  misc_feature 25: note = Core
  misc_feature 26..50: note = LE
ttacttgttttttaccacagtacttcttaagtttacaattcactaaattt

SEQ ID NO: 36064 - DNA, 50 bp, unidentified
  source 1..50: mol_type = unassigned DNA; note = donor_91083ff
  misc_feature 1..24: note = RE
  misc_feature 25: note = Core
  misc_feature 26..50: note = LE
ttggcaaaccgggggcgtccatctataatgggatggacgccccctatctc

SEQ ID NO: 36065 - DNA, 50 bp, unidentified
  source 1..50: mol_type = unassigned DNA; note = donor_910ab7c
  misc_feature 1..23: note = RE
  misc_feature 24..25: note = Core
  misc_feature 26..50: note = LE
ccctcttgacagatagagaggcaccgacttatatgagtgtcacgggacgg

SEQ ID NO: 36066 - DNA, 50 bp, unidentified
  source 1..50: mol_type = unassigned DNA; note = donor_9113005
  misc_feature 1..22: note = RE
  misc_feature 23..25: note = Core
  misc_feature 26..50: note = LE
aaaggacttgacaatagagagtcttatacagtaaactaagaacagcccac

SEQ ID NO: 36067 - DNA, 50 bp, unidentified; identical to SEQ ID NO: 30492
  source 1..50: mol_type = unassigned DNA; note = donor_911636f
  misc_feature 1..24: note = RE
  misc_feature 25: note = Core
  misc_feature 26..50: note = LE

SEQ ID NO: 36068 - DNA, 50 bp, unidentified
  source 1..50: mol_type = unassigned DNA; note = donor_911b69d
  misc_feature 1..24: note = RE
  misc_feature 25: note = Core
  misc_feature 26..50: note = LE
ctgttgaccttctattagctggtatcgtattataaggttaaccagtttat

SEQ ID NO: 36069 - DNA, 50 bp, unidentified
  source 1..50: mol_type = unassigned DNA; note = donor_9121dcb
  misc_feature 1..23: note = RE
  misc_feature 24..25: note = Core
  misc_feature 26..50: note = LE
cgcaggcgggagcagtccacatatgattaggtggacggctcccgctccac

SEQ ID NO: 36070 - DNA, 50 bp, unidentified
  source 1..50: mol_type = unassigned DNA; note = donor_9122e0d
  misc_feature 1..23: note = RE
  misc_feature 24..25: note = Core
  misc_feature 26..50: note = LE
gccaacatggagccgtccacacatgatgctgtggacggctcctccaccgg

SEQ ID NO: 36071 - DNA, 50 bp, unidentified
  source 1..50: mol_type = unassigned DNA; note = donor_9127cfd
  misc_feature 1..23: note = RE
  misc_feature 24..25: note = Core
  misc_feature 26..50: note = LE
tatcttgacttcatatagttagtcttgtataatgaactcataaggaattc

SEQ ID NO: 36072 - DNA, 50 bp, unidentified
  source 1..50: mol_type = unassigned DNA; note = donor_912a74a
  misc_feature 1..24: note = RE
  misc_feature 25: note = Core
  misc_feature 26..50: note = LE
cgacgtcttgacatagaggggtgcctagttagacacttgctgacaggatc

SEQ ID NO: 36073 - DNA, 50 bp, unidentified
  source 1..50: mol_type = unassigned DNA; note = donor_91498ae
  misc_feature 1..24: note = RE
  misc_feature 25: note = Core
  misc_feature 26..50: note = LE
tcaacacttgacttagaggggtgcctacttgttgactggtggcacaaccg

SEQ ID NO: 36074 - DNA, 50 bp, unidentified
  source 1..50: mol_type = unassigned DNA; note = donor_914b27e
  misc_feature 1..22: note = RE
  misc_feature 23..25: note = Core
  misc_feature 26..50: note = LE
atgttgacaaactattagctggtttcgtattataaggttaaccagaatgt

SEQ ID NO: 36075 - DNA, 50 bp, unidentified
  source 1..50: mol_type = unassigned DNA; note = donor_914f309
  misc_feature 1..24: note = RE
  misc_feature 25: note = Core
  misc_feature 26..50: note = LE
tgcaactcggcggcggaccatacataatgggatggtccgccgccgagact

SEQ ID NO: 36076 - DNA, 50 bp, unidentified; identical to SEQ ID NO: 34181
  source 1..50: mol_type = unassigned DNA; note = donor_9160926
  misc_feature 1..23: note = RE
  misc_feature 24..25: note = Core
  misc_feature 26..50: note = LE

SEQ ID NO: 36077 - DNA, 50 bp, unidentified
  source 1..50: mol_type = unassigned DNA; note = donor_9163ff7
  misc_feature 1..23: note = RE
  misc_feature 24..25: note = Core
  misc_feature 26..50: note = LE
tgcaatattggaggagaccatatacgatgaaatggtctcctcctctctaa

SEQ ID NO: 36078 - DNA, 50 bp, unidentified
  source 1..50: mol_type = unassigned DNA; note = donor_916a18a
  misc_feature 1..22: note = RE
  misc_feature 23..25: note = Core
  misc_feature 26..50: note = LE
tattaaatttttaatatagttcgttgtatatttaaaatatttgttgtatc

SEQ ID NO: 36079 - DNA, 50 bp, unidentified
  source 1..50: mol_type = unassigned DNA; note = donor_917869b
  misc_feature 1..23: note = RE
  misc_feature 24..25: note = Core
  misc_feature 26..50: note = LE
cacgctgatcgggaagacggtatcttgtatgttgactgtggttcctgtga

SEQ ID NO: 36080 - DNA, 50 bp, unidentified
  source 1..50: mol_type = unassigned DNA; note = donor_9179615
  misc_feature 1..23: note = RE
  misc_feature 24..25: note = Core
  misc_feature 26..50: note = LE
tggcttgacagccaagacagtatcatgtatcttgccctccgagggaggct

SEQ ID NO: 36081 - DNA, 50 bp, unidentified
  source 1..50: mol_type = unassigned DNA; note = donor_917a823
  misc_feature 1..24: note = RE
  misc_feature 25: note = Core
  misc_feature 26..50: note = LE
tggcaaaccgggggcgtccatctataatgggatggacgcccccttcctgc

SEQ ID NO: 36082 - DNA, 50 bp, unidentified
  source 1..50: mol_type = unassigned DNA; note = donor_918052c
  misc_feature 1..24: note = RE
  misc_feature 25: note = Core
  misc_feature 26..50: note = LE
ctgccccttgacacaaagaggcttctgattgatgatggcaggtgcgttgc

SEQ ID NO: 36083 - DNA, 50 bp, unidentified
  source 1..50: mol_type = unassigned DNA; note = donor_918f45b
  misc_feature 1..23: note = RE
  misc_feature 24..25: note = Core
  misc_feature 26..50: note = LE
gcaggagaagggctgaccatacattaatgagatggtcagcctgaccgaga

SEQ ID NO: 36084 - DNA, 50 bp, unidentified
  source 1..50: mol_type = unassigned DNA; note = donor_91991ed
  misc_feature 1..23: note = RE
  misc_feature 24..25: note = Core
  misc_feature 26..50: note = LE
tgcttgaaaccaagacagttactaatctatcttctttaaaggcaccttga

SEQ ID NO: 36085 - DNA, 50 bp, unidentified
  source 1..50: mol_type = unassigned DNA; note = donor_919fee6
  misc_feature 1..24: note = RE
  misc_feature 25: note = Core
  misc_feature 26..50: note = LE
tgcccccttgacacaaagaggattctggttgagacttgttggtagatgct

SEQ ID NO: 36086 - DNA, 50 bp, unidentified
  source 1..50: mol_type = unassigned DNA; note = donor_91a1001
  misc_feature 1..23: note = RE
  misc_feature 24..25: note = Core
  misc_feature 26..50: note = LE
gtaccggaggctgggtccatatataatgaaatggacccagccttcttcca

SEQ ID NO: 36087 - DNA, 50 bp, unidentified; identical to SEQ ID NO: 33690
  source 1..50: mol_type = unassigned DNA; note = donor_91a38b7
  misc_feature 1..21: note = RE
  misc_feature 22..25: note = Core
  misc_feature 26..50: note = LE

SEQ ID NO: 36088 - DNA, 50 bp, unidentified
  source 1..50: mol_type = unassigned DNA; note = donor_91a8532
  misc_feature 1..23: note = RE
  misc_feature 24..25: note = Core
  misc_feature 26..50: note = LE
gcgctccggggggcgtccacagatgatggggtggacgccccccaacggca

SEQ ID NO: 36089 - DNA, 50 bp, unidentified
  source 1..50: mol_type = unassigned DNA; note = donor_91aaed3
  misc_feature 1..21: note = RE
  misc_feature 22..25: note = Core
  misc_feature 26..50: note = LE
ttgacaaaccacatagggacaccccgttactttgttcatgcccgctggga

SEQ ID NO: 36090 - DNA, 50 bp, unidentified
  source 1..50: mol_type = unassigned DNA; note = donor_91afd50
  misc_feature 1..24: note = RE
  misc_feature 25: note = Core
  misc_feature 26..50: note = LE
tgccacacgggaggcgtccatataatggtatggacgcctcccacctctgc

SEQ ID NO: 36091 - DNA, 50 bp, unidentified
  source 1..50: mol_type = unassigned DNA; note = donor_91b5e6d
  misc_feature 1..22: note = RE
  misc_feature 23..25: note = Core
  misc_feature 26..50: note = LE
gggggatgatgaaagacagttggcttgtgtctttgatcaaggtaaagtct

SEQ ID NO: 36092 - DNA, 50 bp, unidentified
  source 1..50: mol_type = unassigned DNA; note = donor_91b8950
  misc_feature 1..23: note = RE
  misc_feature 24..25: note = Core
  misc_feature 26..50: note = LE
cagtcgcttgacacacagaggcgctgacttgttaaatcgacctcagacgc

SEQ ID NO: 36093 - DNA, 50 bp, unidentified
  source 1..50: mol_type = unassigned DNA; note = donor_91d374c
  misc_feature 1..21: note = RE
  misc_feature 22..25: note = Core
  misc_feature 26..50: note = LE
cgacggcttgacacagggctactcactgctgcaccctcctcgtgtccggg

SEQ ID NO: 36094 - DNA, 50 bp, unidentified
  source 1..50: mol_type = unassigned DNA; note = donor_91d3783
  misc_feature 1..23: note = RE
  misc_feature 24..25: note = Core
  misc_feature 26..50: note = LE
agaaaatcgtattaaactgagggagcattcctgtagatagttatttttgg

SEQ ID NO: 36095 - DNA, 50 bp, unidentified
  source 1..50: mol_type = unassigned DNA; note = donor_91d659c
  misc_feature 1..24: note = RE
  misc_feature 25: note = Core
  misc_feature 26..50: note = LE
agcccttgacaaccataggagcatcagggaggatgtgggtaagtgctccg

SEQ ID NO: 36096 - DNA, 50 bp, unidentified
  source 1..50: mol_type = unassigned DNA; note = donor_91daad1
  misc_feature 1..24: note = RE
  misc_feature 25: note = Core
  misc_feature 26..50: note = LE
tgcaaaacggcggcggaccatacataatgggatggtccgccgcttcctcc

SEQ ID NO: 36097 - DNA, 50 bp, unidentified
  source 1..50: mol_type = unassigned DNA; note = donor_91f00e5
  misc_feature 1..23: note = RE
  misc_feature 24..25: note = Core
  misc_feature 26..50: note = LE
actatgaaaatcaaacacggtatcttatatgttgaaagtgttctccagaa

SEQ ID NO: 36098 - DNA, 50 bp, unidentified
  source 1..50: mol_type = unassigned DNA; note = donor_91f107b
  misc_feature 1..23: note = RE
  misc_feature 24..25: note = Core
  misc_feature 26..50: note = LE
cggaggggttgacttcttatagaggggtcctatataaagaacgagcacgg

SEQ ID NO: 36099 - DNA, 50 bp, unidentified
  source 1..50: mol_type = unassigned DNA; note = donor_91f5e6c
  misc_feature 1..22: note = RE
  misc_feature 23..25: note = Core
  misc_feature 26..50: note = LE
ccaaaagggagccgtccacacatgatgcggtggacggctcccacccgccg

SEQ ID NO: 36100 - DNA, 50 bp, unidentified
  source 1..50: mol_type = unassigned DNA; note = donor_91fba6f
  misc_feature 1..24: note = RE
  misc_feature 25: note = Core
  misc_feature 26..50: note = LE
tctcttggttcttaatatagattgctctaactttgcagtatcaaagagat

SEQ ID NO: 36101 - DNA, 50 bp, unidentified
  source 1..50: mol_type = unassigned DNA; note = donor_91ffd11
  misc_feature 1..24: note = RE
  misc_feature 25: note = Core
  misc_feature 26..50: note = LE
gcacaaacgggagacgttcatataatgatatgaacgtctcccacccgcga

SEQ ID NO: 36102 - DNA, 50 bp, unidentified
  source 1..50: mol_type = unassigned DNA; note = donor_920f6f2
  misc_feature 1..23: note = RE
  misc_feature 24..25: note = Core
  misc_feature 26..50: note = LE
gcaagcggggggccgtccacatatgttggggtggacggcccccgacggca

SEQ ID NO: 36103 - DNA, 50 bp, unidentified
  source 1..50: mol_type = unassigned DNA; note = donor_9212000
  misc_feature 1..23: note = RE
  misc_feature 24..25: note = Core
  misc_feature 26..50: note = LE
ctacttgacttttaatagttagtctcgtattatatagtcatagccattct

SEQ ID NO: 36104 - DNA, 50 bp, unidentified
  source 1..50: mol_type = unassigned DNA; note = donor_9212304
  misc_feature 1..24: note = RE
  misc_feature 25: note = Core
  misc_feature 26..50: note = LE
caacggagacccagttatcgtgtcagatttcattcgccactgcgtggcgc

SEQ ID NO: 36105 - DNA, 50 bp, unidentified
  source 1..50: mol_type = unassigned DNA; note = donor_92136ed
  misc_feature 1..24: note = RE
  misc_feature 25: note = Core
  misc_feature 26..50: note = LE
ttgcaatacggggcggaccatatataatggaatggtccgcctcactatcc

SEQ ID NO: 36106 - DNA, 50 bp, unidentified
  source 1..50: mol_type = unassigned DNA; note = donor_9215b80
  misc_feature 1..23: note = RE
  misc_feature 24..25: note = Core
  misc_feature 26..50: note = LE
tgacatcaagacgcatgggatgtctaatgaggctccggggtctgtcttgg

SEQ ID NO: 36107 - DNA, 50 bp, unidentified; identical to SEQ ID NO: 33046
  source 1..50: mol_type = unassigned DNA; note = donor_921e079
  misc_feature 1..23: note = RE
  misc_feature 24..25: note = Core
  misc_feature 26..50: note = LE

SEQ ID NO: 36108 - DNA, 50 bp, unidentified
  source 1..50: mol_type = unassigned DNA; note = donor_921f4ea
  misc_feature 1..24: note = RE
  misc_feature 25: note = Core
  misc_feature 26..50: note = LE
ttgacgaacgggggagttcatgtagaatgaaatgaactccccccacttaa

SEQ ID NO: 36109 - DNA, 50 bp, unidentified
  source 1..50: mol_type = unassigned DNA; note = donor_92206d2
  misc_feature 1..22: note = RE
  misc_feature 23..25: note = Core
  misc_feature 26..50: note = LE
tccaacggggggcgtccacacatgatgaggtggacggcccccacccaacg

SEQ ID NO: 36110 - DNA, 50 bp, unidentified
  source 1..50: mol_type = unassigned DNA; note = donor_92240ab
  misc_feature 1..21: note = RE
  misc_feature 22..25: note = Core
  misc_feature 26..50: note = LE
cctgagcttgactcaggaagtgtcactagggcatcatcctttctgcgagt

SEQ ID NO: 36111 - DNA, 50 bp, unidentified
  source 1..50: mol_type = unassigned DNA; note = donor_922488b
  misc_feature 1..24: note = RE
  misc_feature 25: note = Core
  misc_feature 26..50: note = LE
taacttttcggggaagcccttatagaatgaaagggacttcccctcgattt

SEQ ID NO: 36112 - DNA, 50 bp, unidentified
  source 1..50: mol_type = unassigned DNA; note = donor_9224b3f
  misc_feature 1..23: note = RE
  misc_feature 24..25: note = Core
  misc_feature 26..50: note = LE
atgcttgacttttattagcaaggttcgtactatataagagtagggaaata

SEQ ID NO: 36113 - DNA, 50 bp, unidentified; identical to SEQ ID NO: 31959
  source 1..50: mol_type = unassigned DNA; note = donor_9228002
  misc_feature 1..23: note = RE
  misc_feature 24..25: note = Core
  misc_feature 26..50: note = LE

SEQ ID NO: 36114 - DNA, 50 bp, unidentified
  source 1..50: mol_type = unassigned DNA; note = donor_9229c7a
  misc_feature 1..23: note = RE
  misc_feature 24..25: note = Core
  misc_feature 26..50: note = LE
cctattgactttttatttgcagactattacaatatatttacgggttaagg

SEQ ID NO: 36115 - DNA, 50 bp, unidentified
  source 1..50: mol_type = unassigned DNA; note = donor_9237566
  misc_feature 1..24: note = RE
  misc_feature 25: note = Core
  misc_feature 26..50: note = LE
tgcaaaaagcgtcgggtccatacatactgagatggacccggtgccccctc

SEQ ID NO: 36116 - DNA, 50 bp, unidentified
  source 1..50: mol_type = unassigned DNA; note = donor_923a98b
  misc_feature 1..23: note = RE
  misc_feature 24..25: note = Core
  misc_feature 26..50: note = LE
tgcagatggggcgggccatacgtttatgggatggcccgctcctccttcgg

SEQ ID NO: 36117 - DNA, 50 bp, unidentified
  source 1..50: mol_type = unassigned DNA; note = donor_924441f
  misc_feature 1..23: note = RE
  misc_feature 24..25: note = Core
  misc_feature 26..50: note = LE
gacacctgatggccgattagagaagatggggtaatcggccggcagcttgt

SEQ ID NO: 36118 - DNA, 50 bp, unidentified
  source 1..50: mol_type = unassigned DNA; note = donor_9249e75
  misc_feature 1..24: note = RE
  misc_feature 25: note = Core
  misc_feature 26..50: note = LE
gccgcttgaccaaaaccatagaggccgttacctttttcgtagcccgttcc

SEQ ID NO: 36119 - DNA, 50 bp, unidentified
  source 1..50: mol_type = unassigned DNA; note = donor_925108b
  misc_feature 1..23: note = RE
  misc_feature 24..25: note = Core
  misc_feature 26..50: note = LE
ggtattgacttttaatagttagtctcgtattatatagacatacccattct

SEQ ID NO: 36120 - DNA, 50 bp, unidentified
  source 1..50: mol_type = unassigned DNA; note = donor_9251ad1
  misc_feature 1..23: note = RE
  misc_feature 24..25: note = Core
  misc_feature 26..50: note = LE
atacggtggggtagacatagaatcttgtatgtcttaaggtgggcctgtcg

SEQ ID NO: 36121 - DNA, 50 bp, unidentified
  source 1..50: mol_type = unassigned DNA; note = donor_925a90a
  misc_feature 1..22: note = RE
  misc_feature 23..25: note = Core
  misc_feature 26..50: note = LE
atgcttgacaaacattagctggtttcgtattattaggtcagccagaaact

SEQ ID NO: 36122 - DNA, 50 bp, unidentified
  source 1..50: mol_type = unassigned DNA; note = donor_925eece
  misc_feature 1..23: note = RE
  misc_feature 24..25: note = Core
  misc_feature 26..50: note = LE
attatttgtaaaaatcatagtagtaccttagatttgcactttatactaaa

SEQ ID NO: 36123 - DNA, 50 bp, unidentified
  source 1..50: mol_type = unassigned DNA; note = donor_9263cc3
  misc_feature 1..23: note = RE
  misc_feature 24..25: note = Core
  misc_feature 26..50: note = LE
gccccgcgggagccatccatacatgatgaagtggatggctcccgcttccg

SEQ ID NO: 36124 - DNA, 50 bp, unidentified
  source 1..50: mol_type = unassigned DNA; note = donor_9264461
  misc_feature 1..24: note = RE
  misc_feature 25: note = Core
  misc_feature 26..50: note = LE
tgctggggaggggcggaccatacataatgggatggtccgccccgaccggc

SEQ ID NO: 36125 - DNA, 50 bp, unidentified
  source 1..50: mol_type = unassigned DNA; note = donor_9266ab1
  misc_feature 1..23: note = RE
  misc_feature 24..25: note = Core
  misc_feature 26..50: note = LE
aagtacttgacttattatagttggtataatatatttaggttatttcatta

SEQ ID NO: 36126 - DNA, 50 bp, unidentified
  source 1..50: mol_type = unassigned DNA; note = donor_92723c4
  misc_feature 1..23: note = RE
  misc_feature 24..25: note = Core
  misc_feature 26..50: note = LE
aggcaatgcatgtgttccatagaagtaaagccaagcctttgttttgattg

SEQ ID NO: 36127 - DNA, 50 bp, unidentified
  source 1..50: mol_type = unassigned DNA; note = donor_9274a76
  misc_feature 1..22: note = RE
  misc_feature 23..25: note = Core
  misc_feature 26..50: note = LE
ctcaacgggggccgtccacacatgatggggtggacggcccccgacctcga

SEQ ID NO: 36128 - DNA, 50 bp, unidentified; identical to SEQ ID NO: 33194
  source 1..50: mol_type = unassigned DNA; note = donor_928d7ae
  misc_feature 1..22: note = RE
  misc_feature 23..25: note = Core
  misc_feature 26..50: note = LE

SEQ ID NO: 36129 - DNA, 50 bp, unidentified
  source 1..50: mol_type = unassigned DNA; note = donor_9296598
  misc_feature 1..23: note = RE
  misc_feature 24..25: note = Core
  misc_feature 26..50: note = LE
tctattgacttttaatagttagtctcgtataataaatgtagtagttttta

SEQ ID NO: 36130 - DNA, 50 bp, unidentified
  source 1..50: mol_type = unassigned DNA; note = donor_92a2785
  misc_feature 1..23: note = RE
  misc_feature 24..25: note = Core
  misc_feature 26..50: note = LE
gacaccgctacgccatgggatgtctaatgggtcctgtcgggcttggttgt

SEQ ID NO: 36131 - DNA, 50 bp, unidentified
  source 1..50: mol_type = unassigned DNA; note = donor_92a92c0
  misc_feature 1..23: note = RE
  misc_feature 24..25: note = Core
  misc_feature 26..50: note = LE
gggcttgacttttaatagttagtctcgtattataaaagagtagtatttat

SEQ ID NO: 36132 - DNA, 50 bp, unidentified
  source 1..50: mol_type = unassigned DNA; note = donor_92a9cfd
  misc_feature 1..23: note = RE
  misc_feature 24..25: note = Core
  misc_feature 26..50: note = LE
ccgcattcgcgtgaacacagttgcctgtgtgttgattccggtgtatggtt

SEQ ID NO: 36133 - DNA, 50 bp, unidentified; identical to SEQ ID NO: 32622
  source 1..50: mol_type = unassigned DNA; note = donor_92aa09a
  misc_feature 1..24: note = RE
  misc_feature 25: note = Core
  misc_feature 26..50: note = LE

SEQ ID NO: 36134 - DNA, 50 bp, unidentified
  source 1..50: mol_type = unassigned DNA; note = donor_92b6859
  misc_feature 1..23: note = RE
  misc_feature 24..25: note = Core
  misc_feature 26..50: note = LE
aaccagtctgacagatacagttgcttctgtatctcggctctgctattctg

SEQ ID NO: 36135 - DNA, 50 bp, unidentified
  source 1..50: mol_type = unassigned DNA; note = donor_92b7595
  misc_feature 1..24: note = RE
  misc_feature 25: note = Core
  misc_feature 26..50: note = LE
gcgaaaggtgggctgaccatacattaatgagatggtcagcccggccgaga

SEQ ID NO: 36136 - DNA, 50 bp, unidentified
  source 1..50: mol_type = unassigned DNA; note = donor_92c4738
  misc_feature 1..24: note = RE
  misc_feature 25: note = Core
  misc_feature 26..50: note = LE
tgcaaaaacggggaggaccatagataatgggatggtcctccccacctgac

SEQ ID NO: 36137 - DNA, 50 bp, unidentified
  source 1..50: mol_type = unassigned DNA; note = donor_92c539c
  misc_feature 1..21: note = RE
  misc_feature 22..25: note = Core
  misc_feature 26..50: note = LE
tcttgactttttgtttgcagactcctacaataaagttacggtcataggca

SEQ ID NO: 36138 - DNA, 50 bp, unidentified
  source 1..50: mol_type = unassigned DNA; note = donor_92cb11f
  misc_feature 1..24: note = RE
  misc_feature 25: note = Core
  misc_feature 26..50: note = LE
cggcttgacaaccacatagagacaccgttaccttcttgatcaagcccggt

SEQ ID NO: 36139 - DNA, 50 bp, unidentified; identical to SEQ ID NO: 31263
  source 1..50: mol_type = unassigned DNA; note = donor_92ccb3a
  misc_feature 1..23: note = RE
  misc_feature 24..25: note = Core
  misc_feature 26..50: note = LE

SEQ ID NO: 36140 - DNA, 50 bp, unidentified
  source 1..50: mol_type = unassigned DNA; note = donor_92d133c
  misc_feature 1..23: note = RE
  misc_feature 24..25: note = Core
  misc_feature 26..50: note = LE
gggcgtgacattcgagacagttgcttgtatcttggaattgtggtacatga

SEQ ID NO: 36141 - DNA, 50 bp, unidentified
  source 1..50: mol_type = unassigned DNA; note = donor_92d475c
  misc_feature 1..23: note = RE
  misc_feature 24..25: note = Core
  misc_feature 26..50: note = LE
aagcgggcgccgtttaatggttgcttgtatcagcgcgccggcttataatg

SEQ ID NO: 36142 - DNA, 50 bp, unidentified
  source 1..50: mol_type = unassigned DNA; note = donor_92d58d0
  misc_feature 1..24: note = RE
  misc_feature 25: note = Core
  misc_feature 26..50: note = LE
ttacttgttttttagcacagtacttcttaagtttacaattaattaaattt

SEQ ID NO: 36143 - DNA, 50 bp, unidentified
  source 1..50: mol_type = unassigned DNA; note = donor_92d5a20
  misc_feature 1..23: note = RE
  misc_feature 24..25: note = Core
  misc_feature 26..50: note = LE
gacttatcgaggcccgttacagaagatggggtaacgggccgcagcctacc

SEQ ID NO: 36144 - DNA, 50 bp, unidentified
  source 1..50: mol_type = unassigned DNA; note = donor_92e4647
  misc_feature 1..23: note = RE
  misc_feature 24..25: note = Core
  misc_feature 26..50: note = LE
tgattgtgtgaggaagatggtatcttgtatctttctcgataagatggtta

SEQ ID NO: 36145 - DNA, 50 bp, unidentified
  source 1..50: mol_type = unassigned DNA; note = donor_92e4f9c
  misc_feature 1..24: note = RE
  misc_feature 25: note = Core
  misc_feature 26..50: note = LE
tgctccggatggggctgccatatcagacaaaatggcgccccttctgggct

SEQ ID NO: 36146 - DNA, 50 bp, unidentified
  source 1..50: mol_type = unassigned DNA; note = donor_92efcd1
  misc_feature 1..23: note = RE
  misc_feature 24..25: note = Core
  misc_feature 26..50: note = LE
gcaattccgcggcggaccatacataatgggatggtccgccgcagaatctc

SEQ ID NO: 36147 - DNA, 50 bp, unidentified; identical to SEQ ID NO: 32695
  source 1..50: mol_type = unassigned DNA; note = donor_92f1a42
  misc_feature 1..23: note = RE
  misc_feature 24..25: note = Core
  misc_feature 26..50: note = LE

SEQ ID NO: 36148 - DNA, 50 bp, unidentified; identical to SEQ ID NO: 31984
  source 1..50: mol_type = unassigned DNA; note = donor_92f1b90
  misc_feature 1..22: note = RE
  misc_feature 23..25: note = Core
  misc_feature 26..50: note = LE

SEQ ID NO: 36149 - DNA, 50 bp, unidentified
  source 1..50: mol_type = unassigned DNA; note = donor_92f26ce
  misc_feature 1..24: note = RE
  misc_feature 25: note = Core
  misc_feature 26..50: note = LE
ccgtgtcttgacacagaggggagcctacttgtttcatggacgcacggctt

SEQ ID NO: 36150 - DNA, 50 bp, unidentified
  source 1..50: mol_type = unassigned DNA; note = donor_92f3d81
  misc_feature 1..24: note = RE
  misc_feature 25: note = Core
  misc_feature 26..50: note = LE
tgcattactaggggagtccatatacaatggtatggactccccacctcaac

SEQ ID NO: 36151 - DNA, 50 bp, unidentified
  source 1..50: mol_type = unassigned DNA; note = donor_92fde71
  misc_feature 1..23: note = RE
  misc_feature 24..25: note = Core
  misc_feature 26..50: note = LE
gggcttgacttttaatagttagtctcgtattatagagtagtagtttttag

SEQ ID NO: 36152 - DNA, 50 bp, unidentified
  source 1..50: mol_type = unassigned DNA; note = donor_930d5b1
  misc_feature 1..24: note = RE
  misc_feature 25: note = Core
  misc_feature 26..50: note = LE
tgcaaacgaggaggagtccatatacaatgggatggactcctcctcaccca

SEQ ID NO: 36153 - DNA, 50 bp, unidentified
  source 1..50: mol_type = unassigned DNA; note = donor_93308a7
  misc_feature 1..21: note = RE
  misc_feature 22..25: note = Core
  misc_feature 26..50: note = LE
ctgggggttgacacaggatgtctcactggactaccctccgttcaaagcgt

SEQ ID NO: 36154 - DNA, 50 bp, unidentified
  source 1..50: mol_type = unassigned DNA; note = donor_93338d0
  misc_feature 1..23: note = RE
  misc_feature 24..25: note = Core
  misc_feature 26..50: note = LE
gcatccagggaggcgtccacacacgatagggtggacgcctccatccgacg

SEQ ID NO: 36155 - DNA, 50 bp, unidentified
  source 1..50: mol_type = unassigned DNA; note = donor_9337666
  misc_feature 1..23: note = RE
  misc_feature 24..25: note = Core
  misc_feature 26..50: note = LE
gccaacagggagccgtccacacatgatgctgtggacggctcccaccgagc

SEQ ID NO: 36156 - DNA, 50 bp, unidentified
  source 1..50: mol_type = unassigned DNA; note = donor_9351056
  misc_feature 1..23: note = RE
  misc_feature 24..25: note = Core
  misc_feature 26..50: note = LE
ccgcgtgacaacgacattaggaagctctaccttcttgaccgggttgatcg

SEQ ID NO: 36157 - DNA, 50 bp, unidentified
  source 1..50: mol_type = unassigned DNA; note = donor_9353d98
  misc_feature 1..22: note = RE
  misc_feature 23..25: note = Core
  misc_feature 26..50: note = LE
caccttgacacttcatggttggtcttgtatgatggtttatgtcctgaggg

SEQ ID NO: 36158 - DNA, 50 bp, unidentified
  source 1..50: mol_type = unassigned DNA; note = donor_93552fd
  misc_feature 1..21: note = RE
  misc_feature 22..25: note = Core
  misc_feature 26..50: note = LE
cggcggcttgacacagggcaactcactggtgcaccatccttgtgtcggtg

SEQ ID NO: 36159 - DNA, 50 bp, unidentified
  source 1..50: mol_type = unassigned DNA; note = donor_935cabf
  misc_feature 1..22: note = RE
  misc_feature 23..25: note = Core
  misc_feature 26..50: note = LE
acctcaaatcgccgaatagagaagatggggtattcggcttcgcgccatct

SEQ ID NO: 36160 - DNA, 50 bp, unidentified
  source 1..50: mol_type = unassigned DNA; note = donor_93660ec
  misc_feature 1..23: note = RE
  misc_feature 24..25: note = Core
  misc_feature 26..50: note = LE
cctcttgactcgaaatacagttgcttgtataatcatatccgtgtgtctgt

SEQ ID NO: 36161 - DNA, 50 bp, unidentified
  source 1..50: mol_type = unassigned DNA; note = donor_9368bb6
  misc_feature 1..23: note = RE
  misc_feature 24..25: note = Core
  misc_feature 26..50: note = LE
tgcaagacagagccgtccacatatgatggtgtggacggctccctgtggtc

SEQ ID NO: 36162 - DNA, 50 bp, unidentified
  source 1..50: mol_type = unassigned DNA; note = donor_9376af6
  misc_feature 1..22: note = RE
  misc_feature 23..25: note = Core
  misc_feature 26..50: note = LE
attcagtttttatattatagttcattgtatattatttaatcgttatactt

SEQ ID NO: 36163 - DNA, 50 bp, unidentified
  source 1..50: mol_type = unassigned DNA; note = donor_9383313
  misc_feature 1..24: note = RE
  misc_feature 25: note = Core
  misc_feature 26..50: note = LE
tgcgacacacagccggaccatacataatgggatggtccgaccgtgttcct

SEQ ID NO: 36164 - DNA, 50 bp, unidentified
  source 1..50: mol_type = unassigned DNA; note = donor_9394f9f
  misc_feature 1..23: note = RE
  misc_feature 24..25: note = Core
  misc_feature 26..50: note = LE
tcgcttgacattcaagacagtcgcttgtatcttagaaatagtagtagacc

SEQ ID NO: 36165 - DNA, 50 bp, unidentified; identical to SEQ ID NO: 33082
  source 1..50: mol_type = unassigned DNA; note = donor_939af4a
  misc_feature 1..22: note = RE
  misc_feature 23..25: note = Core
  misc_feature 26..50: note = LE

SEQ ID NO: 36166 - DNA, 50 bp, unidentified
  source 1..50: mol_type = unassigned DNA; note = donor_939c947
  misc_feature 1..23: note = RE
  misc_feature 24..25: note = Core
  misc_feature 26..50: note = LE
tgacatccaaaatcctgggatgtctaatgagagttagttggcgggtccgc

SEQ ID NO: 36167 - DNA, 50 bp, unidentified
  source 1..50: mol_type = unassigned DNA; note = donor_93a9313
  misc_feature 1..23: note = RE
  misc_feature 24..25: note = Core
  misc_feature 26..50: note = LE
atcaattggaaatgtcatagaaatcctttagatttgtaaatagttaaatt

SEQ ID NO: 36168 - DNA, 50 bp, unidentified
  source 1..50: mol_type = unassigned DNA; note = donor_93adf37
  misc_feature 1..23: note = RE
  misc_feature 24..25: note = Core
  misc_feature 26..50: note = LE
aaatttggaaattagcacagaatctcttacctttgcatcggattatagat

SEQ ID NO: 36169 - DNA, 50 bp, unidentified
  source 1..50: mol_type = unassigned DNA; note = donor_93b7ab6
  misc_feature 1..23: note = RE
  misc_feature 24..25: note = Core
  misc_feature 26..50: note = LE
ctacttgacttttatatagttagctggtataatataattgactcatctaa

SEQ ID NO: 36170 - DNA, 50 bp, unidentified
  source 1..50: mol_type = unassigned DNA; note = donor_93bb9d8
  misc_feature 1..23: note = RE
  misc_feature 24..25: note = Core
  misc_feature 26..50: note = LE
taatttgcagattaacatagaacatggtaagtttgtataaagaaagacag

SEQ ID NO: 36171 - DNA, 50 bp, unidentified
  source 1..50: mol_type = unassigned DNA; note = donor_93bc1d7
  misc_feature 1..22: note = RE
  misc_feature 23..25: note = Core
  misc_feature 26..50: note = LE
gccgcctaagctaatggttgcgcttgcataagcgatgttgtatgaagtgg

SEQ ID NO: 36172 - DNA, 50 bp, unidentified
  source 1..50: mol_type = unassigned DNA; note = donor_93bfacf
  misc_feature 1..23: note = RE
  misc_feature 24..25: note = Core
  misc_feature 26..50: note = LE
taacttgaaattaaacagagtatcttgtatgattaaatttaaagtaaata

SEQ ID NO: 36173 - DNA, 50 bp, unidentified; identical to SEQ ID NO: 34970
  source 1..50: mol_type = unassigned DNA; note = donor_93c2bbd
  misc_feature 1..23: note = RE
  misc_feature 24..25: note = Core
  misc_feature 26..50: note = LE

SEQ ID NO: 36174 - DNA, 50 bp, unidentified
  source 1..50: mol_type = unassigned DNA; note = donor_93d1cd0
  misc_feature 1..22: note = RE
  misc_feature 23..25: note = Core
  misc_feature 26..50: note = LE
caaaaagggagccatccacacaggatggggtggatggctcctgcatcatc

SEQ ID NO: 36175 - DNA, 50 bp, unidentified; identical to SEQ ID NO: 33900
  source 1..50: mol_type = unassigned DNA; note = donor_93dbfc3
  misc_feature 1..24: note = RE
  misc_feature 25: note = Core
  misc_feature 26..50: note = LE

SEQ ID NO: 36176 - DNA, 50 bp, unidentified
  source 1..50: mol_type = unassigned DNA; note = donor_93e637a
  misc_feature 1..23: note = RE
  misc_feature 24..25: note = Core
  misc_feature 26..50: note = LE
tgacatctaacctcctgggatgtctaatgagagttagcgagtcggccatc

SEQ ID NO: 36177 - DNA, 50 bp, unidentified
  source 1..50: mol_type = unassigned DNA; note = donor_93eca69
  misc_feature 1..24: note = RE
  misc_feature 25: note = Core
  misc_feature 26..50: note = LE
tccctgcgacaagatgacagttgcttgtatgtcgggaaagcagcattctg

SEQ ID NO: 36178 - DNA, 50 bp, unidentified
  source 1..50: mol_type = unassigned DNA; note = donor_93f3acd
  misc_feature 1..23: note = RE
  misc_feature 24..25: note = Core
  misc_feature 26..50: note = LE
agcgttgacttttaagacggtatcttgtatctttacttccgccatggtta

SEQ ID NO: 36179 - DNA, 50 bp, unidentified
  source 1..50: mol_type = unassigned DNA; note = donor_93f7b98
  misc_feature 1..23: note = RE
  misc_feature 24..25: note = Core
  misc_feature 26..50: note = LE
gccaatccggagccgtccacacatgatgctgtggacggctcctccaccgg

SEQ ID NO: 36180 - DNA, 50 bp, unidentified
  source 1..50: mol_type = unassigned DNA; note = donor_93fa640
  misc_feature 1..21: note = RE
  misc_feature 22..25: note = Core
  misc_feature 26..50: note = LE
cacttgacagaacttagcatgattagtacgatttaattataccctataac

SEQ ID NO: 36181 - DNA, 50 bp, unidentified
  source 1..50: mol_type = unassigned DNA; note = donor_9401b6e
  misc_feature 1..23: note = RE
  misc_feature 24..25: note = Core
  misc_feature 26..50: note = LE
cttgacgaaaaccatagaggcacccgttacctttttcgtagcccagtctt

SEQ ID NO: 36182 - DNA, 50 bp, unidentified; identical to SEQ ID NO: 30609
  source 1..50: mol_type = unassigned DNA; note = donor_9403f28
  misc_feature 1..22: note = RE
  misc_feature 23..25: note = Core
  misc_feature 26..50: note = LE

SEQ ID NO: 36183 - DNA, 50 bp, unidentified
  source 1..50: mol_type = unassigned DNA; note = donor_9407b00
  misc_feature 1..23: note = RE
  misc_feature 24..25: note = Core
  misc_feature 26..50: note = LE
gaaggcttcattcaagatggttgcttatatctttcaaatagttcaaactt

SEQ ID NO: 36184 - DNA, 50 bp, unidentified
  source 1..50: mol_type = unassigned DNA; note = donor_940ccaf
  misc_feature 1..23: note = RE
  misc_feature 24..25: note = Core
  misc_feature 26..50: note = LE
gcatcccgagaggtgtccacacacgattgtgtggacacctcctaccggca

SEQ ID NO: 36185 - DNA, 50 bp, unidentified
  source 1..50: mol_type = unassigned DNA; note = donor_940d71b
  misc_feature 1..21: note = RE
  misc_feature 22..25: note = Core
  misc_feature 26..50: note = LE
cggcggcttgacacagggctactcactggtgcaccatcgctttcgtcggc

SEQ ID NO: 36186 - DNA, 50 bp, unidentified
  source 1..50: mol_type = unassigned DNA; note = donor_94200bd
  misc_feature 1..23: note = RE
  misc_feature 24..25: note = Core
  misc_feature 26..50: note = LE
gcgttccgccccgcgattaaacgacatggggtaatcgcgggagcgagtcg

SEQ ID NO: 36187 - DNA, 50 bp, unidentified
  source 1..50: mol_type = unassigned DNA; note = donor_94362e3
  misc_feature 1..23: note = RE
  misc_feature 24..25: note = Core
  misc_feature 26..50: note = LE
ttgcaatccgggaggcgtccacatagatggtatggacgcctccccccggt

SEQ ID NO: 36188 - DNA, 50 bp, unidentified
  source 1..50: mol_type = unassigned DNA; note = donor_943e0ad
  misc_feature 1..23: note = RE
  misc_feature 24..25: note = Core
  misc_feature 26..50: note = LE
aagcccctccaacaacacagttgcttatctgttcggattctggcagttta

SEQ ID NO: 36189 - DNA, 50 bp, unidentified
  source 1..50: mol_type = unassigned DNA; note = donor_943e7a8
  misc_feature 1..20: note = RE
  misc_feature 21..25: note = Core
  misc_feature 26..50: note = LE
tattgacttttgttagcaggtttttagtaccatataagtgtaattgttag

SEQ ID NO: 36190 - DNA, 50 bp, unidentified
  source 1..50: mol_type = unassigned DNA; note = donor_94448a5
  misc_feature 1..23: note = RE
  misc_feature 24..25: note = Core
  misc_feature 26..50: note = LE
agggttgacacaaacgatagaaccttgtatggtttggtctccatcaacca

SEQ ID NO: 36191 - DNA, 50 bp, unidentified; identical to SEQ ID NO: 30729
  source 1..50: mol_type = unassigned DNA; note = donor_9448d44
  misc_feature 1..21: note = RE
  misc_feature 22..25: note = Core
  misc_feature 26..50: note = LE

SEQ ID NO: 36192 - DNA, 50 bp, unidentified; identical to SEQ ID NO: 30604
  source 1..50: mol_type = unassigned DNA; note = donor_9449d5b
  misc_feature 1..23: note = RE
  misc_feature 24..25: note = Core
  misc_feature 26..50: note = LE

SEQ ID NO: 36193 - DNA, 50 bp, unidentified
  source 1..50: mol_type = unassigned DNA; note = donor_9449eda
  misc_feature 1..23: note = RE
  misc_feature 24..25: note = Core
  misc_feature 26..50: note = LE
tcagagcttgatcaaaagggatacttgtcttatgactttgcctgtctcca

SEQ ID NO: 36194 - DNA, 50 bp, unidentified
  source 1..50: mol_type = unassigned DNA; note = donor_944dee7
  misc_feature 1..22: note = RE
  misc_feature 23..25: note = Core
  misc_feature 26..50: note = LE
caaagcagacgccatccacacaggatggggtggatggcgtctgcaccaag

SEQ ID NO: 36195 - DNA, 50 bp, unidentified
  source 1..50: mol_type = unassigned DNA; note = donor_94501ee
  misc_feature 1..24: note = RE
  misc_feature 25: note = Core
  misc_feature 26..50: note = LE
acacttgacgcgacataggagcgtctgtgagactgctgaagccggtcccg

SEQ ID NO: 36196 - DNA, 50 bp, unidentified
  source 1..50: mol_type = unassigned DNA; note = donor_9458dd0
  misc_feature 1..23: note = RE
  misc_feature 24..25: note = Core
  misc_feature 26..50: note = LE
gcgcgagcgggggcatccatacatgatggagtggatgccccctcctgacg

SEQ ID NO: 36197 - DNA, 50 bp, unidentified
  source 1..50: mol_type = unassigned DNA; note = donor_9470f98
  misc_feature 1..22: note = RE
  misc_feature 23..25: note = Core
  misc_feature 26..50: note = LE
cagctgcctgaaaaagacagttgcttgtgtcttagggccggcgtaggctt

SEQ ID NO: 36198 - DNA, 50 bp, unidentified
  source 1..50: mol_type = unassigned DNA; note = donor_947264b
  misc_feature 1..24: note = RE
  misc_feature 25: note = Core
  misc_feature 26..50: note = LE
tggcataccgtgggcgtccatgtataatggaatggacgcccactacccta

SEQ ID NO: 36199 - DNA, 50 bp, unidentified
  source 1..50: mol_type = unassigned DNA; note = donor_947a56c
  misc_feature 1..24: note = RE
  misc_feature 25: note = Core
  misc_feature 26..50: note = LE
ccctctactattctttttcaaccttatccattcctttcgcttcgctcaag

SEQ ID NO: 36200 - DNA, 50 bp, unidentified
  source 1..50: mol_type = unassigned DNA; note = donor_9482010
  misc_feature 1..23: note = RE
  misc_feature 24..25: note = Core
  misc_feature 26..50: note = LE
gttagaggcaaagcatgtggagcctcctacggcgattttcacgaacaaca

SEQ ID NO: 36201 - DNA, 50 bp, unidentified
  source 1..50: mol_type = unassigned DNA; note = donor_94846f0
  misc_feature 1..23: note = RE
  misc_feature 24..25: note = Core
  misc_feature 26..50: note = LE
tgacatttgcgcccatggggtgtctaatgggggtccaccacttcttcttg

SEQ ID NO: 36202 - DNA, 50 bp, unidentified
  source 1..50: mol_type = unassigned DNA; note = donor_948afc1
  misc_feature 1..20: note = RE
  misc_feature 21..25: note = Core
  misc_feature 26..50: note = LE
tcttgacttttgttagcaggtttttagtaccataaaagtgtagttggaga

SEQ ID NO: 36203 - DNA, 50 bp, unidentified
  source 1..50: mol_type = unassigned DNA; note = donor_94aae73
  misc_feature 1..24: note = RE
  misc_feature 25: note = Core
  misc_feature 26..50: note = LE
ttgactttctttaatagttagtctctattagtattgtcatagccattctt

SEQ ID NO: 36204 - DNA, 50 bp, unidentified
  source 1..50: mol_type = unassigned DNA; note = donor_94ab83d
  misc_feature 1..23: note = RE
  misc_feature 24..25: note = Core
  misc_feature 26..50: note = LE
ggccttgacaactcttggcaggtttgctacaatgccaacaggcgggagga

SEQ ID NO: 36205 - DNA, 50 bp, unidentified
  source 1..50: mol_type = unassigned DNA; note = donor_94b40a6
  misc_feature 1..24: note = RE
  misc_feature 25: note = Core
  misc_feature 26..50: note = LE
accgcttgacgaacgacataggggccgttaccttcttcccagccccgtgg

SEQ ID NO: 36206 - DNA, 50 bp, unidentified; identical to SEQ ID NO: 30847
  source 1..50: mol_type = unassigned DNA; note = donor_94b5cde
  misc_feature 1..24: note = RE
  misc_feature 25: note = Core
  misc_feature 26..50: note = LE

SEQ ID NO: 36207 - DNA, 50 bp, unidentified
  source 1..50: mol_type = unassigned DNA; note = donor_94b89d1
  misc_feature 1..23: note = RE
  misc_feature 24..25: note = Core
  misc_feature 26..50: note = LE
tgacacaccagcacctgggatgtctaatcagtggtgggagtgggttatcc

SEQ ID NO: 36208 - DNA, 50 bp, unidentified
  source 1..50: mol_type = unassigned DNA; note = donor_94bdec7
  misc_feature 1..22: note = RE
  misc_feature 23..25: note = Core
  misc_feature 26..50: note = LE
tcacttgcttttaaacacagttcatcctatgtttgtgaggtgattgttta

SEQ ID NO: 36209 - DNA, 50 bp, unidentified; identical to SEQ ID NO: 30475
  source 1..50: mol_type = unassigned DNA; note = donor_94be3e9
  misc_feature 1..23: note = RE
  misc_feature 24..25: note = Core
  misc_feature 26..50: note = LE

SEQ ID NO: 36210 - DNA, 50 bp, unidentified; identical to SEQ ID NO: 30713
  source 1..50: mol_type = unassigned DNA; note = donor_94c41f8
  misc_feature 1..22: note = RE
  misc_feature 23..25: note = Core
  misc_feature 26..50: note = LE

SEQ ID NO: 36211 - DNA, 50 bp, unidentified
  source 1..50: mol_type = unassigned DNA; note = donor_94c8922
  misc_feature 1..23: note = RE
  misc_feature 24..25: note = Core
  misc_feature 26..50: note = LE
gacaacttagaaccatggggtgtctaatgggtgtgtagcgggttctcgtg

SEQ ID NO: 36212 - DNA, 50 bp, unidentified
  source 1..50: mol_type = unassigned DNA; note = donor_94cb178
  misc_feature 1..24: note = RE
  misc_feature 25: note = Core
  misc_feature 26..50: note = LE
tagcgcatcgggggcgttcatataatggaatgaacgcccccacctaccgg

SEQ ID NO: 36213 - DNA, 50 bp, unidentified
  source 1..50: mol_type = unassigned DNA; note = donor_94ce6d6
  misc_feature 1..23: note = RE
  misc_feature 24..25: note = Core
  misc_feature 26..50: note = LE
atcgggtgccgatttaatggttgcttgtattagcgcggtggtttatattg

SEQ ID NO: 36214 - DNA, 50 bp, unidentified
  source 1..50: mol_type = unassigned DNA; note = donor_94cf3c6
  misc_feature 1..23: note = RE
  misc_feature 24..25: note = Core
  misc_feature 26..50: note = LE
aaggagctccgttgacatagaatcttgtatgttctaggctaggaacctgt

SEQ ID NO: 36215 - DNA, 50 bp, unidentified; identical to SEQ ID NO: 31238
  source 1..50: mol_type = unassigned DNA; note = donor_94cfd65
  misc_feature 1..24: note = RE
  misc_feature 25: note = Core
  misc_feature 26..50: note = LE

SEQ ID NO: 36216 - DNA, 50 bp, unidentified
  source 1..50: mol_type = unassigned DNA; note = donor_94d6184
  misc_feature 1..24: note = RE
  misc_feature 25: note = Core
  misc_feature 26..50: note = LE
aattaatcttgacttttatatagttggtatattgaaattactcatccaat

SEQ ID NO: 36217 - DNA, 50 bp, unidentified
  source 1..50: mol_type = unassigned DNA; note = donor_94e5517
  misc_feature 1..24: note = RE
  misc_feature 25: note = Core
  misc_feature 26..50: note = LE
ttgcaaacgggaggagtccatatataatggtatggactcctcccctcccc

SEQ ID NO: 36218 - DNA, 50 bp, unidentified
  source 1..50: mol_type = unassigned DNA; note = donor_94f2358
  misc_feature 1..23: note = RE
  misc_feature 24..25: note = Core
  misc_feature 26..50: note = LE
ggtcttgacttttaatagttagtctcgtatcataaaagagtagtatttat

SEQ ID NO: 36219 - DNA, 50 bp, unidentified
  source 1..50: mol_type = unassigned DNA; note = donor_951b32f
  misc_feature 1..23: note = RE
  misc_feature 24..25: note = Core
  misc_feature 26..50: note = LE
gacgaacgaaggcccattacagaagatgccgtaatgggccggcgtcttgc

SEQ ID NO: 36220 - DNA, 50 bp, unidentified
  source 1..50: mol_type = unassigned DNA; note = donor_951ba8e
  misc_feature 1..22: note = RE
  misc_feature 23..25: note = Core
  misc_feature 26..50: note = LE
gcctgaagggggccgtccatacatgctgggtggacggcccccgacggcat

SEQ ID NO: 36221 - DNA, 50 bp, unidentified; identical to SEQ ID NO: 36083
  source 1..50: mol_type = unassigned DNA; note = donor_9523716
  misc_feature 1..23: note = RE
  misc_feature 24..25: note = Core
  misc_feature 26..50: note = LE

SEQ ID NO: 36222 - DNA, 50 bp, unidentified
  source 1..50: mol_type = unassigned DNA; note = donor_95242a6
  misc_feature 1..23: note = RE
  misc_feature 24..25: note = Core
  misc_feature 26..50: note = LE
caatgcgggagccatccacagaagatgatgtggatggctcccgctcccgg

SEQ ID NO: 36223 - DNA, 50 bp, unidentified; identical to SEQ ID NO: 32192
  source 1..50: mol_type = unassigned DNA; note = donor_952582e
  misc_feature 1..23: note = RE
  misc_feature 24..25: note = Core
  misc_feature 26..50: note = LE

SEQ ID NO: 36224 - DNA, 50 bp, unidentified
  source 1..50: mol_type = unassigned DNA; note = donor_9527fd7
  misc_feature 1..23: note = RE
  misc_feature 24..25: note = Core
  misc_feature 26..50: note = LE
gacttgacaagaccctatgggatctgatataacgccatgcaggggtcagg

SEQ ID NO: 36225 - DNA, 50 bp, unidentified
  source 1..50: mol_type = unassigned DNA; note = donor_95294b2
  misc_feature 1..23: note = RE
  misc_feature 24..25: note = Core
  misc_feature 26..50: note = LE
cccagtaacgggcaagacggtatcttgtatctcgactatcgcacctacag

SEQ ID NO: 36226 - DNA, 50 bp, unidentified
  source 1..50: mol_type = unassigned DNA; note = donor_9529ec6
  misc_feature 1..23: note = RE
  misc_feature 24..25: note = Core
  misc_feature 26..50: note = LE
gcgtttgagggggcgtccatacatgatggggtggacgccccccgacggca

SEQ ID NO: 36227 - DNA, 50 bp, unidentified
  source 1..50: mol_type = unassigned DNA; note = donor_9534295
  misc_feature 1..23: note = RE
  misc_feature 24..25: note = Core
  misc_feature 26..50: note = LE
ctccagcttgatcatcacggatacttgtcttatgacattgcggtccgttt

SEQ ID NO: 36228 - DNA, 50 bp, unidentified
  source 1..50: mol_type = unassigned DNA; note = donor_955c4b7
  misc_feature 1..23: note = RE
  misc_feature 24..25: note = Core
  misc_feature 26..50: note = LE
tgacccagacggccgattagagaagatggggtaatcggcctgccagcttg

SEQ ID NO: 36229 - DNA, 50 bp, unidentified
  source 1..50: mol_type = unassigned DNA; note = donor_95635bd
  misc_feature 1..23: note = RE
  misc_feature 24..25: note = Core
  misc_feature 26..50: note = LE
tgcaataacgggggagaccatatacgatggaatggtctcccccctcaaac

SEQ ID NO: 36230 - DNA, 50 bp, unidentified
  source 1..50: mol_type = unassigned DNA; note = donor_956e3ad
  misc_feature 1..20: note = RE
  misc_feature 21..25: note = Core
  misc_feature 26..50: note = LE
caggggttgacacagggcaactcactggtgcaccatccgcgtgtccgagt

SEQ ID NO: 36231 - DNA, 50 bp, unidentified
  source 1..50: mol_type = unassigned DNA; note = donor_9580ec0
  misc_feature 1..22: note = RE
  misc_feature 23..25: note = Core
  misc_feature 26..50: note = LE
atcggcgggcgccgtccagacatgatggcgtggacggcgcccgcaacggc

SEQ ID NO: 36232 - DNA, 50 bp, unidentified
  source 1..50: mol_type = unassigned DNA; note = donor_95836a0
  misc_feature 1..21: note = RE
  misc_feature 22..25: note = Core
  misc_feature 26..50: note = LE
ggcttgacaggttcattgagagtccctaaggttgttaggtgtctggggtt

SEQ ID NO: 36233 - DNA, 50 bp, unidentified
  source 1..50: mol_type = unassigned DNA; note = donor_958aa30
  misc_feature 1..24: note = RE
  misc_feature 25: note = Core
  misc_feature 26..50: note = LE
caccccttgacaacaaaggggagcctactagagacttccctgcaggatcg

SEQ ID NO: 36234 - DNA, 50 bp, unidentified
  source 1..50: mol_type = unassigned DNA; note = donor_958fcb6
  misc_feature 1..23: note = RE
  misc_feature 24..25: note = Core
  misc_feature 26..50: note = LE
tgccttgcgggcagacatagaatcttgtatgtttactcgtggcaggccta

SEQ ID NO: 36235 - DNA, 50 bp, unidentified
  source 1..50: mol_type = unassigned DNA; note = donor_9592f8c
  misc_feature 1..23: note = RE
  misc_feature 24..25: note = Core
  misc_feature 26..50: note = LE
cgttcaaggtccatacagagctactcactgatggacctcactggtgaccc

SEQ ID NO: 36236 - DNA, 50 bp, unidentified
  source 1..50: mol_type = unassigned DNA; note = donor_959617d
  misc_feature 1..24: note = RE
  misc_feature 25: note = Core
  misc_feature 26..50: note = LE
gacgccgcttgacaagaggggagcctacttgttttactggatctacgacc

SEQ ID NO: 36237 - DNA, 50 bp, unidentified
  source 1..50: mol_type = unassigned DNA; note = donor_959fa88
  misc_feature 1..24: note = RE
  misc_feature 25: note = Core
  misc_feature 26..50: note = LE
ttacttgttttttagcacagtacttcttaagtttacaattccttaaattt

SEQ ID NO: 36238 - DNA, 50 bp, unidentified
  source 1..50: mol_type = unassigned DNA; note = donor_95a4115
  misc_feature 1..21: note = RE
  misc_feature 22..25: note = Core
  misc_feature 26..50: note = LE
gcgatggttgacacaggatgtctcactggcctaccctcccacgagacgga

SEQ ID NO: 36239 - DNA, 50 bp, unidentified
  source 1..50: mol_type = unassigned DNA; note = donor_95a9cab
  misc_feature 1..23: note = RE
  misc_feature 24..25: note = Core
  misc_feature 26..50: note = LE
gaaccgaacgggccgtccacacatgttggggtggacggcccccgacggca

SEQ ID NO: 36240 - DNA, 50 bp, unidentified; identical to SEQ ID NO: 30970
  source 1..50: mol_type = unassigned DNA; note = donor_95ab3bd
  misc_feature 1..24: note = RE
  misc_feature 25: note = Core
  misc_feature 26..50: note = LE

SEQ ID NO: 36241 - DNA, 50 bp, unidentified
  source 1..50: mol_type = unassigned DNA; note = donor_95b0838
  misc_feature 1..24: note = RE
  misc_feature 25: note = Core
  misc_feature 26..50: note = LE
gcttgccatcagaggccgtccacatgatgatgtggacggcctcacctcag

SEQ ID NO: 36242 - DNA, 50 bp, unidentified
  source 1..50: mol_type = unassigned DNA; note = donor_95b76c8
  misc_feature 1..22: note = RE
  misc_feature 23..25: note = Core
  misc_feature 26..50: note = LE
ggcttgacatcgtcattgagattccctaagtttgtaggtgtctggggttg

SEQ ID NO: 36243 - DNA, 50 bp, unidentified
  source 1..50: mol_type = unassigned DNA; note = donor_95bc25f
  misc_feature 1..24: note = RE
  misc_feature 25: note = Core
  misc_feature 26..50: note = LE
atgtttggataattccataggaagctttaagtttgcagcgtgaatataag

SEQ ID NO: 36244 - DNA, 50 bp, unidentified
  source 1..50: mol_type = unassigned DNA; note = donor_95c913f
  misc_feature 1..23: note = RE
  misc_feature 24..25: note = Core
  misc_feature 26..50: note = LE
caaagagggagccatccacacaggatgatgtggatggctcctgtccgcgg

SEQ ID NO: 36245 - DNA, 50 bp, unidentified
  source 1..50: mol_type = unassigned DNA; note = donor_95cbc68
  misc_feature 1..22: note = RE
  misc_feature 23..25: note = Core
  misc_feature 26..50: note = LE
cgcttgacgaaagacatagaggcccgttatcttcttcgcggtcctgcaag

SEQ ID NO: 36246 - DNA, 50 bp, unidentified
  source 1..50: mol_type = unassigned DNA; note = donor_95d678a
  misc_feature 1..23: note = RE
  misc_feature 24..25: note = Core
  misc_feature 26..50: note = LE
aaaacttgtgcaagtcttagaattcctttagatttgtgcaggataaataa

SEQ ID NO: 36247 - DNA, 50 bp, unidentified
  source 1..50: mol_type = unassigned DNA; note = donor_95e8aa8
  misc_feature 1..24: note = RE
  misc_feature 25: note = Core
  misc_feature 26..50: note = LE
tgcgaaggtggggaagcccttgtagaatgaaagggacttccccgtcccga

SEQ ID NO: 36248 - DNA, 50 bp, unidentified
  source 1..50: mol_type = unassigned DNA; note = donor_95eb699
  misc_feature 1..24: note = RE
  misc_feature 25: note = Core
  misc_feature 26..50: note = LE
tgcagtcgggcggcggaccatacataatgagatggtccgccgcttgatct

SEQ ID NO: 36249 - DNA, 50 bp, unidentified
  source 1..50: mol_type = unassigned DNA; note = donor_9608dd3
  misc_feature 1..24: note = RE
  misc_feature 25: note = Core
  misc_feature 26..50: note = LE
ggcaaaaaagtgggcgtccatgtataatggaatggacgcccacttcctat

SEQ ID NO: 36250 - DNA, 50 bp, unidentified
  source 1..50: mol_type = unassigned DNA; note = donor_961a931
  misc_feature 1..22: note = RE
  misc_feature 23..25: note = Core
  misc_feature 26..50: note = LE
tcgcaaagggacgcgttcatatagaatgaaatgaacgcgtcccaccccga

SEQ ID NO: 36251 - DNA, 50 bp, unidentified
  source 1..50: mol_type = unassigned DNA; note = donor_962d375
  misc_feature 1..22: note = RE
  misc_feature 23..25: note = Core
  misc_feature 26..50: note = LE
cagaaccggggccgtccacacatgatggggtggacggcccctcccaccgg

SEQ ID NO: 36252 - DNA, 50 bp, unidentified
  source 1..50: mol_type = unassigned DNA; note = donor_9631d5e
  misc_feature 1..24: note = RE
  misc_feature 25: note = Core
  misc_feature 26..50: note = LE
tggcaaactgggggcgaccatctataatggaatggtcacccctatctaat

SEQ ID NO: 36253 - DNA, 50 bp, unidentified
  source 1..50: mol_type = unassigned DNA; note = donor_9635e41
  misc_feature 1..24: note = RE
  misc_feature 25: note = Core
  misc_feature 26..50: note = LE
ttgccctacgttttgtttcaaactaaagaccattcctttctgcgaaaggc

SEQ ID NO: 36254 - DNA, 50 bp, unidentified; identical to SEQ ID NO: 31844
  source 1..50: mol_type = unassigned DNA; note = donor_963a220
  misc_feature 1..22: note = RE
  misc_feature 23..25: note = Core
  misc_feature 26..50: note = LE

SEQ ID NO: 36255 - DNA, 50 bp, unidentified
  source 1..50: mol_type = unassigned DNA; note = donor_963d267
  misc_feature 1..23: note = RE
  misc_feature 24..25: note = Core
  misc_feature 26..50: note = LE
ttcagaggtgttcaagatggttgcttatatctttcgattggttcaaactt

SEQ ID NO: 36256 - DNA, 50 bp, unidentified
  source 1..50: mol_type = unassigned DNA; note = donor_964d624
  misc_feature 1..24: note = RE
  misc_feature 25: note = Core
  misc_feature 26..50: note = LE
atgttgacaagctattagctggtatcgtattatgggatcaaccagttctt

SEQ ID NO: 36257 - DNA, 50 bp, unidentified
  source 1..50: mol_type = unassigned DNA; note = donor_964ee9a
  misc_feature 1..20: note = RE
  misc_feature 21..25: note = Core
  misc_feature 26..50: note = LE
cttgacaaatttatagccggctgctataatatcgaccgtagatattccct

SEQ ID NO: 36258 - DNA, 50 bp, unidentified
  source 1..50: mol_type = unassigned DNA; note = donor_9653539
  misc_feature 1..23: note = RE
  misc_feature 24..25: note = Core
  misc_feature 26..50: note = LE
gccgggaaggggccgtccacatatgatggggtggacggccccacacggta

SEQ ID NO: 36259 - DNA, 50 bp, unidentified
  source 1..50: mol_type = unassigned DNA; note = donor_96542ea
  misc_feature 1..23: note = RE
  misc_feature 24..25: note = Core
  misc_feature 26..50: note = LE
ggggttgactttcaacacaaaatctggtatgttgacagatagggaaaagt

SEQ ID NO: 36260 - DNA, 50 bp, unidentified; identical to SEQ ID NO: 31331
  source 1..50: mol_type = unassigned DNA; note = donor_96584c2
  misc_feature 1..21: note = RE
  misc_feature 22..25: note = Core
  misc_feature 26..50: note = LE

SEQ ID NO: 36261 - DNA, 50 bp, unidentified
  source 1..50: mol_type = unassigned DNA; note = donor_965aa3b
  misc_feature 1..23: note = RE
  misc_feature 24..25: note = Core
  misc_feature 26..50: note = LE
ctccttgactttttatttgcaggctgttacaataaatttgcggcaagtag

SEQ ID NO: 36262 - DNA, 50 bp, unidentified
  source 1..50: mol_type = unassigned DNA; note = donor_965af99
  misc_feature 1..23: note = RE
  misc_feature 24..25: note = Core
  misc_feature 26..50: note = LE
actcttgacatttcttagctggactagtataataatgatgtagtcaagaa

SEQ ID NO: 36263 - DNA, 50 bp, unidentified
  source 1..50: mol_type = unassigned DNA; note = donor_965b8cb
  misc_feature 1..24: note = RE
  misc_feature 25: note = Core
  misc_feature 26..50: note = LE
atcccttgactttaaatagcaggtcctcatatattctttctgccgcttct

SEQ ID NO: 36264 - DNA, 50 bp, unidentified
  source 1..50: mol_type = unassigned DNA; note = donor_966bb4f
  misc_feature 1..22: note = RE
  misc_feature 23..25: note = Core
  misc_feature 26..50: note = LE
taatccgggaggcgcccatataagatggtatgggcgcctccctccgtggg

SEQ ID NO: 36265 - DNA, 50 bp, unidentified
  source 1..50: mol_type = unassigned DNA; note = donor_966f3c2
  misc_feature 1..24: note = RE
  misc_feature 25: note = Core
  misc_feature 26..50: note = LE
tggcatactgggggcgtccatgtataatggaatggacgcccccttcctaa

SEQ ID NO: 36266 - DNA, 50 bp, unidentified
  source 1..50: mol_type = unassigned DNA; note = donor_9677063
  misc_feature 1..23: note = RE
  misc_feature 24..25: note = Core
  misc_feature 26..50: note = LE
gcatttaccggggcgtccacacacgatggggtggacgcccctcgacggca

SEQ ID NO: 36267 - DNA, 50 bp, unidentified
  source 1..50: mol_type = unassigned DNA; note = donor_96786bc
  misc_feature 1..24: note = RE
  misc_feature 25: note = Core
  misc_feature 26..50: note = LE
gcaacgcacggccggaccatacattaatgggatggtccggccgtgctcct

SEQ ID NO: 36268 - DNA, 50 bp, unidentified
  source 1..50: mol_type = unassigned DNA; note = donor_967c37d
  misc_feature 1..23: note = RE
  misc_feature 24..25: note = Core
  misc_feature 26..50: note = LE
cccaacggagagccgtccacacatgatgacgtggacggctctccatctac

SEQ ID NO: 36269 - DNA, 50 bp, unidentified; identical to SEQ ID NO: 34344
  source 1..50: mol_type = unassigned DNA; note = donor_9690386
  misc_feature 1..23: note = RE
  misc_feature 24..25: note = Core
  misc_feature 26..50: note = LE

SEQ ID NO: 36270 - DNA, 50 bp, unidentified
  source 1..50: mol_type = unassigned DNA; note = donor_9695167
  misc_feature 1..23: note = RE
  misc_feature 24..25: note = Core
  misc_feature 26..50: note = LE
tatattgacatattaccagtcgtctcgtataattaattttgtagttagct

SEQ ID NO: 36271 - DNA, 50 bp, unidentified
  source 1..50: mol_type = unassigned DNA; note = donor_96983e9
  misc_feature 1..24: note = RE
  misc_feature 25: note = Core
  misc_feature 26..50: note = LE
ttgcaatgaggaggagtccatatacaatgggatggactcctcctcccacg

SEQ ID NO: 36272 - DNA, 50 bp, unidentified
  source 1..50: mol_type = unassigned DNA; note = donor_96a96ac
  misc_feature 1..23: note = RE
  misc_feature 24..25: note = Core
  misc_feature 26..50: note = LE
ggccttgacttttaatagttagtcttgtattataaagtagtagtttttag

SEQ ID NO: 36273 - DNA, 50 bp, unidentified
  source 1..50: mol_type = unassigned DNA; note = donor_96a9d6d
  misc_feature 1..24: note = RE
  misc_feature 25: note = Core
  misc_feature 26..50: note = LE
tgcaaaaacgggggtgaccatagataatgagatggtcaccccctccttgt

SEQ ID NO: 36274 - DNA, 50 bp, unidentified
  source 1..50: mol_type = unassigned DNA; note = donor_96b3fc3
  misc_feature 1..23: note = RE
  misc_feature 24..25: note = Core
  misc_feature 26..50: note = LE
cggcttgacattcaagacagttgcttgtatctagctctgacggagagttt

SEQ ID NO: 36275 - DNA, 50 bp, unidentified
  source 1..50: mol_type = unassigned DNA; note = donor_96b5f4f
  misc_feature 1..23: note = RE
  misc_feature 24..25: note = Core
  misc_feature 26..50: note = LE
gacatccccacgacatgggatgtctaatgagttttaggagcgggccctga

SEQ ID NO: 36276 - DNA, 50 bp, unidentified
  source 1..50: mol_type = unassigned DNA; note = donor_96b62a0
  misc_feature 1..23: note = RE
  misc_feature 24..25: note = Core
  misc_feature 26..50: note = LE
gcctcgaccggggcgtccacacacgatggggtggacgccccccgacggca

SEQ ID NO: 36277 - DNA, 50 bp, unidentified
  source 1..50: mol_type = unassigned DNA; note = donor_96ba20c
  misc_feature 1..23: note = RE
  misc_feature 24..25: note = Core
  misc_feature 26..50: note = LE
gactgcaacacgccgaatagagaagatggggtattcggcttttgccccat

SEQ ID NO: 36278 - DNA, 50 bp, unidentified
  source 1..50: mol_type = unassigned DNA; note = donor_96c4ded
  misc_feature 1..23: note = RE
  misc_feature 24..25: note = Core
  misc_feature 26..50: note = LE
ccccttgacaaaacttagcaggtctattacaatatgtttagggttaaggc

SEQ ID NO: 36279 - DNA, 50 bp, unidentified; identical to SEQ ID NO: 32750
  source 1..50: mol_type = unassigned DNA; note = donor_96c76b3
  misc_feature 1..23: note = RE
  misc_feature 24..25: note = Core
  misc_feature 26..50: note = LE

SEQ ID NO: 36280 - DNA, 50 bp, unidentified
  source 1..50: mol_type = unassigned DNA; note = donor_96c803d
  misc_feature 1..23: note = RE
  misc_feature 24..25: note = Core
  misc_feature 26..50: note = LE
gacttgactgtatcatagttagtcttgtatgatacagttaagattttgac

SEQ ID NO: 36281 - DNA, 50 bp, unidentified
  source 1..50: mol_type = unassigned DNA; note = donor_96d0aaa
  misc_feature 1..23: note = RE
  misc_feature 24..25: note = Core
  misc_feature 26..50: note = LE
aacctgcttgatcataacggatacttgtcttatgaggatggcggcctttc

SEQ ID NO: 36282 - DNA, 50 bp, unidentified
  source 1..50: mol_type = unassigned DNA; note = donor_96f8bdb
  misc_feature 1..24: note = RE
  misc_feature 25: note = Core
  misc_feature 26..50: note = LE
ttgcaaaaggggatggttcatatataatgtaatgaaccatccccacccct

SEQ ID NO: 36283 - DNA, 50 bp, unidentified; identical to SEQ ID NO: 30383
  source 1..50: mol_type = unassigned DNA; note = donor_96fb744
  misc_feature 1..23: note = RE
  misc_feature 24..25: note = Core
  misc_feature 26..50: note = LE

SEQ ID NO: 36284 - DNA, 50 bp, unidentified
  source 1..50: mol_type = unassigned DNA; note = donor_96fc12f
  misc_feature 1..23: note = RE
  misc_feature 24..25: note = Core
  misc_feature 26..50: note = LE
gaacgcgggggcgagtccatacataattggatggactcgcccaagccgag

SEQ ID NO: 36285 - DNA, 50 bp, unidentified
  source 1..50: mol_type = unassigned DNA; note = donor_97024a7
  misc_feature 1..23: note = RE
  misc_feature 24..25: note = Core
  misc_feature 26..50: note = LE
gacctcaaccagccaaatagagaagatggggtattcggcttgagcctcat

SEQ ID NO: 36286 - DNA, 50 bp, unidentified
  source 1..50: mol_type = unassigned DNA; note = donor_970c685
  misc_feature 1..23: note = RE
  misc_feature 24..25: note = Core
  misc_feature 26..50: note = LE
gcaaaacgggtggagtccatagataatgtgatggactccaccctcctgat

SEQ ID NO: 36287 - DNA, 50 bp, unidentified
  source 1..50: mol_type = unassigned DNA; note = donor_970c7f8
  misc_feature 1..22: note = RE
  misc_feature 23..25: note = Core
  misc_feature 26..50: note = LE
ccaaaagggggccgtccacacatgatggtatggacggcccccgcacccgg

SEQ ID NO: 36288 - DNA, 50 bp, unidentified
  source 1..50: mol_type = unassigned DNA; note = donor_970cf64
  misc_feature 1..23: note = RE
  misc_feature 24..25: note = Core
  misc_feature 26..50: note = LE
atccagcttgaccaatacggatacttgtcttatgattttggcagttttta

SEQ ID NO: 36289 - DNA, 50 bp, unidentified
  source 1..50: mol_type = unassigned DNA; note = donor_9712cb4
  misc_feature 1..24: note = RE
  misc_feature 25: note = Core
  misc_feature 26..50: note = LE
tgcattcaggcgaaggaccatacatactgagatggtccttcgctttcatc

SEQ ID NO: 36290 - DNA, 50 bp, unidentified
  source 1..50: mol_type = unassigned DNA; note = donor_9719f99
  misc_feature 1..24: note = RE
  misc_feature 25: note = Core
  misc_feature 26..50: note = LE
acttgtttaacgacatagaatctccgcttgtatgctgaggcccgacaggt

SEQ ID NO: 36291 - DNA, 50 bp, unidentified; identical to SEQ ID NO: 31619
  source 1..50: mol_type = unassigned DNA; note = donor_9725171
  misc_feature 1..23: note = RE
  misc_feature 24..25: note = Core
  misc_feature 26..50: note = LE

SEQ ID NO: 36292 - DNA, 50 bp, unidentified
  source 1..50: mol_type = unassigned DNA; note = donor_972ac3c
  misc_feature 1..23: note = RE
  misc_feature 24..25: note = Core
  misc_feature 26..50: note = LE
acttgacaagcctcatagaaagtcttatattaggtttgttgcatgtaatc

SEQ ID NO: 36293 - DNA, 50 bp, unidentified
  source 1..50: mol_type = unassigned DNA; note = donor_9733fe0
  misc_feature 1..22: note = RE
  misc_feature 23..25: note = Core
  misc_feature 26..50: note = LE
cgcttgacattttatagctggtcttgtatattaatattagacagaatcat

SEQ ID NO: 36294 - DNA, 50 bp, unidentified
  source 1..50: mol_type = unassigned DNA; note = donor_9735b72
  misc_feature 1..23: note = RE
  misc_feature 24..25: note = Core
  misc_feature 26..50: note = LE
gggcttgacttttatttgcaggactcctacaatataattacggtgatagg

SEQ ID NO: 36295 - DNA, 50 bp, unidentified; identical to SEQ ID NO: 34544
  source 1..50: mol_type = unassigned DNA; note = donor_9739288
  misc_feature 1..23: note = RE
  misc_feature 24..25: note = Core
  misc_feature 26..50: note = LE

SEQ ID NO: 36296 - DNA, 50 bp, unidentified
  source 1..50: mol_type = unassigned DNA; note = donor_973940f
  misc_feature 1..23: note = RE
  misc_feature 24..25: note = Core
  misc_feature 26..50: note = LE
ggggttgacttctaatagttaatcttgtattatagagtagtagttattag

SEQ ID NO: 36297 - DNA, 50 bp, unidentified
  source 1..50: mol_type = unassigned DNA; note = donor_97433b1
  misc_feature 1..23: note = RE
  misc_feature 24..25: note = Core
  misc_feature 26..50: note = LE
tttgcgcaaggggcggttatacatgattctgtaaccgcccccccggcggc

SEQ ID NO: 36298 - DNA, 50 bp, unidentified
  source 1..50: mol_type = unassigned DNA; note = donor_9743418
  misc_feature 1..22: note = RE
  misc_feature 23..25: note = Core
  misc_feature 26..50: note = LE
cagcgcaggggccatccacagatgatgaggtggatggcccctgtgtccga

SEQ ID NO: 36299 - DNA, 50 bp, unidentified; identical to SEQ ID NO: 30383
  source 1..50: mol_type = unassigned DNA; note = donor_9743f29
  misc_feature 1..23: note = RE
  misc_feature 24..25: note = Core
  misc_feature 26..50: note = LE

SEQ ID NO: 36300 - DNA, 50 bp, unidentified
  source 1..50: mol_type = unassigned DNA; note = donor_9767d23
  misc_feature 1..24: note = RE
  misc_feature 25: note = Core
  misc_feature 26..50: note = LE
tgacacttgacaacaacataggggcgttactttattcctgccccggttat

SEQ ID NO: 36301 - DNA, 50 bp, unidentified
  source 1..50: mol_type = unassigned DNA; note = donor_9774a84
  misc_feature 1..23: note = RE
  misc_feature 24..25: note = Core
  misc_feature 26..50: note = LE
atttactacttgacatagttagtctcgtatgttaaattaatattagttcc

SEQ ID NO: 36302 - DNA, 50 bp, unidentified
  source 1..50: mol_type = unassigned DNA; note = donor_97763e7
  misc_feature 1..22: note = RE
  misc_feature 23..25: note = Core
  misc_feature 26..50: note = LE
atcaacgggcgccatccagacatgatggtgtggacggcgcccgcaccggc

SEQ ID NO: 36303 - DNA, 50 bp, unidentified
  source 1..50: mol_type = unassigned DNA; note = donor_97a1675
  misc_feature 1..23: note = RE
  misc_feature 24..25: note = Core
  misc_feature 26..50: note = LE
acaattgaccggcaagacggtatcttgtatcttgctcgttgtgttggtta

SEQ ID NO: 36304 - DNA, 50 bp, unidentified
  source 1..50: mol_type = unassigned DNA; note = donor_97a82c0
  misc_feature 1..23: note = RE
  misc_feature 24..25: note = Core
  misc_feature 26..50: note = LE
gcaaaatgggaggagaccatatacgatgagatggtctcctcccccttcta

SEQ ID NO: 36305 - DNA, 50 bp, unidentified; identical to SEQ ID NO: 35512
  source 1..50: mol_type = unassigned DNA; note = donor_97a9d5b
  misc_feature 1..23: note = RE
  misc_feature 24..25: note = Core
  misc_feature 26..50: note = LE

SEQ ID NO: 36306 - DNA, 50 bp, unidentified
  source 1..50: mol_type = unassigned DNA; note = donor_97ab92a
  misc_feature 1..23: note = RE
  misc_feature 24..25: note = Core
  misc_feature 26..50: note = LE
tgaccgcggggtcgttccacatatgatggtgtggaacgactccgctcttg

SEQ ID NO: 36307 - DNA, 50 bp, unidentified
  source 1..50: mol_type = unassigned DNA; note = donor_97b0f9e
  misc_feature 1..24: note = RE
  misc_feature 25: note = Core
  misc_feature 26..50: note = LE
tgcaaaacggcggcggaccatacatactggcatggtccgccgccgaaacc

SEQ ID NO: 36308 - DNA, 50 bp, unidentified
  source 1..50: mol_type = unassigned DNA; note = donor_97c1045
  misc_feature 1..24: note = RE
  misc_feature 25: note = Core
  misc_feature 26..50: note = LE
ttgcaaacgggatgggtccatatataatggaatggatccatcccctttta

SEQ ID NO: 36309 - DNA, 50 bp, unidentified
  source 1..50: mol_type = unassigned DNA; note = donor_97c7e1c
  misc_feature 1..23: note = RE
  misc_feature 24..25: note = Core
  misc_feature 26..50: note = LE
gcgcttgacacgaaagacggttacttgtatgttcagccatgaccagtgcg

SEQ ID NO: 36310 - DNA, 50 bp, unidentified
  source 1..50: mol_type = unassigned DNA; note = donor_97cc6b9
  misc_feature 1..24: note = RE
  misc_feature 25: note = Core
  misc_feature 26..50: note = LE
aatatttggtgaagtcataggatacctttagatttgtattataaatatta

SEQ ID NO: 36311 - DNA, 50 bp, unidentified
  source 1..50: mol_type = unassigned DNA; note = donor_97d1689
  misc_feature 1..23: note = RE
  misc_feature 24..25: note = Core
  misc_feature 26..50: note = LE
aggcttgacttttcatagctggtcttgtatgatgtttatagaagcaaaaa

SEQ ID NO: 36312 - DNA, 50 bp, unidentified
  source 1..50: mol_type = unassigned DNA; note = donor_97e5e3a
  misc_feature 1..23: note = RE
  misc_feature 24..25: note = Core
  misc_feature 26..50: note = LE
catgagggtggccaagacggtatcttatgtgttgactctcccccgtaggc

SEQ ID NO: 36313 - DNA, 50 bp, unidentified
  source 1..50: mol_type = unassigned DNA; note = donor_97e9534
  misc_feature 1..24: note = RE
  misc_feature 25: note = Core
  misc_feature 26..50: note = LE
cagcccttgacagcaaagaggactctaatagagactcctgctaggcgttg

SEQ ID NO: 36314 - DNA, 50 bp, unidentified
  source 1..50: mol_type = unassigned DNA; note = donor_97f83eb
  misc_feature 1..23: note = RE
  misc_feature 24..25: note = Core
  misc_feature 26..50: note = LE
aaaccgcttgatcaagacggatacttgtcttatggattggattggctctc

SEQ ID NO: 36315 - DNA, 50 bp, unidentified
  source 1..50: mol_type = unassigned DNA; note = donor_97f9cf9
  misc_feature 1..24: note = RE
  misc_feature 25: note = Core
  misc_feature 26..50: note = LE
tgcaacgcacggcgggtccatacataatgggatggacccgccgtgctccc

SEQ ID NO: 36316 - DNA, 50 bp, unidentified
  source 1..50: mol_type = unassigned DNA; note = donor_9800c86
  misc_feature 1..23: note = RE
  misc_feature 24..25: note = Core
  misc_feature 26..50: note = LE
ccagcttgaaatcaacacagttacttgtatcttggcattttagccgtcgt

SEQ ID NO: 36317 - DNA, 50 bp, unidentified; identical to SEQ ID NO: 35271
  source 1..50: mol_type = unassigned DNA; note = donor_98044b9
  misc_feature 1..21: note = RE
  misc_feature 22..25: note = Core
  misc_feature 26..50: note = LE

SEQ ID NO: 36318 - DNA, 50 bp, unidentified
  source 1..50: mol_type = unassigned DNA; note = donor_9811975
  misc_feature 1..24: note = RE
  misc_feature 25: note = Core
  misc_feature 26..50: note = LE
tggcaagcctggggcacccatgtacaatgggatggacgcccccaccctca

SEQ ID NO: 36319 - DNA, 50 bp, unidentified; identical to SEQ ID NO: 32579
  source 1..50: mol_type = unassigned DNA; note = donor_9813d3c
  misc_feature 1..24: note = RE
  misc_feature 25: note = Core
  misc_feature 26..50: note = LE

SEQ ID NO: 36320 - DNA, 50 bp, unidentified
  source 1..50: mol_type = unassigned DNA; note = donor_98147aa
  misc_feature 1..23: note = RE
  misc_feature 24..25: note = Core
  misc_feature 26..50: note = LE
gcataaacgggggcatccacacgtgatggattggatgcccctcctgccgg

SEQ ID NO: 36321 - DNA, 50 bp, unidentified
  source 1..50: mol_type = unassigned DNA; note = donor_9821588
  misc_feature 1..24: note = RE
  misc_feature 25: note = Core
  misc_feature 26..50: note = LE
cgcttgacagaaaccatagggacacgttatcttttagctggtccttgaaa

SEQ ID NO: 36322 - DNA, 50 bp, unidentified; identical to SEQ ID NO: 32253
  source 1..50: mol_type = unassigned DNA; note = donor_982f06a
  misc_feature 1..23: note = RE
  misc_feature 24..25: note = Core
  misc_feature 26..50: note = LE

SEQ ID NO: 36323 - DNA, 50 bp, unidentified; identical to SEQ ID NO: 30461
  source 1..50: mol_type = unassigned DNA; note = donor_9830376
  misc_feature 1..23: note = RE
  misc_feature 24..25: note = Core
  misc_feature 26..50: note = LE

SEQ ID NO: 36324 - DNA, 50 bp, unidentified
  source 1..50: mol_type = unassigned DNA; note = donor_9830fb7
  misc_feature 1..22: note = RE
  misc_feature 23..25: note = Core
  misc_feature 26..50: note = LE
tattaattttttaatatagttcgttgtatatttaaatttatttttatacc

SEQ ID NO: 36325 - DNA, 50 bp, unidentified
  source 1..50: mol_type = unassigned DNA; note = donor_9841423
  misc_feature 1..23: note = RE
  misc_feature 24..25: note = Core
  misc_feature 26..50: note = LE
aatcagcttgatcaaaacggatacttgtcttatgctgatcctggctcttg

SEQ ID NO: 36326 - DNA, 50 bp, unidentified
  source 1..50: mol_type = unassigned DNA; note = donor_984a25d
  misc_feature 1..24: note = RE
  misc_feature 25: note = Core
  misc_feature 26..50: note = LE
accccccttgacatagaggggagcctacttgttgacttgccctaggaccg

SEQ ID NO: 36327 - DNA, 50 bp, unidentified; identical to SEQ ID NO: 32133
  source 1..50: mol_type = unassigned DNA; note = donor_98567d5
  misc_feature 1..22: note = RE
  misc_feature 23..25: note = Core
  misc_feature 26..50: note = LE

SEQ ID NO: 36328 - DNA, 50 bp, unidentified
  source 1..50: mol_type = unassigned DNA; note = donor_985cb87
  misc_feature 1..22: note = RE
  misc_feature 23..25: note = Core
  misc_feature 26..50: note = LE
tttggctcttgacatagagggtcttatatgttaagattttggtaagctct

SEQ ID NO: 36329 - DNA, 50 bp, unidentified
  source 1..50: mol_type = unassigned DNA; note = donor_9861db8
  misc_feature 1..22: note = RE
  misc_feature 23..25: note = Core
  misc_feature 26..50: note = LE
attgacaaaaccatagggacaccccattacagtattaggtgagtcctcaa

SEQ ID NO: 36330 - DNA, 50 bp, unidentified
  source 1..50: mol_type = unassigned DNA; note = donor_9865669
  misc_feature 1..21: note = RE
  misc_feature 22..25: note = Core
  misc_feature 26..50: note = LE
ctgagtgttgacacaggaagtctcactggtgtacctcttggggttgagag

SEQ ID NO: 36331 - DNA, 50 bp, unidentified
  source 1..50: mol_type = unassigned DNA; note = donor_986f31d
  misc_feature 1..23: note = RE
  misc_feature 24..25: note = Core
  misc_feature 26..50: note = LE
gttgacatgggggagtccacataagataattggactcccccacaccctgg

SEQ ID NO: 36332 - DNA, 50 bp, unidentified
  source 1..50: mol_type = unassigned DNA; note = donor_9881aee
  misc_feature 1..24: note = RE
  misc_feature 25: note = Core
  misc_feature 26..50: note = LE
cttgcagacggggcgggccatacgtatgggatggcccgcccttttcctcg

SEQ ID NO: 36333 - DNA, 50 bp, unidentified
  source 1..50: mol_type = unassigned DNA; note = donor_9888471
  misc_feature 1..23: note = RE
  misc_feature 24..25: note = Core
  misc_feature 26..50: note = LE
tttttcttgacttagcacggtagcttgtatgtaataagaatgtggtggtt

SEQ ID NO: 36334 - DNA, 50 bp, unidentified
  source 1..50: mol_type = unassigned DNA; note = donor_988ad2e
  misc_feature 1..24: note = RE
  misc_feature 25: note = Core
  misc_feature 26..50: note = LE
gcccagttgacaaaactataggaaccattacagtctgaagtgggccaccg

SEQ ID NO: 36335 - DNA, 50 bp, unidentified
  source 1..50: mol_type = unassigned DNA; note = donor_9892e6c
  misc_feature 1..21: note = RE
  misc_feature 22..25: note = Core
  misc_feature 26..50: note = LE
tgcttgacacagtcattgagagtccctaagtttgtaggtgtctggggtca

SEQ ID NO: 36336 - DNA, 50 bp, unidentified
  source 1..50: mol_type = unassigned DNA; note = donor_989a3d0
  misc_feature 1..23: note = RE
  misc_feature 24..25: note = Core
  misc_feature 26..50: note = LE
gcaataaatgaggagtccatatatgatgatatggactcctctcccttctg

SEQ ID NO: 36337 - DNA, 50 bp, unidentified
  source 1..50: mol_type = unassigned DNA; note = donor_989cb31
  misc_feature 1..23: note = RE
  misc_feature 24..25: note = Core
  misc_feature 26..50: note = LE
acccttgactttttatttgcaggctactacaatatacttatggttaatat

SEQ ID NO: 36338 - DNA, 50 bp, unidentified
  source 1..50: mol_type = unassigned DNA; note = donor_98a0f2b
  misc_feature 1..24: note = RE
  misc_feature 25: note = Core
  misc_feature 26..50: note = LE
tgcccgggcggggcaggtcatacataatgggatgaccagccccgccctcc

SEQ ID NO: 36339 - DNA, 50 bp, unidentified
  source 1..50: mol_type = unassigned DNA; note = donor_98a5194
  misc_feature 1..24: note = RE
  misc_feature 25: note = Core
  misc_feature 26..50: note = LE
catgcttgattttttatttgcaggcctgttactatatatttgccccatgt

SEQ ID NO: 36340 - DNA, 50 bp, unidentified
  source 1..50: mol_type = unassigned DNA; note = donor_98a5db0
  misc_feature 1..24: note = RE
  misc_feature 25: note = Core
  misc_feature 26..50: note = LE
aggccggttgacacagaggggagcctacttgtttcattgcctcaggaccg

SEQ ID NO: 36341 - DNA, 50 bp, unidentified
  source 1..50: mol_type = unassigned DNA; note = donor_98a801c
  misc_feature 1..24: note = RE
  misc_feature 25: note = Core
  misc_feature 26..50: note = LE
ggcaattggggaggggtccatatacaatgggatggacccctccccactct

SEQ ID NO: 36342 - DNA, 50 bp, unidentified; identical to SEQ ID NO: 30525
  source 1..50: mol_type = unassigned DNA; note = donor_98bd658
  misc_feature 1..23: note = RE
  misc_feature 24..25: note = Core
  misc_feature 26..50: note = LE

SEQ ID NO: 36343 - DNA, 50 bp, unidentified
  source 1..50: mol_type = unassigned DNA; note = donor_98bee5a
  misc_feature 1..23: note = RE
  misc_feature 24..25: note = Core
  misc_feature 26..50: note = LE
tttcttgactccatatagttagtcttgtataatggaactatagtaattcc

SEQ ID NO: 36344 - DNA, 50 bp, unidentified
  source 1..50: mol_type = unassigned DNA; note = donor_98c5316
  misc_feature 1..23: note = RE
  misc_feature 24..25: note = Core
  misc_feature 26..50: note = LE
ctgcttgacgaccaagacggtatcttgtatcttgagccatggggtggtta

SEQ ID NO: 36345 - DNA, 50 bp, unidentified
  source 1..50: mol_type = unassigned DNA; note = donor_98c7769
  misc_feature 1..23: note = RE
  misc_feature 24..25: note = Core
  misc_feature 26..50: note = LE
tagcttgacgttccttaggaactcatttagccttggtgtggggtccgcgg

SEQ ID NO: 36346 - DNA, 50 bp, unidentified
  source 1..50: mol_type = unassigned DNA; note = donor_98c9783
  misc_feature 1..23: note = RE
  misc_feature 24..25: note = Core
  misc_feature 26..50: note = LE
tgttcggggttgacaaagggtgtctgatgggtctaccttccatcgcagag

SEQ ID NO: 36347 - DNA, 50 bp, unidentified
  source 1..50: mol_type = unassigned DNA; note = donor_98ca738
  misc_feature 1..24: note = RE
  misc_feature 25: note = Core
  misc_feature 26..50: note = LE
gcaaaaaaggaggtgaccatagattaatgagatggtcaccctcacacctt

SEQ ID NO: 36348 - DNA, 50 bp, unidentified; identical to SEQ ID NO: 31193
  source 1..50: mol_type = unassigned DNA; note = donor_98caafc
  misc_feature 1..22: note = RE
  misc_feature 23..25: note = Core
  misc_feature 26..50: note = LE

SEQ ID NO: 36349 - DNA, 50 bp, unidentified
  source 1..50: mol_type = unassigned DNA; note = donor_98ccd45
  misc_feature 1..24: note = RE
  misc_feature 25: note = Core
  misc_feature 26..50: note = LE
tattgacaaaggtcacttcataacataatatgaagtgaccgcctagatta

SEQ ID NO: 36350 - DNA, 50 bp, unidentified
  source 1..50: mol_type = unassigned DNA; note = donor_98d289a
  misc_feature 1..24: note = RE
  misc_feature 25: note = Core
  misc_feature 26..50: note = LE
cgcttgacgaaacacataggggcccgttactattttcacgccccgataat

SEQ ID NO: 36351 - DNA, 50 bp, unidentified
  source 1..50: mol_type = unassigned DNA; note = donor_98e610c
  misc_feature 1..24: note = RE
  misc_feature 25: note = Core
  misc_feature 26..50: note = LE
ttgcaaaaacgggagtggccatagaatgagatggccactccctcctcctg

SEQ ID NO: 36352 - DNA, 50 bp, unidentified
  source 1..50: mol_type = unassigned DNA; note = donor_98e9e1e
  misc_feature 1..23: note = RE
  misc_feature 24..25: note = Core
  misc_feature 26..50: note = LE
cgacttgacaaaaaatatagaaccttgtatgtttcgggtgctggggtgaa

SEQ ID NO: 36353 - DNA, 50 bp, unidentified
  source 1..50: mol_type = unassigned DNA; note = donor_98ea1b6
  misc_feature 1..24: note = RE
  misc_feature 25: note = Core
  misc_feature 26..50: note = LE
gagttgacaacctatataggaacacattacgttgttagcggttccacccc

SEQ ID NO: 36354 - DNA, 50 bp, unidentified
  source 1..50: mol_type = unassigned DNA; note = donor_98ed697
  misc_feature 1..23: note = RE
  misc_feature 24..25: note = Core
  misc_feature 26..50: note = LE
ccgcttgacaactccattaggaatccctaccttgttgatcgggatgagcg

SEQ ID NO: 36355 - DNA, 50 bp, unidentified; identical to SEQ ID NO: 30418
  source 1..50: mol_type = unassigned DNA; note = donor_98f91c5
  misc_feature 1..23: note = RE
  misc_feature 24..25: note = Core
  misc_feature 26..50: note = LE

SEQ ID NO: 36356 - DNA, 50 bp, unidentified; identical to SEQ ID NO: 32137
  source 1..50: mol_type = unassigned DNA; note = donor_98fd0da
  misc_feature 1..21: note = RE
  misc_feature 22..25: note = Core
  misc_feature 26..50: note = LE

SEQ ID NO: 36357 - DNA, 50 bp, unidentified
  source 1..50: mol_type = unassigned DNA; note = donor_99006af
  misc_feature 1..24: note = RE
  misc_feature 25: note = Core
  misc_feature 26..50: note = LE
ttgcaattgggcggggtccatatacaatggtatggaccccgccgcccggc

SEQ ID NO: 36358 - DNA, 50 bp, unidentified
  source 1..50: mol_type = unassigned DNA; note = donor_9902579
  misc_feature 1..23: note = RE
  misc_feature 24..25: note = Core
  misc_feature 26..50: note = LE
cggcttgacaacatcattgggaatccatacctttcatcgtgggttgattc

SEQ ID NO: 36359 - DNA, 50 bp, unidentified; identical to SEQ ID NO: 32148
  source 1..50: mol_type = unassigned DNA; note = donor_990e44e
  misc_feature 1..24: note = RE
  misc_feature 25: note = Core
  misc_feature 26..50: note = LE

SEQ ID NO: 36360 - DNA, 50 bp, unidentified
  source 1..50: mol_type = unassigned DNA; note = donor_990f062
  misc_feature 1..23: note = RE
  misc_feature 24..25: note = Core
  misc_feature 26..50: note = LE
agccttgactttttatttgcaggctactacaatataaatatggttaatat

SEQ ID NO: 36361 - DNA, 50 bp, unidentified
  source 1..50: mol_type = unassigned DNA; note = donor_991004a
  misc_feature 1..23: note = RE
  misc_feature 24..25: note = Core
  misc_feature 26..50: note = LE
tcgcttgacggacgtcacggtatcttgtacgatctcgactcatcgggtag

SEQ ID NO: 36362 - DNA, 50 bp, unidentified
  source 1..50: mol_type = unassigned DNA; note = donor_9915b6f
  misc_feature 1..22: note = RE
  misc_feature 23..25: note = Core
  misc_feature 26..50: note = LE
acacttgcatgttaacacagaatctcctatgtttgtgtcaagcaaatgta

SEQ ID NO: 36363 - DNA, 50 bp, unidentified
  source 1..50: mol_type = unassigned DNA; note = donor_9916947
  misc_feature 1..24: note = RE
  misc_feature 25: note = Core
  misc_feature 26..50: note = LE
ctgcttgacaaagcataggagcgtctgtgaggatcgcgttcgcagcctga

SEQ ID NO: 36364 - DNA, 50 bp, unidentified
  source 1..50: mol_type = unassigned DNA; note = donor_9919a0a
  misc_feature 1..22: note = RE
  misc_feature 23..25: note = Core
  misc_feature 26..50: note = LE
cacaacggacggcaaccacagaagatggggtggttgccgtcctccccgaa

SEQ ID NO: 36365 - DNA, 50 bp, unidentified; identical to SEQ ID NO: 32995
  source 1..50: mol_type = unassigned DNA; note = donor_993cc32
  misc_feature 1..23: note = RE
  misc_feature 24..25: note = Core
  misc_feature 26..50: note = LE

SEQ ID NO: 36366 - DNA, 50 bp, unidentified
  source 1..50: mol_type = unassigned DNA; note = donor_993f75e
  misc_feature 1..24: note = RE
  misc_feature 25: note = Core
  misc_feature 26..50: note = LE
gacgcttgacgaaagacataggggccccccccgttactatcttcacgccc

SEQ ID NO: 36367 - DNA, 50 bp, unidentified
  source 1..50: mol_type = unassigned DNA; note = donor_993ffb0
  misc_feature 1..24: note = RE
  misc_feature 25: note = Core
  misc_feature 26..50: note = LE
ttgcgagaagggggtcgtccacatatgttggggtggacggcccccgcacg

SEQ ID NO: 36368 - DNA, 50 bp, unidentified
  source 1..50: mol_type = unassigned DNA; note = donor_9940866
  misc_feature 1..23: note = RE
  misc_feature 24..25: note = Core
  misc_feature 26..50: note = LE
ggtgttgactttgattagcaggtctattacaataagattggatggaaccc

SEQ ID NO: 36369 - DNA, 50 bp, unidentified
  source 1..50: mol_type = unassigned DNA; note = donor_9954466
  misc_feature 1..23: note = RE
  misc_feature 24..25: note = Core
  misc_feature 26..50: note = LE
ttacttgaattttatatagttagctggtatattgtaattgacccatctaa

SEQ ID NO: 36370 - DNA, 50 bp, unidentified
  source 1..50: mol_type = unassigned DNA; note = donor_9954a54
  misc_feature 1..24: note = RE
  misc_feature 25: note = Core
  misc_feature 26..50: note = LE
cccgctattgacacagaggggtgcctacttgttgactggtgttacggccg

SEQ ID NO: 36371 - DNA, 50 bp, unidentified
  source 1..50: mol_type = unassigned DNA; note = donor_995a692
  misc_feature 1..23: note = RE
  misc_feature 24..25: note = Core
  misc_feature 26..50: note = LE
tgcaaaaacgggagtggtcatagatgatatgaccactccctctttcaacg

SEQ ID NO: 36372 - DNA, 50 bp, unidentified
  source 1..50: mol_type = unassigned DNA; note = donor_9968492
  misc_feature 1..23: note = RE
  misc_feature 24..25: note = Core
  misc_feature 26..50: note = LE
ttgcaaacggagtgggtccatatataatggtatggacccactccacttcc

SEQ ID NO: 36373 - DNA, 50 bp, unidentified; identical to SEQ ID NO: 31204
  source 1..50: mol_type = unassigned DNA; note = donor_997ce60
  misc_feature 1..22: note = RE
  misc_feature 23..25: note = Core
  misc_feature 26..50: note = LE

SEQ ID NO: 36374 - DNA, 50 bp, unidentified
  source 1..50: mol_type = unassigned DNA; note = donor_9984ea5
  misc_feature 1..23: note = RE
  misc_feature 24..25: note = Core
  misc_feature 26..50: note = LE
cttgccatggggccgtccacatatgatgatgtggacggcctctcctcaac

SEQ ID NO: 36375 - DNA, 50 bp, unidentified
  source 1..50: mol_type = unassigned DNA; note = donor_998dd1d
  misc_feature 1..22: note = RE
  misc_feature 23..25: note = Core
  misc_feature 26..50: note = LE
gcaatcggggggcgtccatagatgatggtatggacgccccctgtcacggc

SEQ ID NO: 36376 - DNA, 50 bp, unidentified
  source 1..50: mol_type = unassigned DNA; note = donor_99a5ed3
  misc_feature 1..23: note = RE
  misc_feature 24..25: note = Core
  misc_feature 26..50: note = LE
gcttgaaaataccagcgggatgttctaccatcggatttgcaggttagcgg

SEQ ID NO: 36377 - DNA, 50 bp, unidentified
  source 1..50: mol_type = unassigned DNA; note = donor_99a818f
  misc_feature 1..23: note = RE
  misc_feature 24..25: note = Core
  misc_feature 26..50: note = LE
gcttgacacaccacataggggcaccgttaccttgttggtggtcccgggtg

SEQ ID NO: 36378 - DNA, 50 bp, unidentified
  source 1..50: mol_type = unassigned DNA; note = donor_99aa16a
  misc_feature 1..23: note = RE
  misc_feature 24..25: note = Core
  misc_feature 26..50: note = LE
gtgcttgacttttcatagttggtcttgtatgataattacagaagcaaaat

SEQ ID NO: 36379 - DNA, 50 bp, unidentified; identical to SEQ ID NO: 33475
  source 1..50: mol_type = unassigned DNA; note = donor_99b10d3
  misc_feature 1..23: note = RE
  misc_feature 24..25: note = Core
  misc_feature 26..50: note = LE

SEQ ID NO: 36380 - DNA, 50 bp, unidentified
  source 1..50: mol_type = unassigned DNA; note = donor_99b2931
  misc_feature 1..23: note = RE
  misc_feature 24..25: note = Core
  misc_feature 26..50: note = LE
tgcattatcagggaggtccatacataatggtatggacctcccctatgtac

SEQ ID NO: 36381 - DNA, 50 bp, unidentified
  source 1..50: mol_type = unassigned DNA; note = donor_99b3aea
  misc_feature 1..24: note = RE
  misc_feature 25: note = Core
  misc_feature 26..50: note = LE
ttgcaaaaaggcggggtccatatacaatggtatggaccccgccgccgaaa

SEQ ID NO: 36382 - DNA, 50 bp, unidentified
  source 1..50: mol_type = unassigned DNA; note = donor_99ba0bb
  misc_feature 1..23: note = RE
  misc_feature 24..25: note = Core
  misc_feature 26..50: note = LE
gggcttgacttttatttgcaggtctgttacaataataatagtcggtaaaa

SEQ ID NO: 36383 - DNA, 50 bp, unidentified
  source 1..50: mol_type = unassigned DNA; note = donor_99bf5ea
  misc_feature 1..24: note = RE
  misc_feature 25: note = Core
  misc_feature 26..50: note = LE
tttggcatagggggtgtccatgtacaatgcgatggacgcccccacccgta

SEQ ID NO: 36384 - DNA, 50 bp, unidentified
  source 1..50: mol_type = unassigned DNA; note = donor_99cb20d
  misc_feature 1..22: note = RE
  misc_feature 23..25: note = Core
  misc_feature 26..50: note = LE
caggccgggggccatccacacatgatggggtggatggccccctcacggca

SEQ ID NO: 36385 - DNA, 50 bp, unidentified
  source 1..50: mol_type = unassigned DNA; note = donor_99d206d
  misc_feature 1..22: note = RE
  misc_feature 23..25: note = Core
  misc_feature 26..50: note = LE
aagtttgtttttaagcacagttcatcctatgtttgtaaataggatttatt

SEQ ID NO: 36386 - DNA, 50 bp, unidentified
  source 1..50: mol_type = unassigned DNA; note = donor_99db162
  misc_feature 1..23: note = RE
  misc_feature 24..25: note = Core
  misc_feature 26..50: note = LE
gcatcgcaggggccgtccacacatgatgtcgtggacgacccctgcagcag

SEQ ID NO: 36387 - DNA, 50 bp, unidentified; identical to SEQ ID NO: 34183
  source 1..50: mol_type = unassigned DNA; note = donor_99e2ba2
  misc_feature 1..24: note = RE
  misc_feature 25: note = Core
  misc_feature 26..50: note = LE

SEQ ID NO: 36388 - DNA, 50 bp, unidentified
  source 1..50: mol_type = unassigned DNA; note = donor_99e4089
  misc_feature 1..24: note = RE
  misc_feature 25: note = Core
  misc_feature 26..50: note = LE
gaccggttgacaacagaggggagcctactagacacttctctgcaggatcg

SEQ ID NO: 36389 - DNA, 50 bp, unidentified
  source 1..50: mol_type = unassigned DNA; note = donor_99e5b07
  misc_feature 1..23: note = RE
  misc_feature 24..25: note = Core
  misc_feature 26..50: note = LE
cttattgacttagtaccattggactcgtataataagttttgcaaagattt

SEQ ID NO: 36390 - DNA, 50 bp, unidentified
  source 1..50: mol_type = unassigned DNA; note = donor_99ede8c
  misc_feature 1..23: note = RE
  misc_feature 24..25: note = Core
  misc_feature 26..50: note = LE
aattgaatccattaagacagttgcttgtgtcttgagtcaggattagactg

SEQ ID NO: 36391 - DNA, 50 bp, unidentified
  source 1..50: mol_type = unassigned DNA; note = donor_99f616d
  misc_feature 1..22: note = RE
  misc_feature 23..25: note = Core
  misc_feature 26..50: note = LE
catcaagggcggcaaccacagaagatggggtggttgccgccttccccaga

SEQ ID NO: 36392 - DNA, 50 bp, unidentified
  source 1..50: mol_type = unassigned DNA; note = donor_99fec8a
  misc_feature 1..23: note = RE
  misc_feature 24..25: note = Core
  misc_feature 26..50: note = LE
agacttgacttttaatagttagtcttgtattataaagtagtagtttttaa

SEQ ID NO: 36393 - DNA, 50 bp, unidentified
  source 1..50: mol_type = unassigned DNA; note = donor_9a12096
  misc_feature 1..22: note = RE
  misc_feature 23..25: note = Core
  misc_feature 26..50: note = LE
ggcttgacttttaatagttagtctcgtataataaaatagtagtatttata

SEQ ID NO: 36394 - DNA, 50 bp, unidentified; identical to SEQ ID NO: 33070
  source 1..50: mol_type = unassigned DNA; note = donor_9a12e94
  misc_feature 1..23: note = RE
  misc_feature 24..25: note = Core
  misc_feature 26..50: note = LE

SEQ ID NO: 36395 - DNA, 50 bp, unidentified
  source 1..50: mol_type = unassigned DNA; note = donor_9a15a00
  misc_feature 1..24: note = RE
  misc_feature 25: note = Core
  misc_feature 26..50: note = LE
tgcagataaggagcagaccatacataatgggatggtctgctccatctacc

SEQ ID NO: 36396 - DNA, 50 bp, unidentified
  source 1..50: mol_type = unassigned DNA; note = donor_9a18482
  misc_feature 1..24: note = RE
  misc_feature 25: note = Core
  misc_feature 26..50: note = LE
tgcaatccggcggcggaccatacatactggaatggtccgccgcttgttcc

SEQ ID NO: 36397 - DNA, 50 bp, unidentified; identical to SEQ ID NO: 36150
  source 1..50: mol_type = unassigned DNA; note = donor_9a1a23b
  misc_feature 1..24: note = RE
  misc_feature 25: note = Core
  misc_feature 26..50: note = LE

SEQ ID NO: 36398 - DNA, 50 bp, unidentified
  source 1..50: mol_type = unassigned DNA; note = donor_9a1a623
  misc_feature 1..22: note = RE
  misc_feature 23..25: note = Core
  misc_feature 26..50: note = LE
gttgacaatctacatagggacacccgttaccttgatccagtccccgtacc

SEQ ID NO: 36399 - DNA, 50 bp, unidentified; identical to SEQ ID NO: 32119
  source 1..50: mol_type = unassigned DNA; note = donor_9a1cabe
  misc_feature 1..23: note = RE
  misc_feature 24..25: note = Core
  misc_feature 26..50: note = LE

SEQ ID NO: 36400 - DNA, 50 bp, unidentified
  source 1..50: mol_type = unassigned DNA; note = donor_9a2377f
  misc_feature 1..24: note = RE
  misc_feature 25: note = Core
  misc_feature 26..50: note = LE
aatatttgtttaagtcataggatactttagattttttttattgataaatt

SEQ ID NO: 36401 - DNA, 50 bp, unidentified
  source 1..50: mol_type = unassigned DNA; note = donor_9a24006
  misc_feature 1..23: note = RE
  misc_feature 24..25: note = Core
  misc_feature 26..50: note = LE
tagcttgacagccaacagagtgtcttgtatgttggtttcgcctgctcagt

SEQ ID NO: 36402 - DNA, 50 bp, unidentified
  source 1..50: mol_type = unassigned DNA; note = donor_9a26c6b
  misc_feature 1..23: note = RE
  misc_feature 24..25: note = Core
  misc_feature 26..50: note = LE
tgcagaaaagggggtaaccatagatgaaatggttacccccgccgcccctt

SEQ ID NO: 36403 - DNA, 50 bp, unidentified
  source 1..50: mol_type = unassigned DNA; note = donor_9a29c5f
  misc_feature 1..23: note = RE
  misc_feature 24..25: note = Core
  misc_feature 26..50: note = LE
aagcattcgcatgaacacagttgcctgtgtgttggttccggtgtatggtt

SEQ ID NO: 36404 - DNA, 50 bp, unidentified
  source 1..50: mol_type = unassigned DNA; note = donor_9a2f331
  misc_feature 1..23: note = RE
  misc_feature 24..25: note = Core
  misc_feature 26..50: note = LE
cttcttgacaaaacttagcaggtctattacaataattattggttggaagt

SEQ ID NO: 36405 - DNA, 50 bp, unidentified
  source 1..50: mol_type = unassigned DNA; note = donor_9a35b01
  misc_feature 1..23: note = RE
  misc_feature 24..25: note = Core
  misc_feature 26..50: note = LE
cataggcgtcatcaagacggtatcttatgtcttggagccagtcagtatgt

SEQ ID NO: 36406 - DNA, 50 bp, unidentified
  source 1..50: mol_type = unassigned DNA; note = donor_9a37e99
  misc_feature 1..23: note = RE
  misc_feature 24..25: note = Core
  misc_feature 26..50: note = LE
aaaattgaatttcaagagagaatcttgtatcttgtttgcatctcccggat

SEQ ID NO: 36407 - DNA, 50 bp, unidentified
  source 1..50: mol_type = unassigned DNA; note = donor_9a3cb90
  misc_feature 1..22: note = RE
  misc_feature 23..25: note = Core
  misc_feature 26..50: note = LE
cgcagacggggcgggccatacgttatggaatggcccgcccctccgaccgg

SEQ ID NO: 36408 - DNA, 50 bp, unidentified
  source 1..50: mol_type = unassigned DNA; note = donor_9a49638
  misc_feature 1..22: note = RE
  misc_feature 23..25: note = Core
  misc_feature 26..50: note = LE
ccctgatccttcacaacagttgcttgtgttttggtttcggactacaatcg

SEQ ID NO: 36409 - DNA, 50 bp, unidentified
  source 1..50: mol_type = unassigned DNA; note = donor_9a4b259
  misc_feature 1..23: note = RE
  misc_feature 24..25: note = Core
  misc_feature 26..50: note = LE
cggcttgacatcagcattgggaagctctaccttcttgaacgggttggtcc

SEQ ID NO: 36410 - DNA, 50 bp, unidentified; identical to SEQ ID NO: 30993
  source 1..50: mol_type = unassigned DNA; note = donor_9a5879c
  misc_feature 1..24: note = RE
  misc_feature 25: note = Core
  misc_feature 26..50: note = LE

SEQ ID NO: 36411 - DNA, 50 bp, unidentified
  source 1..50: mol_type = unassigned DNA; note = donor_9a5b5c5
  misc_feature 1..24: note = RE
  misc_feature 25: note = Core
  misc_feature 26..50: note = LE
cttggcatagggggcgtccatgtacaatgggatggacgcccccacccgtc

SEQ ID NO: 36412 - DNA, 50 bp, unidentified
  source 1..50: mol_type = unassigned DNA; note = donor_9a5f3e3
  misc_feature 1..23: note = RE
  misc_feature 24..25: note = Core
  misc_feature 26..50: note = LE
tggcttgactgccaagacggttgcttgtatctttatggttcggaccggct

SEQ ID NO: 36413 - DNA, 50 bp, unidentified
  source 1..50: mol_type = unassigned DNA; note = donor_9a6d859
  misc_feature 1..24: note = RE
  misc_feature 25: note = Core
  misc_feature 26..50: note = LE
tgcagtcagatggcggaccatacataatgagatggtccgccgcttgatcc

SEQ ID NO: 36414 - DNA, 50 bp, unidentified
  source 1..50: mol_type = unassigned DNA; note = donor_9a809d4
  misc_feature 1..22: note = RE
  misc_feature 23..25: note = Core
  misc_feature 26..50: note = LE
gacagttgcacccgtgggatatctaatgggtatcgaccacctcgttctgt

SEQ ID NO: 36415 - DNA, 50 bp, unidentified
  source 1..50: mol_type = unassigned DNA; note = donor_9a824c0
  misc_feature 1..24: note = RE
  misc_feature 25: note = Core
  misc_feature 26..50: note = LE
tcttgcagacgggcgggccatacgtatggaatggcccgccctttcaccca

SEQ ID NO: 36416 - DNA, 50 bp, unidentified
  source 1..50: mol_type = unassigned DNA; note = donor_9a82df6
  misc_feature 1..22: note = RE
  misc_feature 23..25: note = Core
  misc_feature 26..50: note = LE
ttacttgacttattaatagttatcttgtatactctaaatagtaaattata

SEQ ID NO: 36417 - DNA, 50 bp, unidentified; identical to SEQ ID NO: 30815
  source 1..50: mol_type = unassigned DNA; note = donor_9a8baf3
  misc_feature 1..22: note = RE
  misc_feature 23..25: note = Core
  misc_feature 26..50: note = LE

SEQ ID NO: 36418 - DNA, 50 bp, unidentified
  source 1..50: mol_type = unassigned DNA; note = donor_9a97b46
  misc_feature 1..23: note = RE
  misc_feature 24..25: note = Core
  misc_feature 26..50: note = LE
ggcccgcgggggcgttccacatatgatgaggtggaacgcccccgctcgtg

SEQ ID NO: 36419 - DNA, 50 bp, unidentified
  source 1..50: mol_type = unassigned DNA; note = donor_9a9e9b2
  misc_feature 1..22: note = RE
  misc_feature 23..25: note = Core
  misc_feature 26..50: note = LE
caatgcagggggcatccatagatgatggaatggatgccccctgcaccggc

SEQ ID NO: 36420 - DNA, 50 bp, unidentified
  source 1..50: mol_type = unassigned DNA; note = donor_9a9e9fc
  misc_feature 1..23: note = RE
  misc_feature 24..25: note = Core
  misc_feature 26..50: note = LE
tgacttgacttttaatagttagtcttgtattatagagtagtagttattag

SEQ ID NO: 36421 - DNA, 50 bp, unidentified
  source 1..50: mol_type = unassigned DNA; note = donor_9aa53c9
  misc_feature 1..24: note = RE
  misc_feature 25: note = Core
  misc_feature 26..50: note = LE
tgcacaatgaggggtgtccatagataatgaaatggacacccctcccctaa

SEQ ID NO: 36422 - DNA, 50 bp, unidentified; identical to SEQ ID NO: 30818
  source 1..50: mol_type = unassigned DNA; note = donor_9aa5639
  misc_feature 1..24: note = RE
  misc_feature 25: note = Core
  misc_feature 26..50: note = LE

SEQ ID NO: 36423 - DNA, 50 bp, unidentified
  source 1..50: mol_type = unassigned DNA; note = donor_9aa7c6d
  misc_feature 1..23: note = RE
  misc_feature 24..25: note = Core
  misc_feature 26..50: note = LE
tgtttgatttggagagatggtatcttgtatctctccaagacaatgatata

SEQ ID NO: 36424 - DNA, 50 bp, unidentified; identical to SEQ ID NO: 32610
  source 1..50: mol_type = unassigned DNA; note = donor_9ab5f1b
  misc_feature 1..23: note = RE
  misc_feature 24..25: note = Core
  misc_feature 26..50: note = LE

SEQ ID NO: 36425 - DNA, 50 bp, unidentified
  source 1..50: mol_type = unassigned DNA; note = donor_9ab8861
  misc_feature 1..23: note = RE
  misc_feature 24..25: note = Core
  misc_feature 26..50: note = LE
gacccgcttgaccatcacggatacttgtcttatgacgtccgtggccactg

SEQ ID NO: 36426 - DNA, 50 bp, unidentified; identical to SEQ ID NO: 32245
  source 1..50: mol_type = unassigned DNA; note = donor_9abdce6
  misc_feature 1..24: note = RE
  misc_feature 25: note = Core
  misc_feature 26..50: note = LE

SEQ ID NO: 36427 - DNA, 50 bp, unidentified
  source 1..50: mol_type = unassigned DNA; note = donor_9acd098
  misc_feature 1..21: note = RE
  misc_feature 22..25: note = Core
  misc_feature 26..50: note = LE
caacggcttgacacagggcttctcactggtgcaccatccttaggtcactg

SEQ ID NO: 36428 - DNA, 50 bp, unidentified
  source 1..50: mol_type = unassigned DNA; note = donor_9ae8896
  misc_feature 1..23: note = RE
  misc_feature 24..25: note = Core
  misc_feature 26..50: note = LE
tggtgataggagagagatggtatcttgtatctctctggataagctgatta

SEQ ID NO: 36429 - DNA, 50 bp, unidentified
  source 1..50: mol_type = unassigned DNA; note = donor_9af9f86
  misc_feature 1..22: note = RE
  misc_feature 23..25: note = Core
  misc_feature 26..50: note = LE
accgcaacccgccgaacagagaagatggggtattcggctggctggcgtgc

SEQ ID NO: 36430 - DNA, 50 bp, unidentified
  source 1..50: mol_type = unassigned DNA; note = donor_9afdd14
  misc_feature 1..23: note = RE
  misc_feature 24..25: note = Core
  misc_feature 26..50: note = LE
aaccgacctgcttgacacggttgcttgtatgtcgcatcattgtctccgga

SEQ ID NO: 36431 - DNA, 50 bp, unidentified
  source 1..50: mol_type = unassigned DNA; note = donor_9b0348f
  misc_feature 1..23: note = RE
  misc_feature 24..25: note = Core
  misc_feature 26..50: note = LE
tgccaatcggggccgtccacatatgatggtgtggacggccccaccctaac

SEQ ID NO: 36432 - DNA, 50 bp, unidentified
  source 1..50: mol_type = unassigned DNA; note = donor_9b05ab8
  misc_feature 1..24: note = RE
  misc_feature 25: note = Core
  misc_feature 26..50: note = LE
tgcaccgcgggcgccgtccatacatgatgtggtggacggcgcccgttccc

SEQ ID NO: 36433 - DNA, 50 bp, unidentified
  source 1..50: mol_type = unassigned DNA; note = donor_9b24117
  misc_feature 1..22: note = RE
  misc_feature 23..25: note = Core
  misc_feature 26..50: note = LE
atgcttgacaaacattagctggtttcgtattatcaggttagccagttatt

SEQ ID NO: 36434 - DNA, 50 bp, unidentified
  source 1..50: mol_type = unassigned DNA; note = donor_9b2bb49
  misc_feature 1..23: note = RE
  misc_feature 24..25: note = Core
  misc_feature 26..50: note = LE
accgaaaggtttattactgaacgcctatataggttttattagctctagag

SEQ ID NO: 36435 - DNA, 50 bp, unidentified
  source 1..50: mol_type = unassigned DNA; note = donor_9b2def4
  misc_feature 1..24: note = RE
  misc_feature 25: note = Core
  misc_feature 26..50: note = LE
tgcctcttgacgacagaggggtgcctactagacgattgtcggtagggccg

SEQ ID NO: 36436 - DNA, 50 bp, unidentified
  source 1..50: mol_type = unassigned DNA; note = donor_9b2e5ac
  misc_feature 1..23: note = RE
  misc_feature 24..25: note = Core
  misc_feature 26..50: note = LE
cttgcaacgcccgcgattagacgacatggggtaatcgcgggagcggtact

SEQ ID NO: 36437 - DNA, 50 bp, unidentified
  source 1..50: mol_type = unassigned DNA; note = donor_9b3e68e
  misc_feature 1..24: note = RE
  misc_feature 25: note = Core
  misc_feature 26..50: note = LE
atctcttgacgtcaataggagcatcagtgataattggagtgtggtcctgc

SEQ ID NO: 36438 - DNA, 50 bp, unidentified; identical to SEQ ID NO: 31800
  source 1..50: mol_type = unassigned DNA; note = donor_9b4068e
  misc_feature 1..22: note = RE
  misc_feature 23..25: note = Core
  misc_feature 26..50: note = LE

SEQ ID NO: 36439 - DNA, 50 bp, unidentified; identical to SEQ ID NO: 35726
  source 1..50: mol_type = unassigned DNA; note = donor_9b423bc
  misc_feature 1..23: note = RE
  misc_feature 24..25: note = Core
  misc_feature 26..50: note = LE

SEQ ID NO: 36440 - DNA, 50 bp, unidentified
  source 1..50: mol_type = unassigned DNA; note = donor_9b4b954
  misc_feature 1..23: note = RE
  misc_feature 24..25: note = Core
  misc_feature 26..50: note = LE
aggctgattagaagagatggtatcttgtatctcttcttgatgagtgttta

SEQ ID NO: 36441 - DNA, 50 bp, unidentified
  source 1..50: mol_type = unassigned DNA; note = donor_9b550c9
  misc_feature 1..23: note = RE
  misc_feature 24..25: note = Core
  misc_feature 26..50: note = LE
aggccgccgcgctctaatggttgcttgtaataacaaaaacgattatggtg

SEQ ID NO: 36442 - DNA, 50 bp, unidentified
  source 1..50: mol_type = unassigned DNA; note = donor_9b5abad
  misc_feature 1..23: note = RE
  misc_feature 24..25: note = Core
  misc_feature 26..50: note = LE
cggcttgacatcacgattgggaagtcctacctttcaagggtggttgctct

SEQ ID NO: 36443 - DNA, 50 bp, unidentified
  source 1..50: mol_type = unassigned DNA; note = donor_9b5cf91
  misc_feature 1..24: note = RE
  misc_feature 25: note = Core
  misc_feature 26..50: note = LE
ccctattgactttttatttgcaggcctgttactatatatttggttgagga

SEQ ID NO: 36444 - DNA, 50 bp, unidentified; identical to SEQ ID NO: 35877
  source 1..50: mol_type = unassigned DNA; note = donor_9b60091
  misc_feature 1..23: note = RE
  misc_feature 24..25: note = Core
  misc_feature 26..50: note = LE

SEQ ID NO: 36445 - DNA, 50 bp, unidentified
  source 1..50: mol_type = unassigned DNA; note = donor_9b61760
  misc_feature 1..23: note = RE
  misc_feature 24..25: note = Core
  misc_feature 26..50: note = LE
gggcttgacatttaatagttagtctcgtataatataagagtagtagtttt

SEQ ID NO: 36446 - DNA, 50 bp, unidentified
  source 1..50: mol_type = unassigned DNA; note = donor_9b78c6b
  misc_feature 1..22: note = RE
  misc_feature 23..25: note = Core
  misc_feature 26..50: note = LE
ctattgactttttatagttggtcttgtataatgtatttaggtttttataa

SEQ ID NO: 36447 - DNA, 50 bp, unidentified
  source 1..50: mol_type = unassigned DNA; note = donor_9b7ba16
  misc_feature 1..24: note = RE
  misc_feature 25: note = Core
  misc_feature 26..50: note = LE
ttgcaaaaaggcggggtccatatacaatggtatggacctcgccaccctca

SEQ ID NO: 36448 - DNA, 50 bp, unidentified
  source 1..50: mol_type = unassigned DNA; note = donor_9b826a5
  misc_feature 1..23: note = RE
  misc_feature 24..25: note = Core
  misc_feature 26..50: note = LE
cttgacaaaaaaagccccatacaagattctatggggcgagcggcgaggag

SEQ ID NO: 36449 - DNA, 50 bp, unidentified
  source 1..50: mol_type = unassigned DNA; note = donor_9b82d14
  misc_feature 1..23: note = RE
  misc_feature 24..25: note = Core
  misc_feature 26..50: note = LE
gaacttgacgggaaccatagaaccttgtatggtttagctcccatcaacca

SEQ ID NO: 36450 - DNA, 50 bp, unidentified
  source 1..50: mol_type = unassigned DNA; note = donor_9b91672
  misc_feature 1..23: note = RE
  misc_feature 24..25: note = Core
  misc_feature 26..50: note = LE
gcattcaccggggcgtccacacacgatggggtggacgcccctccgacggc

SEQ ID NO: 36451 - DNA, 50 bp, unidentified; identical to SEQ ID NO: 32423
  source 1..50: mol_type = unassigned DNA; note = donor_9ba5de8
  misc_feature 1..24: note = RE
  misc_feature 25: note = Core
  misc_feature 26..50: note = LE

SEQ ID NO: 36452 - DNA, 50 bp, unidentified
  source 1..50: mol_type = unassigned DNA; note = donor_9ba7660
  misc_feature 1..23: note = RE
  misc_feature 24..25: note = Core
  misc_feature 26..50: note = LE
gacaaagccgacgcgattagacgacatggggtaatcgcgggagcgagtcg

SEQ ID NO: 36453 - DNA, 50 bp, unidentified
  source 1..50: mol_type = unassigned DNA; note = donor_9bac376
  misc_feature 1..23: note = RE
  misc_feature 24..25: note = Core
  misc_feature 26..50: note = LE
ccccttgactttttatagttagtctcgtataatatagtcatagcttaggt

SEQ ID NO: 36454 - DNA, 50 bp, unidentified
  source 1..50: mol_type = unassigned DNA; note = donor_9bad4d8
  misc_feature 1..23: note = RE
  misc_feature 24..25: note = Core
  misc_feature 26..50: note = LE
ctgcgcctgaatcaagacagttgcttatctcttgacgatctgccagatta

SEQ ID NO: 36455 - DNA, 50 bp, unidentified
  source 1..50: mol_type = unassigned DNA; note = donor_9bb44ca
  misc_feature 1..24: note = RE
  misc_feature 25: note = Core
  misc_feature 26..50: note = LE
ttgacggcgggggatgcccttgtagaatgaaagggacatccccatcctga

SEQ ID NO: 36456 - DNA, 50 bp, unidentified
  source 1..50: mol_type = unassigned DNA; note = donor_9bb92be
  misc_feature 1..23: note = RE
  misc_feature 24..25: note = Core
  misc_feature 26..50: note = LE
gcgtcttacggggcgtccacagatgatggggtggacgcccccgacggcat

SEQ ID NO: 36457 - DNA, 50 bp, unidentified
  source 1..50: mol_type = unassigned DNA; note = donor_9bbaf6f
  misc_feature 1..23: note = RE
  misc_feature 24..25: note = Core
  misc_feature 26..50: note = LE
cttgacttatattaaatagttggctaatatatatatgtagtcctcagata

SEQ ID NO: 36458 - DNA, 50 bp, unidentified
  source 1..50: mol_type = unassigned DNA; note = donor_9bbbe31
  misc_feature 1..24: note = RE
  misc_feature 25: note = Core
  misc_feature 26..50: note = LE
ttgcaaaaaagggggtgaccatagaatgagatggtcacccccaccctgta

SEQ ID NO: 36459 - DNA, 50 bp, unidentified; identical to SEQ ID NO: 30492
  source 1..50: mol_type = unassigned DNA; note = donor_9bcab93
  misc_feature 1..24: note = RE
  misc_feature 25: note = Core
  misc_feature 26..50: note = LE

SEQ ID NO: 36460 - DNA, 50 bp, unidentified
  source 1..50: mol_type = unassigned DNA; note = donor_9bdcb75
  misc_feature 1..24: note = RE
  misc_feature 25: note = Core
  misc_feature 26..50: note = LE
tggcaaacaaggggcgtccatgtacaatggaatggacgcccctactcgta

SEQ ID NO: 36461 - DNA, 50 bp, unidentified
  source 1..50: mol_type = unassigned DNA; note = donor_9bdcc32
  misc_feature 1..24: note = RE
  misc_feature 25: note = Core
  misc_feature 26..50: note = LE
tgcccaaaaggcggtgtccatgtacaatgggatggacacccccacccaaa

SEQ ID NO: 36462 - DNA, 50 bp, unidentified
  source 1..50: mol_type = unassigned DNA; note = donor_9be9245
  misc_feature 1..23: note = RE
  misc_feature 24..25: note = Core
  misc_feature 26..50: note = LE
agccgcctagcttttaatggttgcttgtaatagcgaaatcgaatatcttc

SEQ ID NO: 36463 - DNA, 50 bp, unidentified
  source 1..50: mol_type = unassigned DNA; note = donor_9bec00c
  misc_feature 1..23: note = RE
  misc_feature 24..25: note = Core
  misc_feature 26..50: note = LE
aacccgcttgatcaaaacggatacttgtcttataaacttcttgcttcttc

SEQ ID NO: 36464 - DNA, 50 bp, unidentified
  source 1..50: mol_type = unassigned DNA; note = donor_9bf4076
  misc_feature 1..23: note = RE
  misc_feature 24..25: note = Core
  misc_feature 26..50: note = LE
gaaagtgggggcgagtccatacataattaaatggactcgcccaagccgag

SEQ ID NO: 36465 - DNA, 50 bp, unidentified
  source 1..50: mol_type = unassigned DNA; note = donor_9bf4a67
  misc_feature 1..24: note = RE
  misc_feature 25: note = Core
  misc_feature 26..50: note = LE
ttggcaaaccggggcgaccatgtataatggaatggtcgcccctctcctaa

SEQ ID NO: 36466 - DNA, 50 bp, unidentified
  source 1..50: mol_type = unassigned DNA; note = donor_9bf5724
  misc_feature 1..24: note = RE
  misc_feature 25: note = Core
  misc_feature 26..50: note = LE
ttgagcttgacttttaatagttaatgtattatagagtagtagtttttaga

SEQ ID NO: 36467 - DNA, 50 bp, unidentified
  source 1..50: mol_type = unassigned DNA; note = donor_9c0020d
  misc_feature 1..23: note = RE
  misc_feature 24..25: note = Core
  misc_feature 26..50: note = LE
atccttgacagttcatagttggtcttgtatgatgattacgtcctgagtag

SEQ ID NO: 36468 - DNA, 50 bp, unidentified; identical to SEQ ID NO: 30803
  source 1..50: mol_type = unassigned DNA; note = donor_9c007da
  misc_feature 1..21: note = RE
  misc_feature 22..25: note = Core
  misc_feature 26..50: note = LE

SEQ ID NO: 36469 - DNA, 50 bp, unidentified
  source 1..50: mol_type = unassigned DNA; note = donor_9c00d2f
  misc_feature 1..23: note = RE
  misc_feature 24..25: note = Core
  misc_feature 26..50: note = LE
cgaggtgagggtcaagacggtatcttgtatctcgactttcccttccaaag

SEQ ID NO: 36470 - DNA, 50 bp, unidentified
  source 1..50: mol_type = unassigned DNA; note = donor_9c05ca6
  misc_feature 1..23: note = RE
  misc_feature 24..25: note = Core
  misc_feature 26..50: note = LE
gtacaatacgaggagtccatataagatgtatggactcctccccttaacgg

SEQ ID NO: 36471 - DNA, 50 bp, unidentified
  source 1..50: mol_type = unassigned DNA; note = donor_9c0a39b
  misc_feature 1..23: note = RE
  misc_feature 24..25: note = Core
  misc_feature 26..50: note = LE
aaaaaacacttgactaaatagggagcttcctgtataattcaaatataggg

SEQ ID NO: 36472 - DNA, 50 bp, unidentified
  source 1..50: mol_type = unassigned DNA; note = donor_9c0a8b0
  misc_feature 1..22: note = RE
  misc_feature 23..25: note = Core
  misc_feature 26..50: note = LE
gacggatggaatgcgattagacaacatggagtaatcgcggcgcgatctcg

SEQ ID NO: 36473 - DNA, 50 bp, unidentified; identical to SEQ ID NO: 30668
  source 1..50: mol_type = unassigned DNA; note = donor_9c0d823
  misc_feature 1..23: note = RE
  misc_feature 24..25: note = Core
  misc_feature 26..50: note = LE

SEQ ID NO: 36474 - DNA, 50 bp, unidentified
  source 1..50: mol_type = unassigned DNA; note = donor_9c0ed67
  misc_feature 1..23: note = RE
  misc_feature 24..25: note = Core
  misc_feature 26..50: note = LE
gcaacgggggaacagtccatagataatgggatggactgttcccccacccc

SEQ ID NO: 36475 - DNA, 50 bp, unidentified
  source 1..50: mol_type = unassigned DNA; note = donor_9c16011
  misc_feature 1..24: note = RE
  misc_feature 25: note = Core
  misc_feature 26..50: note = LE
cttgcggtcaccggcggatgcaggttagatgacatgcatcgggcccgggc

SEQ ID NO: 36476 - DNA, 50 bp, unidentified
  source 1..50: mol_type = unassigned DNA; note = donor_9c1bae7
  misc_feature 1..23: note = RE
  misc_feature 24..25: note = Core
  misc_feature 26..50: note = LE
aaatttgcaattaaagatagtacctcatatctttgttaagatttaaaaat

SEQ ID NO: 36477 - DNA, 50 bp, unidentified
  source 1..50: mol_type = unassigned DNA; note = donor_9c1f2ad
  misc_feature 1..22: note = RE
  misc_feature 23..25: note = Core
  misc_feature 26..50: note = LE
caccgttaggggcgtccacagatgatggggtggacgccccccgacggcat

SEQ ID NO: 36478 - DNA, 50 bp, unidentified
  source 1..50: mol_type = unassigned DNA; note = donor_9c24fac
  misc_feature 1..23: note = RE
  misc_feature 24..25: note = Core
  misc_feature 26..50: note = LE
atatttggaattcaacacagaatctcctatgtttgttatcaaatataaaa

SEQ ID NO: 36479 - DNA, 50 bp, unidentified
  source 1..50: mol_type = unassigned DNA; note = donor_9c306c3
  misc_feature 1..23: note = RE
  misc_feature 24..25: note = Core
  misc_feature 26..50: note = LE
atatcttgacaaagtcatagtgttccattagactatttaagtgtagaaaa

SEQ ID NO: 36480 - DNA, 50 bp, unidentified
  source 1..50: mol_type = unassigned DNA; note = donor_9c321f4
  misc_feature 1..22: note = RE
  misc_feature 23..25: note = Core
  misc_feature 26..50: note = LE
acccgcagggggcatccacacatgatggggtggatgccccctgcttggcg

SEQ ID NO: 36481 - DNA, 50 bp, unidentified
  source 1..50: mol_type = unassigned DNA; note = donor_9c3cf0c
  misc_feature 1..23: note = RE
  misc_feature 24..25: note = Core
  misc_feature 26..50: note = LE
caacgcgggagccatccacacaggatggagtggatggctcccgctctcgg

SEQ ID NO: 36482 - DNA, 50 bp, unidentified
  source 1..50: mol_type = unassigned DNA; note = donor_9c3ec10
  misc_feature 1..23: note = RE
  misc_feature 24..25: note = Core
  misc_feature 26..50: note = LE
gcacgaacgggggcatccacacatgatggagtggatgccccctcccgacg

SEQ ID NO: 36483 - DNA, 50 bp, unidentified
  source 1..50: mol_type = unassigned DNA; note = donor_9c43de5
  misc_feature 1..24: note = RE
  misc_feature 25: note = Core
  misc_feature 26..50: note = LE
tgacttgacttcctatagttggtcacgtataataaaaccatctcgaaagg

SEQ ID NO: 36484 - DNA, 50 bp, unidentified
  source 1..50: mol_type = unassigned DNA; note = donor_9c46ec1
  misc_feature 1..23: note = RE
  misc_feature 24..25: note = Core
  misc_feature 26..50: note = LE
cccagaagttaaagtttcacagtaaacccccatgcctctgatgcggcacc

SEQ ID NO: 36485 - DNA, 50 bp, unidentified
  source 1..50: mol_type = unassigned DNA; note = donor_9c4949a
  misc_feature 1..23: note = RE
  misc_feature 24..25: note = Core
  misc_feature 26..50: note = LE
actattgactttttatttgcaggctactacaatatatttatggtttaatg

SEQ ID NO: 36486 - DNA, 50 bp, unidentified
  source 1..50: mol_type = unassigned DNA; note = donor_9c4cd35
  misc_feature 1..23: note = RE
  misc_feature 24..25: note = Core
  misc_feature 26..50: note = LE
aacacttgatttttattagcaggttggtactgtataagtgtagataaaaa

SEQ ID NO: 36487 - DNA, 50 bp, unidentified
  source 1..50: mol_type = unassigned DNA; note = donor_9c4d79d
  misc_feature 1..24: note = RE
  misc_feature 25: note = Core
  misc_feature 26..50: note = LE
ccttgctccaagggccgttccacatgatgaggtggaacgaccccgcttcc

SEQ ID NO: 36488 - DNA, 50 bp, unidentified; identical to SEQ ID NO: 30838
  source 1..50: mol_type = unassigned DNA; note = donor_9c52f60
  misc_feature 1..23: note = RE
  misc_feature 24..25: note = Core
  misc_feature 26..50: note = LE

SEQ ID NO: 36489 - DNA, 50 bp, unidentified
  source 1..50: mol_type = unassigned DNA; note = donor_9c54bba
  misc_feature 1..22: note = RE
  misc_feature 23..25: note = Core
  misc_feature 26..50: note = LE
caccgcgggggccgtccacacatgatggggtggacggcccccgcaccgag

SEQ ID NO: 36490 - DNA, 50 bp, unidentified
  source 1..50: mol_type = unassigned DNA; note = donor_9c58b94
  misc_feature 1..23: note = RE
  misc_feature 24..25: note = Core
  misc_feature 26..50: note = LE
catattgacttttaatagttagtctcgtattattagatttgtagttttta

SEQ ID NO: 36491 - DNA, 50 bp, unidentified; identical to SEQ ID NO: 34245
  source 1..50: mol_type = unassigned DNA; note = donor_9c616c2
  misc_feature 1..24: note = RE
  misc_feature 25: note = Core
  misc_feature 26..50: note = LE

SEQ ID NO: 36492 - DNA, 50 bp, unidentified
  source 1..50: mol_type = unassigned DNA; note = donor_9c65090
  misc_feature 1..24: note = RE
  misc_feature 25: note = Core
  misc_feature 26..50: note = LE
tgcagtcgcgcggcggaccatacataatgagatggtccgccgctgtatcc

SEQ ID NO: 36493 - DNA, 50 bp, unidentified
  source 1..50: mol_type = unassigned DNA; note = donor_9c7edf9
  misc_feature 1..23: note = RE
  misc_feature 24..25: note = Core
  misc_feature 26..50: note = LE
tgacaaaattcaacatgggatgtctaataagagctaccgggtagacgaga

SEQ ID NO: 36494 - DNA, 50 bp, unidentified
  source 1..50: mol_type = unassigned DNA; note = donor_9c8d333
  misc_feature 1..23: note = RE
  misc_feature 24..25: note = Core
  misc_feature 26..50: note = LE
aaagcattgacaacggacatcagagtccgtatgtccttcttcgtggctga

SEQ ID NO: 36495 - DNA, 50 bp, unidentified
  source 1..50: mol_type = unassigned DNA; note = donor_9c9ffe6
  misc_feature 1..21: note = RE
  misc_feature 22..25: note = Core
  misc_feature 26..50: note = LE
gacttgacttcctatagttggtcacgtataataaaaccatctcgaaaggg

SEQ ID NO: 36496 - DNA, 50 bp, unidentified
  source 1..50: mol_type = unassigned DNA; note = donor_9caa4d5
  misc_feature 1..22: note = RE
  misc_feature 23..25: note = Core
  misc_feature 26..50: note = LE
cgcttggtttttatcatagcatctcgtatgtttacattagattacaaaaa

SEQ ID NO: 36497 - DNA, 50 bp, unidentified
  source 1..50: mol_type = unassigned DNA; note = donor_9cbe8fa
  misc_feature 1..22: note = RE
  misc_feature 23..25: note = Core
  misc_feature 26..50: note = LE
attacttcagggagtccatataagatgtatggactcccttccctgaaagg

SEQ ID NO: 36498 - DNA, 50 bp, unidentified
  source 1..50: mol_type = unassigned DNA; note = donor_9cc0790
  misc_feature 1..22: note = RE
  misc_feature 23..25: note = Core
  misc_feature 26..50: note = LE
ttttgctcttgacatagagggtcttatatgttaatatgttttcaagccct

SEQ ID NO: 36499 - DNA, 50 bp, unidentified
  source 1..50: mol_type = unassigned DNA; note = donor_9cc164a
  misc_feature 1..22: note = RE
  misc_feature 23..25: note = Core
  misc_feature 26..50: note = LE
taaaacccgtggattccatatacgatgtatggaatccactcattctctgc

SEQ ID NO: 36500 - DNA, 50 bp, unidentified
  source 1..50: mol_type = unassigned DNA; note = donor_9cc45dd
  misc_feature 1..22: note = RE
  misc_feature 23..25: note = Core
  misc_feature 26..50: note = LE
cttattgacttttattagcaggtttgctactatttatttggaagcagatt

SEQ ID NO: 36501 - DNA, 50 bp, unidentified
  source 1..50: mol_type = unassigned DNA; note = donor_9cce376
  misc_feature 1..21: note = RE
  misc_feature 22..25: note = Core
  misc_feature 26..50: note = LE
taatttgctttttaacacagatcatcctatgtttgcaaaatattagattt

SEQ ID NO: 36502 - DNA, 50 bp, unidentified
  source 1..50: mol_type = unassigned DNA; note = donor_9cd228c
  misc_feature 1..23: note = RE
  misc_feature 24..25: note = Core
  misc_feature 26..50: note = LE
acttgaaaatccaagagggatgttctaccttcgaattttgcggggaggcg

SEQ ID NO: 36503 - DNA, 50 bp, unidentified
  source 1..50: mol_type = unassigned DNA; note = donor_9ce3ee9
  misc_feature 1..23: note = RE
  misc_feature 24..25: note = Core
  misc_feature 26..50: note = LE
gtaacacccggggcgtccatatatgatgtaatggacgccccttactaacg

SEQ ID NO: 36504 - DNA, 50 bp, unidentified
  source 1..50: mol_type = unassigned DNA; note = donor_9ce432c
  misc_feature 1..23: note = RE
  misc_feature 24..25: note = Core
  misc_feature 26..50: note = LE
gggctttccctcaaccatagaatcttgtatggtaggacttgaagggagga

SEQ ID NO: 36505 - DNA, 50 bp, unidentified
  source 1..50: mol_type = unassigned DNA; note = donor_9ce66df
  misc_feature 1..24: note = RE
  misc_feature 25: note = Core
  misc_feature 26..50: note = LE
cacaacgggaggtgtccatatacggatgtgatggacacctcccgccttac

SEQ ID NO: 36506 - DNA, 50 bp, unidentified
  source 1..50: mol_type = unassigned DNA; note = donor_9cf122c
  misc_feature 1..23: note = RE
  misc_feature 24..25: note = Core
  misc_feature 26..50: note = LE
acgagaacgttgacacagggtgtctcactggtgcaccttcgtgcggtcgg

SEQ ID NO: 36507 - DNA, 50 bp, unidentified
  source 1..50: mol_type = unassigned DNA; note = donor_9cf7a27
  misc_feature 1..23: note = RE
  misc_feature 24..25: note = Core
  misc_feature 26..50: note = LE
caaaaacgagggtgaccatagatttaatgagatggtcaccctcaccctac

SEQ ID NO: 36508 - DNA, 50 bp, unidentified
  source 1..50: mol_type = unassigned DNA; note = donor_9cf9a85
  misc_feature 1..23: note = RE
  misc_feature 24..25: note = Core
  misc_feature 26..50: note = LE
gacaaaccaaggcccgttacagaagatggggtaacgggccgaccacccga

SEQ ID NO: 36509 - DNA, 50 bp, unidentified
  source 1..50: mol_type = unassigned DNA; note = donor_9d00fc4
  misc_feature 1..23: note = RE
  misc_feature 24..25: note = Core
  misc_feature 26..50: note = LE
gcggcttgacaaatagagaggcaccgacttatgttcggaagagcggtccg

SEQ ID NO: 36510 - DNA, 50 bp, unidentified
  source 1..50: mol_type = unassigned DNA; note = donor_9d01ac2
  misc_feature 1..21: note = RE
  misc_feature 22..25: note = Core
  misc_feature 26..50: note = LE
cgcttgacttcttcattgagactccgtaagttgttaagcggcccgggagg

SEQ ID NO: 36511 - DNA, 50 bp, unidentified
  source 1..50: mol_type = unassigned DNA; note = donor_9d034ca
  misc_feature 1..22: note = RE
  misc_feature 23..25: note = Core
  misc_feature 26..50: note = LE
gggttgacaaaaagcatagaatcttgtatagtttggaggcgtgcctgccg

SEQ ID NO: 36512 - DNA, 50 bp, unidentified
  source 1..50: mol_type = unassigned DNA; note = donor_9d03810
  misc_feature 1..23: note = RE
  misc_feature 24..25: note = Core
  misc_feature 26..50: note = LE
tgacttctaagaacctgggatgtctaatggcatttaccgggtctgtttgg

SEQ ID NO: 36513 - DNA, 50 bp, unidentified; identical to SEQ ID NO: 36231
  source 1..50: mol_type = unassigned DNA; note = donor_9d04899
  misc_feature 1..22: note = RE
  misc_feature 23..25: note = Core
  misc_feature 26..50: note = LE

SEQ ID NO: 36514 - DNA, 50 bp, unidentified
  source 1..50: mol_type = unassigned DNA; note = donor_9d0c679
  misc_feature 1..21: note = RE
  misc_feature 22..25: note = Core
  misc_feature 26..50: note = LE
cctgaggttgactcaggaagtgtcactagggcaccatcctttcaacggat

SEQ ID NO: 36515 - DNA, 50 bp, unidentified
  source 1..50: mol_type = unassigned DNA; note = donor_9d0fd01
  misc_feature 1..21: note = RE
  misc_feature 22..25: note = Core
  misc_feature 26..50: note = LE
atcttaattttacatagttgactcctacataaaattatgttataaatatt

SEQ ID NO: 36516 - DNA, 50 bp, unidentified
  source 1..50: mol_type = unassigned DNA; note = donor_9d13bf5
  misc_feature 1..24: note = RE
  misc_feature 25: note = Core
  misc_feature 26..50: note = LE
ttgcaatgaggaggagtccatatacaatgggatggactcctcctcacctt

SEQ ID NO: 36517 - DNA, 50 bp, unidentified
  source 1..50: mol_type = unassigned DNA; note = donor_9d15cb0
  misc_feature 1..23: note = RE
  misc_feature 24..25: note = Core
  misc_feature 26..50: note = LE
aattttagtttatatttcaacctttatatccattcctttcgcttcgctca

SEQ ID NO: 36518 - DNA, 50 bp, unidentified
  source 1..50: mol_type = unassigned DNA; note = donor_9d1655e
  misc_feature 1..20: note = RE
  misc_feature 21..25: note = Core
  misc_feature 26..50: note = LE
cttgacacacattagcaggtttgctacaatatgcttgacccaaaaaagca

SEQ ID NO: 36519 - DNA, 50 bp, unidentified; identical to SEQ ID NO: 36198
  source 1..50: mol_type = unassigned DNA; note = donor_9d16a96
  misc_feature 1..24: note = RE
  misc_feature 25: note = Core
  misc_feature 26..50: note = LE

SEQ ID NO: 36520 - DNA, 50 bp, unidentified
  source 1..50: mol_type = unassigned DNA; note = donor_9d1dadc
  misc_feature 1..24: note = RE
  misc_feature 25: note = Core
  misc_feature 26..50: note = LE
ggcaaaccgggaggagtccatatacaatgaaatggactcctccctcctgc

SEQ ID NO: 36521 - DNA, 50 bp, unidentified
  source 1..50: mol_type = unassigned DNA; note = donor_9d25e58
  misc_feature 1..23: note = RE
  misc_feature 24..25: note = Core
  misc_feature 26..50: note = LE
atacttgacttttcatagctggtcttgtatgatgttgttagaagcaaaca

SEQ ID NO: 36522 - DNA, 50 bp, unidentified
  source 1..50: mol_type = unassigned DNA; note = donor_9d31ef8
  misc_feature 1..24: note = RE
  misc_feature 25: note = Core
  misc_feature 26..50: note = LE
ctgcgtcttgacacagaggggtgcctgcttgttccattgacccaggaccg

SEQ ID NO: 36523 - DNA, 50 bp, unidentified
  source 1..50: mol_type = unassigned DNA; note = donor_9d3887d
  misc_feature 1..24: note = RE
  misc_feature 25: note = Core
  misc_feature 26..50: note = LE
atggttgcaggcgttcacagtatctgtatgattactccgtcagaaagaac

SEQ ID NO: 36524 - DNA, 50 bp, unidentified
  source 1..50: mol_type = unassigned DNA; note = donor_9d3932d
  misc_feature 1..22: note = RE
  misc_feature 23..25: note = Core
  misc_feature 26..50: note = LE
tgcaaacgggatgcgttcatatagaatgtaatgaacgcatctcaactatt

SEQ ID NO: 36525 - DNA, 50 bp, unidentified
  source 1..50: mol_type = unassigned DNA; note = donor_9d3cda6
  misc_feature 1..23: note = RE
  misc_feature 24..25: note = Core
  misc_feature 26..50: note = LE
gttttcttgacggaacacggtagcttgtatgtaatagagatgtgctggtt

SEQ ID NO: 36526 - DNA, 50 bp, unidentified
  source 1..50: mol_type = unassigned DNA; note = donor_9d412a0
  misc_feature 1..23: note = RE
  misc_feature 24..25: note = Core
  misc_feature 26..50: note = LE
agacttgcgcaggaacataggatcttgtatgttcctcaggcactctaaag

SEQ ID NO: 36527 - DNA, 50 bp, unidentified; identical to SEQ ID NO: 30393
  source 1..50: mol_type = unassigned DNA; note = donor_9d43e6b
  misc_feature 1..23: note = RE
  misc_feature 24..25: note = Core
  misc_feature 26..50: note = LE

SEQ ID NO: 36528 - DNA, 50 bp, unidentified
  source 1..50: mol_type = unassigned DNA; note = donor_9d486ee
  misc_feature 1..23: note = RE
  misc_feature 24..25: note = Core
  misc_feature 26..50: note = LE
gctacctctcatcctcacagttgcttgtgtgctggaaatttgagagtgta

SEQ ID NO: 36529 - DNA, 50 bp, unidentified
  source 1..50: mol_type = unassigned DNA; note = donor_9d49414
  misc_feature 1..23: note = RE
  misc_feature 24..25: note = Core
  misc_feature 26..50: note = LE
ctacttgacttttaatagttagtctcgtattatatagttatacccattct

SEQ ID NO: 36530 - DNA, 50 bp, unidentified
  source 1..50: mol_type = unassigned DNA; note = donor_9d4ef75
  misc_feature 1..24: note = RE
  misc_feature 25: note = Core
  misc_feature 26..50: note = LE
gcaaccggagcggcggaccatacataatgagatggtccgccgcaacgtgg

SEQ ID NO: 36531 - DNA, 50 bp, unidentified
  source 1..50: mol_type = unassigned DNA; note = donor_9d4fb03
  misc_feature 1..24: note = RE
  misc_feature 25: note = Core
  misc_feature 26..50: note = LE
gacttgacggaagacataggggcaccgttaccttttacgtgtccccgcaa

SEQ ID NO: 36532 - DNA, 50 bp, unidentified
  source 1..50: mol_type = unassigned DNA; note = donor_9d559db
  misc_feature 1..23: note = RE
  misc_feature 24..25: note = Core
  misc_feature 26..50: note = LE
cactcgcttgaccatcacggatacttgtcttatgactttgctgtccgttt

SEQ ID NO: 36533 - DNA, 50 bp, unidentified
  source 1..50: mol_type = unassigned DNA; note = donor_9d607c2
  misc_feature 1..23: note = RE
  misc_feature 24..25: note = Core
  misc_feature 26..50: note = LE
gcatccctgggggcgtccatacacgatggtgtggacgcccccgcccggca

SEQ ID NO: 36534 - DNA, 50 bp, unidentified
  source 1..50: mol_type = unassigned DNA; note = donor_9d652a8
  misc_feature 1..23: note = RE
  misc_feature 24..25: note = Core
  misc_feature 26..50: note = LE
tgacccgcagggccattcacacatgatgggaaggatgccccctgctccgc

SEQ ID NO: 36535 - DNA, 50 bp, unidentified
  source 1..50: mol_type = unassigned DNA; note = donor_9d693d0
  misc_feature 1..22: note = RE
  misc_feature 23..25: note = Core
  misc_feature 26..50: note = LE
ctcttgacttttaatagttagtcttatataatgtatttaggttgttaaag

SEQ ID NO: 36536 - DNA, 50 bp, unidentified
  source 1..50: mol_type = unassigned DNA; note = donor_9d6af57
  misc_feature 1..23: note = RE
  misc_feature 24..25: note = Core
  misc_feature 26..50: note = LE
accccatggttgacaaagggtgtctgatggctttaccctcctgggtcatg

SEQ ID NO: 36537 - DNA, 50 bp, unidentified
  source 1..50: mol_type = unassigned DNA; note = donor_9d6f933
  misc_feature 1..24: note = RE
  misc_feature 25: note = Core
  misc_feature 26..50: note = LE
ttgcaatatgaggtggaccatatataatggaatggtccacctctccccaa

SEQ ID NO: 36538 - DNA, 50 bp, unidentified
  source 1..50: mol_type = unassigned DNA; note = donor_9d7a65d
  misc_feature 1..23: note = RE
  misc_feature 24..25: note = Core
  misc_feature 26..50: note = LE
agacttgacttttaatagttagtctcgtattatatagtagtggtttttag

SEQ ID NO: 36539 - DNA, 50 bp, unidentified; identical to SEQ ID NO: 30668
  source 1..50: mol_type = unassigned DNA; note = donor_9d911df
  misc_feature 1..23: note = RE
  misc_feature 24..25: note = Core
  misc_feature 26..50: note = LE

SEQ ID NO: 36540 - DNA, 50 bp, unidentified
  source 1..50: mol_type = unassigned DNA; note = donor_9d9656d
  misc_feature 1..21: note = RE
  misc_feature 22..25: note = Core
  misc_feature 26..50: note = LE
gttgacaaactatataggaacacccattacgttgttagcagttccgcttg

SEQ ID NO: 36541 - DNA, 50 bp, unidentified
  source 1..50: mol_type = unassigned DNA; note = donor_9d9b469
  misc_feature 1..24: note = RE
  misc_feature 25: note = Core
  misc_feature 26..50: note = LE
ccaaggcttgacaaagaggggagcctacttcttgaatggacgtacggctc

SEQ ID NO: 36542 - DNA, 50 bp, unidentified
  source 1..50: mol_type = unassigned DNA; note = donor_9d9be55
  misc_feature 1..23: note = RE
  misc_feature 24..25: note = Core
  misc_feature 26..50: note = LE
gcaacccgggggccgtccacacatgttggggtggacggcccccgacggca

SEQ ID NO: 36543 - DNA, 50 bp, unidentified
  source 1..50: mol_type = unassigned DNA; note = donor_9da88fa
  misc_feature 1..23: note = RE
  misc_feature 24..25: note = Core
  misc_feature 26..50: note = LE
gacccagatcggccgattagagaagatggggtaatcggccggcgttcttg

SEQ ID NO: 36544 - DNA, 50 bp, unidentified
  source 1..50: mol_type = unassigned DNA; note = donor_9dc7834
  misc_feature 1..21: note = RE
  misc_feature 22..25: note = Core
  misc_feature 26..50: note = LE
caccttccacccctggggtgtctaatggggttgctgggttcgtgagagtc

SEQ ID NO: 36545 - DNA, 50 bp, unidentified; identical to SEQ ID NO: 33393
  source 1..50: mol_type = unassigned DNA; note = donor_9dd641b
  misc_feature 1..23: note = RE
  misc_feature 24..25: note = Core
  misc_feature 26..50: note = LE

SEQ ID NO: 36546 - DNA, 50 bp, unidentified
  source 1..50: mol_type = unassigned DNA; note = donor_9de003b
  misc_feature 1..24: note = RE
  misc_feature 25: note = Core
  misc_feature 26..50: note = LE
tgcgacgcgcggccggaccatacataatgggatggtccggccgtgctccc

SEQ ID NO: 36547 - DNA, 50 bp, unidentified
  source 1..50: mol_type = unassigned DNA; note = donor_9de3743
  misc_feature 1..24: note = RE
  misc_feature 25: note = Core
  misc_feature 26..50: note = LE
atatttggattttaacatagaaagctctaagtttgcaaaggaaagcgacg

SEQ ID NO: 36548 - DNA, 50 bp, unidentified
  source 1..50: mol_type = unassigned DNA; note = donor_9de754a
  misc_feature 1..24: note = RE
  misc_feature 25: note = Core
  misc_feature 26..50: note = LE
tgcagccaacggggagcccttgtagaatgaaagggacttccccgtcccgg

SEQ ID NO: 36549 - DNA, 50 bp, unidentified
  source 1..50: mol_type = unassigned DNA; note = donor_9de8a92
  misc_feature 1..21: note = RE
  misc_feature 22..25: note = Core
  misc_feature 26..50: note = LE
atatttgaaattaaacacagttcatcctatgtttgcataatgcaaataag

SEQ ID NO: 36550 - DNA, 50 bp, unidentified
  source 1..50: mol_type = unassigned DNA; note = donor_9df8636
  misc_feature 1..23: note = RE
  misc_feature 24..25: note = Core
  misc_feature 26..50: note = LE
gtatccgacggggcgtccacacacgttggggtggacgccccctgacggca

SEQ ID NO: 36551 - DNA, 50 bp, unidentified
  source 1..50: mol_type = unassigned DNA; note = donor_9e0441c
  misc_feature 1..24: note = RE
  misc_feature 25: note = Core
  misc_feature 26..50: note = LE
acttgcaacggggcgggccatacgtatggaatggcccgcccctatcccca

SEQ ID NO: 36552 - DNA, 50 bp, unidentified
  source 1..50: mol_type = unassigned DNA; note = donor_9e04a8a
  misc_feature 1..23: note = RE
  misc_feature 24..25: note = Core
  misc_feature 26..50: note = LE
gctattgacttttgtttgcaggactcctacaataataattaaggtttaag

SEQ ID NO: 36553 - DNA, 50 bp, unidentified
  source 1..50: mol_type = unassigned DNA; note = donor_9e06ba4
  misc_feature 1..24: note = RE
  misc_feature 25: note = Core
  misc_feature 26..50: note = LE
gcttggcaaaggggcgtccatgtacaatgggatggacgcccctcccaaaa

SEQ ID NO: 36554 - DNA, 50 bp, unidentified
  source 1..50: mol_type = unassigned DNA; note = donor_9e0b8e4
  misc_feature 1..23: note = RE
  misc_feature 24..25: note = Core
  misc_feature 26..50: note = LE
gcaatcgggcgacggaccatacataatgggatggtccgtcgccttccaag

SEQ ID NO: 36555 - DNA, 50 bp, unidentified; identical to SEQ ID NO: 30919
  source 1..50: mol_type = unassigned DNA; note = donor_9e152f2
  misc_feature 1..23: note = RE
  misc_feature 24..25: note = Core
  misc_feature 26..50: note = LE

SEQ ID NO: 36556 - DNA, 50 bp, unidentified
  source 1..50: mol_type = unassigned DNA; note = donor_9e15db0
  misc_feature 1..24: note = RE
  misc_feature 25: note = Core
  misc_feature 26..50: note = LE
ttgcaaaaggggatggttcatatataatgtaatgaactatccccacccta

SEQ ID NO: 36557 - DNA, 50 bp, unidentified
  source 1..50: mol_type = unassigned DNA; note = donor_9e185b8
  misc_feature 1..24: note = RE
  misc_feature 25: note = Core
  misc_feature 26..50: note = LE
ctgcgtcttgacacagaggggtgcctacttgttccattgccgtaggaccg

SEQ ID NO: 36558 - DNA, 50 bp, unidentified
  source 1..50: mol_type = unassigned DNA; note = donor_9e1e3a3
  misc_feature 1..23: note = RE
  misc_feature 24..25: note = Core
  misc_feature 26..50: note = LE
gcactatggacggcaaccacagaagatggggtggttgccgtcctccccga

SEQ ID NO: 36559 - DNA, 50 bp, unidentified
  source 1..50: mol_type = unassigned DNA; note = donor_9e27519
  misc_feature 1..22: note = RE
  misc_feature 23..25: note = Core
  misc_feature 26..50: note = LE
gggcttgacaaacattagcaagattcgtaatatataagtagaggtataat

SEQ ID NO: 36560 - DNA, 50 bp, unidentified
  source 1..50: mol_type = unassigned DNA; note = donor_9e2a7b5
  misc_feature 1..24: note = RE
  misc_feature 25: note = Core
  misc_feature 26..50: note = LE
ccaccccttgacataaaggggagcctacttaatactgggcagcaggatca

SEQ ID NO: 36561 - DNA, 50 bp, unidentified
  source 1..50: mol_type = unassigned DNA; note = donor_9e2f941
  misc_feature 1..23: note = RE
  misc_feature 24..25: note = Core
  misc_feature 26..50: note = LE
gggcttgactttttatttgcaggctattacaatagatttatagatcaggg

SEQ ID NO: 36562 - DNA, 50 bp, unidentified
  source 1..50: mol_type = unassigned DNA; note = donor_9e33bcf
  misc_feature 1..24: note = RE
  misc_feature 25: note = Core
  misc_feature 26..50: note = LE
tggcaaacgggaggcgtccatataaaatgtaatggacgccttcctcccta

SEQ ID NO: 36563 - DNA, 50 bp, unidentified
  source 1..50: mol_type = unassigned DNA; note = donor_9e393ed
  misc_feature 1..22: note = RE
  misc_feature 23..25: note = Core
  misc_feature 26..50: note = LE
caagtggggggccgtccacatctgctggtgtggacggcctctcatcccaa

SEQ ID NO: 36564 - DNA, 50 bp, unidentified
  source 1..50: mol_type = unassigned DNA; note = donor_9e39afb
  misc_feature 1..23: note = RE
  misc_feature 24..25: note = Core
  misc_feature 26..50: note = LE
aggcttgcgtgaaaccatagaatcttgtatggttctgtagcccccaccga

SEQ ID NO: 36565 - DNA, 50 bp, unidentified
  source 1..50: mol_type = unassigned DNA; note = donor_9e48e02
  misc_feature 1..23: note = RE
  misc_feature 24..25: note = Core
  misc_feature 26..50: note = LE
acagatgaattcttgatagttgactcctaccatgaattcttatagaatat

SEQ ID NO: 36566 - DNA, 50 bp, unidentified
  source 1..50: mol_type = unassigned DNA; note = donor_9e4be2d
  misc_feature 1..24: note = RE
  misc_feature 25: note = Core
  misc_feature 26..50: note = LE
gcgacgcgcggccggaccatacattaatggcatggtccggccgcgctcag

SEQ ID NO: 36567 - DNA, 50 bp, unidentified; identical to SEQ ID NO: 30770
  source 1..50: mol_type = unassigned DNA; note = donor_9e4eec8
  misc_feature 1..24: note = RE
  misc_feature 25: note = Core
  misc_feature 26..50: note = LE

SEQ ID NO: 36568 - DNA, 50 bp, unidentified
  source 1..50: mol_type = unassigned DNA; note = donor_9e4f83d
  misc_feature 1..23: note = RE
  misc_feature 24..25: note = Core
  misc_feature 26..50: note = LE
aactttgccttgcgacatagaatcttgtatgttgtatctcgacaggccag

SEQ ID NO: 36569 - DNA, 50 bp, unidentified
  source 1..50: mol_type = unassigned DNA; note = donor_9e5625a
  misc_feature 1..23: note = RE
  misc_feature 24..25: note = Core
  misc_feature 26..50: note = LE
gccttccgcggggcgtccacagatgatggggtggacgccccccgacagca

SEQ ID NO: 36570 - DNA, 50 bp, unidentified
  source 1..50: mol_type = unassigned DNA; note = donor_9e61f08
  misc_feature 1..23: note = RE
  misc_feature 24..25: note = Core
  misc_feature 26..50: note = LE
acgcttgacccgaaacagagtatcttgtatgtttagatccgacgaactga

SEQ ID NO: 36571 - DNA, 50 bp, unidentified
  source 1..50: mol_type = unassigned DNA; note = donor_9e69db3
  misc_feature 1..22: note = RE
  misc_feature 23..25: note = Core
  misc_feature 26..50: note = LE
cgcttgactctcaacagagtatcttgtatcttgaaggcgagacgcgggga

SEQ ID NO: 36572 - DNA, 50 bp, unidentified
  source 1..50: mol_type = unassigned DNA; note = donor_9e715b0
  misc_feature 1..23: note = RE
  misc_feature 24..25: note = Core
  misc_feature 26..50: note = LE
gcacttgactcgaaagacagttacttgtatgttcagaccagaccagcacg

SEQ ID NO: 36573 - DNA, 50 bp, unidentified; identical to SEQ ID NO: 30440
  source 1..50: mol_type = unassigned DNA; note = donor_9e733d7
  misc_feature 1..24: note = RE
  misc_feature 25: note = Core
  misc_feature 26..50: note = LE

SEQ ID NO: 36574 - DNA, 50 bp, unidentified; identical to SEQ ID NO: 31419
  source 1..50: mol_type = unassigned DNA; note = donor_9e7f9dd
  misc_feature 1..23: note = RE
  misc_feature 24..25: note = Core
  misc_feature 26..50: note = LE

SEQ ID NO: 36575 - DNA, 50 bp, unidentified
  source 1..50: mol_type = unassigned DNA; note = donor_9e8a377
  misc_feature 1..23: note = RE
  misc_feature 24..25: note = Core
  misc_feature 26..50: note = LE
gccaaggcggagccgtccacacatgatgctgtggacggctccccacccgg

SEQ ID NO: 36576 - DNA, 50 bp, unidentified
  source 1..50: mol_type = unassigned DNA; note = donor_9e9655c
  misc_feature 1..24: note = RE
  misc_feature 25: note = Core
  misc_feature 26..50: note = LE
ttgacggcgggggaagcccttgtagaatgaaagggacttccccgtcccga

SEQ ID NO: 36577 - DNA, 50 bp, unidentified
  source 1..50: mol_type = unassigned DNA; note = donor_9e985e6
  misc_feature 1..23: note = RE
  misc_feature 24..25: note = Core
  misc_feature 26..50: note = LE
tgccaagcggggccgtccacatatgatggggtggacggccccgcctcaac

SEQ ID NO: 36578 - DNA, 50 bp, unidentified
  source 1..50: mol_type = unassigned DNA; note = donor_9e99275
  misc_feature 1..24: note = RE
  misc_feature 25: note = Core
  misc_feature 26..50: note = LE
tgcaaatctggggcagaccatacataatggaatggtctgccccacctcct

SEQ ID NO: 36579 - DNA, 50 bp, unidentified
  source 1..50: mol_type = unassigned DNA; note = donor_9e99dc4
  misc_feature 1..23: note = RE
  misc_feature 24..25: note = Core
  misc_feature 26..50: note = LE
tctcttgacttttatatagttagctggtatattgtaaatgactcatctaa

SEQ ID NO: 36580 - DNA, 50 bp, unidentified
  source 1..50: mol_type = unassigned DNA; note = donor_9e9d6f5
  misc_feature 1..23: note = RE
  misc_feature 24..25: note = Core
  misc_feature 26..50: note = LE
gcgtccggaggggcgtccacagatgatggggtggacgccccctgacggca

SEQ ID NO: 36581 - DNA, 50 bp, unidentified
  source 1..50: mol_type = unassigned DNA; note = donor_9e9fc57
  misc_feature 1..24: note = RE
  misc_feature 25: note = Core
  misc_feature 26..50: note = LE
gcccgccgcttgacatagaagcatctattggtgcaaagtgagtcgtgccc

SEQ ID NO: 36582 - DNA, 50 bp, unidentified
  source 1..50: mol_type = unassigned DNA; note = donor_9ea2cdd
  misc_feature 1..21: note = RE
  misc_feature 22..25: note = Core
  misc_feature 26..50: note = LE
tggagggttgacacagggtgtctcactggactaccctccaatcctcggta

SEQ ID NO: 36583 - DNA, 50 bp, unidentified
  source 1..50: mol_type = unassigned DNA; note = donor_9ea9abf
  misc_feature 1..20: note = RE
  misc_feature 21..25: note = Core
  misc_feature 26..50: note = LE
cttgacacaccacataggggcacccgttaccttgttggtggtcgcgggga

SEQ ID NO: 36584 - DNA, 50 bp, unidentified
  source 1..50: mol_type = unassigned DNA; note = donor_9ea9e63
  misc_feature 1..23: note = RE
  misc_feature 24..25: note = Core
  misc_feature 26..50: note = LE
ccgcttgataaacatcacggtatcttgtatgttgtccgctcatcggatcg

SEQ ID NO: 36585 - DNA, 50 bp, unidentified; identical to SEQ ID NO: 30402
  source 1..50: mol_type = unassigned DNA; note = donor_9ead38f
  misc_feature 1..24: note = RE
  misc_feature 25: note = Core
  misc_feature 26..50: note = LE

SEQ ID NO: 36586 - DNA, 50 bp, unidentified
  source 1..50: mol_type = unassigned DNA; note = donor_9eae5e1
  misc_feature 1..23: note = RE
  misc_feature 24..25: note = Core
  misc_feature 26..50: note = LE
cttgcgcaaggggcggttacacatgatgatgtgaccgccccccgacggca

SEQ ID NO: 36587 - DNA, 50 bp, unidentified
  source 1..50: mol_type = unassigned DNA; note = donor_9eb2338
  misc_feature 1..23: note = RE
  misc_feature 24..25: note = Core
  misc_feature 26..50: note = LE
tgacatttacgaacgtgggatgtctaatgggggtcgaccgcctcgttcgt

SEQ ID NO: 36588 - DNA, 50 bp, unidentified
  source 1..50: mol_type = unassigned DNA; note = donor_9ebfa6b
  misc_feature 1..23: note = RE
  misc_feature 24..25: note = Core
  misc_feature 26..50: note = LE
ttatttgataattaacacagaatctcctatgtttgttatcattaaatata

SEQ ID NO: 36589 - DNA, 50 bp, unidentified
  source 1..50: mol_type = unassigned DNA; note = donor_9ec6b8c
  misc_feature 1..19: note = RE
  misc_feature 20..25: note = Core
  misc_feature 26..50: note = LE
acgaaccccatagaggcacccccccgttaccgtcttcgtggccccgcaac

SEQ ID NO: 36590 - DNA, 50 bp, unidentified
  source 1..50: mol_type = unassigned DNA; note = donor_9ec9a8c
  misc_feature 1..24: note = RE
  misc_feature 25: note = Core
  misc_feature 26..50: note = LE
tccgcacttgacctaaaggggagcctagttagagactggtgtcaggatcg

SEQ ID NO: 36591 - DNA, 50 bp, unidentified
  source 1..50: mol_type = unassigned DNA; note = donor_9ec9c36
  misc_feature 1..23: note = RE
  misc_feature 24..25: note = Core
  misc_feature 26..50: note = LE
tgcaaaaacgggagtgaccatagataatgagatggtcactccctcttcct

SEQ ID NO: 36592 - DNA, 50 bp, unidentified
  source 1..50: mol_type = unassigned DNA; note = donor_9ed16f8
  misc_feature 1..22: note = RE
  misc_feature 23..25: note = Core
  misc_feature 26..50: note = LE
tgccaaagggggcgtccacatatgatgatgtggacgcccccgcactgacc

SEQ ID NO: 36593 - DNA, 50 bp, unidentified
  source 1..50: mol_type = unassigned DNA; note = donor_9ede413
  misc_feature 1..24: note = RE
  misc_feature 25: note = Core
  misc_feature 26..50: note = LE
gatcagttgacaacagaagggagcctactagacgattcacgtagggccgg

SEQ ID NO: 36594 - DNA, 50 bp, unidentified
  source 1..50: mol_type = unassigned DNA; note = donor_9ee2560
  misc_feature 1..24: note = RE
  misc_feature 25: note = Core
  misc_feature 26..50: note = LE
ttgcaatacggggcggaccatatataatggaatggtccgccccactccaa

SEQ ID NO: 36595 - DNA, 50 bp, unidentified
  source 1..50: mol_type = unassigned DNA; note = donor_9eeb9ec
  misc_feature 1..23: note = RE
  misc_feature 24..25: note = Core
  misc_feature 26..50: note = LE
ttgcaaacggggtgggttcatatataatggtatgaacccactccacttcc

SEQ ID NO: 36596 - DNA, 50 bp, unidentified
  source 1..50: mol_type = unassigned DNA; note = donor_9ef6445
  misc_feature 1..23: note = RE
  misc_feature 24..25: note = Core
  misc_feature 26..50: note = LE
tctcttgacttttatttgcaggtctgatacaatataattgaccgaaaaaa

SEQ ID NO: 36597 - DNA, 50 bp, unidentified; identical to SEQ ID NO: 30804
  source 1..50: mol_type = unassigned DNA; note = donor_9ef9c8e
  misc_feature 1..24: note = RE
  misc_feature 25: note = Core
  misc_feature 26..50: note = LE

SEQ ID NO: 36598 - DNA, 50 bp, unidentified; identical to SEQ ID NO: 34188
  source 1..50: mol_type = unassigned DNA; note = donor_9efe97b
  misc_feature 1..23: note = RE
  misc_feature 24..25: note = Core
  misc_feature 26..50: note = LE

SEQ ID NO: 36599 - DNA, 50 bp, unidentified
  source 1..50: mol_type = unassigned DNA; note = donor_9f089a5
  misc_feature 1..23: note = RE
  misc_feature 24..25: note = Core
  misc_feature 26..50: note = LE
ttgacagcgaagcccgttacagaagatggtgtaacgggcgcgcggaacac

SEQ ID NO: 36600 - DNA, 50 bp, unidentified
  source 1..50: mol_type = unassigned DNA; note = donor_9f0b611
  misc_feature 1..23: note = RE
  misc_feature 24..25: note = Core
  misc_feature 26..50: note = LE
gccaagcctgatcaacatggttgcttgtctgttggacggatgctagggtt

SEQ ID NO: 36601 - DNA, 50 bp, unidentified
  source 1..50: mol_type = unassigned DNA; note = donor_9f0cf3e
  misc_feature 1..23: note = RE
  misc_feature 24..25: note = Core
  misc_feature 26..50: note = LE
gacctcaccacgccgattagagaagatggggtaatcggctttgagcccca

SEQ ID NO: 36602 - DNA, 50 bp, unidentified
  source 1..50: mol_type = unassigned DNA; note = donor_9f10d06
  misc_feature 1..23: note = RE
  misc_feature 24..25: note = Core
  misc_feature 26..50: note = LE
tgcaaagatcgggctgaccatagataatgaaatggtcagcccgatcgccc

SEQ ID NO: 36603 - DNA, 50 bp, unidentified
  source 1..50: mol_type = unassigned DNA; note = donor_9f134d4
  misc_feature 1..23: note = RE
  misc_feature 24..25: note = Core
  misc_feature 26..50: note = LE
gactagtcggcatttaatggttgcttgtaatagcaaaatcgattatcgtt

SEQ ID NO: 36604 - DNA, 50 bp, unidentified
  source 1..50: mol_type = unassigned DNA; note = donor_9f28cc1
  misc_feature 1..22: note = RE
  misc_feature 23..25: note = Core
  misc_feature 26..50: note = LE
cgcccaggcggtcgtccacacatgatggtgtggacgaccgccacccaccg

SEQ ID NO: 36605 - DNA, 50 bp, unidentified
  source 1..50: mol_type = unassigned DNA; note = donor_9f295db
  misc_feature 1..23: note = RE
  misc_feature 24..25: note = Core
  misc_feature 26..50: note = LE
catcttgaaacgacggacatgagagaccacatgtccgtctgaggctggtg

SEQ ID NO: 36606 - DNA, 50 bp, unidentified
  source 1..50: mol_type = unassigned DNA; note = donor_9f2ac06
  misc_feature 1..23: note = RE
  misc_feature 24..25: note = Core
  misc_feature 26..50: note = LE
tgacatttaagctcctgggatgtctaataagtcttgtcgggtccgccgta

SEQ ID NO: 36607 - DNA, 50 bp, unidentified
  source 1..50: mol_type = unassigned DNA; note = donor_9f301da
  misc_feature 1..23: note = RE
  misc_feature 24..25: note = Core
  misc_feature 26..50: note = LE
tgacattcaagcccctgggatgtctaatgggttctgggagtgagccatcc

SEQ ID NO: 36608 - DNA, 50 bp, unidentified
  source 1..50: mol_type = unassigned DNA; note = donor_9f39cd1
  misc_feature 1..23: note = RE
  misc_feature 24..25: note = Core
  misc_feature 26..50: note = LE
tctcttgacttagcaccattggactcgtataataagtttcagagactgtt

SEQ ID NO: 36609 - DNA, 50 bp, unidentified; identical to SEQ ID NO: 30838
  source 1..50: mol_type = unassigned DNA; note = donor_9f40186
  misc_feature 1..23: note = RE
  misc_feature 24..25: note = Core
  misc_feature 26..50: note = LE

SEQ ID NO: 36610 - DNA, 50 bp, unidentified
  source 1..50: mol_type = unassigned DNA; note = donor_9f44f32
  misc_feature 1..22: note = RE
  misc_feature 23..25: note = Core
  misc_feature 26..50: note = LE
atctccgggaggcgtccatataagatggtatggacgcctccccccggcaa

SEQ ID NO: 36611 - DNA, 50 bp, unidentified
  source 1..50: mol_type = unassigned DNA; note = donor_9f4f370
  misc_feature 1..23: note = RE
  misc_feature 24..25: note = Core
  misc_feature 26..50: note = LE
catcttgacatatcaccgctagactcgtaatatatgttttgttactaagt

SEQ ID NO: 36612 - DNA, 50 bp, unidentified
  source 1..50: mol_type = unassigned DNA; note = donor_9f57b39
  misc_feature 1..23: note = RE
  misc_feature 24..25: note = Core
  misc_feature 26..50: note = LE
tattcaagtttttattatagttcattgtatattaattaaacgttgtactt

SEQ ID NO: 36613 - DNA, 50 bp, unidentified
  source 1..50: mol_type = unassigned DNA; note = donor_9f66169
  misc_feature 1..23: note = RE
  misc_feature 24..25: note = Core
  misc_feature 26..50: note = LE
ctcgatgaggggcaagacggtatcttgtatctcgactatcgctccgacag

SEQ ID NO: 36614 - DNA, 50 bp, unidentified
  source 1..50: mol_type = unassigned DNA; note = donor_9f67ac6
  misc_feature 1..23: note = RE
  misc_feature 24..25: note = Core
  misc_feature 26..50: note = LE
aatttttacgttcaagacagttgctccttgtatcttgaaaattggttaaa

SEQ ID NO: 36615 - DNA, 50 bp, unidentified
  source 1..50: mol_type = unassigned DNA; note = donor_9f6a778
  misc_feature 1..23: note = RE
  misc_feature 24..25: note = Core
  misc_feature 26..50: note = LE
gcgcaagcgggggtatccacacatgatggtgtggacacccccgcccgacg

SEQ ID NO: 36616 - DNA, 50 bp, unidentified; identical to SEQ ID NO: 32750
  source 1..50: mol_type = unassigned DNA; note = donor_9f6b814
  misc_feature 1..23: note = RE
  misc_feature 24..25: note = Core
  misc_feature 26..50: note = LE

SEQ ID NO: 36617 - DNA, 50 bp, unidentified
  source 1..50: mol_type = unassigned DNA; note = donor_9f6c062
  misc_feature 1..23: note = RE
  misc_feature 24..25: note = Core
  misc_feature 26..50: note = LE
gcgcttgactcggaagacggttacttgtatgtttcaaaccagaccagcgc

SEQ ID NO: 36618 - DNA, 50 bp, unidentified
  source 1..50: mol_type = unassigned DNA; note = donor_9f7020e
  misc_feature 1..24: note = RE
  misc_feature 25: note = Core
  misc_feature 26..50: note = LE
tgcagtcctgcggcggaccatacataatgggatggtccgccgcctgactc

SEQ ID NO: 36619 - DNA, 50 bp, unidentified
  source 1..50: mol_type = unassigned DNA; note = donor_9f76184
  misc_feature 1..23: note = RE
  misc_feature 24..25: note = Core
  misc_feature 26..50: note = LE
gggcttgacttttaatagttaatcttgtattatagagtagtagttattag

SEQ ID NO: 36620 - DNA, 50 bp, unidentified
  source 1..50: mol_type = unassigned DNA; note = donor_9f774cb
  misc_feature 1..23: note = RE
  misc_feature 24..25: note = Core
  misc_feature 26..50: note = LE
acaaatgcgtcatccttcatagaagatgggatgaagagtggcgtaccttt

SEQ ID NO: 36621 - DNA, 50 bp, unidentified
  source 1..50: mol_type = unassigned DNA; note = donor_9f786b2
  misc_feature 1..20: note = RE
  misc_feature 21..25: note = Core
  misc_feature 26..50: note = LE
tttggaatttaaaacagtaccttttatttttactgagaattacaaaaagg

SEQ ID NO: 36622 - DNA, 50 bp, unidentified
  source 1..50: mol_type = unassigned DNA; note = donor_9f7b671
  misc_feature 1..23: note = RE
  misc_feature 24..25: note = Core
  misc_feature 26..50: note = LE
gcgctaaagggggcgtccacagatgatggggtggacgccccccgacggca

SEQ ID NO: 36623 - DNA, 50 bp, unidentified
  source 1..50: mol_type = unassigned DNA; note = donor_9f7cb41
  misc_feature 1..23: note = RE
  misc_feature 24..25: note = Core
  misc_feature 26..50: note = LE
gggcttgtgtcttaagagagtatcttgtatattaaatacatctctaaagc

SEQ ID NO: 36624 - DNA, 50 bp, unidentified
  source 1..50: mol_type = unassigned DNA; note = donor_9f84aa4
  misc_feature 1..24: note = RE
  misc_feature 25: note = Core
  misc_feature 26..50: note = LE
tgcaactctgcggcggatcatacataatgggatggtccgccgcagctcta

SEQ ID NO: 36625 - DNA, 50 bp, unidentified
  source 1..50: mol_type = unassigned DNA; note = donor_9f85b00
  misc_feature 1..24: note = RE
  misc_feature 25: note = Core
  misc_feature 26..50: note = LE
accccttgacctccataggagcatcagtgaggatggtggggtgggtcacc

SEQ ID NO: 36626 - DNA, 50 bp, unidentified
  source 1..50: mol_type = unassigned DNA; note = donor_9f87473
  misc_feature 1..24: note = RE
  misc_feature 25: note = Core
  misc_feature 26..50: note = LE
gggcaaaccgggggcgtccatgtacaatggaatggacgcccccaccctaa

SEQ ID NO: 36627 - DNA, 50 bp, unidentified
  source 1..50: mol_type = unassigned DNA; note = donor_9f886d5
  misc_feature 1..23: note = RE
  misc_feature 24..25: note = Core
  misc_feature 26..50: note = LE
ctgcttgactttttatttgcagactattactatgtgtttatggttaatat

SEQ ID NO: 36628 - DNA, 50 bp, unidentified
  source 1..50: mol_type = unassigned DNA; note = donor_9f8ac1d
  misc_feature 1..23: note = RE
  misc_feature 24..25: note = Core
  misc_feature 26..50: note = LE
tcccttgactctttatagctggtctcgtataatgaatttacggtttaggt

SEQ ID NO: 36629 - DNA, 50 bp, unidentified
  source 1..50: mol_type = unassigned DNA; note = donor_9f9c82d
  misc_feature 1..23: note = RE
  misc_feature 24..25: note = Core
  misc_feature 26..50: note = LE
gcattccgcgcggcatccacacaagatggggtggatgccgcgctccccca

SEQ ID NO: 36630 - DNA, 50 bp, unidentified
  source 1..50: mol_type = unassigned DNA; note = donor_9f9cc9e
  misc_feature 1..23: note = RE
  misc_feature 24..25: note = Core
  misc_feature 26..50: note = LE
atgcttgaccattaatagttagtctcgtattattaagttgtagcttttct

SEQ ID NO: 36631 - DNA, 50 bp, unidentified
  source 1..50: mol_type = unassigned DNA; note = donor_9f9e366
  misc_feature 1..22: note = RE
  misc_feature 23..25: note = Core
  misc_feature 26..50: note = LE
gaatggcatgttgaagacagttgcttgtgtcttgatctgggaataaactc

SEQ ID NO: 36632 - DNA, 50 bp, unidentified
  source 1..50: mol_type = unassigned DNA; note = donor_9fa0455
  misc_feature 1..24: note = RE
  misc_feature 25: note = Core
  misc_feature 26..50: note = LE
gacgcttgacaaacatagaagcatctgtgagagtcgctgttgctgtcttg

SEQ ID NO: 36633 - DNA, 50 bp, unidentified
  source 1..50: mol_type = unassigned DNA; note = donor_9fa3272
  misc_feature 1..23: note = RE
  misc_feature 24..25: note = Core
  misc_feature 26..50: note = LE
gaaaaagacttgactaaatagggagcttcctgtataattcaagtataggg

SEQ ID NO: 36634 - DNA, 50 bp, unidentified
  source 1..50: mol_type = unassigned DNA; note = donor_9fa7788
  misc_feature 1..24: note = RE
  misc_feature 25: note = Core
  misc_feature 26..50: note = LE
cttgcagacggggcgggccatacgtatgggatggcccgccccttatctct

SEQ ID NO: 36635 - DNA, 50 bp, unidentified
  source 1..50: mol_type = unassigned DNA; note = donor_9fa7ac7
  misc_feature 1..23: note = RE
  misc_feature 24..25: note = Core
  misc_feature 26..50: note = LE
gacggacggaatgcgattatacaacatggggtaatcgcggcgcgatctcc

SEQ ID NO: 36636 - DNA, 50 bp, unidentified; identical to SEQ ID NO: 30383
  source 1..50: mol_type = unassigned DNA; note = donor_9fa9afb
  misc_feature 1..23: note = RE
  misc_feature 24..25: note = Core
  misc_feature 26..50: note = LE

SEQ ID NO: 36637 - DNA, 50 bp, unidentified
  source 1..50: mol_type = unassigned DNA; note = donor_9fabac3
  misc_feature 1..23: note = RE
  misc_feature 24..25: note = Core
  misc_feature 26..50: note = LE
gcatccgaaggggcgtccacagatgatggggtggacgccccccgacagca

SEQ ID NO: 36638 - DNA, 50 bp, unidentified
  source 1..50: mol_type = unassigned DNA; note = donor_9faecf0
  misc_feature 1..23: note = RE
  misc_feature 24..25: note = Core
  misc_feature 26..50: note = LE
aaacaccttgatcaaaacggatacttgtcttatgacattatttggcggag

SEQ ID NO: 36639 - DNA, 50 bp, unidentified
  source 1..50: mol_type = unassigned DNA; note = donor_9fb467d
  misc_feature 1..22: note = RE
  misc_feature 23..25: note = Core
  misc_feature 26..50: note = LE
cgcaaacgggaggcgttcatatagaatgatatgaacgcctcccacccgtg

SEQ ID NO: 36640 - DNA, 50 bp, unidentified
  source 1..50: mol_type = unassigned DNA; note = donor_9fd0f4e
  misc_feature 1..21: note = RE
  misc_feature 22..25: note = Core
  misc_feature 26..50: note = LE
ctgttgacttttcttagcaggtttggtacaatataagcgtagccctatac

SEQ ID NO: 36641 - DNA, 50 bp, unidentified
  source 1..50: mol_type = unassigned DNA; note = donor_9fd3e10
  misc_feature 1..23: note = RE
  misc_feature 24..25: note = Core
  misc_feature 26..50: note = LE
gctaacggagcgccgtccagacatgatgtcgtggacggcgctccacctga

SEQ ID NO: 36642 - DNA, 50 bp, unidentified
  source 1..50: mol_type = unassigned DNA; note = donor_9fdc819
  misc_feature 1..23: note = RE
  misc_feature 24..25: note = Core
  misc_feature 26..50: note = LE
ctacttgactttgaacacggttacttgtatgttcaaaccagaccagcgcg

SEQ ID NO: 36643 - DNA, 50 bp, unidentified
  source 1..50: mol_type = unassigned DNA; note = donor_9feebd8
  misc_feature 1..23: note = RE
  misc_feature 24..25: note = Core
  misc_feature 26..50: note = LE
ggcttgacaaacgacattaggaatccctacgttgttctgcgggacgtggt

SEQ ID NO: 36644 - DNA, 50 bp, unidentified
  source 1..50: mol_type = unassigned DNA; note = donor_9ff7f58
  misc_feature 1..23: note = RE
  misc_feature 24..25: note = Core
  misc_feature 26..50: note = LE
tgaccgcagcgctcatgggatgtctaatgagacttgccgggtcggttgcg

SEQ ID NO: 36645 - DNA, 50 bp, unidentified
  source 1..50: mol_type = unassigned DNA; note = donor_a0040df
  misc_feature 1..24: note = RE
  misc_feature 25: note = Core
  misc_feature 26..50: note = LE
gcaaaaatggaggtgaccatagattaatgagatggtcacctccaccctgt

SEQ ID NO: 36646 - DNA, 50 bp, unidentified
  source 1..50: mol_type = unassigned DNA; note = donor_a01d8ca
  misc_feature 1..23: note = RE
  misc_feature 24..25: note = Core
  misc_feature 26..50: note = LE
cgcaggcgggggccgtccacatatgatggggtggacggcccccgcttccg

SEQ ID NO: 36647 - DNA, 50 bp, unidentified
  source 1..50: mol_type = unassigned DNA; note = donor_a01deea
  misc_feature 1..23: note = RE
  misc_feature 24..25: note = Core
  misc_feature 26..50: note = LE
ccgcagccgccacataatggttgcttgtattagcgcgaatcgctatggtg

SEQ ID NO: 36648 - DNA, 50 bp, unidentified; identical to SEQ ID NO: 35942
  source 1..50: mol_type = unassigned DNA; note = donor_a01e8f3
  misc_feature 1..23: note = RE
  misc_feature 24..25: note = Core
  misc_feature 26..50: note = LE

SEQ ID NO: 36649 - DNA, 50 bp, unidentified
  source 1..50: mol_type = unassigned DNA; note = donor_a022488
  misc_feature 1..24: note = RE
  misc_feature 25: note = Core
  misc_feature 26..50: note = LE
ttggcataccggggcgtccatgtacaatggaatggacgccccaccttaaa

SEQ ID NO: 36650 - DNA, 50 bp, unidentified
  source 1..50: mol_type = unassigned DNA; note = donor_a022b17
  misc_feature 1..23: note = RE
  misc_feature 24..25: note = Core
  misc_feature 26..50: note = LE
tgaggtcctgaccaacacagttgcttatctgttcggaatctggcagttta

SEQ ID NO: 36651 - DNA, 50 bp, unidentified; identical to SEQ ID NO: 30717
  source 1..50: mol_type = unassigned DNA; note = donor_a02ec3d
  misc_feature 1..23: note = RE
  misc_feature 24..25: note = Core
  misc_feature 26..50: note = LE

SEQ ID NO: 36652 - DNA, 50 bp, unidentified
  source 1..50: mol_type = unassigned DNA; note = donor_a03654c
  misc_feature 1..23: note = RE
  misc_feature 24..25: note = Core
  misc_feature 26..50: note = LE
acccttgacttttgttagcaggtctattacaataaatattggttggaagt

SEQ ID NO: 36653 - DNA, 50 bp, unidentified; identical to SEQ ID NO: 32963
  source 1..50: mol_type = unassigned DNA; note = donor_a0392df
  misc_feature 1..23: note = RE
  misc_feature 24..25: note = Core
  misc_feature 26..50: note = LE

SEQ ID NO: 36654 - DNA, 50 bp, unidentified
  source 1..50: mol_type = unassigned DNA; note = donor_a0461b1
  misc_feature 1..24: note = RE
  misc_feature 25: note = Core
  misc_feature 26..50: note = LE
acagcttgacgaaaaccatagaggccgttaccttcttcgtagcccggctc

SEQ ID NO: 36655 - DNA, 50 bp, unidentified
  source 1..50: mol_type = unassigned DNA; note = donor_a04a096
  misc_feature 1..23: note = RE
  misc_feature 24..25: note = Core
  misc_feature 26..50: note = LE
gaagcccgggggccatccacacatgttggggtggatggccccctaccggc

SEQ ID NO: 36656 - DNA, 50 bp, unidentified
  source 1..50: mol_type = unassigned DNA; note = donor_a05c035
  misc_feature 1..23: note = RE
  misc_feature 24..25: note = Core
  misc_feature 26..50: note = LE
gcaaatacgggagcgtccatatatgatgtgatggacgctcccatttacgg

SEQ ID NO: 36657 - DNA, 50 bp, unidentified
  source 1..50: mol_type = unassigned DNA; note = donor_a081272
  misc_feature 1..22: note = RE
  misc_feature 23..25: note = Core
  misc_feature 26..50: note = LE
agaaaattaaactttattgagggagcattcctgtaatgaagaaatttgag

SEQ ID NO: 36658 - DNA, 50 bp, unidentified
  source 1..50: mol_type = unassigned DNA; note = donor_a0860ec
  misc_feature 1..23: note = RE
  misc_feature 24..25: note = Core
  misc_feature 26..50: note = LE
tcgcttgacaatcaagacagtcgcttgtatcttagaagaagtagtaaacc

SEQ ID NO: 36659 - DNA, 50 bp, unidentified
  source 1..50: mol_type = unassigned DNA; note = donor_a093431
  misc_feature 1..23: note = RE
  misc_feature 24..25: note = Core
  misc_feature 26..50: note = LE
gacaagttagggccgtgggatgtctaatgggactcgactggcagccgtag

SEQ ID NO: 36660 - DNA, 50 bp, unidentified
  source 1..50: mol_type = unassigned DNA; note = donor_a09b6f9
  misc_feature 1..22: note = RE
  misc_feature 23..25: note = Core
  misc_feature 26..50: note = LE
tggcttgacaaacattagctggtttcgtattatcaggtcagccagaattt

SEQ ID NO: 36661 - DNA, 50 bp, unidentified
  source 1..50: mol_type = unassigned DNA; note = donor_a09bcd0
  misc_feature 1..24: note = RE
  misc_feature 25: note = Core
  misc_feature 26..50: note = LE
ccgcctcttgacacagaggggtgcctacttatctactggtggcacgaccg

SEQ ID NO: 36662 - DNA, 50 bp, unidentified
  source 1..50: mol_type = unassigned DNA; note = donor_a0a3ff7
  misc_feature 1..21: note = RE
  misc_feature 22..25: note = Core
  misc_feature 26..50: note = LE
aagcggcttgacatagggcttctcactggactaccttcctgacgtcatcg

SEQ ID NO: 36663 - DNA, 50 bp, unidentified
  source 1..50: mol_type = unassigned DNA; note = donor_a0af2c6
  misc_feature 1..24: note = RE
  misc_feature 25: note = Core
  misc_feature 26..50: note = LE
ttgcaatacggggcggaccatatataatggaatggtccgccccacttccc

SEQ ID NO: 36664 - DNA, 50 bp, unidentified
  source 1..50: mol_type = unassigned DNA; note = donor_a0c3f81
  misc_feature 1..24: note = RE
  misc_feature 25: note = Core
  misc_feature 26..50: note = LE
gcgcttaatggggaagcccttgtagaatgaaagggacttccccgtcccga

SEQ ID NO: 36665 - DNA, 50 bp, unidentified
  source 1..50: mol_type = unassigned DNA; note = donor_a0c96c1
  misc_feature 1..23: note = RE
  misc_feature 24..25: note = Core
  misc_feature 26..50: note = LE
cttgcgcatggggcggttatacatgatgatgtaaccgccctccgacgacc

SEQ ID NO: 36666 - DNA, 50 bp, unidentified
  source 1..50: mol_type = unassigned DNA; note = donor_a0d8b69
  misc_feature 1..23: note = RE
  misc_feature 24..25: note = Core
  misc_feature 26..50: note = LE
aagcttgaccgtgaacagagtatcttgtatgttgccctcacaccagtcaa

SEQ ID NO: 36667 - DNA, 50 bp, unidentified
  source 1..50: mol_type = unassigned DNA; note = donor_a0e45c6
  misc_feature 1..23: note = RE
  misc_feature 24..25: note = Core
  misc_feature 26..50: note = LE
cgggattgacttctaatgttaatcttgtattatagagtagtagtaattag

SEQ ID NO: 36668 - DNA, 50 bp, unidentified
  source 1..50: mol_type = unassigned DNA; note = donor_a0e5ffd
  misc_feature 1..23: note = RE
  misc_feature 24..25: note = Core
  misc_feature 26..50: note = LE
ccccttgacatttatttgcaggtctactataatatatttgacgggtaaat

SEQ ID NO: 36669 - DNA, 50 bp, unidentified; identical to SEQ ID NO: 32910
  source 1..50: mol_type = unassigned DNA; note = donor_a0e7f8f
  misc_feature 1..23: note = RE
  misc_feature 24..25: note = Core
  misc_feature 26..50: note = LE

SEQ ID NO: 36670 - DNA, 50 bp, unidentified
  source 1..50: mol_type = unassigned DNA; note = donor_a0f6037
  misc_feature 1..21: note = RE
  misc_feature 22..25: note = Core
  misc_feature 26..50: note = LE
gacgaatcccatagggacaccccccgttacctttttcacgtcccgccgac

SEQ ID NO: 36671 - DNA, 50 bp, unidentified
  source 1..50: mol_type = unassigned DNA; note = donor_a0f8dba
  misc_feature 1..24: note = RE
  misc_feature 25: note = Core
  misc_feature 26..50: note = LE
ttgcaatgcgggacggaccatatataatgggatggtccgtcccgcttctc

SEQ ID NO: 36672 - DNA, 50 bp, unidentified
  source 1..50: mol_type = unassigned DNA; note = donor_a100f59
  misc_feature 1..20: note = RE
  misc_feature 21..25: note = Core
  misc_feature 26..50: note = LE
ttttatgtggttttccatgggaaacgcccatgcgcccaggcaggggctca

SEQ ID NO: 36673 - DNA, 50 bp, unidentified
  source 1..50: mol_type = unassigned DNA; note = donor_a104ba6
  misc_feature 1..23: note = RE
  misc_feature 24..25: note = Core
  misc_feature 26..50: note = LE
aacttgacaggtcgttccatatcagtcacaatggaacgaccggctccgat

SEQ ID NO: 36674 - DNA, 50 bp, unidentified
  source 1..50: mol_type = unassigned DNA; note = donor_a10b7cc
  misc_feature 1..23: note = RE
  misc_feature 24..25: note = Core
  misc_feature 26..50: note = LE
aggcctgttgacacacagaggcgctgacttgttgaatgccggccaggacg

SEQ ID NO: 36675 - DNA, 50 bp, unidentified
  source 1..50: mol_type = unassigned DNA; note = donor_a10d7f3
  misc_feature 1..23: note = RE
  misc_feature 24..25: note = Core
  misc_feature 26..50: note = LE
ttcttgacaaattcgtagttggtctggtaaaataacaacacgggtaattg

SEQ ID NO: 36676 - DNA, 50 bp, unidentified
  source 1..50: mol_type = unassigned DNA; note = donor_a115a78
  misc_feature 1..23: note = RE
  misc_feature 24..25: note = Core
  misc_feature 26..50: note = LE
cttgccacgggggcgtccacatatgatgatgtggacgcccccgctcacgg

SEQ ID NO: 36677 - DNA, 50 bp, unidentified
  source 1..50: mol_type = unassigned DNA; note = donor_a11ac69
  misc_feature 1..24: note = RE
  misc_feature 25: note = Core
  misc_feature 26..50: note = LE
tgcaatattgaggcggaccatacataatgagatggtccgcctcccctaat

SEQ ID NO: 36678 - DNA, 50 bp, unidentified
  source 1..50: mol_type = unassigned DNA; note = donor_a12526a
  misc_feature 1..24: note = RE
  misc_feature 25: note = Core
  misc_feature 26..50: note = LE
tggatatatggcaaacctagaatacctttgtattgataaagataatttta

SEQ ID NO: 36679 - DNA, 50 bp, unidentified
  source 1..50: mol_type = unassigned DNA; note = donor_a125899
  misc_feature 1..23: note = RE
  misc_feature 24..25: note = Core
  misc_feature 26..50: note = LE
tgacaacaaaaaacatggggtgtctaatgggagtcaccggggtggccgta

SEQ ID NO: 36680 - DNA, 50 bp, unidentified
  source 1..50: mol_type = unassigned DNA; note = donor_a12d997
  misc_feature 1..22: note = RE
  misc_feature 23..25: note = Core
  misc_feature 26..50: note = LE
aatattgacaaactattagctggttcgtattataaggtcagccagataag

SEQ ID NO: 36681 - DNA, 50 bp, unidentified
  source 1..50: mol_type = unassigned DNA; note = donor_a13575d
  misc_feature 1..23: note = RE
  misc_feature 24..25: note = Core
  misc_feature 26..50: note = LE
gcagggaggaggccgtccacatatgttggggtggacggcctccgtacggc

SEQ ID NO: 36682 - DNA, 50 bp, unidentified
  source 1..50: mol_type = unassigned DNA; note = donor_a13bf5e
  misc_feature 1..22: note = RE
  misc_feature 23..25: note = Core
  misc_feature 26..50: note = LE
cccttgactttcaagacggttgcttgtatattgatttcggtcgttcacaa

SEQ ID NO: 36683 - DNA, 50 bp, unidentified
  source 1..50: mol_type = unassigned DNA; note = donor_a14a052
  misc_feature 1..23: note = RE
  misc_feature 24..25: note = Core
  misc_feature 26..50: note = LE
tgcaggcgggggccgtccacatatgatggggtggacggcccttgctccca

SEQ ID NO: 36684 - DNA, 50 bp, unidentified
  source 1..50: mol_type = unassigned DNA; note = donor_a14e198
  misc_feature 1..24: note = RE
  misc_feature 25: note = Core
  misc_feature 26..50: note = LE
accacttgaccaaagacatagaggcgttatgttcttcgtggtcctgcaag

SEQ ID NO: 36685 - DNA, 50 bp, unidentified
  source 1..50: mol_type = unassigned DNA; note = donor_a14e2e0
  misc_feature 1..24: note = RE
  misc_feature 25: note = Core
  misc_feature 26..50: note = LE
ttgcaatgagggggagtccatatacaatgggatggactccccctcacctc

SEQ ID NO: 36686 - DNA, 50 bp, unidentified; identical to SEQ ID NO: 33973
  source 1..50: mol_type = unassigned DNA; note = donor_a14f94b
  misc_feature 1..23: note = RE
  misc_feature 24..25: note = Core
  misc_feature 26..50: note = LE

SEQ ID NO: 36687 - DNA, 50 bp, unidentified
  source 1..50: mol_type = unassigned DNA; note = donor_a17deb7
  misc_feature 1..23: note = RE
  misc_feature 24..25: note = Core
  misc_feature 26..50: note = LE
tgaccctcgagctcctgggatgtctaatgggggctggcgagtcggccgtc

SEQ ID NO: 36688 - DNA, 50 bp, unidentified
  source 1..50: mol_type = unassigned DNA; note = donor_a18389c
  misc_feature 1..23: note = RE
  misc_feature 24..25: note = Core
  misc_feature 26..50: note = LE
taattgacagcctttttcataggtgatatcatgaaaaaggctgcagagct

SEQ ID NO: 36689 - DNA, 50 bp, unidentified
  source 1..50: mol_type = unassigned DNA; note = donor_a185b52
  misc_feature 1..22: note = RE
  misc_feature 23..25: note = Core
  misc_feature 26..50: note = LE
gatattgacaacctattagctggttcgtattatatagttcagccagaact

SEQ ID NO: 36690 - DNA, 50 bp, unidentified
  source 1..50: mol_type = unassigned DNA; note = donor_a188283
  misc_feature 1..23: note = RE
  misc_feature 24..25: note = Core
  misc_feature 26..50: note = LE
gcactaataggggcatccatacatgatggcgtggatgcccctcccgacgg

SEQ ID NO: 36691 - DNA, 50 bp, unidentified
  source 1..50: mol_type = unassigned DNA; note = donor_a18cc87
  misc_feature 1..22: note = RE
  misc_feature 23..25: note = Core
  misc_feature 26..50: note = LE
atcggacttgacaatagagggtcttatacattaaactagtgctagggcct

SEQ ID NO: 36692 - DNA, 50 bp, unidentified
  source 1..50: mol_type = unassigned DNA; note = donor_a18ea9e
  misc_feature 1..23: note = RE
  misc_feature 24..25: note = Core
  misc_feature 26..50: note = LE
tatattgacttcatatagttagtcttgtataatgaacatatagtgaaaat

SEQ ID NO: 36693 - DNA, 50 bp, unidentified
  source 1..50: mol_type = unassigned DNA; note = donor_a19a6bd
  misc_feature 1..22: note = RE
  misc_feature 23..25: note = Core
  misc_feature 26..50: note = LE
catcgaagggggcgtccacacatgatggggtggacgccccccgacggcat

SEQ ID NO: 36694 - DNA, 50 bp, unidentified
  source 1..50: mol_type = unassigned DNA; note = donor_a19e10f
  misc_feature 1..21: note = RE
  misc_feature 22..25: note = Core
  misc_feature 26..50: note = LE
cacttgacaacatcatagagattccctaccctgtagcgagcccaggcgta

SEQ ID NO: 36695 - DNA, 50 bp, unidentified
  source 1..50: mol_type = unassigned DNA; note = donor_a19fa01
  misc_feature 1..23: note = RE
  misc_feature 24..25: note = Core
  misc_feature 26..50: note = LE
tgacatccaagcgcctgggatgtctaatgggaggcgtcgggtcagccggg

SEQ ID NO: 36696 - DNA, 50 bp, unidentified
  source 1..50: mol_type = unassigned DNA; note = donor_a1a88e4
  misc_feature 1..23: note = RE
  misc_feature 24..25: note = Core
  misc_feature 26..50: note = LE
atcacccccgaatctaatggttgcttgtattagcgcgaagcattacactg

SEQ ID NO: 36697 - DNA, 50 bp, unidentified
  source 1..50: mol_type = unassigned DNA; note = donor_a1ab989
  misc_feature 1..24: note = RE
  misc_feature 25: note = Core
  misc_feature 26..50: note = LE
tgccaaacgggaggcgtccatataatgggatggacgcctcccttctcacc

SEQ ID NO: 36698 - DNA, 50 bp, unidentified
  source 1..50: mol_type = unassigned DNA; note = donor_a1b100f
  misc_feature 1..23: note = RE
  misc_feature 24..25: note = Core
  misc_feature 26..50: note = LE
cggcttgacaacgacattaggaagctctaccttctgagttgggttgatcg

SEQ ID NO: 36699 - DNA, 50 bp, unidentified
  source 1..50: mol_type = unassigned DNA; note = donor_a1bb22d
  misc_feature 1..23: note = RE
  misc_feature 24..25: note = Core
  misc_feature 26..50: note = LE
gcaatcgggcgttctaatggttgcttgtattagcgcgctgggttagactg

SEQ ID NO: 36700 - DNA, 50 bp, unidentified
  source 1..50: mol_type = unassigned DNA; note = donor_a1bba7c
  misc_feature 1..23: note = RE
  misc_feature 24..25: note = Core
  misc_feature 26..50: note = LE
gcatgaaacggggcatccacacatgatggagtggatgcccctcccgccga

SEQ ID NO: 36701 - DNA, 50 bp, unidentified
  source 1..50: mol_type = unassigned DNA; note = donor_a1c01cb
  misc_feature 1..24: note = RE
  misc_feature 25: note = Core
  misc_feature 26..50: note = LE
attattgacagctattagctggtatcgtattataaggttaaccagtcatt

SEQ ID NO: 36702 - DNA, 50 bp, unidentified
  source 1..50: mol_type = unassigned DNA; note = donor_a1c56c7
  misc_feature 1..23: note = RE
  misc_feature 24..25: note = Core
  misc_feature 26..50: note = LE
atgcttgacgtgcaagagagaatcttgtatgtttcgagatgaggcgtgag

SEQ ID NO: 36703 - DNA, 50 bp, unidentified
  source 1..50: mol_type = unassigned DNA; note = donor_a1c93cf
  misc_feature 1..23: note = RE
  misc_feature 24..25: note = Core
  misc_feature 26..50: note = LE
gcaaaacggctggcatccacacaagatgggatggatgccagccttttccg

SEQ ID NO: 36704 - DNA, 50 bp, unidentified
  source 1..50: mol_type = unassigned DNA; note = donor_a1ce1fc
  misc_feature 1..23: note = RE
  misc_feature 24..25: note = Core
  misc_feature 26..50: note = LE
aagcttgactttttatttgcaggctactacaatatatttatggttaatat
